(19) United States
(12) Patent Application Publication
(10) Pub. No.: US 2025/0101403 A1
(43) Pub. Date: Mar. 27, 2025

(54) INTEGRASES

(71) Applicant: Seamless Therapeutics GmbH, Dresden (DE)

(72) Inventors: Aksana SCHNEIDER, Dresden (DE); Felix Johannes LANSING, Nurnberg (DE)

(21) Appl. No.: 18/822,341

(22) Filed: Sep. 2, 2024

(30) Foreign Application Priority Data
Sep. 1, 2023 (EP) 23194978.5
Feb. 7, 2024 (EP) 24156399.8

(51) Int. Cl. C12N 9/00; A61K 38/00; C12N 15/90; C40B 30/08

(52) U.S. Cl. CPC C12N 9/93; C12N 15/902; C40B 30/08; A61K 38/00; C12Y 605/01

(57) ABSTRACT

The present invention pertains to a method for generating a target-specific large serine recombinase (LSR), the method comprising the steps of: a) generating a plurality of first variants of an LSR by introducing one or more mutations into a sequence encoding the LSR; b) generating a library of expression vectors, wherein each expression vector comprises a first region encoding one of the first variants of an LSR, and a second region comprising at least two first target sites of the LSR, wherein the two first target sites are different from each other; c) introducing the library of expression vectors into host cells; d) culturing the host cells and expressing the first variant LSR; e) isolating plasmid DNA from the culture of host cells; f) determining whether a portion of the second region of the expression vector between the two first target sites has been excised by the variant LSR; g) generating a plurality of second LSR variants by introducing one or more mutations into the sequence encoding those first LSR variants that excised the portion of the second region of the expression vector between the two first target sites; and h) repeating steps b) to f) optionally with at least one second target site, wherein the at least one second target site differs from the first target sites in at least one nucleotide. The present invention further provides variant LSRs obtained by the method, a nucleic acid or group of nucleic acids encoding a variant LSR, a vector comprising said nucleic acid(s); a system for integrating a donor DNA into a target nucleic acid; and uses of the LSRs, the nucleic acid(s) or the vector.

### RELATED APPLICATIONS

[0001] This application claims priority to European Patent Application Nos. 24156399.8, filed Feb. 7, 2024, and 23194978.5, filed Sep. 1, 2023, the entire disclosures of which are hereby incorporated herein by reference.

### SEQUENCE LISTING

[0002] The instant application contains a Sequence Listing which has been submitted electronically in XML format and is hereby incorporated by reference in its entirety. Said XML file, created on Aug. 28, 2024, is named 757657_TUD9-004_ST26.xml and is 17,587,618 bytes in size.

[0003] The present invention relates to a method for generating target-specific large serine recombinases, also called integrases. The present invention further pertains to large serine recombinase variants obtained by said method and systems comprising the same, nucleic acids encoding the same, vectors expressing the nucleic acids, as well as uses of said large seine recombinases for integrating a donor nucleic acid sequence into a target nucleic acid sequence, preferably into the genome of a subject or cell.

### BACKGROUND OF THE INVENTION

[0004] Genome integration, the process of introducing foreign DNA into the genome of an organism, is a fundamental technique in molecular biology and genetic engineering. In the realms of medicine and biotechnology, the ability to precisely manipulate genomes is of paramount importance for advancements in therapeutics, disease research, and biopharmaceutical production.

[0005] One crucial aspect of genome editing is the site-specific integration of genetic payloads into desired genomic loci. Integrating sizable genetic payloads at precise genomic locations offers numerous advantages, such as targeted gene therapy, precise gene regulation, and the creation of genetically modified organisms for various research and industrial purposes. Targeted integration allows the user to insert the transgene into a locus that favors stable, long-term expression. It helps to avoid strong positional effects and reduce unwanted effects on cell functions, as well as to control the copy numbers at each integration event. However, achieving target site-specific integration of large DNA fragments remains a significant challenge in current genome editing methodologies, currently requiring inefficient, multi-step processes that are time and resource intensive (Anzalone et al. 2022; Yarnall et al. 2023; Zhu et al. 2014).

[0006] Large serine recombinases (LSR), also known as integrases, have emerged as highly valuable tools for facilitating precise and efficient genome integration. They are a family of enzymes encoded in temperate phage genomes or on mobile elements, which precisely cut and recombine DNA in a highly controllable and predictable way. In phage integration, LSRs act at specific sites, i.e. at the attP site in the phage and the attB site in the host chromosome, where cleavage and strand exchange lead to the integrated prophage flanked by the recombinant sites attL and attR. To perform integration, LSRs do not require any additional factors, auxiliary DNA sequences, or specific substrate topologies (Smith, 2015). The first LSRs to be studied in in vitro recombination systems were the integrases from the Streptomyces phage PhiC31 (Thorpe and Smith, 1998) and Mycobacteriophage Bxb1 (Kim et al., 2003).

[0007] Integrases typically consist of a relatively conserved catalytic N-terminal domain (1-140 aa) required for DNA cleavage and for rejoining, a “recombinase” domain, and a zinc ribbon domain. The catalytic and “recombinase” domains are linked by the long aE helix and the “recombinase” domain and the zinc ribbon domain are connected by a short linker. The “recombinase” domain and the zinc ribbon domain are collectively termed the C-terminal domain and range in size from 319 to about 550 amino acids. The zinc ribbon domain contains a long flexible coiled-coil motif implicated in additional binding specificity and irreversibility of forward integration reaction without excision cofactors (reviewed in Van Duyne and Rutherford, 2013; Smith, 2015).

[0008] The attachment sites used by LSRs comprise the binding sites for their cognate integrase; no host or accessory factors bind to the attachment sites. The attP and attB sites show a relatively simple structure, typically having less than 50 bp, with the crossover site centrally located and flanked by imperfect inverted repeats. Sites forming after recombination are called attL and attR, and contain half sites from attP and attB. Recombination by LSRs is strongly directional. Only attB and attP sites will undergo recombination; the resulting attL and attR sites are inactive in the absence of a phage-encoded factor required for excision, and no other pairing of sites (e.g., attB and attB) will lead to recombinant products (Ghosh et al., 2005; Rutherford et al., 2013; Thorpe et al., 2000; Smith, 2015).

[0009] The following mechanism of recombination has been proposed for the LSR family: Integrases bind to their target attachment sites as dimers and then form a tetramer, bringing the DNA sites together in a synaptic complex. Within this complex, all four subunits are simultaneously activated, and the catalytic serine residues break all four DNA strands simultaneously. Each cleaved end remains covalently bound to an integrase monomer as two integrase subunits rotate 180° relative to the other two subunits in a process known as subunit rotation. If the central dinucleotides of attP and attB sites are the same, the integrases ligate the newly aligned DNA strands together, thus completing the process. If the central dinucleotides are mismatched, they do not undergo ligation, and the integrases continue to rotate until the original attP and attB sites are restored (Bai et al., 2011; Rutherford et al., 2013; Smith, 2015).

[0010] Numerous studies have demonstrated the efficacy of large serine recombinases as genome engineering tools (Groth et al., 2004; Keravala et al., 2006; Low et al., 2022; Olivares et al., 2001; Russel et al., 2006; Thomason et al., 2001; Yamaguchi et al., 2011; Xu et al., 2008). They have been widely employed for targeted gene insertions in a variety of organisms, including bacteria, yeast, plants, and mammalian cells. These enzymes possess the remarkable capability to integrate large genetic payloads, ranging from several kilobases to several megabases, with high efficiency and accuracy.

[0011] However, a significant hurdle lies in the fact that integrases typically rely on predetermined target sites, which are not naturally present in the human genome or other genomes of interest. This limitation restricts their application for site-specific integration in complex biological systems.

[0012] In light of this challenge, researchers have resorted to a strategy that involves integrating an integrase wild-type target site into the genome and subsequently utilizing it as a landing platform for further genomic manipulations (Anzalone et al. 2022; Yarnall et al. 2023). This approach allows the subsequent integration of desired genetic payloads with increased specificity at the artificially created target sites. However, this method relies on complex machinery with multiple enzymes, which makes the whole construct difficult to introduce into cells with current delivery methods. Moreover, all different enzymes involved can contribute to additional off-target events.

[0013] Alternative approaches involve searching available metagenome datasets for enzymes with the required target site recognition (Durrant et al., 2023), or finding more flexible enzymes that can act on pseudo-sites. Pseudo-sites are target sites in the human genome that share some similarity to the natural target site of the enzyme and can thus be used for integration (Thyagarajan et al., 2001). However, search for integrases in the metagenome databases also requires detailed characterization of the new enzymes for each target site, which can be very resource- and time-consuming, provided that a suitable integrase is found at all. At the same time, repurposing the enzymes to recognize additional pseudo-sites leads to an increased risk for high off-target activity, limiting possible therapeutic applications.

[0014] To enable the direct and site-specific integration at user-defined target sequences, it is necessary to modify the large serine recombinases and change their target site specificity. However, little is known about the 3D structure and domains involved in DNA recognition, which poses a challenge for rational design. Modification of LSRs is further hampered by the complexity of their natural target sites, which are usually non-symmetrical and non-repetitive. Because the specificity defining rules are so obscure, there is a need in the art to develop a new unbiased and open method to enable the change of target site preferences of LSRs or to further improve activity and/or efficiency of LSRs. There is further a need for novel variants of large serine recombinases allowing the introduction of desired DNA sequences at specific sites into the genome of a subject.

### SUMMARY OF THE INVENTION

[0015] The objective underlying the present invention is solved by the provision of a method for generating a target-specific large serine recombinase (LSR), the method comprising the steps of:
[0016] a) generating a plurality of first variants of an LSR by introducing one or more mutations into a sequence encoding the LSR;
[0017] b) generating a library of expression vectors, wherein each expression vector comprises a first region comprising the sequence encoding one of the first variants of the LSR, and a second region comprising at least two first target sites of the LSR, wherein the two first target sites are different from each other;
[0018] c) introducing the library of expression vectors into host cells;
[0019] d) culturing the host cells and expressing the first variants of the LSR;
[0020] e) isolating plasmid DNA from the culture of host cells;
[0021] f) determining whether a portion of the second region on the expression vector between the two first target sites has been excised by the first variant LSR;
[0022] g) generating a plurality of second LSR variants by introducing one or more mutations into the sequence encoding those first LSR variants that excised the portion of the second region on the expression vector between the at least two first target sites;
[0023] h) repeating steps b) to f) optionally with at least one second target site, wherein the at least one second target site differs from the first target sites in at least one nucleotide.

[0024] According to one embodiment, the method further comprises the step of repeating steps g) and h), preferably wherein steps g) and h) are repeated at least twice to at least 30 times.

[0025] According to another embodiment, the LSR in step a) as basis for the plurality of first variant LSRs is a naturally occurring LSR.

[0026] According to one embodiment, the two target sites in the second region of the expression vector are spaced apart by at least 50 nucleotides.

[0027] According to one embodiment, the determining step f) comprises (i) sequencing of the first and the second region of the expression vector, or (ii) performing restriction digestion on the sequence of the expression vector comprising the two target sites followed by analysis of the digestion fragments.

[0028] According to a preferred embodiment, the method further comprises the step of removing inactive variants of the variant LSR from the library of expression vectors.

[0029] According to a preferred embodiment, the one or more mutations in the sequence encoding the LSR are introduced by random mutagenesis using error-prone PCR.

[0030] According to a further embodiment, the first region on the vector further comprises a unique molecular identifier.

[0031] According to one embodiment, the method further comprises one or more of the steps of:
[0032] (i) clustering the unique molecular identifiers,
[0033] (ii) generating and polishing consensus sequences,
[0034] (iii) determining the number of DNA modification events for each variant LSR enzyme;
[0035] (iv) determining an activity rate for each LSR variant; and/or
[0036] (v) selecting a target-specific LSR from the variant LSRs generated in step a) or steps g) to h) of claim 1 that excises the DNA sequence on the second region on the expression vector between two variant target sites of interest.

[0037] According to one preferred embodiment, the expression vector is a pEVO vector.

[0038] According to a further aspect, the present invention provides a variant large serine recombinase (LSR) obtainable or obtained by the method of the present invention, wherein the amino acid sequence of the variant LSR differs in at least one amino acid from the amino acid sequence of the LSR from which the variant is generated in step a), and from the amino acid sequence of any other naturally occurring large serine recombinase. According to a preferred embodiment, the variant comprises or consists of an amino acid sequence having at least 85% identity to one of SEQ ID NOs: 14, 17 to 35, 38 to 56, 60 to 8391, 8395, 8398 to 8403, 8406 to 8412, 8415 to 8422, 8425 to 8429 and, 8430 to 13115.

[0039] According to one embodiment, the variant LSR is a variant of an LSR selected from the group consisting of A118, TP901, φRV1 (also termed PhiRv1), Bxb1, φC31, R4, Wβ, Tnpx, Cp36, Dn29, Kp03, Nm60, Pa01, Si74.

[0040] According to a yet a further aspect, the present invention provides a nucleic acid or group of nucleic acids encoding a variant LSR according to the invention.

[0041] According to a yet a further aspect, the present invention provides an expression vector comprising a nucleic acid or group of nucleic acids of the present invention.

[0042] According to a yet a further aspect, the present invention provides a system for integrating a donor DNA into a target nucleic acid, the system comprising a polypeptide comprising a variant LSR according to the present invention or a nucleic acid encoding the same, and a donor nucleic acid to be inserted into the target nucleic acid.

[0043] According to a yet a further aspect, the present invention provides a pharmaceutical composition comprising the variant LSR of the invention, the nucleic acid or group of nucleic acids of the invention, or the expression vector of the invention, and optionally a pharmaceutically acceptable carrier.

[0044] According to a yet a further aspect, the present invention provides the use of the variant LSR of the invention, the nucleic acid or group of nucleic acids of the invention, the expression vector of the invention, the system of the invention, or of the pharmaceutical composition of the invention for integrating a nucleic acid sequence of interest into the genome of a subject or cell, wherein the cell preferably does not include cells of the human germ line.

[0045] According to a yet a further aspect, the present invention provides the variant LSR of the invention, the nucleic acid or group of nucleic acids of the invention, the expression vector of the invention, or the pharmaceutical composition of the invention for use in medicine.

[0046] According to a yet a further aspect, the present invention provides the variant LSR for use of the invention, the nucleic acid or group of nucleic acids for use of the invention, the expression vector for use of the invention, or the pharmaceutical composition for use of the invention, for use in the treatment of a genetic disease or disorder. The genetic disease or disorder is preferably a monogenetic disease or disorder. Further aspects and embodiments of the invention will become apparent from the appending claims and the following detailed description.

### DESCRIPTION OF THE DRAWINGS

[0047] The invention is further illustrated by the following figures and examples without being limited thereto.

[0048] FIG. 1 illustrates an integration reaction in nature. The bold circle represents the phage genome, with the phage attachment site attP. The line represents the bacterial genome, with the bacterial attachment site attB. In the presence of integrase, the integration reaction proceeds, resulting in the phage genome integrated into the bacterial chromosome, flanked by two hybrid att sites termed attL and attR.

[0049] FIG. 2A illustrates the domain organization of large serine recombinases.

[0050] FIG. 2B illustrates the structure of the LSR in the free unbound state.

[0051] FIG. 2C illustrates the mechanism of site-specific recombination.

[0052] FIGS. 3A-3C illustrate the evolution process of different integrases. FIG. 3A shows the process for TP901 integrase, FIG. 3B shows the process for PhiRv1 integrase, and FIG. 3C shows the process for A118 integrase.

[0053] FIGS. 4A-4B show the analysis of single clones from the evolved libraries of TP901 integrase.

[0054] FIG. 4A is the library evolved towards pRT798 target sites, and FIG. 4B is the library evolved towards target sites pRT799. Upper panel: agarose gel pictures showing the results of recombination test for single clones with 1 μg/ml arabinose induction. Pictograms at the right of the gel scheme indicate to which fragment each band corresponds to. Numbers at the bottom show recombination efficiency. Two triangles represent non-recombined fragments, and one triangle represents recombined fragments. M=molecular weight marker. Lower panel: sequence alignment of each clone with the wild-type enzyme (top line). Dot represents no change, * is a stop codon, # is an insertion. Positions of each mismatch are indicated in the bottom line.

[0055] FIGS. 5A-5B show the analysis of single clones from the evolved libraries of PhiRv1 integrase. FIG. 5A is the library evolved towards pRT824 target sites, and FIG. 5B is the library evolved towards target sites pRT825. Upper panel: agarose gel pictures showing the results of recombination test for single clones with 0, 1 and 10 μg/ml arabinose induction. Pictograms at the right of the gel scheme indicate to which fragment each band corresponds to. Two triangles represent non-recombined fragments, and one triangle represents recombined fragments. Lower panel: sequence alignment of each clone with the wild-type enzyme (top line). Dot represents no change, * is a stop codon. Positions of each mismatch are indicated in the bottom line.

[0056] FIGS. 6A-6C show the analysis of single clones from the evolved libraries of A118 integrase. FIG. 6A is the library evolved towards pRT783 target sites, FIG. 6B is the library evolved towards target sites pRT784, and FIG. 6C is the library evolved towards target sites pRT787. Upper panel: agarose gel pictures showing the results of recombination test for single clones with 0, 1 and 10 μg/ml arabinose induction. Pictograms at the right of the gel scheme indicate to which fragment each band corresponds to. Two triangles represent non-recombined fragments, and one triangle represents recombined fragments. Lower panel: sequence alignment of each clone with the wild-type enzyme (top line). Dot represents no change, * is a stop codon. Positions of each mismatch are indicated in the bottom line.

[0057] FIG. 7 shows the plasmid map of the pEVO4gg vector.

[0058] FIGS. 8A-8D illustrate the evolution process of Bxb1 integrase towards different target sites. FIG. 8A shows the process for the SH1 target site, FIG. 8B shows the process for the SH2 target site, FIG. 8C shows the process for the SH3 target site, and FIG. 8D shows the process for the SH4 target site.

[0059] FIGS. 9A-9B show the analysis of single clones from the libraries evolved towards SH2 target site. FIG. 9A: agarose gel pictures showing the results of recombination test for single clones with 0, 1 and 10 μg/ml arabinose induction. Numbers at the bottom show recombination efficiency. Pictograms at the right of the gel scheme indicate to which fragment each band corresponds to. Two triangles represent non-recombined fragments, and one triangle represents recombined fragments. M=molecular weight marker. FIG. 9B: sequence alignment of each clone with the wild-type enzyme (top line). Only positions with differences to the wild-type reference are shown. Dot represents no change, * is a stop codon. Positions of each mismatch are indicated in the bottom line.

[0060] FIGS. 10A-10B show the analysis of single clones from the libraries evolved towards the SH4 target site. FIG. 10A: agarose gel pictures showing the results of recombination test for single clones with 0, 1 and 10 μg/ml arabinose induction. Numbers at the bottom show recombination efficiency. Pictograms at the right of the gel scheme indicate to which fragment each band corresponds to. Two triangles represent non-recombined fragments, and one triangle represents recombined fragments. M=molecular weight marker. FIG. 10B: sequence alignment of each clone with the wild-type enzyme (top line). Only positions with differences to the wild-type reference are shown. Dot represents no change, * is a stop codon. Positions of each mismatch are indicated in the bottom line.

[0061] FIGS. 11A-11B show the analysis of single clones from the libraries evolved towards the SH3 target site. FIG. 11A: agarose gel pictures showing the results of recombination test for single clones with 0, 1 and 10 μg/ml arabinose induction. Numbers at the bottom show recombination efficiency. Pictograms at the right of the gel scheme indicate to which fragment each band corresponds to. Two triangles represent non-recombined fragments, and one triangle represents recombined fragments. M=molecular weight marker. FIG. 11B: sequence alignment of each clone with the wild-type enzyme (top line). Only positions with differences to the wild-type reference are shown. Dot represents no change, * is a stop codon. Positions of each mismatch are indicated in the bottom line.

[0062] FIGS. 12A-12B show the analysis of single clones from the libraries evolved towards the SH1 target site. FIG. 12A: agarose gel pictures showing the results of recombination test for single clones with 0, 1 and 10 μg/ml arabinose induction. Numbers at the bottom show recombination efficiency. Pictograms at the right of the gel scheme indicate to which fragment each band corresponds to. Two triangles represent non-recombined fragments, and one triangle represents recombined fragments. M=molecular weight marker. FIG. 12B: sequence alignments of each clone with the wild-type enzyme (top line). Only positions with differences to the wild-type reference are shown. Dot represents no change, * is a stop codon. Positions of each mismatch are indicated in the bottom line.

[0063] FIG. 13 sequence alignment of the clones from the Nanopore screen chosen for the evaluation in mammalian cell culture. The wild-type Bxb1 enzyme (top line) was used as reference. Only positions with differences to the wild-type reference are shown. Dot represents no change, * is a stop codon. Positions of each mismatch are indicated in the bottom line.

[0064] FIG. 14 shows the generalised plasmid map of the pCAGGS-attB-mCherry-attP-EGFP reporter vector.

[0065] FIG. 15 shows the generalised plasmid map of the EF1a-tagBFP-P2A-Int expression vector with integrase.

[0066] FIG. 16 shows a scheme of the plasmid-based assay used to quantify recombination efficiency of evolved integrase variants in mammalian cells. pCAGGS-attB-mCherry-attP-EGFP reporter plasmid encodes a red fluorescent protein mCherry flanked by tested target sites, followed by terminator sequences to stop transcription, and the EGFP gene, which is not expressed from the original plasmid. Upon recombination of the target sites, the mCherry cassette with the terminator sequence is excised, which leads to expression of a downstream EGFP gene.

[0067] FIG. 17 shows recombination efficiencies of single clones measured by using a reporter assay. The figure shows quantification of recombination efficiencies 48 h after transfection of the cells with indicated recombinases, analysed by flow cytometry (n=2, biological replicates are shown as dots). Error bars represent standard deviation of the mean (SD).

[0068] FIG. 18 shows recombination efficiencies of single clones nominated from Nanopore screens and measured with a reporter assay. Top panel shows recombination on SH4 target sites, lower panel shows recombination on SH3 target sites. N=2, biological replicates are shown as dots, error bars represent standard deviation of the mean (SD).

[0069] FIG. 19 shows gel analysis of PCR product evidencing the successful integration of a donor nucleic acid sequence into the SH2 locus using an evolved LSR.

### LIST OF SEQUENCES

[0070] The sequences referred to herein are disclosed in detail in the accompanying sequence listing. Exemplary and at the same time preferred sequences of the present invention are also listed in Tables 2 to 5 in the following detailed part of the description.

### DETAILED DESCRIPTION OF THE INVENTION

[0071] Before the present invention is described in detail below, it is to be understood that this invention is not limited to the particular methodology, protocols and reagents described herein as these may vary. It is also to be understood that the terminology used herein is for the purpose of describing particular embodiments only, and it is not intended to limit the scope of the present invention which will be limited only by the appended claims. Unless defined otherwise, all technical and scientific terms used herein have the same meanings as commonly understood by one of ordinary skill in the art.

[0072] Preferably, the terms used herein are defined as described in “A multilingual glossary of biotechnological terms: (IUPAC Recommendations)”, Leuenberger, H. G. W, Nagel, B. and Klbl, H. eds. (1995), Helvetica Chimica Acta, CH-4010 Basel, Switzerland).

[0073] Throughout this specification and the claims which follow, unless the context requires otherwise, the word “comprise”, and variations such as “comprises” and “comprising”, will be understood to imply the inclusion of a stated integer or step or group of integers or steps but not the exclusion of any other integer or step or group of integers or steps. In the following passages, different aspects of the invention are defined in more detail. Each aspect so defined may be combined with any other aspect or aspects unless clearly indicated to the contrary. Any feature indicated as being optional, preferred or advantageous may be combined with any other feature or features indicated as being optional, preferred or advantageous.

[0074] Several documents are cited throughout the text of this specification. Each of the documents cited herein (including all patents, patent applications, scientific publications, manufacturer's specifications, instructions etc.), whether supra or infra, is hereby incorporated by reference in its entirety. Nothing herein is to be construed as an admission that the invention is not entitled to antedate such disclosure by virtue of prior invention. Some of the documents cited herein are characterized as being “incorporated by reference”. In the event of a conflict between the definitions or teachings of such incorporated references and definitions or teachings recited in the present specification, the text of the present specification takes precedence.

[0075] In the following, the elements of the present invention will be described. These elements are listed with specific embodiments; however, it should be understood that they may be combined in any manner and in any number to create additional embodiments. The variously described examples and preferred embodiments should not be construed to limit the present invention to only the explicitly described embodiments. This description should be understood to support and encompass embodiments which combine the explicitly described embodiments with any number of the disclosed and/or preferred elements. Furthermore, any permutations and combinations of all described elements in this application should be considered disclosed by the description of the present application unless the context indicates otherwise.

### Definitions

[0076] In the following, some definitions of terms frequently used in this specification are provided. These terms will, in each instance of its use, in the remainder of the specification have the respectively defined meaning and preferred meanings.

[0077] As used in this specification and the appended claims, the singular forms “a”, “an”, and “the” include plural referents, unless the content clearly dictates otherwise.

[0078] The “percentage of sequence identity” is determined by comparing two optimally aligned sequences over a comparison window, wherein the portion of the sequence in the comparison window can comprise additions or deletions (i.e. gaps) as compared to the reference sequence (which does not comprise additions or deletions) for optimal alignment of the two sequences. The percentage is calculated by determining the number of positions at which the identical nucleic acid base or amino acid residue occurs in both sequences to yield the number of matched positions, dividing the number of matched positions by the total number of positions in the window of comparison and multiplying the result by 100 to yield the percentage of sequence identity.

[0079] The term “identical” is used herein in the context of two or more nucleic acids or polypeptide sequences, to refer to two or more sequences or subsequences that are the same, i.e. that comprise the same sequence of nucleotides or amino acids. Sequences are “identical” to each other if they have a specified percentage of nucleotides or amino acid residues that are the same. According to the present invention, at least 60% identical includes at least at least 61%, at least at least 62%, at least at least 63%, at least at least 64%, at least at least 65%, at least at least 66%, at least at least 67%, at least at least 68%, at least at least 69%, at least 70%, at least 71%, at least 72%, at least 73%, at least 74%, at least 75%, at least 76%, at least 77%, at least 78%, at least 79%, at least 80, at least 81%, at least 82%, at least 83%, at least 84%, at least 85%, at least 86%, at least 87%, at least 88%, at least 89%, at least 90%, at least 91%, at least 92%, at least 93%, at least 94%, at least 95%, at least 96%, at least 97%, at least 98%, at least 99%, at least 99.2%, at least 99.5%, or at least 99.7% identity over the specified sequence, when compared and aligned for maximum correspondence over a comparison window, or designated region as measured using one of the following sequence comparison algorithms or by manual alignment and visual inspection. These definitions also refer to the complement of a test sequence. Accordingly, the term “at least XY % sequence identity” is used throughout the specification with regard to polypeptide and polynucleotide sequence comparisons. This expression preferably refers to a sequence identity of at least 60%, at least 65%, at least 70%, at least 75%, at least 80%, at least 81%, at least 82%, at least 83%, at least 84%, at least 85%, at least 86%, at least 87%, at least 88%, at least 89%, at least 90%, at least 91%, at least 92%, at least 93%, at least 94%, at least 95%, at least 96%, at least 97%, at least 98%, at least 99%, at least 99.2%, at least 99.5%, or at least 99.7% to the respective reference polypeptide or to the respective reference polynucleotide.

[0080] In the context of the present invention, a protein comprising an amino acid sequence having at least 80% identity to a given SEQ ID NO preferably means that said protein has an amino acid sequence having at least 85%, at least 90%, at least 92%, at least 94%, at least 96%, at least 98%, at least 99%, at least 99.2%, at least 99.5%, or at least 99.7% sequence identity to the given SEQ ID NO.

[0081] Likewise, in the context of the present invention, a nucleic acid sequence having at least 60% sequence identity to a given SEQ ID NO or a nucleic acid sequence reverse complementary thereto preferably means that said nucleic acid has a sequence having at least 65%, at least 70%, at least 75%, at least 80%, at least 85%, at least 90%, at least 92%, at least 94%, at least 96%, at least 98%, at least 99%, at least 99.2%, at least 99.5%, or at least 99.7% sequence identity to the given SEQ ID NO or a nucleic acid sequence reverse complementary to said SEQ ID NO.

[0082] The term “sequence comparison” is used herein to refer to the process wherein one sequence acts as a reference sequence, to which test sequences are compared. When using a sequence comparison algorithm, test and reference sequences are entered into a computer, if necessary, subsequence coordinates are designated, and sequence algorithm program parameters are designated. Default program parameters are commonly used, or alternative parameters can be designated. The sequence comparison algorithm then calculates the percent sequence identities for the test sequences relative to the reference sequence, based on the program parameters. In case where two sequences are compared and the reference sequence is not specified in comparison to which the sequence identity percentage is to be calculated, the sequence identity is to be calculated with reference to the longer of the two sequences to be compared, if not specifically indicated otherwise. If the reference sequence is indicated, the sequence identity is determined on the basis of the full length of the reference sequence indicated by one of the SEQ ID NOs of the present invention, if not specifically indicated otherwise.

[0083] Methods of alignment of sequences for comparison are well known in the art. Optimal alignment of sequences for comparison can be conducted, for example, by the local homology algorithm of Smith and Waterman (Adv. Appl. Math. 2:482, 1970), by the homology alignment algorithm of Needleman and Wunsch 1970, by the search for similarity method of Pearson and Lipman 1988, by computerized implementations of these algorithms (e.g., GAP, BESTFIT, FASTA, and TFASTA in the Wisconsin Genetics Software Package, Genetics Computer Group, 575 Science Dr., Madison, Wis.), or by manual alignment and visual inspection (see, e.g., Ausubel et al., Current Protocols in Molecular Biology (1995 supplement)). Algorithms suitable for determining percent sequence identity and sequence similarity are the BLAST and BLAST 2.0 algorithms, which are described in Altschul et al. (Nuc. Acids Res. 25:3389-402, 1977), and Altschul et al. (J. Mol. Biol. 215:403-10, 1990), respectively. Software for performing BLAST analyses is publicly available through the National Center for Biotechnology Information (http://www.ncbi.nlm.nih.gov/). This algorithm involves first identifying high scoring sequence pairs (HSPs) by identifying short words of length W in the query sequence, which either match or satisfy some positive-valued threshold score T when aligned with a word of the same length in a database sequence. T is referred to as the neighborhood word score threshold (Altschul et al., supra). These initial neighborhood word hits act as seeds for initiating searches to find longer HSPs containing them. The word hits are extended in both directions along each sequence for as far as the cumulative alignment score can be increased. Cumulative scores are calculated using, for nucleotide sequences, the parameters M (reward score for a pair of matching residues; always >0) and N (penalty score for mismatching residues; always <0). For amino acid sequences, a scoring matrix is used to calculate the cumulative score. Extension of the word hits in each direction are halted when: the cumulative alignment score falls off by the quantity X from its maximum achieved value; the cumulative score goes to zero or below, due to the accumulation of one or more negative-scoring residue alignments; or the end of either sequence is reached. The BLAST algorithm parameters W, T, and X determine the sensitivity and speed of the alignment. The BLASTN program (for nucleotide sequences) uses as defaults a wordlength (W) of 11, an expectation (E) of 10, M=5, N=−4 and a comparison of both strands. For amino acid sequences, the BLASTP program uses as defaults a wordlength of 3, and expectation (E) of 10, and the BLOSUM62 scoring matrix (see Henikoff and Henikoff, 1989) alignments (B) of 50, expectation (E) of 10, M=5, N=−4, and a comparison of both strands. The BLAST algorithm also performs a statistical analysis of the similarity between two sequences (see, e.g., Karlin and Altschul, Proc. Natl. Acad. Sci. USA 90:5873-87, 1993). One measure of similarity provided by the BLAST algorithm is the smallest sum probability (P(N)), which provides an indication of the probability by which a match between two nucleotide or amino acid sequences would occur by chance. For example, a nucleic acid is considered similar to a reference sequence if the smallest sum probability in a comparison of the test nucleic acid to the reference nucleic acid is less than about 0.2, typically less than about 0.01, and more typically less than about 0.001.

[0084] The term “nucleic acid” and “nucleic acid molecule” are used synonymously herein and are understood as well-accepted in the art, i.e. as single or double-stranded oligo- or polymers of deoxyribonucleotide or ribonucleotide bases or both. The term “nucleic acids” as used herein includes not only deoxyribonucleic acids (DNA) and ribonucleic acids (RNA), but also all other linear polymers in which the bases adenine (A), cytosine (C), guanine (G) and thymine (T) or uracil (U) are arranged in a corresponding sequence (nucleic acid sequence). The invention also comprises the corresponding RNA sequences (in which thymine is replaced by uracil), complementary sequences and sequences with modified nucleic acid backbone or 3′ or 5′-terminus. Nucleic acids in the form of DNA are however preferred.

[0085] The term “large serine recombinase”, abbreviated as LSR, and the term “integrase” (including the term “integrase protein”) are used herein interchangeably and refer to an enzyme that is capable of manipulating the structure of a genome by integrating a nucleic acid into the genome of a subject or a cell. More specifically, the term refers to respective enzymes capable of catalyzing an integration reaction. LSRs are known in the art and described e.g. in Van Duyne et al., 2013, incorporated herein by reference. An integrase is preferably present in form of a monomer, a dimer or a tetramer, in particular in form of a dimer. Two integrase dimers usually work together to catalyze an integrase reaction. Dimers and tetramers can comprise two or four identical integrase protein monomers (homodimer or homotetramer), respectively, or alternatively two or more different monomers (heterodimer or heterotetramer).

[0086] The term “engineered DNA recombining enzyme” as used herein refers to any naturally occurring DNA recombining enzyme, preferably to an integrase protein, that has been further modified, e.g. evolved as described herein, in particular to modify its target-site specificity and/or its activity and/or efficiency.

[0087] The term “target site” (sometimes also referred to as “attachment site” or “att”) as used herein refers to a specific nucleotide sequence which an LSR recognizes, and at which DNA breakage and strand exchange occur. Naming of the sites is historically linked to their location: the attP site is found in the phage genome, and the attB site is present in the bacterial genome (Smith, 2015). These sequences typically range between 30 and 200 base pairs in length with the crossover site mostly centrally located and flanked by imperfect inverted repeats.

[0088] The term “target sequence” or “target nucleic acid” as used herein refers to a nucleic acid sequence comprising one or more target sites, such as the attB site, and on which an LSR dimer is formed for catalyzing an excision or integration reaction. For an integration reaction to occur, a donor sequence is integrated into the target sequence.

[0089] The term “donor sequence” or “donor nucleic acid” as used herein refers to a nucleic acid sequence to be integrated into the genome of a cell or a subject, and in particular into a target sequence thereof. The donor sequence comprises one or more target sites, such as the attP site, on which an LSR dimer is formed.

[0090] For a recombination event to occur, integrases bind to their target (attachment) sites on the target nucleic acid and on the donor nucleic acid as dimers, and then together form a tetramer, bringing the DNA sites together in a synaptic complex, which is illustrated in FIG. 2C. Sites forming after recombination are called attL (positioned left or upstream from the integration) and attR (positioned right or downstream from the integration), and contain half sites from attP and attB.

[0091] The term “therapeutically effective amount” as used herein, means that amount of active compound or pharmaceutical agent that elicits the biological or medicinal response in a tissue system, animal or human being sought by a researcher, veterinarian, medical doctor or other clinician, which includes alleviation of the symptoms of the disease or disorder being treated.

[0092] The term “pharmaceutical composition” as used herein refers to a substance and/or a combination of substances being used for the identification, prevention or treatment of a disease or tissue status. The pharmaceutical composition is formulated to be suitable for administration to a patient in order to prevent and/or treat a disease. Further, a pharmaceutical composition refers to the combination of an active agent with a carrier, inert or active, making the composition suitable for therapeutic use. Such a carrier is also referred to as being pharmaceutically acceptable. Pharmaceutical compositions can be formulated for oral, parenteral, topical, inhalative, rectal, sublingual, transdermal, subcutaneous or vaginal application routes according to their chemical and physical properties. Pharmaceutical compositions comprise solid, semisolid, liquid, transdermal therapeutic systems (TTS). Solid compositions are selected from the group consisting of tablets, coated tablets, powder, granulate, pellets, capsules, effervescent tablets or transdermal therapeutic systems. Also comprised are liquid compositions, selected from the group consisting of solutions, syrups, infusions, extracts, solutions for intravenous application, solutions for infusion or solutions of the carrier systems of the present invention. Semisolid compositions that can be used in the context of the invention comprise emulsion, suspension, creams, lotions, gels, globules, buccal tablets and suppositories.

[0093] As used herein, the term “pharmaceutically acceptable” embraces both human and veterinary use: For example, the term “pharmaceutically acceptable” embraces a veterinarily acceptable compound or a compound acceptable in human medicine and health care.

[0094] The term “subject” as used herein, refers to an animal, preferably a mammal, most preferably a human.

[0095] The term “plurality” as used herein includes any number of events described by an integer above one. The term “more than one” can be substituted for the term “plurality”.

[0096] The terms “LSR variant(s)” and “variant(s) of an/the LSR” are used interchangeably herein and denote an LSR differing from an LSR non-variant in at least one amino acid, for example an amino acid substitution, deletion or addition.

### Description of Embodiments

[0097] The present invention is in the field of large serine recombinases (LSRs). LSRs, also referred to as integrases, are known in the art and are described e.g. in Van Duyne et al., 2013, incorporated herein by reference. In contrast to tyrosine recombinases, large serine recombinases catalyze a unidirectional integration reaction. FIG. 1 schematically illustrates such an integration reaction. The bold circle represents the phage genome, with the phage attachment site attP. The line represents the bacterial genome, with the bacterial attachment site attB. In the presence of the integrase enzyme, the integration reaction proceeds, resulting in the phage genome becoming integrated into the bacterial chromosome, flanked by two hybrid att sites termed attL and attR.

[0098] The typical domain organization of large serine recombinases is illustrated in FIG. 2A. The catalytic domain (CD) is located at the N-terminal part of the protein, having a size of around 140 amino acids. In FIG. 2A, aE denotes the long alpha helix that connects the CD to the recombinase domain (RD) and the zinc ribbon domain (ZD). RD and ZD combined have a size of between approximately 300 and 500 amino acids. The structure of the LSR in its free unbound state is presented in FIG. 2B, showing the LSR as a compact and globular dimer, held together by interactions between catalytic domains. The typical mechanism of the integration reaction for LSRs is illustrated in FIG. 2C. The reaction starts when attachment site attP on the target sequence and attachment site attB on the donor sequence are each bound by an integrase dimer, followed by synapsis through intermolecular binding between both integrase dimers. DNA sequences are cleaved in the middle by the recombinase domain and rotated by 180°. The resulting sticky ends, which are complementary, are ligated. After rotation, the LSR dimers dissociate from the two newly generated attachment sites, attL and attR.

[0099] The present invention provides the first reliable and targeted method for either improving the activity and/or efficiency of large serine recombinases on their target sequences, or for changing the specificity of a large serine recombinase to essentially any desired target and donor sequences.

[0100] The present invention provides a method for generating a target-specific large serine recombinase (LSR), the method comprising the steps of:
[0101] a) generating a plurality of first variants of an LSR by introducing one or more mutations into a sequence encoding the LSR;
[0102] b) generating a library of expression vectors, wherein each expression vector comprises a first region comprising the sequence encoding one of the first variants of the LSR, and a second region comprising at least two first target sites of the LSR, wherein the two first target sites are different from each other;
[0103] c) introducing the library of expression vectors into host cells;
[0104] d) culturing the host cells and expressing the first variant LSR;
[0105] e) isolating plasmid DNA from the culture of host cells;
[0106] f) determining whether a portion of the second region on the expression vector between the two first target sites has been excised by the first variant LSR;
[0107] g) generating a plurality of second LSR variants by introducing one or more mutations into the sequence encoding those first LSR variants that excised the portion of the second region on the expression vector between the at least two first target sites;
[0108] h) repeating steps b) to f) optionally with at least one second target site, wherein the at least one second target site differs from the first target sites in at least one nucleotide.

[0109] According to one embodiment, the method further comprises the step of repeating steps g) and h), preferably wherein steps g) and h) are repeated at least twice to at least 30 times. That is, steps g) and h) are preferably repeated twice, three times, four times, five times, six times, seven times, eight times, nine times, ten times, eleven times, twelve times, 13×, 14×, 15×, 16×, 17×, 18×, 19×, 20×, 21×, 22×, 23×, 24×, 25×, 26×, 27×, 28×, 29×, 30× or more, wherein × denotes times.

[0110] In accordance with the present invention, a variant—be it the first, second, third or any subsequent variant—of an LSR differs from said known, initial or starting LSR in at least one amino acid. That is, the one or more mutations introduced into the sequence encoding the LSR leads to at least one or more amino acid substitution, deletion or addition, respectively, preferably to at least one or more amino acid substitution. Thus, according to a particularly preferred embodiment, the amino acid mutation is an amino acid substitution. Preferably, the variant differs from the known, initial or starting LSR in at least two, three, four, five, six, seven, eight, nine, ten, or more amino acids, preferably in at least 15, 20, 25, 30, 35, 40, 45, 50, 55, 60, 65, 70, 75, 80, 85, 90, 95, 100, 150, 200, 250, 300, 350, or 400 amino acids. For evolving LSRs, the first variant to be generated in accordance with a preferred embodiment of the present invention differs from a known LSR in at least one, two, three, four, five, six, seven, eight, nine, or ten or more amino acids, preferably in at least 15, 20, 25, 30, 35, 40, 45, 50, 55, 60, 65, 70, 75, 80, 85, 90, 95, or 100 amino acids. When repeating the step of generating LSR variants in step g) of the method, the new variant (also termed second variant) preferably differs from the initially generated or first LSR variant in at least one, two, three, four, five, six, seven, eight, nine, ten, or more amino acids, preferably in at least 15, 20, 25, 30, 35, 40, 45, 50, 55, 60, 65, 70, 75, 80, 85, 90, 95, or 100 amino acids. The same applies to each following LSR variant, which preferably differs from the previous LSR variant in at least one, two, three, four, five, six, seven, eight, nine, ten, or more amino acids, preferably in at least 15, 20, 25, 30, 35, 40, 45, 50, 55, 60, 65, 70, 75, 80, 85, 90, 95, or 100 amino acids. It is to be understood that the term “first LSR variant” denotes the starting LSR variant, and the term “second LSR variant” denotes the next and any further LSR variant generated. The term “second” is therefore not limited to only one subsequent LSR variant, but includes any following variant generated in accordance with each repeating of the method steps (step g)) of the present method, such as a third, fourth, fifth etc. variant. The method is thus not limited to just one cycle or repetition, but may include any number of cycles or repetitions necessary for generating the desired LSR variant. This may include at least two, three, four, five, six, seven, eight, nine, ten, eleven, twelve, 13, 14, 15, 16, 17, 18, 19, 20, 21, 22, 23, 24, 25, 26, 27, 28, 29, or at least 30 cycles or repetitions of the present method, preferably in accordance with step g) and optionally step h).

[0111] The difference in the amino acids may be a substitution, deletion or addition. A particularly preferred difference in amino acids in accordance with the variant LSRs described herein is an amino acid substitution. Hence, a variant LSR preferably differs from a known LSR or a previous variant LSR in that it contains at least one, two, three, four, five, six, seven, eight, nine, ten, or more amino acids, preferably in at least 15, 20, 25, 30, 35, 40, 45, 50, 55, 60, 65, 70, 75, 80, 85, 90, 95, or 100 amino acid modifications, preferably substitutions.

[0112] Variants of an LSR can be generated using any conventional method known in the art. According to a preferred embodiment, the variants are generated by amplifying the respective LSR gene with error-prone PCR to create a library of variants. According to a particularly preferred embodiment of the present invention, a low-fidelity DNA polymerase is used for error-prone PCR.

[0113] According to one particularly preferred embodiment, the LSR variants are based on a naturally occurring LSR. According to one such embodiment, the naturally occurring LSR is selected from the group consisting of but not limited to A118, TP901, φRV1, Bxb1, φC31, R4, Wβ, Tnpx, Cp36, Dn29, Kp03, Nm60, Pa01, and Si74. Thus, and in accordance with the present invention, for generating LSR variants based on a naturally occurring LSR, the nucleic acid sequence encoding said naturally occurring LSR, for example the coding sequence of A118, is subject to the method of the invention by introducing one or more mutations into the coding sequence thereof, e.g. by error-prone PCR as described herein. For generating LSR variants based on a non-naturally occurring LSR, the nucleic acid sequence encoding said non-naturally occurring LSR is subject to the method of the invention by introducing one or more mutations into the coding sequence thereof, e.g. by error-prone PCR as described herein. Thus, according to an alternative particularly preferred embodiment, the LSR variants are based on a non-naturally occurring LSR, such as a naturally-occurring LSR that has already been modified, or such as an artificially created LSR.

[0114] The mutated sequences encoding the variant LSRs, such as the PCR products of the error-prone PCR reaction, are introduced (e.g. cloned) into a suitable expression vector. This can be done by conventional methods such as digesting the coding nucleic acid using suitable restriction enzymes and ligating the coding nucleic acid into the expression vector. The expression vector to be used for the library of expression vectors can be any expression vector considered useful by the person of ordinary skill in the art. A preferred expression vector to be used in the context of the present invention is the pEVO expression vector described in Buchholz and Stewart 2001 or a modified version thereof described herein as pEVO4gg, shown in FIG. 7.

[0115] The expression vector comprises at least two regions. In the first region, the expression vector comprises the nucleic acid sequence encoding the LSR variant. According to a preferred embodiment, the first region further comprises a unique molecular identifier (UMI) for associating an identification means to each variant LSR. The term “unique molecular identifier” or “UMI” as used herein denotes a type of molecular barcoding. Molecular barcodes are short sequences to uniquely tag a molecule in a sample library. UMIs are known to the skilled person and are described in detail in Zurek et al., 2020, or Karst et al., 2021, both of which are herein incorporated by reference in their entirety. According to a preferred embodiment of the present invention, a UMI is an oligonucleotide comprising at least 5, at least 6, at least 7, at least 8, at least 9, at least 10, at least 20, at least 30, at least 40, at least 50, at least 60, at least 70, at least 80, at least 90 or at least 100 random nucleotides. According to a particularly preferred embodiment, a UMI is an oligonucleotide comprising at least 50 random nucleotides. A UMI may preferably form part of a UMI-tag, which may further comprise one or more sequences down-stream and/or upstream of the random nucleotides of the UMI (e.g. flanking the random nucleotides), which sequences may serve as one or more primer binding sites. A UMI-tag may further comprise one or more and preferably at least two restriction sites preferably down-stream and/or upstream of the random nucleotides of the UMI. According to a preferred embodiment, a UMI-tag comprises a first primer binding site, a first restriction site, the random nucleotides of the UMI, a second restriction site, and a second primer binding site.

[0116] In addition to the sequence encoding the variant LSR in the first region of the expression vector, the expression vector further comprises a second region comprising at least two first target sites. The second region on the expression vector is separated from the first region in that both regions do not overlap.

[0117] Naturally occurring LSR target sites differ from each other. Thus, according to one embodiment of the present invention, the target sites differ from each other, preferably in at least one, two, three, four, five, six, seven, eight, nine, ten, eleven, twelve, 13, 14, 15, 16, 17, 18, 19, 20, 21, 22, 23, 24, 25, 26, 27, 28, 29 or at least 30 nucleotides. Such a difference may also include the length of the target sites, if both are compared to each other. Depending on the intended direction of evolution of the LSRs, each of the second target sites may differ from the respective first target site in at least one, two, three, four, five, six, seven, eight, nine, ten, eleven, twelve, 13, 14, 15, 16, 17, 18, 19, 20, 21, 22, 23, 24, 25, 26, 27, 28, 29 or at least 30 nucleotides. According to a further embodiment, only one of the second target sites differs from the respective first target site in at least one, two, three, four, five, six, seven, eight, nine, ten, eleven, twelve, 13, 14, 15, 16, 17, 18, 19, 20, 21, 22, 23, 24, 25, 26, 27, 28, 29 or at least 30 nucleotides, and the other one of the second target sites does not differ from the respective first target site.

[0118] The first target sites are preferably the target sites of the respective LSR to be mutated in step a) of the method of the present invention. For example, in cases of a naturally occurring LSR to be the starting point of the method of the present invention and thus the template for the mutations in step a), the at least two target sites can be those of the naturally occurring LSR. In such a case, the variant LSR is evolved to have an increased specificity to the first target sites and/or increased activity (also referred to as increased efficiency) on the first target sites compared to the respective naturally occurring LSR. Such an increase in specificity and/or activity is preferably at least 10%, 20%, 30%, 40%, 50%, 60%, 70%, 80%, 90%, 100%, 150%, 200%, 250%, or at least 300% compared to the starting/initial LSR. The same applies to the generation of subsequent variant LSRs, which are based on a previous variant LSR.

[0119] A table showing naturally occurring LSRs (also referred to as wildtype LSRs) used for the generation of LSR variants, and their respective natural target sites is presented below in Table 1.

TABLE 1
Wildtype LSRs and their target sites.

| | Amino acid | First target | Second target |
|---|---|---|---|
| LSR | sequence | site (P) | site (B) |
| TP901-1 | SEQ ID NO: 5 | SEQ ID NO: 6 | SEQ ID NO: 7 |
| PhiRv1 | SEQ ID NO: 8 | SEQ ID NO: 9 | SEQ ID NO: 10 |
| A118 | SEQ ID NO: 11 | SEQ ID NO: 12 | SEQ ID NO: 13 |
| Bxb1 | SEQ ID | SEQ ID | SEQ ID |
| | NO: 8392 | NO: 8393 | NO: 8394 |

[0120] According to one preferred embodiment of the present invention, for generating LSRs that are active on a desired target site (also termed a target site of interest), one or both of the at least two first target sites are variants of the respective target sites of the LSR, from which the variants are generated in step a) of the method of the present invention. According to one embodiment, one or both of the at least two first target sites differ from the respective target sites of the LSR in at least one, two, three, four, five, six, seven, eight, nine, ten, eleven, twelve, 13, 14, 15, 16, 17, 18, 19, 20, 21, 22, 23, 24, 25, 26, 27, 28, 29 or at least 30 nucleotides. Alternatively, any nucleic acid sequence of interest could be used as target site in the method of the invention. The present invention thus allows generating LSRs which are active on desired target sites, preferably on target sites present in the genome of an organism such as a mammal and more preferably of a human. Particularly preferred target sites are those in the genome of a subject, preferably a human, which are located in safe harbor sites (SHS). SHS and methods for their identification are known in the respective field and are described e.g. in Aznauryan et al., 2022. For applications that do not require precise targeting of an existing gene or locus (e.g. to introduce or modify an endogenous gene, allele, or regulatory element), a common strategy is to target transgene integration to one of a small number of chromosomal SHS for expression, presumably without disrupting the expression of adjacent or more distant genes. Known SHS include but are not limited to the AAVS1 site on chromosome 19q and those described in Pellenz et al., 2019, incorporated herein by reference. Other preferred target sites are selected such that an endogenous gene, allele, or regulatory element can be modified by inserting a respective donor nucleic acid.

[0121] According to a preferred embodiment of the present invention, the at least two target sites in the second region on the expression vector are spaced apart from each other by at least about 50, 55, 60, 65, 70, 75, 80, 85, 90, 95, 100, 110, 120, 130, 140, 150, 160, 170, 180, 190, or at least about 200 nucleotides. According to a particularly preferred embodiment, the at least two target sites in the second region on the expression vector are spaced apart from each other by at least about 50 nucleotides, more preferably by at least about 100 nucleotides.

[0122] The library of expression vectors containing the nucleotide sequences encoding the variant LSRs and the target sites are subsequently introduced into suitable (host) cells. The method according to the invention can be performed using eukaryotic and prokaryotic (host) cells. Preferred prokaryotic cells are bacterial cells. Particularly preferred prokaryotic cells are cells of Escherichia coli. Preferred eukaryotic cells are yeast cells (preferably Saccharomyces cerevisiae), insect cells, non-insect invertebrate cells, amphibian cells, or mammalian cells (preferably somatic or pluripotent stem cells, including embryonic stem cells and other pluripotent stem cells, like induced pluripotent stem cells, and other native cells or established cell lines, including NIH3T3, CHO, HeLa, HEK293, hiPS). According to a particularly preferred embodiment, the (host) cells are XL-1 Blue E. coli cells, and the ligated plasmids are introduced via electroporation of the cells. The skilled person is well aware about alternative suitable methods for introducing a ligated plasmid into a host cell for subsequent expression of the encoded protein. According to one embodiment, the cell is not a human germ cell.

[0123] The host cells carrying the library of expression vectors are cultured to allow the expression of the encoded LSR variants. The culturing conditions are not particularly limited and will be selected by the skilled person based on the host cells used. For example, in case of using XL-1 Blue E. coli cells, it is preferred to culture the transformed bacteria in LB medium at 37° C. Conditions for introducing expression of the encoded LSR variants also depend on the host cells and plasmid vectors used. In the case of using pEVO expression vectors and XL-1 Blue E. coli cells, expression can be induced by adding e.g. arabinose to the culture medium.

[0124] Although LSRs are known to integrate a donor DNA into a genome, the expressed LSR variants—if active on the respective target sites—actively excise the portion (i.e. the nucleotide sequence) between the at least two target sites on the expression vector without integrating any DNA.

[0125] After cultivation and induction of expression, plasmid DNA of these cultures is isolated using any suitable method known to the person or ordinary skill in the art. The isolated plasmid DNA can then be analysed for activity of the LSR variant on the target sites. For example, at least the respective portion of the plasmid DNA encoding the at least two target sites and any nucleotides in between the at least two target sites can be sequenced. Thus, according to one embodiment, the step of determining whether the portion of the second region of the expression vector between the at least two target sites has been excised by the variant LSR involves sequencing of at least the second region of the expression vector. The sequencing may also include the first region of the expression vector encoding the variant LSR. Alternatively, the plasmid DNA may be digested using one or more restriction enzymes. Thus, according to one embodiment, the step of determining whether the portion of the second region on the expression vector between the at least two target sites has been excised by the variant LSR involves performing restriction digestion on the sequence of the expression vector comprising the two target sites, followed by analysis of the digestion fragments. The restriction enzyme(s) is preferably selected so as to excise the portion of the plasmid encoding the variant LSR, leading to a larger fragment including the sequence in between the at least two target sites in case of no excision by the LSR (that is the LSR is inactive on the target sites), and to a smaller fragment in case of an excision reaction between the at least two target sites (that is the LSR is active on the target sites). When determining whether the variant LSR is active on the target sites, those variants that turned out not to be able to excise the portion between the at least two target sites will be removed from the library. Thus, according to one embodiment of the present invention, the method further comprises the step of removing inactive LSR variants from the library of expression vectors. In such cases, the removed variants will not be included in method steps g) and h). An exemplary method of removing inactive LSR variants is analogous to the restriction digestion method for determining whether the LSR variant is active on the respective target sites. The restriction enzyme(s) digest the plasmid between the target sites encoded in the second region of the vector. In the absence of an excision reaction, the restriction enzyme will cut the vector in between the two target sites and the vector will be linearized. If the LSR is active, the respective portion between the two target sites will be excised and no restriction digestion that could linearize the plasmid will occur. PCR primers are selected so as to allow amplification of the first region comprising the sequence encoding the variant LSR and the second region comprising the at least two first target sites, wherein the PCR primers point at each other. If an excision reaction took place, any restriction site is removed and the vector stays intact, preserving correct orientation the PCR primers and thus amplification of a product including the first and the second regions on the plasmid. This PCR product can then be used for the next evolution cycle in that it serves as basis for introducing further mutations e.g. by error-prone PCR as described for step a) to generate second LSR variants.

[0126] According to the present invention, step a) is repeated with those first active LSR variants by introducing one or more mutations into the sequence encoding these first LSR variants to generate second LSR variants. This step can be performed analogous to step a) with the variant LSRs of the first round as basis for the mutations instead of the naturally occurring LSRs.

[0127] Likewise, method steps b) to f) are repeated. For generating LSR variants with improved efficiency/activity on the target sites, the target sites may be used unchanged, i.e. with the same nucleotide sequences as in the previous round or cycle. If the LSR variants shall be evolved in the direction of variant target sites differing from the first target sites used, at least one target site used in step b) may optionally be modified. Such variant second target site(s) may differ from the previously used first target sites in at least one, two, three, four, five, six, seven, eight, nine, ten, eleven, twelve, 13, 14, 15, 16, 17, 18, 19, 20, 21, 22, 23, 24, 25, 26, 27, 28, 29 or at least 30 nucleotides.

[0128] The method steps disclosed herein may be repeated until a variant LSR is generated with an improved efficiency/activity on naturally occurring target sites or having activity on desired target sites (i.e. having a changed specificity). The method for determining the activity and or specificity of LSRs is not particularly limited. According to one particularly preferred embodiment, activity is determined by performing restriction digestion on the sequence of the expression vector comprising the two target sites, followed by analysis of the digestion fragments. A larger fragment is obtained in case of no excision reaction by the LSR, and a smaller fragment is obtained in case of an excision reaction by the LSR between the at least two target sites. Comparing the amount of the smaller fragment with the amount of the larger fragment allows the calculation of a percentage value, which reflects the activity of the LSR on the respective target sites. In more detail, the sequence encoding an LSR or LSR variant is preferably introduced into an expression vector comprising the respective target sites and/or variant target sites. The expression vectors are then introduced into suitable cells such as bacteria cells, which are cultured under conditions allowing the expression of the encoded protein (e.g. by adding e.g. arabinose to the culture medium). Plasmid DNA may then be isolated and digested using one or more restriction enzymes. The restriction enzyme(s) is preferably selected so as to excise the portion of the plasmid encoding the target sites and optionally the variant LSR, leading to a larger fragment including the sequence in between the at least two target sites in case of no excision reaction by the LSR, and to a smaller fragment in case of an excision between the at least two target sites. The size difference can be visualized for example in gel electrophoresis. The visualizations can then be analysed for the relative amount of large and small fragments, allowing the calculation of a percentage value for recombined and non-recombined (excised and non-excised) plasmids. Band intensity values can for example be divided by the combined values of the recombined and non-recombined bands to determine the fraction of recombined DNA, which can be converted to a percentage value by multiplying with 100.

[0129] An alternative method for determining whether or not an LSR is active on the target sites in the expression vector is by analysing the nucleic acid sequence of the vector in the isolated plasmids. This can be done by PCR amplification of the region comprising the target sites and optionally the region encoding the LSR variant, and/or by sequencing the region comprising the target sites and optionally the region encoding the LSR variant. In cases of an excision reaction by an active LSR, the sequence will be shorter, lacking the excised sequence between the two target sites.

[0130] According to a preferred embodiment, an active LSR exhibits at least about 10% activity, preferably at least about 15%, about 20%, about 25%, about 30%, about 35%, about 40%, about 45%, or at least about 50% activity on the respective target sites. According to a preferred embodiment, LSRs that show less than about 1%, less than about 2%, less than about 3%, less than about 4%, or less than about 5% activity, are considered as being inactive on the respective target sites.

[0131] Further methods for determining the activity of an enzyme are well known in the art. One such further and preferred method for determining activity of an LSR comprises digesting recombined and non-recombined plasmids from the culture of host cells with restriction enzymes that excise the LSR gene. Due to differences in plasmid sizes between the two versions, the resulting DNA fragments containing the plasmid backbone also show a difference in size. The size difference can be visualized for example in agarose gel electrophoresis. The visualizations can then be analysed for the relative amount of large and small fragments, allowing the calculation of a percentage value for recombined and non-recombined plasmids. Band intensity values can for example be divided by the combined values of the recombined and non-recombined bands to determine the fraction of recombined DNA, which can be converted to a percentage value by multiplying with 100.

[0132] According to a further embodiment, the method of the present invention further comprises the step of clustering the unique molecular identifiers, if any are present in the first region of the expression vector. According to a further embodiment, the method of the present invention further comprises the step of generating and polishing consensus sequences. Clustering and polishing of respective sequencing results are described in Zurek at el., 2020, and Karst et al., 2021, both of which are incorporated herein by reference in their entirety. For clustering, the sequence at least in the first region of the expression vector encoding the variant LSR and preferably the UMI are sequenced by methods known in the art. The collected UMI sequences are then clustered based on sequence identity, while maintaining their association to their read identification (read IDs), i.e. the UMI. This can be done by any conventional method known in the art, such as by using VSEARCH (Rognes et al., 2016). Based on these clusters and their associated read IDs, the sequence reads can then be separated into different files, where each file contains reads that corresponds to one UMI-cluster. From each of these clusters of separated reads, the part of the sequence that contains the gene for the LSR variant is aligned to a reference gene that contains a high similarity to the screened variants. Typically, such a gene is determined through sequencing of the screened LSR variant library or by selecting the LSR variant gene that was modified to produce the screened variant library. With the aid of this alignment, a software for consensus sequence generation and sequence polishing can be used to determine the most likely gene sequence of the LSR variant associated to this cluster based on all sequence reads. Polishing in this respect refers to additional rounds of processing of the reads, leading to improved sequence accuracy.

[0133] According to a further embodiment, the method of the present invention further comprises the step of determining the number of DNA modification events for or in each variant LSR. This step identifies which amino acids in the variant LSR have been modified compared to the naturally occurring starting LSR or to the previous LSR from which the variant LSR is derived.

[0134] According to a further embodiment, the method of the present invention further comprises the step of determining an activity rate for each LSR variant generated by the method of the present invention. In particular, the activity rate can be determined for those LSR variants that have been found to excise the DNA sequence on the second region on the expression vector between the at least two target sites of particular interest.

[0135] According to a further embodiment, the method of the present invention further comprises the step of selecting a target-specific LSR from the variant LSRs generated in step a) or steps g) to i) that excises the DNA sequence on the second region on the expression vector between two variant target sites of interest.

[0136] The present invention is also directed to variant LSRs (also termed LSR variants) obtained by the method of the present invention. These variant LSRs preferably differ in at least one amino acid, in at least two, three, four, five, six, seven, eight, nine, ten, or more amino acids, preferably in at least 15, 20, 25, 30, 35, 40, 45, 50, 55, 60, 65, 70, 75, 80, 85, 90, 95, 100, 150, 200, 250, 300, 350, or in at least 400 amino acids from any naturally occurring LSR, in particular from the LSRs A118, TP901, φRV1, φC31, R4, Wβ, Tnpx, Cp36, Dn29, Kp03, Nm60, Pa01, and Si74. The variant LSRs further preferably differ in at least one, in at least two, three, four, five, six, seven, eight, nine, ten, or more amino acids, preferably in at least 15, 20, 25, 30, 35, 40, 45, 50, 55, 60, 65, 70, 75, 80, 85, 90, 95, 100, 150, 200, 250, 300, 350, or in at least 400 amino acids from the LSR from which the first variant is generated in step a) of the method of the present invention. According to a particular preferred embodiment, the variant LSR differs from any LSR known to date (such as those described in Durrant et al., 2022) in at least one, in at least two, three, four, five, six, seven, eight, nine, ten, or more amino acids, preferably in at least 15, 20, 25, 30, 35, 40, 45, 50, 55, 60, 65, 70, 75, 80, 85, 90, 95, 100, 150, 200, 250, 300, 350, or in at least 400 amino acids. The difference between the LSR variant obtained by the method of the present invention and a naturally occurring LSR, in particular A118, TP901, φRV1, Bxb1, φC31, R4, Wβ, Tnpx, Cp36, Dn29, Kp03, Nm60, Pa01, and Si74, can also be expressed in terms of percentage identity. Accordingly, according to one embodiment, the LSR variant obtained by the method of the present invention has a sequence identity of not more than 80%, 81%, 82%, 83%, 84%, 85%, 86%, 87%, 88%, 89%, 90%, 91%, 92%, 93%, 94%, 95%, 96%, 97%, 98%, 99%, 99.2%, 99.5% or 99.7% to a naturally occurring LSR, in particular to A118, TP901, φRV1, Bxb1, φC31, R4, Wβ, Tnpx, Cp36, Dn29, Kp03, Nm60, Pa01, and Si74. According to a particular preferred embodiment, the LSR variant obtained by the method of the present invention has a sequence identity of between 80% and 90% to a naturally occurring LSR, in particular to A118, TP901, φRV1, φC31, R4, Wβ, Tnpx, Cp36, Dn29, Kp03, Nm60, Pa01, and Si74, more preferably of between 82% and 88%, even more preferably of between 84% and 86%, and most preferably of 85%. Such LSR variants are preferably active LSRs as defined herein.

[0137] According to a particularly preferred embodiment, the difference in the amino acid sequence is caused by one or more amino acid substitutions, i.e. the variant differs from the wildtype or the preceding variant in that it comprises a respective number of amino acid substitutions and thus the same overall number of amino acids as in the wildtype or the preceding variant.

[0138] Particularly preferred LSRs in accordance with the present invention comprise or consist of an amino acid sequence having at least 85% sequence identity to any one of SEQ ID NOs: 14, 17 to 35, 38 to 56, 60 to 8391, 8395, 8398 to 8403, 8406 to 8412, 8415 to 8422, 8425 to 8429, and 8430 to 13115. More specifically preferred are LSRs that comprise or consist of an amino acid sequence having at least 85% sequence identity to any one of SEQ ID NOs: 14, 17 to 35, 38 to 56, 60 to 88, and 12437. According to a preferred embodiment, the LSRs in accordance with the present invention comprise or consist of an amino acid sequence having at least 86%, at least 87%, at least 88%, at least 89%, at least 90%, at least 91%, at least 92%, at least 93%, at least 94%, at least 95%, at least 96%, at least 97%, at least 98%, at least 99%, at least 99.2%, at least 99.5%, at least 99.7%, or 100% sequence identity to any one of SEQ ID NOs: 14, 17 to 35, 38 to 56, 60 to 8391, 8395, 8398 to 8403, 8406 to 8412, 8415 to 8422, 8425 to 8429, and 8430 to 13115. According to a particularly preferred embodiment, the LSR consists of an amino acid sequence as set forth in one of SEQ ID NOs: 14, 17 to 35, 38 to 56, 60 to 8391, 8395, 8398 to 8403, 8406 to 8412, 8415 to 8422, 8425 to 8429, and 8430 to 13115, more preferably of an amino acid sequence as set forth in one of SEQ ID NOs: 14, 17 to 35, 38 to 56, 60 to 88, and 12437. According to one particular embodiment, the LSRs in accordance with the present invention comprise or consist of an amino acid sequence having at least 85% sequence identity to any one of SEQ ID NOs: 14, 17 to 35, 38 to 56, 60 to 8391, 8395, 8398 to 8403, 8406 to 8412, 8415 to 8422, 8425 to 8429, and 8430 to 13115 are not identical to any large serine recombinase known in the art. All of these LSRs are preferably active LSRs as defined herein.

[0139] The present invention also provides fragments of the LSRs disclosed herein or obtained by the method of the present invention, in particular fragments of an LSR comprising or consisting of an amino acid sequence having at least 85% sequence identity to any one of SEQ ID NOs: 14, 17 to 35, 38 to 56, 60 to 8391, 8395, 8398 to 8403, 8406 to 8412, 8415 to 8422, 8425 to 8429, and 8430 to 13115. In accordance with the present invention, a fragment LSRs may comprise an N-terminal and/or C-terminal deletion of one or more amino acids. According to a preferred embodiment, the deletion may comprise one, two, three, four, five, six, seven, eight, nine, ten, eleven, twelve, 13, 14, 15, 16, 17, 18, 19, 20, 21, 22, 23, 24, 25, 26, 27, 28, 29 or 30 amino acids compared to the non-fragment LSR. All of these LSRs are preferably active LSRs as defined herein.

[0140] The following tables list some generated variant LSRs and their respective target sequences. Thus, according to a particularly preferred embodiment of the present invention, an LSR or LSR variant according to the invention is selected from the LSR variants disclosed in Tables 2 to 5.

TABLE 2
TP901 LSR variants and their target sites.

| LSR | Amino acid | First target | Second target |
|---|---|---|---|
| variant | sequence | site (P) | site (B) |
| 798 cl2 | SEQ ID NO: 14 | SEQ ID NO: 6 | SEQ ID NO: 15 |
| 798 cl6 | SEQ ID NO: 17 | SEQ ID NO: 6 | SEQ ID NO: 15 |
| 798 cl10 | SEQ ID NO: 18 | SEQ ID NO: 6 | SEQ ID NO: 15 |
| 798 cl3 | SEQ ID NO: 19 | SEQ ID NO: 6 | SEQ ID NO: 15 |
| 798 cl4 | SEQ ID NO: 20 | SEQ ID NO: 6 | SEQ ID NO: 15 |
| 798 cl9 | SEQ ID NO: 21 | SEQ ID NO: 6 | SEQ ID NO: 15 |
| 798 cl7 | SEQ ID NO: 22 | SEQ ID NO: 6 | SEQ ID NO: 15 |
| 798 cl5 | SEQ ID NO: 23 | SEQ ID NO: 6 | SEQ ID NO: 15 |
| 798 cl8 | SEQ ID NO: 24 | SEQ ID NO: 6 | SEQ ID NO: 15 |
| 799 cl10 | SEQ ID NO: 25 | SEQ ID NO: 6 | SEQ ID NO: 16 |
| 799 cl5 | SEQ ID NO: 26 | SEQ ID NO: 6 | SEQ ID NO: 16 |
| 799 cl9 | SEQ ID NO: 27 | SEQ ID NO: 6 | SEQ ID NO: 16 |
| 799 cl3 | SEQ ID NO: 28 | SEQ ID NO: 6 | SEQ ID NO: 16 |
| 799 cl7 | SEQ ID NO: 29 | SEQ ID NO: 6 | SEQ ID NO: 16 |
| 799 cl1 | SEQ ID NO: 30 | SEQ ID NO: 6 | SEQ ID NO: 16 |
| 799 cl2 | SEQ ID NO: 31 | SEQ ID NO: 6 | SEQ ID NO: 16 |
| 799 cl8 | SEQ ID NO: 32 | SEQ ID NO: 6 | SEQ ID NO: 16 |
| 799 cl6 | SEQ ID NO: 33 | SEQ ID NO: 6 | SEQ ID NO: 16 |
| 799 cl4 | SEQ ID NO: 34 | SEQ ID NO: 6 | SEQ ID NO: 16 |

TABLE 3
PhiRv1 LSR variants and their target sites.

| LSR | Amino acid | First target | Second target |
|---|---|---|---|
| variant | sequence | site (P) | site (B) |
| 824 cl1 | SEQ ID NO: 35 | SEQ ID NO: 9 | SEQ ID NO: 36 |
| 824 cl8 | SEQ ID NO: 38 | SEQ ID NO: 9 | SEQ ID NO: 36 |
| 824 cl5 | SEQ ID NO: 39 | SEQ ID NO: 9 | SEQ ID NO: 36 |
| 824 cl10 | SEQ ID NO: 40 | SEQ ID NO: 9 | SEQ ID NO: 36 |
| 824 cl2 | SEQ ID NO: 41 | SEQ ID NO: 9 | SEQ ID NO: 36 |
| 824 cl3 | SEQ ID NO: 42 | SEQ ID NO: 9 | SEQ ID NO: 36 |
| 824 cl7 | SEQ ID NO: 43 | SEQ ID NO: 9 | SEQ ID NO: 36 |
| 824 cl4 | SEQ ID NO: 44 | SEQ ID NO: 9 | SEQ ID NO: 36 |
| 824 cl6 | SEQ ID NO: 45 | SEQ ID NO: 9 | SEQ ID NO: 36 |
| 824 cl9 | SEQ ID NO: 46 | SEQ ID NO: 9 | SEQ ID NO: 36 |
| 825 cl4 | SEQ ID NO: 47 | SEQ ID NO: 9 | SEQ ID NO: 37 |
| 825 cl1 | SEQ ID NO: 48 | SEQ ID NO: 9 | SEQ ID NO: 37 |
| 825 cl8 | SEQ ID NO: 49 | SEQ ID NO: 9 | SEQ ID NO: 37 |
| 825 cl9 | SEQ ID NO: 50 | SEQ ID NO: 9 | SEQ ID NO: 37 |
| 825 cl3 | SEQ ID NO: 51 | SEQ ID NO: 9 | SEQ ID NO: 37 |
| 825 cl10 | SEQ ID NO: 52 | SEQ ID NO: 9 | SEQ ID NO: 37 |
| 825 cl2 | SEQ ID NO: 53 | SEQ ID NO: 9 | SEQ ID NO: 37 |
| 825 cl7 | SEQ ID NO: 54 | SEQ ID NO: 9 | SEQ ID NO: 37 |
| 825 cl5 | SEQ ID NO: 55 | SEQ ID NO: 9 | SEQ ID NO: 37 |

TABLE 4
A118 LSR variants and their target sites.

| LSR | Amino acid | First target | Second target |
|---|---|---|---|
| variant | sequence | site (P) | site (B) |
| 783 cl7 | SEQ ID NO: 56 | SEQ ID NO: 12 | SEQ ID NO: 57 |
| 783 cl1 | SEQ ID NO: 60 | SEQ ID NO: 12 | SEQ ID NO: 57 |
| 783 cl2 | SEQ ID NO: 61 | SEQ ID NO: 12 | SEQ ID NO: 57 |
| 783 cl8 | SEQ ID NO: 62 | SEQ ID NO: 12 | SEQ ID NO: 57 |
| 783 cl10 | SEQ ID NO: 63 | SEQ ID NO: 12 | SEQ ID NO: 57 |
| 783 cl3 | SEQ ID NO: 64 | SEQ ID NO: 12 | SEQ ID NO: 57 |
| 783 cl6 | SEQ ID NO: 65 | SEQ ID NO: 12 | SEQ ID NO: 57 |
| 783 cl4 | SEQ ID NO: 66 | SEQ ID NO: 12 | SEQ ID NO: 57 |
| 783 cl9 | SEQ ID NO: 67 | SEQ ID NO: 12 | SEQ ID NO: 57 |
| 783 cl5 | SEQ ID NO: 68 | SEQ ID NO: 12 | SEQ ID NO: 57 |
| 784 cl9 | SEQ ID NO: 69 | SEQ ID NO: 12 | SEQ ID NO: 58 |
| 784 cl1 | SEQ ID NO: 70 | SEQ ID NO: 12 | SEQ ID NO: 58 |
| 784 cl5 | SEQ ID NO: 71 | SEQ ID NO: 12 | SEQ ID NO: 58 |
| 784 cl10 | SEQ ID NO: 72 | SEQ ID NO: 12 | SEQ ID NO: 58 |
| 784 cl4 | SEQ ID NO: 73 | SEQ ID NO: 12 | SEQ ID NO: 58 |
| 784 cl8 | SEQ ID NO: 74 | SEQ ID NO: 12 | SEQ ID NO: 58 |
| 784 cl2 | SEQ ID NO: 75 | SEQ ID NO: 12 | SEQ ID NO: 58 |
| 784 cl3 | SEQ ID NO: 76 | SEQ ID NO: 12 | SEQ ID NO: 58 |
| 784 cl7 | SEQ ID NO: 77 | SEQ ID NO: 12 | SEQ ID NO: 58 |
| 784 cl6 | SEQ ID NO: 78 | SEQ ID NO: 12 | SEQ ID NO: 58 |
| 787 cl1 | SEQ ID NO: 79 | SEQ ID NO: 12 | SEQ ID NO: 59 |
| 787 cl7 | SEQ ID NO: 80 | SEQ ID NO: 12 | SEQ ID NO: 59 |
| 787 cl3 | SEQ ID NO: 81 | SEQ ID NO: 12 | SEQ ID NO: 59 |
| 787 cl5 | SEQ ID NO: 82 | SEQ ID NO: 12 | SEQ ID NO: 59 |
| 787 cl6 | SEQ ID NO: 83 | SEQ ID NO: 12 | SEQ ID NO: 59 |
| 787 cl10 | SEQ ID NO: 84 | SEQ ID NO: 12 | SEQ ID NO: 59 |
| 787 cl4 | SEQ ID NO: 85 | SEQ ID NO: 12 | SEQ ID NO: 59 |
| 787 cl8 | SEQ ID NO: 86 | SEQ ID NO: 12 | SEQ ID NO: 59 |
| 787 cl9 | SEQ ID NO: 87 | SEQ ID NO: 12 | SEQ ID NO: 59 |
| 787 cl2 | SEQ ID NO: 88 | SEQ ID NO: 12 | SEQ ID NO: 59 |

TABLE 5
Bxb1 LSR variants and their target sites.

| LSR | Amino acid | | Second target |
|---|---|---|---|
| variant | sequence | First target site (P) | site (B) |
| SH1 | SEQ ID NO: 8395 | SEQ ID NO: 8396 | SEQ ID NO: 8397 |
| cl10rep | | | |
| SH1 | SEQ ID NO: 8398 | SEQ ID NO: 8396 | SEQ ID NO: 8397 |
| cl4rep | | | |
| SH1 cl8 | SEQ ID NO: 8399 | SEQ ID NO: 8396 | SEQ ID NO: 8397 |
| SH1 cl3 | SEQ ID NO: 8400 | SEQ ID NO: 8396 | SEQ ID NO: 8397 |
| SH1 cl2 | SEQ ID NO: 8401 | SEQ ID NO: 8396 | SEQ ID NO: 8397 |
| SH1 cl9 | SEQ ID NO: 8402 | SEQ ID NO: 8396 | SEQ ID NO: 8397 |
| SH2 cl6 | SEQ ID NO: 8403 | SEQ ID NO: 8404 | SEQ ID NO: 8405 |
| SH2 cl7 | SEQ ID NO: 8406 | SEQ ID NO: 8404 | SEQ ID NO: 8405 |
| SH2 cl5 | SEQ ID NO: 8407 | SEQ ID NO: 8404 | SEQ ID NO: 8405 |
| SH2 cl8 | SEQ ID NO: 8408 | SEQ ID NO: 8404 | SEQ ID NO: 8405 |
| SH2 cl4 | SEQ ID NO: 8409 | SEQ ID NO: 8404 | SEQ ID NO: 8405 |
| SH2 cl3 | SEQ ID NO: 8410 | SEQ ID NO: 8404 | SEQ ID NO: 8405 |
| SH2 cl1 | SEQ ID NO: 8411 | SEQ ID NO: 8404 | SEQ ID NO: 8405 |
| SH3 cl4 | SEQ ID NO: 8412 | SEQ ID NO: 8413 | SEQ ID NO: 8414 |
| SH3 cl5 | SEQ ID NO: 8415 | SEQ ID NO: 8413 | SEQ ID NO: 8414 |
| SH3 cl7 | SEQ ID NO: 8416 | SEQ ID NO: 8413 | SEQ ID NO: 8414 |
| SH3 cl6 | SEQ ID NO: 8417 | SEQ ID NO: 8413 | SEQ ID NO: 8414 |
| SH3 cl2 | SEQ ID NO: 8418 | SEQ ID NO: 8413 | SEQ ID NO: 8414 |
| SH3 cl9 | SEQ ID NO: 8419 | SEQ ID NO: 8413 | SEQ ID NO: 8414 |
| SH3 cl3 | SEQ ID NO: 8420 | SEQ ID NO: 8413 | SEQ ID NO: 8414 |
| SH3 cl8 | SEQ ID NO: 8421 | SEQ ID NO: 8413 | SEQ ID NO: 8414 |
| SH4 cl4 | SEQ ID NO: 8422 | SEQ ID NO: 8423 | SEQ ID NO: 8424 |
| SH4 cl3 | SEQ ID NO: 8425 | SEQ ID NO: 8423 | SEQ ID NO: 8424 |
| SH4 | SEQ ID NO: 8426 | SEQ ID NO: 8423 | SEQ ID NO: 8424 |
| cl10 | | | |
| SH4 cl8 | SEQ ID NO: 8427 | SEQ ID NO: 8423 | SEQ ID NO: 8424 |
| SH4 cl1 | SEQ ID NO: 8428 | SEQ ID NO: 8423 | SEQ ID NO: 8424 |
| SH4 cl7 | SEQ ID NO: 8429 | SEQ ID NO: 8423 | SEQ ID NO: 8424 |

[0141] Further LSR variants of the present invention comprise or consist of an amino acid sequence as laid out in one of SEQ ID NOs: 89 to 8391 and 8430 to 13115, or a sequence at least 85% identical thereto.

[0142] Particularly preferred Bxb1 LSR variants comprise one or more, and preferably all of the mutations with respect to Bxb1 LSR wildtype (SEQ ID NO: 8392) selected from the group consisting of:
[0143] (a) Q70R, V74A, T84A, I87T, I87V, K138R, N141S, T166A, E171V, V175A, H189R, D193N, N194D, K214R, Q221R, E229K, I240T, E242G, E242V, T254I, D257G, E273G, L275Q, V283A, A315S, P322S, D355G, D355N, N381S, E418G, E434G, T453A, L488S, S490G;
[0144] (b) V74A, T84A, I87T, I87V, N141S, T166A, V175A, K214R, Q221R, E229K, I240T, E242V, T254I, L275Q, A315S, D355G, D355N, E434G;
[0145] (c) T84A, I87T, N141S, T166A, V175A, Q221R, E229K;
[0146] (d) D14E, E24A, Q27R, V74A, 187T, I87V, Q92R, H95L, H95R, N141I, N141S, A145T, A145V, H146R, T166A, V175A, H189R, H203Y, Q221R, Q226R, E229K, K236R, I240T, E242G, E242K, E242V, T254I, D257G, E273G, L275Q, V283A, K284R, A315T, A315V, F331S, K333E, A341V, A343T, A347V, E351K, D355G, D355N, K365R, A374S, V385M, E418G, G422S, E431G, E434G, F439L, G440R, T453A, V460I, V466A, D478E, Q480R, E483G, Q484R, L488S, S490G, V491A, V492A, H496R, T497A, M499T, S500P;
[0147] (e) V74A, I87T, I87V, H95R, N141I, N141S, A145V, H146R, T166A, H203Y, Q221R, Q226R, E229K, K236R, I240T, E242G, E242V, T254I, D257G, E273G, L275Q, V283A, A315V, K333E, A341V, A343T, D355G, D355N, E434G, F439L, G440R, D478E, Q484R, L488S, V492A, H496R;
[0148] (f) I87T, H95R, N141I, A145V, Q221R, Q226R, E229K, I240T, E242V, T254I, L275Q, V283A, A315V, K333E, A341V, D355N, E434G, V492A;
[0149] (g) D45N, V74A, T84A, I87T, I87V, K138R, T166A, V175A, H189R, N194D, P197S, L200W, Q221R, E229K, I240T, E242V, T254I, E273G, E281V, V283A, A341V, D355G, D355N, A360T, N381S, E424G, S428P, E431G, E434G, T453A, V466A, D478G, Q480R, L488S, S490G;
[0150] (h) V74A, T84A, 187T, I87V, T166A, V175A, Q221R, E229K, I240T, E273G, A341V, D355N, E424G, E434G;
[0151] (i) I87T, I87V, Q221R, E229K, A341V, E424G;
[0152] (j) D14E, E24A, Q27R, D45N, Q70R, V74A, T84A, I87T, I87V, Q92R, H95L, H95R, K138R, N141S, N141I, A145T, A145V, H146R, T166A, E171V, V175A, H189R, D193N, N194D, P197S, L200W, H203Y, K214R, Q221R, Q226R, E229K, K236R, I240T, E242G, E242V, E242K, T254I, D257G, E273G, L275Q, E281V, V283A, K284R, A315S, A315T, A315V, P322S, F331S, K333E, A341V, A343T, A347V, E351K, D355G, D355N, A360T, K365R, A374S, N381S, V385M, E418G, G422S, E424G, S428P, E431G, E434G, F439L, G440R, T453A, V460I, V466A, D478E, D478G, Q480R, E483G, Q484R, L488S, S490G, V491A, V492A, H496R, T497A, M499T, S500P;
[0153] (k) V74A, T84A, I87T, I87V, H95R, N141S, N141I, A145V, H146R, T166A, V175A, H203Y, K214R, Q221R, Q226R, E229K, K236R, I240T, E242V, E242G, T254I, D257G, E273G, L275Q, V283A, A315S, A315V, K333E, A341V, A343T, D355G, D355N, E424G, E434G, F439L, G440R, D478E, Q484R, L488S, V492A, H496R; or
[0154] (l) T84A, 187T, I87V, H95R, N141S, N141I, A145V, T166A, V175A, Q221R, Q226R, E229K, I240T, E242V, T254I, L275Q, V283A, A315V, K333E, A341V, D355N, E424G, E434G, V492A.

[0155] According to one embodiment of the present invention, the LSR is present as a monomer. According to a preferred embodiment of the present invention, the LSR comprises at least two LSR monomers, i.e. is in a dimeric form (dimer). Such a dimer can comprise two monomers of the same type (i.e. two identical integrase monomers, homodimer) or two monomers of a different type (i.e. two different integrase monomers, heterodimer). According to a further preferred embodiment of the present invention, the LSR comprises at least four protein monomers, i.e. is in a tetrameric form (tetramer). Such a tetramer can comprise four monomers of the same type (i.e. four identical integrase monomers, homotetramer), or monomers of a different type such as two, three or four different integrase monomers (heterotetramer). According to a particularly preferred embodiment, the variant LSR is present as a dimer and comprises two identical LSR monomers.

[0156] The present invention further pertains to a nucleic acid or group of nucleic acids encoding a variant LSR according to the present invention. For activation of the expression of such nucleic acid or group of nucleic acids, the nucleic acid encoding for the LSR preferably further comprises a regulatory nucleic acid sequence, preferably a promoter region. Hence, expression of the nucleic acid encoding for the integrase protein can be initiated or regulated by activating the regulatory nucleic acid sequence. Accordingly, one way for inducing a DNA integration of a donor nucleic acid into a cell or genome of a subject is introducing the nucleic acid sequence or group of nucleic acid sequences of the present invention into the respective subject or cell, and activating the regulatory nucleic acid sequence (preferably the promoter region) to express the gene encoding for the integrase protein. Preferably, the regulatory nucleic acid sequence (preferably the promoter region) is either introduced into a respective cell, preferably together with the sequence encoding for the integrase protein, or the regulatory nucleic acid sequence is already present in said cell at the beginning. In the second case, merely the nucleic acid encoding for the integrase protein is introduced into the cell (and placed under the control of the regulatory nucleic acid sequence).

[0157] The term “regulatory nucleic acid sequence” as used herein refers to gene regulatory regions of DNA. In addition to promoter regions, this term encompasses operator regions more distant from the gene as well as nucleic acid sequences that influence the expression of a gene, such as cis-elements, enhancers or silencers. The term “promoter region” as used herein refers to a nucleotide sequence on the DNA allowing a regulated expression of a gene. The promoter region allows regulated expression of the nucleic acid encoding for the respective protein. The promoter region is located at the 5′-end of the gene and thus before the RNA coding region. Both, bacterial and eukaryotic promoters are applicable for the invention.

[0158] According to one embodiment of the invention, the target sites are either already included in the subject or cell, or they are introduced into the subject's genome or into the cell, preferably by recombinant techniques well known to the person of ordinary skill in the art.

[0159] According to one preferred embodiment, the nucleic acid that is to be integrated (i.e. the donor nucleic acid) is already present in the subject and particularly in a respective cell. Alternatively, the nucleic acid to be integrated can be introduced into the subject or cell by conventional means known to the skilled person, such as by recombinant techniques (e.g. transfection or transduction).

[0160] The present invention also includes one or a plurality of nucleic acids or nucleic acid sequences or polynucleotides in which the coding sequence for the LSR is fused in the same reading frame to a polynucleotide sequence which aids in expression and secretion of a protein from a host cell. For example, a leader sequence, which functions as a secretory sequence for controlling transport of a polypeptide from the cell, may be fused to the sequence encoding the integrase protein. The polypeptide or protein having such a leader sequence is termed a pre-protein or a pre-proprotein and may have the leader sequence cleaved by the host cell to form the mature form of the protein. These polynucleotides may have a 5′ extended region so that it encodes a proprotein, which is the mature protein plus additional amino acid residues at the N-terminus. The expression product having such a pro-sequence is termed a pro-protein, which is an inactive form of the mature protein; however, once the pro-sequence is cleaved, an active mature protein remains. The additional sequence may also be attached to the protein and be part of the mature protein. Thus, for example, the polynucleotides of the present invention may encode polypeptides, or proteins having a pro-sequence, or proteins having both, a pro-sequence and a pre-sequence (such as a leader sequence).

[0161] The nucleic acids of the present invention may also have the coding sequence fused in frame to a marker sequence, which allows for purification of the integrase protein of the present invention. The marker sequence may be an affinity tag or an epitope tag such as a polyhistidine tag, a streptavidin tag, an Xpress tag, a FLAG tag, a cellulose or chitin binding tag, a glutathione-S transferase tag (GST), a hemagglutinin (HA) tag, a c-myc tag or a V5 tag.

[0162] If the nucleic acid of the invention is an mRNA, in particular for use as a medicament, the delivery of mRNA therapeutics can be facilitated by the significant progress that has been achieved in maximizing the translation and stability of mRNA, preventing its immune-stimulatory activity and the development of in vivo delivery technologies. The 5′ cap and 3′ poly(A) tail are the main contributors to efficient translation and prolonged half-life of mature eukaryotic mRNAs. Incorporation of cap analogs such as ARCA (anti-reverse cap analogs) and poly(A) tail of 120-150 bp into in vitro transcribed (IVT) mRNAs has markedly improved expression of the encoded proteins and mRNA stability. New types of cap analogs, such as 1,2-dithiodiphosphate-modified caps, with resistance against RNA decapping complex, can further improve the efficiency of RNA translation. Replacing rare codons within mRNA protein-coding sequences with synonymous frequently occurring codons, so-called codon optimization, also facilitates better efficacy of protein synthesis and limits mRNA destabilization by rare codons, thus preventing accelerated degradation of the transcript. Similarly, engineering 3′ and 5′ untranslated regions (UTRs), which contain sequences responsible for recruiting RNA-binding proteins (RBPs) and miRNAs, can enhance the level of protein product. Interestingly, UTRs can be deliberately modified to encode regulatory elements (e.g., K-turn motifs and miRNA binding sites), providing a means to control RNA expression in a cell-specific manner. Some RNA base modifications such as N1-methyl-pseudouridine have not only been instrumental in masking mRNA immune-stimulatory activity but have also been shown to increase mRNA translation by enhancing translation initiation. In addition to their observed effects on protein translation, base modifications and codon optimization affect the secondary structure of mRNA, which in turn influences its translation. Respective modifications of the nucleic acid molecules of the invention are also contemplated by the invention.

[0163] The RNA or plurality of RNAs preferably encode the integrase enzyme of the present invention or any of its subunits. Specific methods for delivering and expressing nucleic acids and specifically RNAs are disclosed e.g. in EP2590676 and EP3115064, which are herein incorporated by reference. The RNA may be present in a particle and is preferably self-replicating. After in vivo administration of the particles, RNA is released from the particles and is translated inside a cell to provide the DNA recombining enzyme or any of its monomeric subunits.

[0164] A self-replicating RNA molecule (replicon) can, when delivered to a vertebrate cell even without any proteins, lead to the production of multiple daughter RNAs by transcription from itself (via an antisense copy which it generates from itself). These daughter RNAs, as well as collinear sub-genomic transcripts, may be translated by themselves to provide in situ expression of an encoded polypeptide, or may be transcribed to provide further transcripts with the same sense as the delivered RNA which are translated to provide in situ expression of the polypeptide. The overall results of this sequence of transcriptions is a huge amplification in the number of the introduced replicon RNAs and so the encoded polypeptide becomes a major polypeptide product of the cells.

[0165] A preferred self-replicating RNA molecule encodes (i) an RNA-dependent RNA polymerase which can transcribe RNA from the self-replicating RNA molecule, and (ii) an integrase protein of the present invention. The polymerase can be an alphavirus replicase e.g. comprising one or more of alphavirus proteins nsP1, nsP2, nsP3 and nsP4. It is preferred that the self-replicating RNA molecules of the invention do not encode alphavirus structural proteins. Thus, a preferred self-replicating RNA can lead to the production of genomic RNA copies of itself in a cell, but not to the production of RNA-containing virions. A self-replicating RNA molecule useful in the context of the present invention may have two open reading frames. The first (5′) open reading frame encodes a replicase, and the second (3′) open reading frame encodes a polypeptide of the present invention. In some embodiments, the RNA may have additional (e.g. downstream) open reading frames e.g. for further encoding accessory polypeptides.

[0166] Such RNA is particularly suitable for the general use in gene therapy, and specifically for use in the treatment of genetic disorders or diseases.

[0167] The present invention further provides an expression vector comprising the nucleic acid according to the present invention. The expression vector is preferably a pEVO vector as described in Buchholz and Stewart, 2001, more preferably the variant pEVO vector described herein as pEVO4gg. According to a particularly preferred embodiment, the vector comprises a nucleic acid sequence encoding a protein having at least 85% identity to any one of SEQ ID NOs: 14, 17 to 35, 38 to 56, 60 to 8391, 8395, 8398 to 8403, 8406 to 8412, 8415 to 8422, 8425 to 8429, and 8430 to 13115.

[0168] The present invention further provides a cell or host cell comprising the vector or the nucleic acid or group of nucleic acids according to the present invention. The skilled person readily identifies suitable host cells, which may be eukaryotic or prokaryotic. Preferred prokaryotic cells are bacterial cells. Particularly preferred prokaryotic cells are cells of Escherichia coli. Preferred eukaryotic cells are yeast cells (preferably Saccharomyces cerevisiae), insect cells, non-insect invertebrate cells, amphibian cells, or mammalian cells (preferably somatic or pluripotent stem cells, including embryonic stem cells and other pluripotent stem cells, like induced pluripotent stem cells, and other native cells or established cell lines, including NIH3T3, CHO, HeLa, HEK293, hiPS). According to a particularly preferred embodiment, the host cells are XL-1 Blue E. coli cells.

[0169] The present invention further provides a system for integrating a donor nucleic acid into a target nucleic acid such as into the genome of a subject or cell. The system comprises a polypeptide comprising a large serine recombinase (LSR) according to the present invention, or a nucleic acid encoding the same, and a donor nucleic acid to be inserted into the target nucleic acid. The donor nucleic acid preferably comprises at least one target site of the LSR.

[0170] The system according to the invention is applicable for use in combination with other recombinase systems and thus may become a particular valuable tool for genetic experiments where multiple recombinases are required simultaneously or sequentially.

[0171] The present invention also provides a pharmaceutical composition comprising the large serine recombinase according to the present invention and in particular a protein having at least 85% identity to any one of SEQ ID NOs: 14, 17 to 35, 38 to 56, 60 to 8391, 8395, 8398 to 8403, 8406 to 8412, 8415 to 8422, 8425 to 8429, and 8430 to 13115, the one or more nucleic acids according to the present invention, or the vector according to the present invention, and optionally a pharmaceutically acceptable carrier. The pharmaceutical composition may be in any form that is suitable for the selected mode of administration.

[0172] In one embodiment, the pharmaceutical composition of the present invention is administered parenterally.

[0173] The phrases “parenteral administration” and “administered parenterally” as used herein means modes of administration other than enteral and topical administration, usually by injection, and include epidermal, intravenous, intramuscular, intraarterial, intrathecal, intracapsular, intraorbital, intracardiac, intradermal, intraperitoneal, intratendinous, transtracheal, subcutaneous, subcuticular, intraarticular, subcapsular, subarachnoid, intraspinal, intracranial, intrathoracic, epidural and intrasternal injection and infusion.

[0174] The therapeutically active agents in the pharmaceutical composition of the invention include but are not limited to the large serine recombinase according to the present invention and include in particular a protein having at least 85% identity to any one of SEQ ID NOs: 14, 17 to 35, 38 to 56, 60 to 8391, 8395, 8398 to 8403, 8406 to 8412, 8415 to 8422, 8425 to 8429, and 8430 to 13115, the one or more nucleic acids according to the present invention, or the vector according to the present invention. According to a preferred embodiment, the active agent in the pharmaceutical composition is the large serine recombinase according to the present invention and in particular a protein having at least 85% identity to any one of SEQ ID NOs: 14, 17 to 35, 38 to 56, 60 to 8391, 8395, 8398 to 8403, 8406 to 8412, 8415 to 8422, 8425 to 8429, and 8430 to 13115. The pharmaceutical composition comprising the therapeutically active agent can be administered, as sole pharmaceutical composition, or in combination with other active agents, in a unit administration form, as a mixture with conventional pharmaceutical supports, to animals and human beings.

[0175] In further embodiments, the pharmaceutical composition contains one or more carriers (also termed vehicles) which are pharmaceutically acceptable for a formulation capable of being injected. These may be in particular isotonic, sterile, saline solutions (monosodium or disodium phosphate, sodium, potassium, calcium or magnesium chloride and the like or mixtures of such salts), or dry, especially freeze-dried compositions which upon addition, depending on the case, of sterilized water or physiological saline, permit the constitution of injectable solutions.

[0176] The pharmaceutical forms suitable for injectable use include sterile aqueous solutions or dispersions; formulations including sesame oil, peanut oil or aqueous propylene glycol; and sterile powders for the extemporaneous preparation of sterile injectable solutions or dispersions. In all cases, the form must be sterile and must be fluid. It must be stable under the conditions of manufacture and storage and must be preserved against the contaminating action of microorganisms, such as bacteria and fungi.

[0177] According to a further aspect, the present invention provides the use of a large serine recombinase according to the present invention and in particular the use of a protein having at least 85% identity to any one of SEQ ID NOs: 14, 17 to 35, 38 to 56, 60 to 8391, 8395, 8398 to 8403, 8406 to 8412, 8415 to 8422, 8425 to 8429, and 8430 to 13115 for integrating a donor nucleic acid into a target nucleic acid such as into the genome of a subject or cell. According to a particularly preferred embodiment, the donor nucleic acid encodes a polypeptide or protein of interest and is integrated into the target nucleic acid such that the polypeptide or protein of interest is expressed when the target nucleic acid is transcribed and translated. The donor nucleic acid preferably comprises at least one target site of the LSR.

[0178] According to a further aspect, the present invention provides the use of the nucleic acid or group of nucleic acids of the present invention for integrating a donor nucleic acid into a target nucleic acid such as into the genome of a subject or cell. According to a particularly preferred embodiment, the donor nucleic acid encodes a polypeptide or protein of interest and is integrated into the target nucleic acid such that the polypeptide or protein of interest is expressed when the target nucleic acid is transcribed and translated. The donor nucleic acid preferably comprises at least one target site of the LSR.

[0179] According to a further aspect, the present invention provides the use of the expression vector or the pharmaceutical composition of the present invention for integrating a donor nucleic acid into a target nucleic acid such as into the genome of a subject or cell. According to a particularly preferred embodiment, the donor nucleic acid encodes a polypeptide or protein of interest and is integrated into the target nucleic acid such that the polypeptide or protein of interest is expressed when the target nucleic acid is transcribed and translated. The donor nucleic acid preferably comprises at least one target site of the LSR.

[0180] According to a further aspect, the present invention provides the use of the system of the present invention for integrating a donor nucleic acid into a target nucleic acid such as into the genome of a subject or cell. According to a particularly preferred embodiment, the donor nucleic acid encodes a polypeptide or protein of interest and is integrated into the target nucleic acid such that the polypeptide or protein of interest is expressed when the target nucleic acid is transcribed and translated. The donor nucleic acid preferably comprises at least one target site of the LSR.

[0181] The present invention further provides the large serine recombinase according to the present invention and in particular a protein having at least 85% identity to any one of SEQ ID NOs: 14, 17 to 35, 38 to 56, 60 to 8391, 8395, 8398 to 8403, 8406 to 8412, 8415 to 8422, 8425 to 8429, and 8430 to 13115, the nucleic acid or group of nucleic acids of the present invention, the expression vector of the present invention, the pharmaceutical composition of the present invention, or the system of the present invention for use in medicine.

[0182] The present invention further provides the large serine recombinase according to the present invention and in particular a protein having at least 85% identity to any one of SEQ ID NOs: 14, 17 to 35, 38 to 56, 60 to 8391, 8395, 8398 to 8403, 8406 to 8412, 8415 to 8422, 8425 to 8429, and 8430 to 13115, the nucleic acid or group of nucleic acids of the present invention, the expression vector of the present invention, the pharmaceutical composition of the present invention, or the system of the present invention for use in the treatment of a genetic disease or disorder. The genetic disease or disorder is not particularly limited and includes any genetic disease or disorder that can be treated by integrating a nucleic acid sequence or plurality of nucleic acid sequences into the genome of a respective patient that encodes one or more proteins or polypeptides that aid in treating the genetic disease or disorder. A preferred genetic disease or disorder is a monogenetic disease or disorder.

[0183] According to one embodiment, a (host) cell within the meaning of the invention is preferably a naturally occurring cell or a cell line (optionally transformed or genetically modified) that comprises at least one vector according to the invention or a nucleic acid according to the invention recombinantly, as described above. Thereby, the invention includes transient transfectants (e.g. by mRNA injection) or host cells that include at least one expression vector according to the invention as a plasmid or artificial chromosome, as well as host cells in which an expression vector according to the invention is stably integrated into the genome of said host cell.

[0184] Further provided are kits comprising a therapeutically active agent as described herein. In one embodiment, the kit provides the therapeutically active agents prepared in one or more unitary dosage forms ready for administration to a subject, for example in a preloaded syringe or in an ampoule. In another embodiment, the therapeutically active agents are provided in a lyophilized form.

[0185] Using the present invention, it is possible to integrate a donor nucleic acid, preferably DNA, into a target nucleic acid, preferably DNA, which target nucleic acid can be present in a host organism, such as mammals. Therefore, the present invention also includes a host organism comprising the integrated nucleic acid. According to one embodiment, the host organism is not a human. Also provided are host organisms which comprise a vector according to the invention or a nucleic acid according to the invention as described above that is, respectively, stably integrated into the genome of the host organism or individual cells of the host organism. Preferred host organisms according to the present invention are plants, invertebrates and vertebrates, particularly Bovidae, Drosophila melanogaster, Caenorhabditis elegans, Xenopus laevis, medaka, zebrafish, or Mus musculus, or embryos of these organisms.

[0186] The present invention further pertains to a method for integrating a donor DNA into a target nucleic acid such as into the genome of a subject or cell. The method comprises the steps of (i) providing the LSR variant according to the present invention and in particular a protein comprising or consisting of an amino acid sequence having at least 85% identity to any one of SEQ ID NOs: 14, 17 to 35, 38 to 56, 60 to 8391, 8395, 8398 to 8403, 8406 to 8412, 8415 to 8422, 8425 to 8429, and 8430 to 13115, the nucleic acid or group of nucleic acids of the present invention, the expression vector of the present invention, the pharmaceutical composition of the present invention, or the system of the present invention, and a donor DNA, optionally allowing the large serine recombinase to be expressed, and (ii) allowing the LSR to integrate the donor nucleic acid into the target nucleic acid.

[0187] The present invention further pertains to a method for treating a genetic disease or disorder in a subject by integrating a donor DNA into a target nucleic acid of the subject. The method comprises the steps of (i) providing the LSR variant according to the present invention and in particular a protein comprising or consisting of an amino acid having at least 85% identity to any one of SEQ ID NOs: 14, 17 to 35, 38 to 56, 60 to 8391, 8395, 8398 to 8403, 8406 to 8412, 8415 to 8422, 8425 to 8429, 8430 to 13115, the nucleic acid or group of nucleic acids of the present invention, the expression vector of the present invention, the pharmaceutical composition of the present invention, or the system of the present invention, and a donor DNA, optionally allowing the large serine recombinase to be expressed, and (ii) allowing the large serine recombinase to integrate the donor nucleic acid into the target nucleic acid.

[0188] The present invention further pertains to the following items.

[0189] Item 1: A method for generating a target-specific large serine recombinase (LSR), the method comprising the steps of:
[0190] a) generating a plurality of first variants of an LSR by introducing one or more mutations into the sequence encoding an LSR;
[0191] b) generating a library of expression vectors, wherein each expression vector comprises a first region comprising the sequence encoding one of the first variants of the LSR, and a second region comprising at least two first target sites of the LSR, wherein the two first target sites are different from each other;
[0192] c) introducing the library of expression vectors into host cells;
[0193] d) culturing the host cells and expressing the first variant LSR;
[0194] e) isolating plasmid DNA from the culture of host cells;
[0195] f) determining whether the portion of the second region on the expression vector between the two first target sites has been excised by the first variant LSR;
[0196] g) repeating step a) with those first LSR variants that excised the DNA sequence of the second region on the expression vector between the two first target sites by introducing one or more mutations into the sequence encoding the first variant LSR to generate second variants of the LSR;
[0197] h) repeating steps b) to f) optionally with at least one second target site, wherein the at least one second target site differs from the first target sites in at least one nucleotide.

[0198] Item 2: The method according to item 1, further comprising the step of repeating steps g) and h), preferably wherein steps g) and h) are repeated at least twice to at least 30 times.

[0199] Item 3: The method according to item 1 or 2, wherein the LSR in step a) as basis for the plurality of first variants of the LSR is a naturally occurring LSR.

[0200] Item 4: The method according to any one of items 1 to 3, wherein the two target sites in the second region of the expression vector are spaced apart by at least 50 nucleotides.

[0201] Item 5: The method according to any one of items 1 to 4, wherein the determining step f) comprises (i) sequencing of the first and the second region of the expression vector, or (ii) performing restriction digestion on the sequence of the expression vector comprising the two target sites followed by analysis of the digestion fragments.

[0202] Item 6: The method according to any one of items 1 to 5, further comprising the step of removing inactive variants of the variant LSR from the library of expression vectors.

[0203] Item 7: The method according to any one of items 1 to 6, wherein the one or more mutations in the sequence encoding the LSR are introduced by random mutagenesis using error-prone PCR.

[0204] Item 8: The method according to any one of items 1 to 7, wherein the first region on the vector further comprises a unique molecular identifier.

[0205] Item 9: The method according to item 8, further comprising one or more of the steps of:
[0206] (i) clustering the unique molecular identifiers,
[0207] (ii) generating and polishing consensus sequences,
[0208] (iii) determining the number of DNA modification events for each variant LSR;
[0209] (iv) determining an activity rate for each LSR variant; and/or
[0210] (v) selecting a target-specific LSR from the variant LSRs generated in step a) or steps g) to i) of claim 1 that excises the DNA sequence on the second region on the expression vector between two variant target sites of interest.

[0211] Item 10: The method according to any one of the preceding items, wherein the expression vector is a pEVO vector.

[0212] Item 11: A variant large serine recombinase (LSR) obtainable by the method according to any of items 1 to 10, wherein the amino acid sequence of the variant LSR differs in at least one amino acid from the amino acid sequence of the LSR from which the variant is generated in step a), and from the amino acid sequence of any other naturally occurring serine recombinase, preferably wherein the variant comprises or consists of an amino acid sequence having at least 85% identity to one of SEQ ID NOs: 14, 17 to 35, 38 to 56, 60 to 8391, 8395, 8398 to 8403, 8406 to 8412, 8415 to 8422, 8425 to 8429, and 8430 to 13115.

[0213] Item 12: The variant LSR according to item 11, wherein the variant LSR is a variant of an LSR selected from the group consisting of A118, TP901, φRV1, Bxb1, φC31, R4, Wβ, Tnpx, Cp36, Dn29, Kp03, Nm60, Pa01, Si74.

[0214] Item 13: A nucleic acid or group of nucleic acids encoding a variant LSR according to item 11 or 12.

[0215] Item 14: An expression vector comprising a nucleic acid or group of nucleic acids according to item 13.

[0216] Item 15: A system for integrating a donor DNA into a target nucleic acid, the system comprising
[0217] a polypeptide comprising a variant LSR according to item 11 or 12, or a nucleic acid encoding the same, and
[0218] a donor nucleic acid to be inserted into the target nucleic acid.

[0219] Item 16: A pharmaceutical composition comprising the variant LSR of item 11, the nucleic acid or group of nucleic acids according to item 13, or the expression vector according to item 14, and optionally a pharmaceutically acceptable carrier.

[0220] Item 17: Use of the variant LSR of item 11 or 12, the nucleic acid or group of nucleic acids of item 13, the expression vector of item 14, the system of item 15, or the pharmaceutical composition of item 16, for integrating a nucleic acid sequence of interest into the genome of a subject or cell, wherein the cell does not include cells of the human germ line.

[0221] Item 18: The variant LSR according to item 11 or 12, the nucleic acid or group of nucleic acids of item 13, the expression vector of item 14, or the pharmaceutical composition of item 16 for use in medicine.

[0222] Item 19: The variant LSR, the nucleic acid or group of nucleic acids, the expression vector, or the pharmaceutical composition for use of item 18, for use in the treatment of a genetic disease or disorder, preferably wherein the genetic disease or disorder is a monogenetic disease or disorder.

[0223] Item 20: A method for integrating a donor DNA into a target nucleic acid such as into the genome of a subject or cell, comprising the steps of (i) providing the LSR variant according to the present invention and in particular a protein comprising or consisting of an amino acid sequence having at least 85% identity to any one of SEQ ID NOs: 14, 17 to 35, 38 to 56, 60 to 8391, 8395, 8398 to 8403, 8406 to 8412, 8415 to 8422, 8425 to 8429, and 8430 to 13115, the nucleic acid or group of nucleic acids of the present invention, the expression vector of the present invention, the pharmaceutical composition of the present invention, or the system of the present invention, and a donor DNA, optionally allowing the large serine recombinase to be expressed, and (ii) allowing the LSR to integrate the donor nucleic acid into the target nucleic acid.

[0224] Item 21: A method for treating a genetic disease or disorder in a subject by integrating a donor DNA into a target nucleic acid of the subject, the method comprising the steps of (i) providing the LSR variant according to the present invention and in particular a protein comprising or consisting of an amino acid having at least 85% identity to any one of SEQ ID NOs: 14, 17 to 35, 38 to 56, 60 to 8391, 8395, 8398 to 8403, 8406 to 8412, 8415 to 8422, 8425 to 8429, and 8430 to 13115, the nucleic acid or group of nucleic acids of the present invention, the expression vector of the present invention, the pharmaceutical composition of the present invention, or the system of the present invention, and a donor DNA, optionally allowing the large serine recombinase to be expressed, and (ii) allowing the large serine recombinase to integrate the donor nucleic acid into the target nucleic acid.

### EXAMPLES

### Example 1: Cloning of Integrase Genes

[0225] After analyzing the published literature and sequences available in GenBank, four large serine recombinases (A118, PhiRv1, TP901-1 and Bxb1) were selected and evolved as detailed herein. The amino acid sequences for large site-specific recombinases of the serine family were obtained from GenBank and reverse translated to DNA. Since the sources of recombinases were from various bacteria or bacterial viruses, the DNA sequence was optimized for recombinase expression in E. Coli without changing the encoded amino acid sequence. The genes were synthesized with restriction enzyme sites for cloning. A 20 μl digest reaction was prepared as follows: 500 ng plasmid DNA, 2 μl CutSmart Buffer, 1 μl XbaI, 1 μl BsrGI-HF, and water. The reaction was incubated at 37° C. for at least 1 h and the insert was purified using ISOLATE II PCR and Gel Kit (Bioline) according to the manufacturer's instructions. The purified insert was subsequently used for ligation with the pEVO4gg vector containing target sites. The pEVO4gg vector was made based on the pEVO4 vector by integrating oligo with BbsI target sites (Hoersten et al., unpublished). A map of the pEVO4gg vector is shown in FIG. 7.

### Example 2: Target Site Cloning

[0226] To generate a plasmid with target sites (see Tables 2 to 5), oligonucleotides containing the target sites were used to amplify a DNA fragment that was cloned into a pEVO4gg backbone via Golden Gate. This method offers a proficient and directional means for the concurrent assembly of multiple DNA fragments into a unified construct, employing Type IIS restriction enzymes and T4 DNA ligase as key components of the process. Type IIS enzymes like BbsI cut DNA outside of their recognition sites and because the final product lacks the recognition site, the correctly ligated product cannot be cut again by the restriction enzyme, meaning the reaction is essentially irreversible (Engler et al., 2008). Specifically, a 50 μl PCR reaction was prepared as follows: 36 μl water, 10 μl 5× Herculase II Reaction Buffer, 0.5 μl 100 mM dNTP Mix, 1.25 μl of each forward and reverse primer (10 μM), 0.5 μl Herculase II Fusion DNA Polymerase, 1 μl of any pEVO4 or pEVO4gg vector with target sites (20 ng/μl). The reaction was run with the following program: 95° C. 3 min; 30 cycles: 95° C. 15 s, 55° C. 20 s, 72° C. 30 s; 72° C. 3 min; store at 8° C. PCR product was directly used for Golden Gate reaction.

TABLE 6
Primers used in the excision evolution assay.

| Primer | Primer sequence |
|---|---|
| F | TTTGAAGACCCCAC |
| | (SEQ ID NO: 1) |
| | -target_site_1- |
| | AGCTTGCATGCCTGCAGATCGAG |
| | (SEQ ID NO: 2) |
| R | TTTGAAGACCTAAAC |
| | (SEQ ID NO: 3) |
| | -rev_comp_target_site_2- |
| | tcgaactgtaccggttgttagtga |
| | (SEQ ID NO: 4) |

[0227] A 20 μl Golden Gate reaction was prepared as follows: 2 μl Fast Digest Buffer, 2 μl 10 mM ATP, 75 ng of pEVO4gg vector, 1 μl PCR product with target sites (diluted 1:10), 1 μl T4 DNA Ligase, 1 μl BpiI-HF, and water. The reaction was run with the following program: 37° C. for 10 minutes, 10 cycles of 37° C. for 5 minutes and 16° C. for 5 minutes, 37° C. for 15 minutes, and 65° C. for 10 minutes.

[0228] Golden Gate reaction was then used for bacterial transformation. The entire transformation mixture was plated on agar plates containing 15 μg/ml Chloramphenicol, and the cultures were grown in an incubator at 37° C. for 14-16 hours.

### Example 3: Excision Evolution Assay

[0229] The integrase gene was amplified with error-prone PCR to create a library. PCRs were performed with a low-fidelity DNA polymerase (MyTaq, Bioline) and PCR products were digested with XbaI and BsrGI for further cloning. Digested fragments were isolated from an agarose gel with the Isolate II PCR and Gel Kit (Bioline) and ligated into similarly digested pEVO4gg vector with target sites. Ligation was performed between 30 ng insert and 60 ng vector using T4 DNA Ligase (NEB).

[0230] Ligated plasmids were desalted with MF-Millipore membrane filters (Merck) on distilled water for 20 minutes and transformed into XL-1 Blue E. coli cells via electroporation. Transformed bacteria were cultured in SOC medium for 1 h at 37° C. 2 μl of this culture were spread on agarose plates with 15 mg/ml chloramphenicol and incubated over night at 37° C. The number of colonies on the plates was determined to calculate the number of transformed bacteria present per μl of SOC culture. The rest of the transformation solution was added to 100 ml LB medium to grow the library overnight at 37° C. Liquid cultures contained a specific amount of arabinose to induce the expression of the integrase. Arabinose levels and thus induction of enzyme expression used in the evolution were 200 μg/ml, 100 μg/ml, 50 μg/ml, 25 μg/ml, 10 μg/ml, 5 μg/ml and 1 μg/ml. Arabinose solution was prepared from the powder to the stock concentration of 100 mg/ml and then diluted with LB-medium to reach required concentration.

[0231] Plasmid DNA of these cultures was subsequently extracted using the GeneJet Plasmid Miniprep Kit (Thermo Fisher Scientific) and was used to characterize excision and continue evolution cycles. To continue the evolution cycle, a miniprep of plasmid DNA was digested with NdeI and AvrII, which target the plasmid portion in between target sites on the vector. In the absence of an excision reaction, the vector is linearized and primers for PCR amplification will go in opposite directions. If an excision reaction took place, restriction sites are removed and the vector stays intact, preserving correct orientation the PCR primers.

[0232] A further round of directed evolution was started with an error-prone-PCR on the enzymatically digested DNA. Only edited plasmids were replicated because primers are placed in a way that only the edited DNA fragment is a valid template for PCR. The PCR product was subsequently cloned into non-edited pEVO4gg vectors, which started a new evolution cycle. For increasing selection pressure, arabinose levels and thus induction of enzyme expression were lowered from 200 μg/ml to 1 μg/ml.

[0233] The evolution processes performed on the integrases TP901, PhiRv1, and A118 are illustrated in FIGS. 3A to 3C, respectively; Tables 2 to 4 summarize the respective sequences of the variant LSRs and the target sites on which the variants have been evolved. In FIGS. 3A to 3C, sequences of the wild-type target sites are presented in the top panel termed WT. New target sites used for evolution are shown below said box. Grey squares within the new target site sequences mark changes in the new target sites. Total number of changes is given at the end of each new target sequence. Agarose gel pictures in the lower panel show the results of the recombination tests and respective activities in percent (Rec %). For determining activity, recombined and non-recombined plasmids are digested with restriction enzymes that excise the recombinase gene. Due to differences in plasmid sizes between the two versions, the resulting DNA fragments containing the plasmid backbone are also different in size. The size difference is visualized in agarose gel electrophoresis. Because enzymes in the evolution library have different efficiencies, results are a mixture of recombined and non-recombined plasmids. When an agarose gel picture contains both kinds of fragments, the strength of each band corresponds to the amount of the respective fragment, allowing quantification of the recombination rate. Left agarose pictures represent the start of the evolution process, the right agarose pictures represent the end of the evolution process. Pictograms at the right of the gel scheme indicate to which fragment each band corresponds to: two triangles represent non-recombined fragments, and one triangle represents recombined fragments. The total number of evolution cycles is shown in the circle arrow in the middle between both agarose gel pictures. Arabinose induction level in μg/ml is noted under the gel pictures; M denotes the molecular weight marker.

[0234] Resulting integrase variants are shown in FIG. 4 (TP901 variants), FIG. 5 (PhiRv1 variants), and FIG. 6 (A118 variants). For each library, ten clones were analyzed under arabinose induction as indicated (1 μg/ml for TP901 variants (FIG. 4), and 0, 1 and 10 μg/ml for the other variants (FIGS. 5 to 7)). Every clone was sequenced with Sanger sequencing using forward and reverse primers. Two reads were used to create one gene sequence, translated und used for amino acid sequence alignment compared to the wild-type enzyme. The sequence alignment of each clone with the wild-type enzyme is shown in each figure. No full sequence alignments are shown but the figures highlight only those positions that differ between the variants and the wildtype sequence. A dot represents no change, * is a stop codon, # is an insertion. Positions of each mismatch are indicated in the bottom line below each sequence alignment. Only positions with differences to the wildtype reference are shown. Sequence of the wild-type enzyme was used as a reference.

### Example 4: Test Digests

[0235] In order to detect whether an integrase variant catalyzed an excision reaction, a restriction digest was performed as shown in FIGS. 3 to 7. Integrases were cloned into pEVO vectors with the respective target sites by utilizing XbaI and BsrGI restriction enzymes. Expression of integrases was controlled by an L-arabinose inducible promoter system (araBAD). Recombination of the respective target sites on the evolution plasmid leads to the excision of a 750 bp fragment from the plasmid. The resulting size difference is mediated by the recombinase activity and is detectable by a restriction digest followed by gel electrophoresis. The size of leftover backbone correlates to the unmodified vector (5147 bp) or to a vector containing an excision (4397 bp) in proportion to the relative abundance of each.

### Example 5: Excision Evolution Assay

[0236] A transient fluorescence-based reporter assay described in Lansing et al. 2020, and in Lansing et al. 2022 was used to determine the recombination properties of the evolved integrase variants as.

[0237] Expi293F cells were maintained in Dulbecco's modified Eagle medium (Invitrogen GmbH) supplemented with 10% fetal bovine serum and 1% penicillin-streptomycin (10,000 U/ml, Thermo Fisher). Cells were passaged every 3 to 4 days and maintained at 37° C. and 5% CO₂. Cells were transfected using Lipofectamine 2000 (Invitrogen) according to manufacturer's instructions. After 48 hours, cells were harvested and analysed in a MACS Quant analyser (Miltenyi Biotec).

[0238] The test was performed as follows: 75,000 cells per well were seeded in a 24-well plate. Cells were co-transfected with combination of EF1a-tagBFP-P2A-Int plasmid (FIG. 15), encoding for one integrase variant and blue fluorescent protein (BFP), along with pCAGGS-attB-mCherry-attP-EGFP reporter plasmid (FIG. 14) encoding a red fluorescent protein mCherry flanked by the tested target sites. Upon recombination of these sites, a downstream EGFP gene is expressed. Schematic representation of this process is shown in FIG. 16. 48 hours after transfection, the recombinase activity was quantified via FACS using the MACSQuant VYB flow cytometer (Miltenyi Biotec). Analysis of the data was performed using FlowJo™ 10 (BD). Cell populations were grouped with forward scatter and side scatter to group the total cell population. Cells expressing BFP were grouped with forward scatter and BFP to define populations which had acquired EF1a-tagBFP-P2A-Int plasmid with the integrase variant. From the BFP population, cells were grouped by GFP and mCherry expression. Recombination was quantified by determining the percentage of cells displaying green fluorescence within the blue fluorescence population.

[0239] Two sets of Bxb1 variants were tested for recombination efficiency in mammalian cell culture. First, 2 to 3 variants per safe harbour side (SHS) library with the highest recombination efficiency from the tested single clones (FIG. 9 to 14) were assessed. Results are shown in FIG. 17. Wild-type Bxb1 integrase was used for comparison and showed 0% recombination on all 4 tested target sites.

[0240] Subsequently, ten clones per library with the highest performance in the Nanopore screen were tested. Sequence alignments for all of them are shown in FIG. 13. Measured recombination efficiencies are presented in FIG. 18.

[0241] These experiments show that evolved clones can recombine their new target site in mammalian cells, reaching 89% efficiency, while wild-type Bxb1 is completely inactive on the new target sites.

[0242] The pCAGGS-attB-mCherry-attP-EGFP reporter plasmids (FIG. 14) used in the experiments were generated from the pCAGGS-loxP-mCherry-loxP-EGFP plasmid described by Karpinski et al. (2016). The target sites were introduced by PCR with overhang primers and were inserted in the reporter plasmid using NheI and HindIII restriction digestion cloning.

TABLE 7
Primers used for PCR:

| Primer | Primer sequence |
|---|---|
| F | AAAAGCTAGC |
| | (SEQ ID NO: 13116) |
| | -target_site- |
| | CGCCACCATGGTGAGCAA |
| | (SEQ ID NO: 13117) |
| R | AAAAAAGCTTAGATCT |
| | (SEQ ID NO: 13118) |
| | -rev_comp- |
| | CCTGCATCGACCTAGACTAGCTAGAA |
| | (SEQ ID NO: 13119) |

[0243] The transient mammalian expression vector EF1a-tagBFP-P2A-Int (FIG. 15) was generated from the EF1a-Rec-P2A-EGFP vector as described by Lansing et al. (2020) and Lansing et al. (2022). The integrases were inserted in the expression plasmid by restriction digest using XbaI and BsrGI.

### Example 6: SH2 Integration Experiment

[0244] This experiment shows the successful integration of a donor nucleic acid sequence into the SH2 locus using an evolved LSR.

[0245] A pTwist-CMV plasmid (Twist Bioscience) was used for expression of the SH2 clone 20 integrase (SEQ ID NO: 12437) with the Nucleoplasmin NLS on the C-terminus of the recombinase. The SH2-c120-NP was cloned via HindIII and NheI restriction sites into the pTwist-CMV expression vector. The donor plasmid pTwist-Kan-DNR3-P52 derived from a pTwist-Kan high copy cloning vector (Twist Bioscience) containing an SH2-P52 target site (5′-GTGGTTTGTCTGGTCAACCACCGCGGTCTCAGTGGTGTACGGTACAAACCCA-3′; SEQ ID NO: 13126) and a turboGFP followed by SV40 poly(A) sequence under a short CMV promotor (without enhancer and chimeric intron sequences). The fragment attP52-CMV-turboGFP-SV40poly(A) was cloned into the pTwist-Kan high copy cloning vector (Twist Bioscience).

[0246] Expi293F cells (Thermo Fisher Scientific) were cultured in DMEM (Gibco) with 10% FBS (Gibco) and 1% penicillin-streptomycin (10,000 U/ml, Thermo Fisher Scientific) at 37° C. and 5% CO₂. Trypsin-EDTA (Gibco) was used for dissociation of the cells for splitting.

[0247] For the integration assay, 30,000 Expi293F cells per well were seeded in a 96-well plate. The next day, 25 ng of the pTwist-CMV-SH2c120-NP expression plasmid and 200 ng of the pDNR3-attP52 donor plasmid were transfected using Lipofectamine 2000 Transfection Reagent (Thermo Fisher Scientific). The cells were analyzed with a MACSQuant X (Miltenyi Biotec) 72 h after transfection. The cells were gated for single cells and then for transfected population (GFP⁺ cells). The transfection efficiency of the sample transfected with the recombinase and donor plasmids was 49.6%.

[0248] 72 h post-transfection, the cells were harvested and gDNA was extracted using the Fast extract DNA solution (VWR) following the manufacturer's instructions.

[0249] 1 μl of the extracted gDNA (untreated cells were used as a control) was used for junction PCR with MyTaq polymerase (Bioline) in 25 μl PCR reaction. The junction PCR allows to check for correct donor integration in the SH2-B target site in the genome by amplifying the DNA fragment between the genomic locus and the integrated DNA sequence. PCR was performed using a primer specific for the sequence to the genomic sequence upstream (5′) or downstream (3′) of the SH2-B target site, and another primer specific to the sequence that was integrated by the recombinase (the donor plasmid). Primers used for the left junction (5′) PCR: GCAATGAGGTCCCAGATCCT (SEQ ID NO: 13120, binds in the genomic sequence, coordinates of the primer binding site in the human genome next to the SH2-B target site: chr13:74,941,518-74,941,537) and TGGCGGTCATATTGGACATGA (SEQ ID NO: 13121, binds in the donor plasmid downstream the target site); expected product size: 435 bp. Primers used for the right junction (3′) PCR: TCGGGCTTCCCATACAATCG (SEQ ID NO: 13122, binds in the donor plasmid upstream the target site) and CTTGCGCCTCCAGAAACATTG (SEQ ID NO: 13123, binds in the genomic sequence, coordinates of the primer binding site in the human genome next to the SH2-B target site: chr13:74,941,098-74,941,118); expected product size: 618 bp. Cycling program: 95° C.—5 min, (95° C.—15s, 56° C.—15s, 72° C.—15s)×35, 72° C.—3 min.

[0250] 5 μl of the PCR product was run on a 22 well 1% Agarose E-Gel (Thermo Fisher Scientific) for 20 min. E-Gel 1 Kb Plus Express DNA Ladder was used to analyze the PCR product size. Gel photo (FIG. 19) was taken with the E-Gel Power Snap Plus Electrophoresis System (Thermo Fisher Scientific). On the gel picture, two PCR bands are present in the sample lanes, where the gDNA from the cells transfected with SH2 c120 recombinase and pTwist-Kan-DNR3-P52 donor was used as a template. The size of the bands matches the expected sizes of 435 bp for the left junction (5′), and 618 bp for the right junction (3′), indicating successful integration of the donor plasmid into the SH2 genomic locus. No PCR product was amplified in the samples where gDNA of untreated cells (wt cells) was used as a template, indicating specificity of the PCR assay (see control lanes 2 in FIG. 19; control lanes 3 show no amplicons for the H₂O negative controls in the PCR reaction mixture).

[0251] 1 μl of the PCR product was sent for Sanger Sequencing to Microsynth AG with the primer GCAATGAGGTCCCAGATCCT (SEQ ID NO: 13124) for the left junction PCR and the primer TCGGGCTTCCCATACAATCG (SEQ ID NO: 13125) for the right junction PCR. Sequencing results confirmed successful integration of the donor nucleic acid sequence into the SH2 locus.

### CITED NON-PATENT LITERATURE

[0252] Anzalone A V, Gao X D, Podracky C J, Nelson A T, Koblan L W, Raguram A, Levy J M, Mercer JAM, Liu D R. Programmable deletion, replacement, integration and inversion of large DNA sequences with twin prime editing. Nat Biotechnol. 2022 May; 40(5):731-740.
[0253] Aznauryan E, Yermanos A, Kinzina E, Devaux A, Kapetanovic E, Milanova D, Church G M, Reddy S T. Discovery and validation of human genomic safe harbour sites for gene and cell therapies. Cell Reports Methods 2022 January: 2(1):100154.
[0254] Bai H, Sun M, Ghosh P, Hatfull G F, Grindley N D, Marko J F. Single-molecule analysis reveals the molecular bearing mechanism of DNA strand exchange by a serine recombinase. Proc Natl Acad Sci USA. 2011 May 3; 108(18):7419-24. doi: 10.1073/pnas.1018436108. Epub 2011 Apr. 18. PMID: 21502527; PMCID: PMC3088605.
[0255] Buchholz F., Hauber J. (2011). In vitro evolution and analysis of HIV-1 LTR-specific recombinases. Methods 53, 102-109.
[0256] Buchholz, F., Stewart, A. F. (2001). Alteration of Cre recombinase site specificity by substrate-linked protein evolution. Nat Biotechnol 19, 1047-1052.
[0257] Durrant M G, Fanton A, Tycko J, Hinks M, Chandrasekaran S S, Perry N T, Schaepe J, Du P P, Lotfy P, Bassik M C, Bintu L, Bhatt A S, Hsu P D. Systematic discovery of recombinases for efficient integration of large DNA sequences into the human genome. Nat Biotechnol. 2023 April; 41(4):488-499. doi: 10.1038/s41587-022-01494-w. Epub 2022 Oct. 10. PMID: 36217031; PMCID: PMC10083194.
[0258] Engler C, Kandzia R, Marillonnet S. A one pot, one step, precision cloning method with high throughput capability. PLoS One. 2008; 3(11):e3647. doi: 10.1371/journal.pone.0003647. Epub 2008 Nov. 5. PMID: 18985154; PMCID: PMC2574415.
[0259] Ghosh P, Pannunzio N R, Hatfull G F. Synapsis in phage Bxb1 integration: selection mechanism for the correct pair of recombination sites. J Mol Biol. 2005 Jun. 3; 349(2):331-48. doi: 10.1016/j.jmb.2005.03.043. Epub 2005 Apr. 7. PMID: 15890199.
[0260] Groth A C, Fish M, Nusse R, Calos M P. Construction of transgenic Drosophila by using the site-specific integrase from phage phiC31. Genetics. 2004 April; 166(4):1775-82. doi: 10.1534/genetics.166.4.1775. PMID: 15126397; PMCID: PMC1470814.
[0261] Henikoff S and Henikoff J G. 1989. Amino acid substitution matrices from protein blocks. Proc. Natl. Acad. Sci. USA 89(22):10915-10919.
[0262] Karpinski J., Hauber I., Chemnitz J., Schäfer C., Paszkowski-Rogacz M., Chakraborty D., Beschorner N., Hofmann-Sieber H., Lange U. C., Grundhoff A. (2016). Directed evolution of a recombinase that excises the provirus of most HIV-1 primary isolates with high specificity. Nature Biotechnology 34, 401-409.
[0263] Karst S. M., Ziels R. M., Kirkegaard R. H., Sørensen E. A., McDonald D., Zhu Q., Knight R., Albertsen M. (2021). High-accuracy long-read amplicon sequences using unique molecular identifiers with nanopore or PacBio sequencing. Nat Methods 18:165-169; available from: https://doi.org/10.1038%2Fs41592-020-01041-y.
[0264] Keravala A, Groth A C, Jarrahian S, Thyagarajan B, Hoyt J J, Kirby P J, Calos M P. A diversity of serine phage integrases mediate site-specific recombination in mammalian cells. Mol Genet Genomics. 2006 August; 276(2):135-46. doi: 10.1007/s00438-006-0129-5. Epub 2006 May 13. PMID: 16699779.
[0265] Kim A I, Ghosh P, Aaron M A, Bibb L A, Jain S, Hatfull G F. Mycobacteriophage Bxb1 integrates into the Mycobacterium smegmatis groEL1 gene. Mol Microbiol. 2003 October; 50(2):463-73. doi: 10.1046/j.1365-2958.2003.03723.x. PMID: 14617171.
[0266] Lansing F, Paszkowski-Rogacz M, Schmitt L T, Schneider P M, Rojo Romanos T, Sonntag J, Buchholz F. A heterodimer of evolved designer-recombinases precisely excises a human genomic DNA locus. Nucleic Acids Res. 2020 Jan. 10; 48(1):472-485. doi: 10.1093/nar/gkz1078. PMID: 31745551; PMCID: PMC7107906.
[0267] Lansing F, Mukhametzyanova L, Rojo-Romanos T, Iwasawa K, Kimura M, Paszkowski-Rogacz M, Karpinski J, Grass T, Sonntag J, Schneider P M, Günes C, Hoersten J, Schmitt L T, Rodriguez-Muela N, Knöfler R, Takebe T, Buchholz F. Correction of a Factor VIII genomic inversion with designer-recombinases. Nat Commun. 2022 Jan. 20; 13(1):422. doi: 10.1038/s41467-022-28080-7. PMID: 35058465; PMCID: PMC8776779.
[0268] Low B E, Hosur V, Lesbirel S, Wiles M V. Efficient targeted transgenesis of large donor DNA into multiple mouse genetic backgrounds using bacteriophage Bxb1 integrase. Sci Rep. 2022 Mar. 31; 12(1):5424. doi: 10.1038/s41598-022-09445-w. PMID: 35361849; PMCID: PMC8971409.
[0269] Needleman S B, Wunsch C D. A general method applicable to the search for similarities in the amino acid sequence of two proteins. JMB 1970 Vol.: 48(3):443-453.
[0270] Olivares E C, Hollis R P, Calos M P. Phage R4 integrase mediates site-specific integration in human cells. Gene. 2001 Oct. 31; 278(1-2):167-76. doi: 10.1016/s0378-1119(01)00711-9. PMID: 11707334.
[0271] Pearson W R and Lipman D J. 1988. Proc. Natl. Acad. Sci. USA: 2444-2448.
[0272] Pellenz S, Phelps M, Tang W, Hovde B T, Sinit R B, Fu W, Li H, Chen E, Monnat R J jr. New Human Chromosomal Sites with “Safe Harbor” Potential for Targeted Transgene Insertion. Hum Gene Ther. 2019 Jul. 1; 30(7): 814-828.
[0273] Rognes T, Flouri T, Nichols B, Quince C, Mahé, F. VSEARCH: a versatile open source tool for metagenomics. PeerJ 2016, 1-22.
[0274] Russell J P, Chang D W, Tretiakova A, Padidam M. Phage Bxb1 integrase mediates highly efficient site-specific recombination in mammalian cells. Biotechniques. 2006 April; 40(4):460, 462, 464. doi: 10.2144/000112150. PMID: 16629393.

[0275] Rutherford K, Yuan P, Perry K, Sharp R, Van Duyne G D. Attachment site recognition and regulation of directionality by the serine integrases. Nucleic Acids Res. 2013 September; 41(17):8341-56. doi: 10.1093/nar/gkt580. Epub 2013 Jul. 2. PMID: 23821671; PMCID: PMC3783163.
[0276] Smith M C M. Phage-encoded Serine Integrases and Other Large Serine Recombinases. Microbiol Spectr. 2015 August; 3(4). doi: 10.1128/microbiolspec.MDNA3-0059-2014. PMID: 26350324.
[0277] Thomason L C, Calendar R, Ow D W. Gene insertion and replacement in Schizosaccharomyces pombe mediated by the Streptomyces bacteriophage phiC31 site-specific recombination system. Mol Genet Genomics. 2001 August; 265(6):1031-8. doi: 10.1007/s004380100498. PMID: 11523775.
[0278] Thorpe H M, Smith M C. In vitro site-specific integration of bacteriophage DNA catalyzed by a recombinase of the resolvase/invertase family. Proc Natl Acad Sci USA. 1998 May 12; 95(10):5505-10. doi: 10.1073/pnas.95.10.5505.
[0279] Thorpe H M, Wilson S E, Smith M C. Control of directionality in the site-specific recombination system of the Streptomyces phage phiC31. Mol Microbiol. 2000 October; 38(2):232-41. doi: 10.1046/j.1365-2958.2000.02142.x. PMID: 11069650.
[0280] Thyagarajan B, Olivares E C, Hollis R P, Ginsburg D S, Calos M P. Site-specific genomic integration in mammalian cells mediated by phage phiC31 integrase. Mol Cell Biol. 2001 June; 21(12):3926-34. doi: 10.1128/MCB.21.12.3926-3934.2001. PMID: 11359900; PMCID: PMC87055.
[0281] Van Duyne G D, Rutherford K. Large serine recombinase domain structure and attachment site binding. Crit Rev Biochem Mol Biol. 2013 September-October; 48(5):476-491. doi: 10.3109/10409238.2013.831807. Epub 2013 Aug. 28. PMID: 23980849.
[0282] Xu Z, Lee N C, Dafhnis-Calas F, Malla S, Smith M C, Brown W R. Site-specific recombination in Schizosaccharomyces pombe and systematic assembly of a 400 kb transgene array in mammalian cells using the integrase of Streptomyces phage phiBT1. Nucleic Acids Res. 2008 January; 36(1):e9. doi: 10.1093/nar/gkm1123. Epub 2007 Dec. 20. PMID: 18096621; PMCID: PMC2248738.
[0283] Yamaguchi S, Kazuki Y, Nakayama Y, Nanba E, Oshimura M, Ohbayashi T. A method for producing transgenic cells using a multi-integrase system on a human artificial chromosome vector. PLoS One. 2011 Feb. 24; 6(2):e17267. doi: 10.1371/journal.pone.0017267. PMID: 21390305; PMCID: PMC3044732.
[0284] Yarnall M T N, Ioannidi E I, Schmitt-Ulms C, Krajeski R N, Lim J, Villiger L, Zhou W, Jiang K, Garushyants S K, Roberts N, Zhang L, Vakulskas C A, Walker J A 2nd, Kadina A P, Zepeda A E, Holden K, Ma H, Xie J, Gao G, Foquet L, Bial G, Donnelly S K, Miyata Y, Radiloff D R, Henderson J M, Ujita A, Abudayyeh O O, Gootenberg J S. Drag-and-drop genome insertion of large sequences without double-strand DNA cleavage using CRISPR-directed integrases. Nat Biotechnol. 2023 April; 41(4):500-512. doi: 10.1038/s41587-022-01527-4. Epub 2022 Nov. 24. PMID: 36424489; PMCID: PMC10257351.
[0285] Zhu F, Gamboa M, Farruggio A P, Hippenmeyer S, Tasic B, Schüle B, Chen-Tsai Y, Calos M P. DICE, an efficient system for iterative genomic editing in human pluripotent stem cells. Nucleic Acids Res. 2014 March; 42(5):e34. doi: 10.1093/nar/gkt1290. Epub 2013 Dec. 4. PMID: 24304893; PMCID: PMC3950688.
[0286] Zurek P J., Knyphausen P., Neufeld K., Pushpanath A., Hollfelder F. (2020). UMI-linked consensus sequencing enables phylogenetic analysis of directed evolution. Nature Communications 11; available from: https://doi.org/10.1038/s41467-020-19687-9.

1. Method for generating a target-specific large serine recombinase (LSR), the method comprising the steps of:
a) generating a plurality of first variants of an LSR by introducing one or more mutations into a sequence encoding the LSR;
b) generating a library of expression vectors, wherein each expression vector comprises a first region comprising the sequence encoding one of the first variants of the LSR from among the plurality, and a second region comprising at least two first target sites of the LSR, wherein the two first target sites are different from each other;
c) introducing the library of expression vectors into host cells;
d) culturing the host cells and expressing the first variant LSR;
e) isolating plasmid DNA from the culture of host cells;
f) determining whether a portion of the second region on the expression vector has been excised between the two first target sites by the first variant LSR;
g) generating a plurality of second LSR variants by introducing one or more mutations into the sequence encoding those first LSR variants that excised the portion of the second region on the expression vector between the two first target sites;
h) repeating steps b) to f) optionally with at least one second target site, wherein the at least one second target site differs from the first target sites in at least one nucleotide.

2. The method according to claim 1, further comprising the step of repeating steps g) and h), preferably wherein steps g) and h) are repeated at least twice to at least 30 times.

3. The method according to claim 1 or 2, wherein the LSR in step a) as basis for the plurality of first variant LSRs is a naturally occurring LSR.

4. The method according to any one of claims 1 to 3, wherein the two target sites in the second region of the expression vector are spaced apart by at least 50 nucleotides.

5. The method according to any one of claims 1 to 4, wherein the determining step f) comprises:
i) sequencing of the first and the second region of the expression vector; or ii) performing restriction digestion on the sequence of the expression vector comprising the two target sites followed by analysis of the digestion fragments.

6. The method according to any one of claims 1 to 5, further comprising the step of removing inactive variants of the variant LSR from the library of expression vectors.

7. A variant large serine recombinase (LSR) obtainable by the method according to any of claims 1 to 6, wherein the amino acid sequence of the variant LSR differs in at least one amino acid from the amino acid sequence of the LSR from which the variant is generated in step a), and from the amino acid sequence of any other naturally occurring serine recombinase, preferably wherein the variant comprises or consists of an amino acid sequence having at least 85% identity to one of SEQ ID NOs: 14, 17 to 35, 38 to 56, 60 to 8391, 8395, 8398 to 8403, 8406 to 8412, 8415 to 8422, 8425 to 8429, and 8430 to 13115.

8. The variant LSR according to claim 7, wherein the variant LSR is a variant of an LSR selected from the group consisting of A118, TP901, φRV1, Bxb1, C31, R4, Wβ, Tnpx, Cp36, Dn29, Kp03, Nm60, Pa01, Si74.

9. A nucleic acid or group of nucleic acids encoding a variant LSR according to claim 7 or 8.

10. An expression vector comprising a nucleic acid or group of nucleic acids according to claim 9.

11. A system for integrating a donor DNA into a target nucleic acid, the system comprising
a polypeptide comprising a variant LSR according to claim 7 or 8, or a nucleic acid encoding the same, and
a donor nucleic acid to be inserted into the target nucleic acid.

12. A pharmaceutical composition comprising the variant LSR of claim 7 or 8, the nucleic acid or group of nucleic acids according to claim 9, or the expression vector according to claim 10, and optionally a pharmaceutically acceptable carrier.

13. Use of the variant LSR of claim 7 or 8, the nucleic acid or group of nucleic acids of claim 9, the expression vector of claim 10, the system of claim 11, or the pharmaceutical composition of claim 12, for integrating a nucleic acid sequence of interest into the genome of a subject or cell, wherein the cell does not include cells of the human germ line.

14. The variant LSR according to claim 7 or 8, the nucleic acid or group of nucleic acids of claim 9, the expression vector of claim 10, or the pharmaceutical composition of claim 12 for use in medicine.

15. The variant LSR, the nucleic acid or group of nucleic acids, the expression vector, or the pharmaceutical composition for use of claim 14, for use in the treatment of a genetic disease or disorder, preferably wherein the genetic disease or disorder is a monogenetic disease or disorder.

The application's sequence listing, which the Patent Office published only in electronic form, follows.

SEQUENCE LISTING (13126 sequences)

SEQ ID NO: 1 - DNA, 15 bp, synthetic construct
  source 1..15: mol_type = other DNA
tttgaagaccccacc

SEQ ID NO: 2 - DNA, 23 bp, synthetic construct
  source 1..23: mol_type = other DNA
agcttgcatgcctgcagatcgag

SEQ ID NO: 3 - DNA, 15 bp, synthetic construct
  source 1..15: mol_type = other DNA
tttgaagacctaaac

SEQ ID NO: 4 - DNA, 24 bp, synthetic construct
  source 1..24: mol_type = other DNA
tcgaactgtaccggttgttagtga

SEQ ID NO: 5 - protein, 485 aa, unidentified
MTKKVAIYTRVSTTBQAEEGFSIBEQIBRLTKYAEAMGWQVSBTYTBAGFSGAKLERPAMQRLIBBIEBKAFBTVLVYKLBRLSRSVRBTLYLVKBVFTKBKIBFISLBESIBTSSAMGSLFLTILSAIBEFEREBIKERMTMGKLGRAKSGKSMMWTKTAFGYYHBRKTGILEIVPLQATIVEQIFTBYLSGISLTKLRBKLBESGHIGKBIPWSYRTLRQTLBBPVYCGYIKFKBSLFEGMHKPIIPYETYLKVQKELEERQQQTYERBBBPRPFQAKYMLSGMARCGYCGAPLKIVLGHKRKBGSRTMKYHCABRFPRKTKGITVYBBBKKCBSGTYBLSBLEBTVIBBLIGFQEBBBSLLKIIBGBBQPILBTSSFKKQISQIBKKIQKBSBLYLBBFITMBELKBRTBSLQAEKKLLKAKISEBKFBBSTBVFELVKTQLGSIPIBELSYBBKKKIVBBLVSKVBVTABBVBIIFKFQLA

SEQ ID NO: 6 - DNA, 66 bp, unidentified
  source 1..66: mol_type = other DNA
tccaactcgcttaattgcgagtttttatttcgtttatttcaattaaggtaactaaaaaactccttt

SEQ ID NO: 7 - DNA, 45 bp, unidentified
  source 1..45: mol_type = other DNA
ctgataattgccaacacaattaacatctcaatcaaggtaaatgct

SEQ ID NO: 8 - protein, 469 aa, unidentified
MRYTTPVRAAVYLRISEBRSGEQLGVARQREBCLKLCGQRKWVPVEYLBBBVSASTGKRRPAYEQMLABITAGKIAAVVAWBLBRLHRRPIELEAFMSLABEKRLALATVAGBVBLATPQGRLVARLKGSVAAHETEHKKARQRRAARQKAERGHPBWSKAFGYLPGPBGPEPBPRTAPLVKQAYABILAGASLGBVCRQWBBAGAFTITGRPWTTTTLSKFLRKPRBAGLRAYKGARYGPVBRBAIVGKAQWSPLVBEATFWAAQAVLBAPGRAPGRKSVRRHLLTGLAGCGKCGBHLAGSYRTBGQVVYVCKACHGVAILABBIEPILYHIVAERLAMPBAVBLLRREIHBAAEAETIRLELETLYGELBRLAVERAEGLLTARQVKISTBIVBAKITKLQARQQBQERLRVFBGIPLGTPQVAGMIAELSPBRFRAVLBVLAEVVVQPVGKSGRIFBPERVQVBWR

SEQ ID NO: 9 - DNA, 52 bp, unidentified
  source 1..52: mol_type = other DNA
gtagtgtatctcacaggtccacggttggccgtggactgctgaagaacattcc

SEQ ID NO: 10 - DNA, 40 bp, unidentified
  source 1..40: mol_type = other DNA
gaaggtgttggtgcggggttggccgtggtcgaggtggggt

SEQ ID NO: 11 - protein, 452 aa, unidentified
MKAAIYIRVSTQEQVEBYSIQAQTEKLTALCRSKBWBVYBIFIBGGYSGSBMBRPALBEMLSKLHEIBAVVVYRLBRLSRSQRBTITLIEEYFLKBBVEFVSLSETLBTSSPFGRAMIGILSVFAQLERETIRBRMVMGKIKRIEAGLPLTTAKGRTFGYBVIBTKLYIBEEEAKQLQLIYBIFEEEQSITFLQKRLKKLGFKVRTYBRYBBWLTBBLYCGYVSYKBKVHVKGIHEPIISEEQFYRVQEIFTRMGKBPBMBRBSASLLBBLVVCSKCGLGFVHRRKBTMSRGKKYHYRYYSCKTYKHTHELEKCGBKIWRABKLEELIIBRVBBYSFASRBVBKEBELBSLBEKLKIEHAKKKRLFBLYIBGSYEVSELBSMMBBIBAQIBYYESQIEABEELKKBKKIQEBLABLATVBFBSLEFREKQLYLKSLIBKIYIBGEQVTIEWL

SEQ ID NO: 12 - DNA, 56 bp, unidentified
  source 1..56: mol_type = other DNA
tgtttagttcctcgttttctctcgttggaagaagaagaaacgagaaactaaaatta

SEQ ID NO: 13 - DNA, 56 bp, unidentified
  source 1..56: mol_type = other DNA
gtaactttttcggatcaagctatgaaggacgcaaagagggaactaaacacttaatt

SEQ ID NO: 14 - protein, 485 aa, synthetic construct
MTKKVAIYTRVSTTBQAEEGFSIBEQIBRLTKYAEAMGWQVSBTYTBAGLSGAKLERPAMQRLIBBIEBKAFBTVLVYKLBRLSRSVRBTLYLVKBVFTKBKIBFISLBESIBTSSAMGSLFLTILSAIBEFEREBIKERMTMGKLGRAKSGKSMMWAKTAFGYYHBRKTGILEIVPLQATIVEQIFTBYLSGTSLTRLRBKLBESGHIGKBIPWSYRTLRQTLVBPVYCGYIKFKBSLFEGMHKPIISYETYLKVQKELEERQQQTYERBBBPRPFQAKYMLSGMARCGYCGAPLRIVLGHKRKBGSRTMKYHCABRFPRKTKGVTVYBBBKKCBSGTYBLSSLEBTVIBSLIGFQEBBBSLLKIIBGBBQPILBTSGFKEQISQIBKKIQKBSBLYLBBFITMBELKBRTBSLQAEKRLLEAKISEBKFBBSTBVFELVKTQLGSIPIBELSYBBKKKIVBBLVSKVBVTABBVBIIFKFQLA

SEQ ID NO: 15 - DNA, 45 bp, synthetic construct
  source 1..45: mol_type = other DNA
ctaataatacccaacagaattaacatctcaatcaaggtaaatgct

SEQ ID NO: 16 - DNA, 45 bp, synthetic construct
  source 1..45: mol_type = other DNA
ctgataattgccaacacaattaacttctcaaacaaggtaaatgct

SEQ ID NO: 17 - protein, 485 aa, synthetic construct
MTKKVAIYTRVSTTBQAEEGFSIBEQIERLTKYAEAMGWQVSBTYTBAGLSGAKLERPAMQRLIBBIEBKAFBTVLVYKLBRLSRSVRBTLYLVKBVFTKBKIBFISLBESIBTSSAMGSLFLTILSAIBEFEREBIKERMTMGKLGRAKSGKSMMWTKTAFGYYHBRKTGILEIVPLQATIVEQIFTBYLSGISLTKLRBKLBESGHIGKBIPWSYRALRQTLBBPVYCGYIKFKBSLFEGMHKPIIPYETYLKVQKELEERQQQAYERBBBPRPFQAKYMLSGMARCGYCGAPLRIVLGHKRKBGSRTMKYHCABRFPRKTKGVTVYBBBKKCBSGTYBLSBLEBTVIBBLVGFQEBBBSLLKFIBGBBQPILBTSSIEKQISQIBKKIQKBSBLYLBBFITMBELKERTBSLQAEKKLLKAKISEBKFBBGTBVLELVKTQLGSIPIBELSYBBQKKIVBBLVSKVBVTABBVBIIFKFQLA

SEQ ID NO: 18 - protein, 485 aa, synthetic construct
MTKKVAIYTRVSTTBQAEEGFSIBEQIBRLTKYAEAMGWQVSBTYTBAGFSGAKLERPAMQRLIBBIEBKAFBTVLVYKLBRLSRSVRBTLYLVKBVFTKBKIBFISLSESIBTSSAMGSLFLTILSAIBEFEREBIKERMTMGKLGRAKSGKSMMWTKTAFGYYHBRKTGILEIVPLQATIVEQIFTBYLSGISLTKLRBKLBESGHIGKBIPWSYRTLRQTLBBPVYCGYIKFKBSLFEGMHKPIIPYETYLKVQKELEERQQQAYERBBBPRPFQAKYMLSGVARCGYCGAPLRVVLGHKRKBGSRTMKYHCABRFPRKTKGVTVYBBBRKCBSGTYBLSBLEBTVIBSLIGFQEBBBGLLRIIBGBBQPILBTSSLKKQISQIBEKIQKBSBLYLBBFITMBELKBRTBSLQAEKKLLKAKISEBKFBBSTBVFELVKTQLGSIPIBELSYBBKKKIVBBLVSKVBVTABBVBIIFKFQLA

SEQ ID NO: 19 - protein, 485 aa, synthetic construct
MTKKVAIYTRVSTTBQAEEGFSIBEQIBRLTKYAEAMGWQVGBTYTBAGLSGAKLERPAMQRLIBBIEBKAFBTVLVYKLBRLSRSVRBTLYLVKBVFTKBKIBFISLBESIBTSSAMGSLFLTILSAIBEFEREBIKERMTMGKLGRAKSGKSMMWTKTAFGYYHBRKTGILEIVPLQATIVEQIFTBYLSGISLTKLRBKLBESGHIGKBIPWSYRTLRQTLGBPVYCGYIKFKBSLFEGMHKPIIPYETYLKVQKELEERQQQTYERBBBPRPFQAKYMLSGMARCGYCGAPLRIVLGHKRKBGSRTMKYHCABRFPRKTKGVTVYBBBKKCBSGTYBLCBLEBTVIBBLIGFQEBBBSLLKIIBGBHQPILBTSSFKKQISQIBKKIQKBGBLYLBBFITMBELKBRTBSLQAEKKLLKAKISEBKFBBSTBVFELVKTQLGSIPIBELSYBBKKKIVBSLVSKVBVTABBVBIIFKFQLA

SEQ ID NO: 20 - protein, 485 aa, synthetic construct
MTKKVAIYTRVSTTBQAEEGFSIBEQVBRLTKYAEAMGWQVSBTYTBAGFSGAKLERPAMQRLIBBIEBKAFBTVLVYKLBRLSRSVRBTLYLVKBVFTKBKIBFISLBESIBTSSAMGSLFLTILSAIBEFEREBIKERMTMGKLGRAKSGKSMMWTKTAFGYYHBRKTGILEIVPLQATIVEQIFTBYLSGISLTRLRBKLBESGHIGKBIPWSYRALRQTLVBPVYCGYIKFKGSLFEGMHKPIIPYETYLKVQRELKERQQQTYERBBBPRPFQAKYMLSGVARCGYCGAPLRIVLGHKRKBGSRTMKYHCABRFPRKTKGVTVYBBBKKCBSGTYBLSBLEBTVIBBLIGFQEBBBSLLKIIBGBBQPILBTSSFEKQISQIBKKIQKBSBLYLBBFITMBELKBRTBSLQAEKKLLKAKISEBKFBBSTBVFELVKTQLGGIPIBELSYBBKKKIVBBLVSKVBVTABBVBIIFKFQLA

SEQ ID NO: 21 - protein, 485 aa, synthetic construct
MTKKVAIYTRVSTTBQAEEGFSVBEQIBRLTKYAEAMGWQVSBTYTBAGLSGAKLERPAMQRLIBBIEBKAFBTVLVYKLBRLSRSVRBTLYLVKBVFTKBKIBFISLBESIBTSSAMGSLFLTILSAIBEFEREBIKERMTMGKLGRAKSGKSMMWTKTAFGYYHBRKTGILEIVPLQAAIVEQIFTBYLSGISLTKLRBKLBEGGHIGKBIPWSYRTLRQTLGBPVYCGYIKFKGGLFEGMHKPIIPYETYLKVQKELEERQQQTYERBBBPRPFQAKYMLSGMARCGYCGAPLRIVLGHKRKBGSRTMKYHCABRFPRKTKGVTVYBBBKKCBSGTYBLSBLEKTVIBBLIGFQEBBBSLLKIISGBBQPILBTSSFKEQISQIBKKIQKBSBLYLBBFITMBELKBRTBSLQAEKKLLKAKISEBKFSBSTBVFELVKTQLGSIPIBELSYBBKKKIVBBLVSKVBVTEBBVBIIFKFQLA

SEQ ID NO: 22 - protein, 486 aa, synthetic construct
MTKKVAIYTRVSTTBQAEEGFSIBEQIBRLTKAEAMGWQVSBTYTBAGHSGAKLERPAMQRLIBBIEBKAFBTVLVYKLBRLSRSVRBTLYLVKBVFTKBKIBFISLSESIBTSSAMGSLFLTILSAIBEFEREBIKERMTMGKLGRAKSGKSMMWTKTAFGYYHBRKTGILEIVPLQATIVEQIFTBYLSGISLTKLRBKLBESGHIGKBIPWSYRTLRQTLBBPVYCGYIKFKBSLFEGMHKPIIPYETYLKVQKELEERQQQTYERBBBPRPFQAKYMLSGIARCGYCGAPLRIVLGHKRKBGSRTMKYHCABRFPRKTKGVTVYBBBKKCBSGTYBLSBLEBTVIBBLVGFQEBBBSLLKIIBGBBQPILBTSSFKKQISQIBKKIQKBSBLYLBBFITMBELKBRTBSLRAEKKLLKAKIGEBBLSBSTBVFELVKTQLGSIPIBELSYBBKKKIVBBLVSKVBVTABBVBIIFKFQLANA

SEQ ID NO: 23 - protein, 485 aa, synthetic construct
MTKKVAIYTRVSTTBQAEEGFSIBEQIBRLTKYAEAMGWQVSBTYTBAGLSGAKLERPAMQRLIBBIESKAFBTVLVYKLBRLSRSVRBTLYLVKBVFTKBKIBFISLBESIBTSSAMGSLFLTILSAIBEFEREBIKERMSMGKLGRAKSGKSMMWTKTAFGYYHBRKTGILEIVPLQATIVEQIFTBYLSGISLTKLRBKLBESGHIGKBIPWSYRTLRQTLBBPVYCGYIKFKBSLFEGMHKPIIPYETYLKVQKELEERQQQTYERBBBPRPFQAKYMLSGMARCGYCGAPLRIVLGHKRKBGSRTMKYHCABRFPRKTKGVTVYBBBKKCBSGTYBLSBLEBTVIBBLIGFQEBBBSLLKIIBGBBQPILBTSSFEKQISQIBKKIQKBSBLYLBBFITMBELKBRTBSLQAEKKLLKAKISEBKFBBSTBVFELVKTQLGSIPIBELSYBBKKKIVBBLVSKVBVTABBVBIIFKFQLA

SEQ ID NO: 24 - protein, 485 aa, synthetic construct
MTKKVAIYTRVSTTBQAEEGFSIBEQIBRLTKYAEAMGWQVSBTYTBAGLSGAKLERPAMQRLIBBIEBKAFBTVLVYKLBRLSRSVRBTLYLVKBVFTKBKIBFISLBESIBTSSAMGSLFLTILSAIBEFEREBIKERMTMGKLGRAKSGKSMMWTKTAFGYYHBRKTGILEIVPLQATIVEQIFTBYLSGISLTKLRBKLBESGHIGKBIPWSYRTLRQTLBBPVYCGYIKFKBSLFEGMHKPIIPYETYLRVQKELEERQQQTYERBBBPRPFQAKYMLSGMARCGYCGAPLRIVLGRKRKBGSRTMKYHCABRFPRKAKGVTVYBBBKKCBSGTYBLSBLEBTVIBSLIGFQEBBBSLLKIIBGYSQPILBTGSLKKQISQIBKKIQKBSBLYLBBFITMBELKBRTBSLQAEKKLLKAKISGBKFBBSTBVFELVKTQLGSTPIBELSYEBKKKIVBBLVSKVBVTABBVBIIFKFQLA

SEQ ID NO: 25 - protein, 485 aa, synthetic construct
MTKKVAIYTRVSTTBQAEEGFSIBEQIGRLTKYAEAMGWQVSBTYTBAGISGAKLERPAMQRLIBBIEBKAFBTVLVYKLBRLSRSVRBTLYLVKBVFTKBKIBFISLBESIBTSSAMGSLFLTILSAIBEFEREBIKERMTMGKLGRAKSGKSMMWTKTAFGYYHBRKTGILEIVPLQATIVEQIFTBYLSGISLTKLRBKLBESGHIGKBIPWSYRTLRQTLBBPVYCGYIKFKBSLFEGMHRPIIPYETYLKVQKELEERQQQTYERBBBPRPFQAKYMLSGMARCGYCGAPLKIVLGHKRKBGSRTMKYHCABRFPRKTKGVTVYBBBKKCBSGTYBLSBLEBTVIBBLVGFQEBBBSLLKIIBGBBQPILBTSSIKKQISQIBKKIQKBSBLYLBBFITMBELKBRTGSLQAEKKLLKAKISETKFBBSTBVFELVKTQLGBIPIBELSYBBKKKIVBBLVSKVBVTABBVBIIFKFQLA

SEQ ID NO: 26 - protein, 485 aa, synthetic construct
MTKKVAIYTRVSTTBQAEEGFSIBEQIBRLTKYAEAMGWQVSBTYTBAGFSGTKLERPAMQRLIBBIEBKAFBTVLVYKLBRLSRSVRBTLYLVKBVFTKBKIBFISLBESIBTSSAMGSLFLTILSAIBEFEREBIKERMTMGKLGRAKSGKSMMWTKTAFGYYHBRKTGILEIVPLQATIVEQIFTBYLSGISLTKLRBKLBESGHIGKBIPWSYRTLRQTLBBPVYCGYIKFKGSLFEGMHRPIIPYETYLKVQKELEERQQQTYERBBBPRPFQAKYMLSGMARCGYCGAPLKIVLGHKRKBGSRTMKYHCABRFPRKTKGITVYBBBKKCBSGAYBLSBLEBTVIBILIGLQEBBGSLLKIIBGBBQPILBTSSFKKQISRIBKKIQKBSBLYLBBFITMBELRBRTBSLQAEKKLLKAKISEBKFBBSTBVFELVKTQLGSIPISELSYBBKKKIVBBLVSKVBVTABBVVIIFKFQLA

SEQ ID NO: 27 - protein, 485 aa, synthetic construct
MTKKVAIYTRVSTTBQAEEGFSIBEQIBRLTKYAEAMGWQVSBTYTBAGLSGAKLERPAMQRLIBBIEBKAFBTVLVYKLBRLSRSVRBTLYLVKBVFTKBKIBFISLBESIBTSSAMGSLFLTILSAIBEFEREBIKERMTMGKLGRAKSGKSMMWTKTAFGYYHBRKTGILEIVPLQATIVEQIFTBYLSGISLTKLRBKLBESGHIGKBIPWSYRTLRQTLBBPVYCGYIKFKBSLFEGMHKPIIPYETYLKVQKELEERQQQTYERBBBPRPFQAKYMLSGMARCGYCGAPLKIVLGHKRKBGSRTMKYHCABRFPRKTKGVTVYBBBKKCBSGTYBLSBLEBTVIBBLIGFQEBBBSLLKIIBGBBQPILBTSSFKBQISQIBKKIQKBSBLYLBBFITMBELKARTBSLQAEKKLLKAKISEBKFBBSTBVFELVKTQLGSIPIBELSYBBKKKIVBBLVSKVBVTABBVBIIFKFQLA

SEQ ID NO: 28 - protein, 485 aa, synthetic construct
MTKKVAIYTRVSTTBQAEEGFSIBEQIBRLTKYAEAMGWQVSGTYTBAGFSGAKLERPAMQRLIBBIEBKAFBTVLVYKLBRLSRSVRGTLYLVKBVFTKBKIBFVSLBESIBTSSAMGSLFLTILSAIBEFEREBIKERMTMGKLGRAKSGKSMMWTKTAFGYYHBRKTGILEIVPLQATIVEQIFTBYLSGISLTKLRBKLBESGHIGKBIPWSYRTLRQTLBBPVYCGYIKFKBSLFEGMHKPIIPYETYLKVQKELEERQQQTCERBBBPRPFQAKYMLSGMARCGYCGAPLRIVLGHKRKBGSRTMKYHCABRFPRKTRGVTVYBBBKKCBSGTYBLSBLEBTVIGBLIGFQEBBBSLLKIIBGBHQPILBTSSFKKQISQIBKKIQKBSBLYLBBFITMBELKBRTBSLQAEKMLLRAKISEBKFBBSTBVFELVKTQLGSIPIBELSYBBKKKIVBSLVSKVBVTABBVBIIFKFQLA

SEQ ID NO: 29 - protein, 485 aa, synthetic construct
MTKKVAIYTRVSTTBQAEEGFSIBEQIBRLTKYAEAMGWQVSBTYTBAGFSGAKLERPAMQRLIBBIEBKAFBTVLVYKLBRLSRSVRBTLYLVKBVFTRBKIBFISLBESIBTSSAMGSLFLTILSAIBEFEREBIKERMTMGKLGRAKSGKSMMWTKTAFGYYHBRKTGILEIVPLQATIVEQIFTBYLSGTSLTKLRBKLBESGHIGKBIPWSYRTLRQTLBBPVYCGYIKFKBSLFEGMHKPIIPYETYLKVQKELEERQQQTYERBBBPRPFQAKYMLSGMARCGYCGAPLKIVLGHKRKBGSRTMKYHCABRFPRKTKGVTVYBBBKKCBSGTYBLSILEBTVIBBLIGLQEBBBSLLKVIBGBBQPILBTSSFEKRISQIBKKIQKBSBLYLBBFITMBELKBRTBSLQAEKKLLRAKISEBKFBBSTBVFELVKTQLGSIPIBELSYBBKKRIVBBLVSKVBVTABBVBIIFKFQQA

SEQ ID NO: 30 - protein, 485 aa, synthetic construct
MTKKVAIYTRVSTTBQAEEGFSIBEQIBRLTKYAEAMGWQVSBTYTBAGSSGAKLERPAMQRLIBBIEBKAFBTVLVYKLBRLSRSVRBTLYLVKBVFTKBKIBFISLBESIBTSSAMGSLFLTILSAIBEFEREBIKERMTMGKLGRAKSGKSMMWTRTAFGYYHBRKTGILEIVPLQATIVEQIFTBYLSGISLTKLRBKLBESGHIGKBIPWSYRTLRQTLBBPVYCGYIKFKGSLFEGMHKPIIPYETYLKVQKELEERQQQTYERSBBPRPFQAKYMLSGMARCGYCGAPLRIVLGHKRKBGSRTMKYHCABRFPRKTKGATVYBBBKKCBSGTYBLSBLEBTVIBBLIGFQEBBGSLLKIIBGBBQPIPBTSSFEKQISQIBKKIQKBSBLYLBBFITMBELKARTBSLQAEKKLLKAKISEBKFBBSTBVFELVKTQLGSIPIBELSYBBKKKIVBBLVSKVBVTABBVBIIFKFQPA

SEQ ID NO: 31 - protein, 485 aa, synthetic construct
MTKKVAIYTRVSTTBQAEEGFSIBEQIBRLTKYAEAMGWQVSBTYTBAGFSGAKLERPAMQRLIBBIEBKAFBTVLVYKLBRLSRSVRBTLHLVKBVFTKBKIBFISLBESIBTSSAMGSLFLTILSAIBEFELEBIKERMTMGKLGRAKSGKSMLWTKTAFGYYHBRKTGILEIVPLQATIVEQIFTBYLSGISLTKLRBKLBESGPIGKBIPWSYRTLRQTLBBPVYCGYIKFKBSLFEGMHKPIIPYETYLKVQKELEERQQQAYKRBBBPRPFQVKYMLSGMARCGYCGAPLKIVLGHKRKBGSRTMKYHCABRFPRKTKGVTVYBBBKKCBSGTYBLSBLEBTVIBBLIGFQEBBBSLLRIIBGIBQPILBTSSFEKQISQIBKKIQKBSBLYLBBFITMBELKBRTBSLQAEKKLLKAKISEBKFBBSTBVFELVKTQLGSIPIBELSYBBKKKIVBBLVSKVBVTABBVBIIFKFQLA

SEQ ID NO: 32 - protein, 485 aa, synthetic construct
MTKKVAIYTRVSTTBQAEEGFSIBEQIBRLTKYAEAMGWRVSBTYTBAGLSGAKLERPAMQRLIBBIEBKAFBTVLVYKLBRLSRSVRBTLYLVKBVFTKBKIBFISLBESIBTSSAMGSLFLTILSAIBEFEREBIKERMTMGKLGRAKSGKSMMWTKTAFGYYHBRKTGILEIVPLQATIVEQIFTBYLSGISLTKLRBKLBESGHIGKBIPWSYRTLRQTLBBPVYCGYIRFKBSLFEGMHKPIIPYETYLKVQKELEERQQQAYERBBBPRPFQAKYMLSGMARCGYCGAPLRIVLGHKRKBGSRTMKYHCABRFPRKTKGVTVYBBBKKCBSGSYBLSBLEBAVIBILIGFQGBBBSLLKIIBGBBQPTLBTSSFEKQIGQIBKKIQKHSBLYLBBFITMBELKBRTBSLQAEKKLLKAKISEBKFBBSTBVFELVKTQLGSIPIBELSYBBKKKIVBBLVSKVBVTABBVBIIFKFQLA

SEQ ID NO: 33 - protein, 485 aa, synthetic construct
MTKKVAIYTRVSTTBQAEEGFSIBEQIBRLTKYAEAMGWQVSBTYTBAGFSGAKLERPAMQRLIBBIEBKAFBTVLVYKLBRLSRSVRBTLYLVKGVFTKBKIBFISLSESIBTSSAMGSLFLTILSAIBEFEREBIKERMTMGKLGRAKSGKSMMWTKTAFGYYHBRKTGILEIVPLQATIVEQIFTBYLSGISLTKLRBKLBESGHIGKEIPWSYRTLRQTLBBPVYCGYIKFKGSLFEGMHKPIIPYETYLKVQKELEBRQQQTYERBBBPRPFQAKYMLSGMARCGYCGAPLRIVLGHKRKBGSRTMKYHCABRFPRKTKGVTVYBBBKKCBSGTYBLGBLEBTVIBSLIGLQEBBBSLLKIIBGBBQPILBTSSFKKQISQIBKKIQRBSBLYLBBFITMBELKBRTBSLQAEKKLLKAKISEBKFBBSTBVFELVKTQLGSIPIBELSYBBKKKIVBBLVSKVBVTABBVBIIFKFQLA

SEQ ID NO: 34 - protein, 485 aa, synthetic construct
MTKKVAIYTRVSTTBQAEEGSSIBEQIBRLTKYAEAMGWQVSBTYTBAGFSGAKLERPAMQRLIBBIEBKAFBTVLVYKLBRLSRSVRBTLYLVKEVFTKBKIBFISLBESIBTSSAMGSLFLTILGAIBEFEREBIKERMTMGKLGRAKSGKSMMWTKTAFGYYHBRKTGILEIVPLQATIVEQIFTBYLSGISLTKLRBKLBESGHIGKBIPWSYRTLRQTLBBPVYCGYIKFKBSLFEGMHKPIIPYETYLKVQRELEERQQQAYERBBBPRPFQAKYMLSGMARCGYCGAPLRIVLGRRRKBGSRTMKYHCABRFPRKTKGVTVYBBBKKCBSGTYBLSBLEBTVIBBLIGFQEBSBSLLKIIBGBBQPILBTSSLKRQISQIBKKIQKBSBLYLBBFITMBELKBRTBSLRAEKKLLKAKISESKFBBSTBVLELVKTQLGSIPIBELSYBBKKKIVBBLVSKVBVTABBVBIIFKFQLA

SEQ ID NO: 35 - protein, 469 aa, synthetic construct
MCYTTPVRAAVYLRISEBRSGEQLGVARQREBCLKLCBQRKWVPVEYLBBBVSASTGKRRPAYEQMLABITAGKIAAVVAWBLBRLHRRPVELEAFMSLABEKRLALATVAGBVBLATPQGRLVARLKGCVAAHETEHKKARQRRAARQKAERGHPBWSKAFGYLPGPBGPEPBPRTAPLVKQAYABILAGASLGBVCRQWBBAGAFTITGRPWTTTTLSKFLRKPRBAGLRAYKGARYGPVBRBAIVGKAQWSPLVBEATFWAAQAVLBAPGRAPGRKSVRRHLLTGLAGCGKCGBHLAGSCRTBGRVVYVCKACHGVAILABBIEPILYHIVAERLAMPBAVBLLRREIHBTAEAETIHLELETLYGELBRLAVERAEGLLTARQVKISTBIVBAKITELQARQLBQERLRVLBGIPLGTPQVAGMIAELSPBRFRAVLBVLAEVVVQPVGRSGRTFBPERVQVBWR

SEQ ID NO: 36 - DNA, 40 bp, synthetic construct
  source 1..40: mol_type = other DNA
ggaggtgttggtgcggggttggccgtggtcgaggtggggt

SEQ ID NO: 37 - DNA, 40 bp, synthetic construct
  source 1..40: mol_type = other DNA
gaaggtgttggtccacggttggccgtggtcgaggtggggt

SEQ ID NO: 38 - protein, 469 aa, synthetic construct
MSYTTPVRAAVYLRISEBRSGEQLGVARQREBCLKLCBQRKWVPVEYLBBBVSASTGKRRPAYEQMLABITAGKIAAVVAWBLBRLHRRPIELEAFMGLABEKRLALATVAGBVBLATPQGRLVARLKGSVAAHETEHKKARQRRAARQKAERGYPBWSKAFGYLPGPBGPEPBPRTAPLVKQAYABILAGASLGBVCRQWBBAGAFTITGRPWTTTTLSKFLRKPRBAGLRAYKGARYGPVBRBAIVGKAQWSPLVBEATFWAAQAVLBAPGRAPGRKSVRRHLLTGLAGCGKCGBHLAGSYRTBGRVVYVCKACHGVAILABBIEPILYHIVAERLAMPBAVBVLRREIHBAAEAETIRLELETLYGELBRLAVERAEGLLTARQVKISTBIVBAKITKLQARQLBQERLRVLBGIPLGTPQVAGMIAELSPBRFRAVLBVLAEVVVQPVGKSGRTFBPERVQVBWR

SEQ ID NO: 39 - protein, 469 aa, synthetic construct
MSYTTPVRAAVYLRISEBRSGEQLGVARQREBCLKLCBQRKWVPVEYLBBBVSASTGRRRPAYEQMLABITAGKIAAVVAWBLBRLHRRPIELEAFMSLABEKRLALATVAGBVBLATPQGRLVARLKASVAAHETEHKKARQRRAARQKAERGHPBWSKAFGYLPGPBGPEPBPRTAPLVKQAYABILAGASLGBVCRQWBBAGAFTITGRPWTTTALSKFLRKPRBAGLRAYKGARYGPVBRBAIVGKAQWSPLVBEATFWAAQAVLBAPGRAPGRKSVRRHLLTGLAGCGKCGBHLAGSYRTBGRVVYVCKACHGVAILABBIEPILYHTVAERLAMPBAVGLLRREIHBAAEAETIRLELETLYGELBRLAVERAEGLLTARQVKISTBIVSAKIAKLQARQLBQGRLRVLBGIPLGTPQVAGVTAGLSPBRFRAVLBVLAEVVVQPVGKGGRIFBPERVQVBWR

SEQ ID NO: 40 - protein, 469 aa, synthetic construct
MSYTTPVRAAVYLRISEBRSGEQLGVARQREBCLKLCGQRRWVPVEYLBBBVSASTGKRRPAYEQMLABITAGKIAAVVAWBLBRLHRRPIELEAFMSLABEKRLALATVAGBVBLATPQGRLVARLKGCVAAHETEHKKARQRRAARQKAERGHPBWSKAFGYLPGPBGPEPBPRTAPLVKQAYABILAGASLGBVCRQWBBAGAFTITGRPWTTTTLSKFLRKPRBAGLRAYKGARYGPVBRBAIVGKAQWSPLVBEATFWAAQAVLBAPGRAPGRKSVRRHLLTGLAGCGKCGBHLAGSYRTBGQVVYVCKACHGVAILABBIEPILYHIVAERLAMPBAVBLLRREIHBAAEAETIRLELETLYGELBCLAVERAEGLLTARQVKIGTBIVBAKITKLQVRQLBQERLRVFBGIPLGTPQVASVIAELSPBRFRAVLBVLAEVVVQPVGKSGRIFSPERVQVBWR

SEQ ID NO: 41 - protein, 469 aa, synthetic construct
MSYTTRVRAAVYLRISEBRSGEQLGVARQREBCLKLCGQRKWVPVEYLBBBVSASTGKRRPAYEQMLABITAGKIAAVVAWBLBRLHRRPIELEAFMSLABEKRLALATVAGBVBLATPQGRLVARLKGCVAAHETEHKKARQRRAARQKAERGLPBWSKAFGYLPGPBGPEPBPRTAPLVKQAYABILAGASLGBVCRQWBGAGALTITGRPWTTTTLSKFLRKPRBAGLRAYKGARYGPVBRBAIVGKAQWSPLVBEATFWAAQAVLBAPGRAPGRKSVRRHLLTGLASCGKCGBHLAGSYRTBGRVVYVCKACHGVAILABBIEPILYHIVAERLATPBAVBLLRRBIHBAAEAEAIRLELETLYGELBRLAVERAEGLLTARQVKISTBIVBAKITKLQARQLBQERLRVFBGIPLGTPQVAGVIAELSPBRFRAVLBALAEVVVQPVGKSGRILBPERVQVBWR

SEQ ID NO: 42 - protein, 469 aa, synthetic construct
MSYTTPVRAAVYLRISEBRSGEQLGVARQREBCLKLCGQRKWVPVEYLBBBVSASTGKRRPAYEQMLABITAGKIAAVVAWBLBRLHRRPIELEAFMSLABEKRLALATVAGBVBLATPQGRLVARLKGSVAAHETEHKKARQRRAARQKAERGYPBWSKAFGYLPGPBGPEPBPRTAPLVKQAYABILAGASSGBVCRQWBBAGAFTITGRPWTTTTLSKFLRKPRBAGLRAYKGARYGPVBRBAIVGKAQWSPLVBEGTFWAAQAVLBAPGRAPGRKSVRRHLLTGLAGCGKCGBHLAGSYRABGRVVYVCKACHGVSILAVBIEPILYHIVAERLAMPBAVBLLRREIHBAAGAETIRLELETLYGELBRLAVERAEGLLTARQVKISTBVVBAKITELQARQLBQERLRVLBGIPLGTPQVAGMIAELSPBRFRAVLBVLAEVVVQPVGKSGRISBPERVQVBWR

SEQ ID NO: 43 - protein, 469 aa, synthetic construct
MSYTTPVRAAVYLRISEBRSGEQLGVTRQREBCLKLCGQRKWVPVEYLBBBVSASTGKRRPAYEQMLABITAGKIAAVVAWBLBRLHRRPIELEAFMSLABEKRLALATVAGBVBLATPQGRLVARLKGSVAAHETEHKKARQRRAARQKAERGLPBWSKAFGYRPGPBGPEPBPRTAPLVKQAYABILAGASLGBVCRQWBBAGASTTTGRPWTTTTLSKFLRKPRBAGLRAYKGACYGPVBRBAIVGKAQWSPLVBEATFWAAQAVLBAPGRAPGRKSVRRHLLTGLAGCGKCGBHLAGSCRTBGQVVYVCKACHGVAILABIIEPMLYHIVAERLAMPBAVBLLRREIHBAAEAETIRLELESLYGELBRLAVERAEGLLTARQVKISTBIVBAKITKLQARQLBQERLRVLBGIPLGTPQVAGMIAELSPBRFRAVLBVLAEVVVQPVGKSGRIFBPERVQVBWR

SEQ ID NO: 44 - protein, 469 aa, synthetic construct
MSYTTPVRAAMYLRISEBRSGEQLGVARQREBCLKLCGQRKWVPVEYLBBBVSASTGKRRPAYEQMLABITAGKITAVVAWBLBRLHRRPIELEAFMSLABEKRLALATVAGBVBLATPQGRLVARLKGSVAAHETEHKKARQRRAARQKAERGLPBWSKAFGYLPGPBGPEPBPRTAPLVKQAYABILAGASLGBVCRQWBGAGAFTITGRPWTTTTLSKFLRKPRBAGLRAYKGARYGPVBRBAIVGKAQWSPLVBEATFWAAQAVLBAPGRAPGRKSVRRHLLTGLAGCGKCGBHLAGSYRTBGRVVYVCKACHGVAILABBIEPVLYHIVAERLAMPBAVBLLRREIHBAAEAETIRLELETLYGELBRLAVERAEGLLTARQVKISTBIVBAKIAKLQARQLBQERLRVFBGIPLGTPQVAGVIAELSPBRFRAVLBVLAEVVVQPVGKCGRVSBPERVQVBWR

SEQ ID NO: 45 - protein, 469 aa, synthetic construct
MSYTTPVRAAVYLRISEBRSGEQLGVARQREBCLKLCGQHKWVPVEYLBBBVSASTGKRRPAYEQMLABIAAGKIAAVVAWBLBRLHRRPIELEAFMSLABEKRLALATVAGBVBLATPQGRLVARLKGCVAAHETEHKKARQRRAARQKAERGLPBWSKAFGYLPGPBGPEPBPRTAPLVKQAYABILAGASLGBVCRQWBBAGAFTITGRPWVTTTLSKFLRKPRBAGLRAYKGARYGPVBRBAIVGKAQWSPLVBEATFWAAQAVLBAPGRAPGKKSVRRHLLTGLAGCGKCGBHLAGSYRTBGRVVYVCKACHGVAILABBIEPILYHIVAERSAMPBAVBLLRREIHBAAEAETIRLELETLYGELBRLAVERAEGLLTARQVKISTBIVBAKITKLQARQQBQERLRVLBGIPLGTPQVAGTIAGLSPBRFRAVLBVLAEVVVQPVGKSGRIFBPERVQVBWR

SEQ ID NO: 46 - protein, 469 aa, synthetic construct
MCYTTPVRAAVYLRISEBRSGEQLGVARQREBCLKLCGQRQWVPVEYLBBBVSASTGKRRPAYEQMLABITAGKIAAVVAWBLBRLHRRPIELEAFMSLABEKRLALATVAGBVBLATPQGRLVARLKGSVAAHETEHKKARQRRAARQKAERGLPBWSRAFGYLPGPBGPEPBPRTAPLVKQAYABILAGASLGBVCRRWBBAGAFTITGRPWTTTTLSKFLRKPRBAGLRAYKGARYGPVBRBAIVGKAQWSPLVBEATFWAAQAVLBAPGRAPGRKSVRRHLLTGLAGCGKCGBHLAGSYRTBGQVVYVCKACHGVSILAVBIEPILYHVVAERMAMPBAVBLLRREIHBAAEAETIRLELETLYGELBRLAIERAEGLLTARQVKISTBIVBAKITKLQARQLBQVRLRVLBGIPLGTPQVAGMIAELSPBRFRAVLGVLAEVVVQPVGKSGRIFBPERVQVBWR

SEQ ID NO: 47 - protein, 469 aa, synthetic construct
MSYTTPVRAAVYLRISEBRSGEQLGVARQREBCLELCVQRKWVPVEYLBBBVSASTGKRRPAYEQMLABITAGKIAAVVAWBLBRLHRRPIELEAFMSLABEKRLALATVAGBIBLATPQGRLVARLKGSVAAHETEHKKARQRRAARQKAERGYPBWSKAFGYLPGPBGPEPBPRTAPLVKQAYABILAGASLGBVCRQWBBAGAFTITGRPWTTTTLSKFLRKPRBAGLRAYKGARYGPVBRBAIVGKAQWSPLVBEVTFWAAQAVLBAPGRAPGRKSVRRHLLTGLAGCGKCGBHLAGSYRTBGKVVYVCKACHGVAILABBIEPILYHIVAERLAMPBAVBLLRREIHBAAEAETIRLELVSLYGELBCLAVERAEGLLTARQVKISTBIVBAKITKLQACQLBQERLRVLGGIPLGTPQVAGMIAELSPBRFRAVLBVLAEVVVQPVGKSGRILBPERVQVBWR

SEQ ID NO: 48 - protein, 469 aa, synthetic construct
MSYTTPVRAAVYLRISEBRSGEQLGVARQREBCLKLCBQRKWVPVEYLBBBVSASAGKRRPAYEQMLABITAGKIAAVVAWBLBRLHRRPIELEAFMSLABEKRLALATVAGBVBLATPQGRLIARLKGSVAAHETEHKKARQRRAARQKAERGYPBWSKAFGYLPGPBGPEPBPRTAPLVKQAYABILAGASLGBVCRQWBBAGAFTITGRPWTTTTLSKFLRKPRBAGLRAYKGARYGPGBRBAIVGKAQWSPLVBEATFWTAQAVLBAPGRAPGRKSVRRHLLTGLAGCGKCGBHLAGSYRTBGRVVYVCKACHGVAILABBIEPILYHIVAERLAMPBAVBLLRREIHBVAEAETIRLELGTLYGELBRLAVERAEGLLTARQVKISTBVVBAKITKLQARQLBQERLRVFGGIPLGTPQVAGMIAKLSPBRFRAVLBVLAEVVVQPVGKSGRIFBPERVRVSWR

SEQ ID NO: 49 - protein, 471 aa, synthetic construct
MSYTTPVRAAVYLRISEBRSGEQLGVARQREBCLKLCBQRKWVPVEYLBBBVSASTGKRRPAYEQMLABITAGKIAAVVAWBLBRLHRRPVELEAFMSLABEKRLALATVAGBVBLATPQGRLVARLKGSVAAHETEHKKARQRRAARQKAERGHPBWSKAFGYLPGPBGPEPBPRTAPLVKQAYABILAGASLGBVCRQWBBAGAFTITGRPWTTTTLSKFLRKPRBAGLRAYKGARYGPVBRBAIVGKAQWSPLVBEATFWAAQAVLBAPGRAPGRKSVRRHLLTGLAGCGKCGBHLAGSYRTBGRVVYVCKACHGVAILABBIEPVLYHIVAERLAKPBAVBLLRREIHBAAEAETIRLELETLYGELBRLAVERAEGLLTARQVKISTBIVBAKITKLQARQLBQERLRVLBGIPLGTPQVAGMIAELSPBRFRAVLBVLAEVVVQPVGKSGRIFBPERVQVBWRNA

SEQ ID NO: 50 - protein, 469 aa, synthetic construct
MSYTTPVRAAVYLRISEBRSGEQLGVARQREBCLKLCBQRKWVPVEYLBBBVSASTGKRRPAYEQMLABITAGKIAAVVAWBLBRLHRRPVELEAFMSLABEKRLALATVAGBVBLATPQGRLVARLKGSVAAHETEHKKARQRRAARQKAERGYPBWSKAFGYLPGPBGPEPBPRTAPLVKQAYABILAGASLGBVCRQWBGAGAFTITGRPWTSTTLSKFLRKPRBAGLRAYKGARYGPVBRGAIVGKARWSPLVBEATFWAAQAVLBAPGRAPGRKSVRRHLLTGLAGCGKCGHHLAGSYRTBGQVVYVCRACHGVAILAGBIEPILYHIVAERLAMPBAVBLLRREIHGAAEAETIRLELETLYGELBRLAVERAEGLLTARQVKISTBIVBAKITKLQARQLBQERLRVLBGIPLGTPQVABMIAELSPBRLRTVLBVLVEVVVQPVGKGGRIFBPERVQVBWR

SEQ ID NO: 51 - protein, 469 aa, synthetic construct
MSYITPVRAAVYLRISEBRSGEQLGVARQREBCLKLCBQRKWVPVEYLBBBVSASTGKRRPAYEQMLABITAGKIAAVVAWBLBRLHRRPIELEAFMSLABEKRLALATVAGBVBLATPQGRLVARLKGSVAAHETEHKKARQRRAARQKAERGHPBWSKAFGYLPGPBGPEPBPRTAPLVKQAYABILAGASLGBVCRRWBBAGAFTITGRSWTTTTLSKFLRKPRBAGLRAYKGARYGPVBRBAIVGKAQWSPLVBEATFWAAQAVLBAPGRAPGRKSVRRHLLTGLAGCGKCGBHLAGSYRTBGRVVYVCKACHGVAILABBIEPILYHIVAERLAMPBAVBLLRREIHBAAEAETIRLELETLYGELBRLAVERAEGLLTARQVKISTBIVBAKITELQARQLBQERLRVLBGIPLGTPQVAGMIAELSPBRFRAVLBVLAEVVVQPVGKGGRIFBPERVQVBWR

SEQ ID NO: 52 - protein, 469 aa, synthetic construct
MSYTTPVRAAVYLRISEBRSGEQLGVARQREBCLKLCGQRKWEPVEYLBBBVSASTGKRRPAYEQMLABITAGKIAAVVAWBLBRLHRRPIELEAFMSLABEKRLALATVAGBVBLATPQGRLVARLKGSVAAHETEHKKARQRRAARQKAERGYPBWSKAFGYLPGPBGPEPBPRTAPLVKQAYABILAGASLGBVCRQWBGAGAFTITGRPWTTTALSKFLRKPRBAGLRAYKGARYGPVBRBAIVGKAQWSPLVBEATFWAAQAVLBAPGRAPGRKSVRRHLLTGLAGCGKCGBHLAGSYRTBGRVVYVCKTCHGVAILABBIEPILYHIVAERLAMPBAVBLLRREIHBAAEAEAIHLELETLYBELBRLAVERAEGLLTARQVEISTBIVBAKIAELQARQQBQERLRVLBGIPLGTPQVAGVIAELSPBRFRAVLBVLAEVVVQPVGKSGRIFBPERVQVBWR

SEQ ID NO: 53 - protein, 469 aa, synthetic construct
MSYSTPVRAAVYLRISEBRSGEQLGVARQREBCLKLCBQRKWEPVEYLBBBVSASTGKRRPAYEQMLABITAGKIAAVVAWBLBRLHRRPIELEAFMSLABEKRLALATVAGBVBLATPQGRLVARLKGSVAAHETEHKKARQRRAARQKAERGYPBWSKAFGYLPGPBGPEPBPRTAPLVKQAYABILAGASLGBVCRRWBAASAFTITGRPWTTTTLSKFLRKPRBAGLRAFKGARYGPVBRBAIVGKAQWSPLVBEATFWAAQAVLBAPGRAPGRKSVRRHLLTGLAGCGKCGBHLAGSYRTBGRVVYVCKACHGVAILABBIEPTLYHIVAERLAMPBAVGLLRREIHBAAEAESIRLELETLYGELBRLAVERAEGLLTARQVKIGTBIVBAKITKLQARQLBQERLRVFGGIPLGTPQVAGMIAELSPBRFRAVLBVLAEVVVQPVGKSGRIFBPERVQVBWR

SEQ ID NO: 54 - protein, 469 aa, synthetic construct
MSYTTPVRAAVYLRISEBRSGEQLGVARQREBCLKLCBQRKWVPVEYLBBBVSASTGKRRPAYEQMLABITAGKIAAVVAWBLBRLHRRPIELEAFMSLABEKRLALATVAGBVBLATPQGRLVARLKGSVAAHETEHKKARQRRAARQKAERGHPBWSKAFGYLPGPBGPEPBPRTAPLVKQAYABILAGASLGBVCRQWBBAGAFTITGRPWTTTTLSKFLRKPRBASLRAYKGARYGPVBRBAIVGKAQWSPLVBEATFWAAQAVLBAPGRAPGRKSVRRHLLTGLASCGKCGBHLAGSYRTBGRVVYVCKACHGVAILABBIEPILYRIVAERLAMPBAVBLLRREIHBAAEAETIHLELETLYGELBRLAVERAEGLLTARQVKISTBIVSAKIAKLQARQLBQERLRVFBGIPLGTPQVAGMIAGLSPBRFRAVLBALAEVVVQPVGKSGRIFBPERVQVBWR

SEQ ID NO: 55 - protein, 469 aa, synthetic construct
MCYTTPVRAAVYLRISEBRSGEQLGVARQREBCLKLCBQRKWEPVEYLBBBVSASTGKRRPAYEQMLABITAGKIAAVVAWBLBRLHRRPVELEAFMSLABEKRLALATVAGBVBLATPQGRLVARLKGSVAAHETEHKKARQRRAARQKAERGHPBWSKAFGYLPGPBGPEPBPRTAPLVKQAYABILAGASLGBVCRQWBBAGAFTTTGRPWTTTTLSKFLRKPRBAGLRAYKGARYGPVBRBAIVGKAQWSPLVBEATFWAAQAVLBAPGRAPGRKSVRRHLLTGLAGCGKCGBHLAGSYRTBGRVVYVCKACHGVAILAGBIEPILYHIVAERLAMPBAVBLLRREIHBAAEAEAIRLELETLYGELBCLAVERAEGLLTARQVKISTBIVBAKITKLRVRQQBQERLRVLBGIPLGAPQVAGMIAELSPBRFRAVLBVLAEVVVRPVGKSGRIFBPERVQVBWR

SEQ ID NO: 56 - protein, 452 aa, synthetic construct
MKAAIYIRVSTREQVEBYSIQAQTEKLTALCRSKBWBVYBIFIBGGYSGSBMBRPALBEMLGKLHEIBAVVVYRLBRLSRSQRBTITLIEEYFLKBBVEFVSLSETLBTSSPFGRAMIGILSVFAQLERETIRBRMVMGKIKRIEAGLPLTTAKGRTFGYBVIBTKLYIBEEEAKQLQLIYBIFEEEQSITFLQKRLKELGFKVRTYBCYBBWLTBBLYCGYVSYKBKVHVKGIHEPIISEEQFYRVQEIFTRMGKBPBMBRBSASLLBBLVVCSKCGLGFVHRRKBAMSRBKKYHYRYYSCKTYKHIHELEKCGBKIWRABKLEELIIBRVBBYSFASRBABKEBELBSLBEKLKIEHAKKKRLFBLYIBGSYEVSELBSMMBBIBAQIBYYESQIEABEELKKBKKIQEBLAYLATVBFBSLEFREKQLYLKSLIBKIYIBGEQVTIEWL

SEQ ID NO: 57 - DNA, 48 bp, synthetic construct
  source 1..48: mol_type = other DNA
actttttggcacctctcctcctgggtccctactaggggccagggcact

SEQ ID NO: 58 - DNA, 48 bp, synthetic construct
  source 1..48: mol_type = other DNA
acttattagtgccttttcacagtggcaggatagaaaaggttttacact

SEQ ID NO: 59 - DNA, 48 bp, synthetic construct
  source 1..48: mol_type = other DNA
acttgtccggcccggccaccccggggaggggtggaggtacaggacact

SEQ ID NO: 60 - protein, 452 aa, synthetic construct
MKAAIYIRVSTREQVEBYSIQAQTEKLTALCRSKBWBVYBIFIBGGYSGSBMBRPALBEMLSKLHEIBAVVVYRLBRLSRSQRBTITLIEEYFLKBBVEFVSLSETLBTSSPFGRAMIGILSVFAQLERETIRBRMVMGKIKRVEAGLPLTTAKGRTFGYBVIBTKLYIBEEEAKQLQLIYBIFEEEQSITFLQKRLKKLGFKVRTYBRYBBWLTBBLYCGYVSYKBKVHVRGIHEPIISEEQFYRVQEIFTRMGKBPBMBRBSASLLBBLVVCSKCGLSFVHRRKBAMSRBKKYHYRYYSCKTYKHIHELEKCGBKIWRABELEELIIBRVBBYSLASRBVBKBBELBSLBEKLKIEHAKKKRLFBLYIBGSFEVRELBSMMSBIBAQIBYYESQIEASEELKKBKKIQEBLABLATVBFBSLEFREKQLYLKSLIBKIYIBGEQVTIEWL

SEQ ID NO: 61 - protein, 452 aa, synthetic construct
MKAAIYIRVSTREQVEBYSIQAQTEKLTALCRSKBWBVYBIFTBGGYSGSBMBRPALBEMLSKLHEIBAVVVYRLBRLSRSQRBTITLIEEYFLKBBVEFVSLSETLBTSSPFGRAMIGILSVFAQLERETIRBRMTMGKIKRIEAGLPLTTAKGRTFGYBVIBTKLYIBEEEAKQLRLIYBIFEEEQSITFLQKRLKKLGLKVRTYSRYBBWLTBBLYCGYVSYKBKVHVKGIHEPIISEEQFYRVQEIFARMGKBPBMBRBSASLLBBLVVCSKCGLGFVHRRKBIMSHGKKYHYRYYSCKTYKHIHELEKCGBKIWRABKLEELIIBRVBSYSLVSRBVBKEBELBSLBEKLEIEHAKKRRLFBLYIBGSYEVSELBSMMBBIBAQIBYYESQIEABEELKRBKRIQEBLAYLATVBFBSLEFREKQLYLKSLIBKIYIBGEQVTIEWL

SEQ ID NO: 62 - protein, 452 aa, synthetic construct
MKAAIYIRVSTREQVEBYSIQAQTEKLTALCRSKBWBVYBIFIBGGYSGSBMBRPALBEMLSKLHEIBAVVVYRLBRLSRSQRBTITLIEEYFLKBBVEFVSLSETLBTSSPFGRAMIGILSVFAQLERETIRBRMVMGKIKRIEAGLPLTTAKGRTFGYBVIBTKLYIBEEEAKQLRLIYBIFEEEQSITFLQKRLKKLGYKVRTYBRYSBWLTBBLYCGYVSYKBKVHVKGIHEPIISEEQFYRVQEIFTRMGKBPBMBRBSASLLBBLVVCGKCGLGFVHRRKBAMSRBKKYHYRYYSCKTYKHIHELEKCGBKIWRABKLEELIIBRVBBYSTASRBVBKEBELBGLBEKLKVEHAKKKRLFBLYIBGSYEVSELVSMMBBIBAQIBYYESQIEABEELKKBKKIQEBLAYLATVBFBSLEFREKQLYLKSLIBKIYIBGEQVTIEWL

SEQ ID NO: 63 - protein, 452 aa, synthetic construct
MKAAIYIRVSTREQVEBYSIQAQTEKLTALCRSKGWBVYBIFIBGGYSGSBMBRPALBEMLSKLHEIBAVVVYRLBRLSRSQRBTITLIEEYFLKBBVEFVSLSETLBTSSPFGRAMIGILSVFAQLERETIRBRMVMGKIKRIEAGLPLTTAKGRTFGYBVIBSKLYIBEEEAKQLQLIYBIFEEEQSITFLQKRLKELGFKVRTYBCYBBWLTBBLYCGYVSYKBKVHVKGIHEPIISEEQFYRVQEIFTRMGKBPBMBRBSASLLBBLVVCSKCGLGFVHRRKBATSRBKKYHYRYYSCKTYKHIHELEKCGBKIWRABKLEELIIBRVBBYSLASRBABKEBELBSLBEKLKIEHAKKKRLFBLYIBGSYEVSELBSMMBBIBAQIBYYESQIEABEELEKBKKIQEBLABLATVAFBSLEFREKQLYLKSLIBKIYIBGEQVTIEWL

SEQ ID NO: 64 - protein, 452 aa, synthetic construct
MKAAIYIRVSTREQVEBYSIQAQTEKLTALCRSKBWBVYBIFIBGGYSGSBMBRPALBEMLSKLHEIBAVVVYRLBRLSRSQRBTITLIEEYFLKBBVEFVSLSETLBTSSPFGRAMIGILSVFAQLERETIRBRMVMGKIKRIEAGLPLTTAKGRTFGYBVIBTKLYIBEEEAKQLQLIYBIFEEEQSITFLQRRLKELGLKVRTYBRYSBWLTBBLYCGYVSYKBKVHVKGIHEPIISEEQFYRVQEIFTRMGKBPBMBRBSASLLBBLVVCSKCGLGFVHRRKBIMSRGKKYHYRYYSCKTYKHIHELEKCGBKIWRABKLEELIIBRVBYYSLASRBVBKEBELVSLBEKLKIEHAKKKRLFBLYIBGSYEVSELBSMMSBIBVQIBYYESQIEABEKQKKBKKIQEBLABLATVBFBSLEFREKQLYLKSLIBKIYIBGEQVTIEWL

SEQ ID NO: 65 - protein, 452 aa, synthetic construct
MKAAIYIRVSTREQVEBYSIQAQAEKLTALCRSKBWBVYBIFVBGGYSGSBMBRPALBEMLSKLHEIBAVVVYRLBRLSRSQRBTITLIEEYFLKBBVEFVSLSETLBTSSPFGRAMIGILSVFAQLERETIRBRMVMGKIKRIEAGLPLTTAKGRTFGYBVIBTKLYIBEEEARQLQLIYBIFEEEQSITFLQKRLKKLGFKVRTYBRYBBWLTBBLYCGYVSYKBKVHVKGIHBPIISEEQFYRVQEIFTRMGKBPBMBRBSASLLBBLVVCSKCGLSFVHRRKBAMSRBKKYHYRYYSCKTYKHIHELEKCGBKIWRABKLEELIIBRVBSYSLAGRBVBKEBELBSLBEKLKIERAKKKRLFBLYIBGSYEVSELBSMMBBIBAQIBYYESQIEABEELRKBRKIQEBLAHLATVBFBSLEFREKQLYLKSLIBKIYIVGEQVTIEWL

SEQ ID NO: 66 - protein, 452 aa, synthetic construct
MKAAIYIRVSTREQVEBYSIQAQTERLTALCRSKBWBVYBVFIBGGYSGSBMBRPALBEMLSKLHEIBAVVVYRLBRLSRSQRBTITLIEEYFLKBBVEFVSLSETLBTSSPFGRAMIGILSVFAQLERETIRBRMVMGKIKRIEAGLPLTTAKGRTFGYBVIBTKLYIBEEEAKQLQLIYBIFEEEQSITFLQRRLKKLGFKVRTYBRYBBWLTBBLYCGYVGYKBKVHVKGIHEPIISEEQFYRVQEIFTRMGKBPBMBRBSASLLBBLVVCSKCGLGFVHRRKBAMSRSKKYHYRYYSCKTYKHIHELEKCGBKIWRABKLEELIIBRVSBYSIASRBABKEBELBSLBEKLKIEHAKKKRLFBLYIBGBYEVSELBSIMBBIBAQIBYYESQIEABEELKKBKKIQGBLAYLATVBFBSLEFREKQLYLKSLIBKIYVBGEQVTIEWL

SEQ ID NO: 67 - protein, 452 aa, synthetic construct
MKAAIYIRVSTREQVEBYSIQAQTEKLTALCRSKBWBVYBIFIBGGYSGSBMBRPALBEMLSKLHEIBAVVVYRLBRLSRSQRBTITLIEEYFLKBBVEFVSLSETLBTSSPFGRAMIGILSVFAQLERETIRBRMVMGKIKRIEAGLPLTTAKGRTFGYBVIBTKLYIBEEEAKQLQLIYBIFEEEQSITFLQKRLKKLGFKVRTYBRYBBWLTBBLYCGYVSYKBKVHVKGIHEPIISEEQFYRVQEIFTRMGKBPBMBRBSASLLBBLVVCSKCGLGFVHRRKBAMSRBKKYHYRYYSCKTYKHIHELEKCGBKIWRABKLEELIIBRVBBYSFASHBABKEGELESLBEKLKIEHAKKKRLFBLYIBGSYEVSELBSMVBBIBAQIBYYESQIEABEELKKSKKIQEBLAGLATVBFBSLEFREKQLYLKSLIBKIYIBGEQVTIEWL

SEQ ID NO: 68 - protein, 452 aa, synthetic construct
MKAAIYIRVSTREQVEBYSIQAQTEKLTALCRSKBWBVYBIFIBGGYSGSBMBRPALBEMLGKLHEIBAVVVYRLBRLSRSQRBTITLIEEYFLKBBVEFVSLSETLBTSSPFGRAMIGILSVFAQLERETIRBRMVMGKIKRIEAGLPLTTAKGRTFGYBVIBTKLYIBEEEAKQLRLIYBIFEEEQSITFLQKRLKKLGFKVRTYBRYBBWLTBBLYCGYVSYKBKVHVKGIHEPIISEEQFYRVQEIFTRMGKBPBMBRBSASLLBBLVVCSKCGLGFVHRRKBAMSRGKKYHYRYYSCKTYKHIHELEKCGBKIWRABKLEELIIBRVBBYSLASRBVBKEBELBSLBEKLKIEHAKKRRLFBLYIBGSYEVSELBSMMBBIBAQIBYYESQIEABEELKKBKKIQEBLAYLATVBFBSLEFREKQLYLKSLIBKIYIBGEQVTIEWL

SEQ ID NO: 69 - protein, 452 aa, synthetic construct
MKAAIYIRVSTQEQVEBYSIQAQTEKLTALCRSKBWBVYBIFIBGGYSGSBMBRPALBEMLSKLHEIBAVVVYRLBRLSRSQRBTTTLIEEYFLKBBVEFVSLSETLBTSSPFGRAMIGILSVFAQLERETIRBRMEMGKIKRIEAGLPLTTAKGRTFGYBVIBTKLYIBEEEAKQLQLIYBIFEBEQSITSLQKRLKKLGFKVRTYBRYBBWLTBBLYCGYVSYKBKVHVKGIHEPIISEEQFYRVQEIFTRMGKBPBMBRBSASLLSBLVVCSKCGLSFVHRSKBTMSRGKKYHYRYYSCKTYKHTHELEKCGBKTWRABKLEELIIBRVBBYSFASRBEBKEBELBSLBEKLKIEHAKKKRLFBLYIBGSYEVSELBSMMBBIBAQISYYESQIEABEELKKBKKIQEBLABLATVBFBSLEFREKQLYLKSLISKIYIBGEQVTIEWL

SEQ ID NO: 70 - protein, 452 aa, synthetic construct
MKAAIYIRVSTQEQVEBYSIQAQAEKLTALCRSKBWBVYBIFIBGGYSGSBMBRPALBEMLSKLHEIBAVVVYRLBRLSRSQRBTTTLIEEYFLKBBVEFVSLSETLBTSSPFGRAMIGILSVFAQLERETIRBRMVMGKIKRIEAGLPLTTAKGRTFGYBVIBTKLYIBEEEAKQLQLIYBIFEEEQSITFLQKRLKKLGFKVRTYBRYBBWLTBBLYCGYVSYKBKVHVKGIHEPIISEEQFYRVQEIFTRMGKBPBMBRBSASLLSBLVVCSKCGLGFVHRSKBTMSRGKKYHYRYYSCKTYKHTHELEKCGBKTWRABKLEELIISRVIBYSFASRBVBKEBELBSLBEKLKIERAKKQRLFBLYIBGSYEVSELBSMMSBIBAQIBYYESQIEABEELKEBKRIQEBLABLAAVBFBSLEFREKQLYLKSLIBKIYIBGEQVTIEWL

SEQ ID NO: 71 - protein, 452 aa, synthetic construct
MKAAIYIRVSTQEQVGBYSIQAQTEKLTALCRSKBWBVYBIFIBGGYSGSBMBRPALBEMLSKLHEIBAVVVYRLBRLSRSQRBTTTLIEEYFLKBBVEFVSLSETLBTSSPFGRAMIGILSVFAQLERETIRBRMVMGKIKRIEAGLPLTTAKGRTFGYBVIBTKLYIBEEEAKQLQLIYBIFEEEQSITSLQKRLKKLGFKVRTYTRYSBWLTBBLYCGYVSYKBKVHVKGIHEPIISEEQFYRVQEIFTRMGKBPBMBRBSASLLBTLVVCSKCGLSFVHRSKBTMSRGKKYHYRYYSCKTYKHTHELEKCGBKTWRABKLEELIIBRVBBYSFASRBABKEBELBSLBEKLKIEHARKKRPFBLYIBGSYEVSELBSMMBBIBAQIBYYEBQIEABEELKKBKEIQEBLABLATVBFBSLEFREKQLYLKSLIBKIYIBGEQVTIEWL

SEQ ID NO: 72 - protein, 452 aa, synthetic construct
MKAAIYIRVSTQEQVEBYSIQAQTEKLTALCRSKBWBVYBIFIBGGYSGSBMBRPALBEMLSKLHEIBAVVVYRLBRLSRSQRBTTTLIEEYFLKBBVEFVSLSETLBTSSPFGRAMIGILSVFAQLERETIRBRMVMGKIKRIEAGLPLTTAKGRTFGYBVVBTKLYIBEEEAKQLQLIYBIFEEEQSITSLQKRLKKLGFKVRTYBRYBBWLTBBLYCGYVSYKBKVHVKGIHEPIISEEQFYRVQEIFTRTGKBPBMBRBSASLLBBLVVCSKCGLGFVHRSKBTMSRGKKYHYRYYSCKTYKHTHELEKCGBKTWRABKLEELIIBRVBBYSFASRBVBKEBELBSLBEKLKVEHAKKRRLFBLYIBGSYEVSELBSMMBBIBAQIBYYESQIEASEELKKBKKIQEBLABLATVBFBSLEFREKQLYLKSLIBKIYIBGEQVTIEWL

SEQ ID NO: 73 - protein, 452 aa, synthetic construct
MKAAIYIRVSTQEQVGBYSIQAQTEKLTALCRSKBWBVYBIFIBGGYSGSBMBRPALBEMLSKLHEIBAVVVYRLBRLSRSQRBTTTLIEEYFLKBBVEFVSLSETLBTSSPFGRAMIGILSVFAQLERETIRBRMVMGKIKRIEAGLPLTTAKGRTFGYBVIBTKLYIBEEEAKQLQLIYBIFEEEQSITFLQKRLKKLGFKVRTYBRYBBWLTBBLYCGYVSYKBRVHVKGIHEPIISEEQFYRVQEIFTRMGKBPBMBRBSASLLBGLVVCSKCGLGFVHRSKBTMSRGKKYHYRYYSCKTYKHTHELEKCGBKTWRABKLEELIIBRVBBCSFASRBABKEBGLBSLSEKLKIEHAKKKRLFBLYIBGSYEVSELBSMMBBIBAQIBHYESQIEABEELKKBKEIQEBLABLATVBFBSLEFREKQLYLKSLIBKIYIBGEQVTIEWL

SEQ ID NO: 74 - protein, 452 aa, synthetic construct
MKAAIYIRVSTQEQVGBYSIQAQTEKLTALCRSKBWBVYBIFIBGGYSGSBMBRPALBEMLSKLHEIBAVVVYRLBRLSRSQRBTTTLIEEYFLKBBVEFVSLSETLBTSSPFGRAMIGILSVFAQLERETIRBRMVMGKIKRIEAGLPLTTAKGRTFGYBVIBTKLYIBEEEARQLQLIYBIFEEEQSITSLQKRLKKLGFKVRTYBRYBBWLTBBLYCGYVSYKBKVHVKGIHEPIISEEQFYRVQEIFTRMGKBPBMBRBSASLLSBLVVCSKCGLGFVHRSKBTMSRGKKYHYRYYSCKTYKHTHELEKCGBKIWRABKLEELIIBRVBSYSFASRBVBKEBELBSLBEKLKIEHAKRKRLFBLYIBGSYEVSELBSMMBBIBARIBYYESQIGABEGLKKBKKIQEBLABLATVBFBGLEFREKQLYLKSLIBKIYIBGERVTIEWL

SEQ ID NO: 75 - protein, 452 aa, synthetic construct
MKAAIYIRVSTQEQVGBYSIQAQTEKLTALCRSKBWBVYBIFIBGGYSGSBMBRPALBEMLSKLHEIBAVVVYRLBRLSRSQRBTTTLIEEYFLKBBVEFVSLSETLBTSSPFGRAMIGILSVFAQLERETIRBRMVMGKIKRIEAGLPLTTAKGRTFGYBVIBTKLYIBEEEAKQLQLIYBIFEEEQSITSLQKRLKELGFKVRTYBRYBBWLTBBLYCGYVSYKBKVHVKGIHEPIISEEQFYRVQEIFARMGRBPBMBRBSASLLSBLVVCSKCGLGFVHRSKBTMCRGKKYHYRYYSCKTYKHTHELEKCGBKTWRABKLEELIIBRVBBYSLASRBVBKEYELBSLBEKLKIEHAKRKRLFBLYIBGSYEVSELBSMMBBIBAQISYYESQIEABEELKKBKKIQEBLABLATVBFBSLEFREKQLYLKSLIBKIYIBGEQVTIEWL

SEQ ID NO: 76 - protein, 452 aa, synthetic construct
MKAAIYIRVSTQEQVGBYSIQAQTEKLTALCRSKBWBVYBIFIBGGYSGSBMBRPALBEMLSKLHEIBAVVVYRLBRLSRSQRBTTTLIEEYFLKBBVEFVSLSETLBTSSPFGRAMIGILSVFAQLERETIRBRMVMGKIKRVEAGLPLTTAKGRTFGYBVIBTKLYIBEEEAKQLQLIYBIFEEEQSITSLQKRLKKLGFKVRTYBRYBBWLTBBLYCGYVSYKBKVHVKGIHEPIISEEQFYRVQEIVTRMGKBPBMBRBSASLLSBLVVCSKCGLGFVHRSKBTMSRGKKYHYRYYSCKTYKHTHELEKCGBKTWRABKLEELIISRVBBYSFASRBVBKEBELBSLBEKLKIEHAKKKRLFBLYIBGSYGVSELBSMMBBVBAQIBYYESQIEASEELKKSKKIQEBLABLATVBFBSLEFREKQLYLKSLIBKIYIBGEQVTVEWL

SEQ ID NO: 77 - protein, 452 aa, synthetic construct
MKAAIYIRVSTQEQVGBYSIQAQTEKLTALCRSKBWBVYBIFIBGGYSGSBMBRPALBEMLSKLHEIBAVVVYRLBRLSRSQRBTTTLIEEYFLKBBVEFVSLSETLBTSSPFGRAMIGILSVFAQLERETIRBRMVMGKIKRIEAGLPLTTAKGRTFGYBVIBTKLYVBEEEAKQLRLIYBIFEEEQSITFLQKRLKKLGFKVRTYBRYSBWLTBBLYCGYVSYKBKVHVKGIHEPIISEEQFYRVQEIFTRMGKBPBMBRBSASLLSBLVVCSKCGLGFVHRRKBTMSRGKKYHYRYYSCKTYKHTHELEKCGBKTWRABKLEELIIBRVBBYSFASRGVBKEBELBSLBEKLKIEHAKKKRLFBLYIBGSYEVSELBSMMBBVBAQIBYYESQIEABEGLKKBEKIQEBLABLAAVBFBSLEFREKQLYLKSLIBKIYIBGEQVAIEWL

SEQ ID NO: 78 - protein, 452 aa, synthetic construct
MKAAIYIRVSTQEQVEBYSIQAQTEKLTALCRSKBWBVYBIFIBGGYSGSBMBRPALBEMLSKLHEIBAVVVYRLBRLSRSQRBTTTLIEEYFLKBBVEFVSLSETLBTSSPFGRAMIGILSVFAQLERETIRBRMVMGKIKCIEAGLPLTTAKGRTFGYBVIBTKLYIBEEEAKQLQLIYBIFEEEQSITFLQKRLKKLGFKVRTYBRYSBWLTBBLYCGYVSYKBKVHVKGIHEPIISEEQFYRVQEIFTRMGKBPBMBRBSASLLBBLVVCSKCGLGFVHRRKBTTSGGKKYHYRYYSCKTYKHTHELEKCGBKTWRABKLEELIIBRVBBYSLASRBVBKEBELBSLBEKLKVEHAKKKRLFBLYIBGSYEVSELBSMMBBIBVQIBYYESQIEABEELKKBKKIQEBLABLAAVBFBSLEFREKQLYLKSLIBKIYIBGEQVTIEWL

SEQ ID NO: 79 - protein, 452 aa, synthetic construct
MKAAIYIRVSTREQVEBYSIQAQTEKLTALCRSKBWBVYBIFIBGGYSGSBMBRPALBEMLSKLHEIBAVVVYRLBRLSRSQRBTITLIEEYFLKBBVEFVSLSETLBTSSPFGRAMIGILSVFAQLERETIRBRMVMGKIKRIEAGLPLTTAKGRTFGYBVIBTKLYIBEEEAKQLRLIYBIFEEEQSITFLQKRLKKLGFKVRTYBRYBBWLTBBLYCGYVSYKBKVHVKGIHEPIISEEQFYRVQEIFARVGKBPBMBRESASLLBBLVVCGKCGLGFVHRRKBTKSRGKKYHYRYYSCKTYKHIHELEKCGBKIWRABKLEELIIBRVBBYSFASRBVBKEBELBGLBEKLKIEHAKKKRLFBLYIBGSYEVSELBSMMBBIBAQIBYYESQIEABEELRKBKKTQEBLABLASVBYBSLEFREKQLYLKSLIBKIYIBGEQVTIEWL

SEQ ID NO: 80 - protein, 452 aa, synthetic construct
MKAAIYIRVSTREQVEBYSIQAQTEKLTALCRSKBWBVYBLFIBGGYSGSBMBRPALBEMLSKLHEIBAVVVYRLBRLSRSQRBTITLIEEYFLKBBVEFVSLSETLBTSSPFGRAMVGILSVFAQLERETIRBRMVMGKIKRIEAGLPLTTAKGRTFGYBVIBTKLYIBEEEAKQLQLIYBIFEEEQSITLLQKRLKKLGFKVHTYBRYBBWLTBBLYCGYVSYKBKVHVKGIHEPIISEEQFYRVQEIFTRTGKBPBVBRBSASLLBBLVVCGKCGLGFVHRRKBTMSRGKKYHYRYYSCKTYKHTHELEKCGBKIWRABKLEELIIBRVBBYSLASRBVBKEBELBSLBEKLKIEHAKKBRLFBLYIBGGYEVSELBSMMBBIBAQIBYYESQIEABEELKKBKKIQEBLABLATVBFBSLEFREKQLYLKSLIBKIYIBGEQVTIEWL

SEQ ID NO: 81 - protein, 452 aa, synthetic construct
MKAAIYIRVSTQEQVEBYSIQAQTEKLTALCRSKBWBVYBIFIBGGYSGSBMBRPALBEMLSKLHEIBAVVVYRLBRLSRSQRBTITLIEEYFLKBBVEFVSLSETLBTSSPFGRAMIGILSVFAQLERETIRBRMVMGKIKRVEAGLPLTTAKGRTFGYBVIBTKLYIBEEEAKQLQLIYBIFEEEQSITFLQKRLKKLGLKVRTYSCYBBWLTBBLYCGYVSYKBKVHVKGIHEPIISEEQFCRVQEIFARTGKBPBMBRBSASLLKBLVVCSKCGLGFVHRRKBTTSRGKKYRYRYYSCKTYKHTHELEKCGBKIWRABKLEELIIBRVBBYSLASRBVBKEBELBSLBEKLKIEHAKKKRLFBLYIBGSYEVGELVSMMBBIBAQIBCYESQIEABEGLKKBKKIQEBLABLATVBFBSLEFREKQLYLKSLIBKIYIBGEQVTIEWL

SEQ ID NO: 82 - protein, 452 aa, synthetic construct
MKAAIYIRVSTREQVEBYSIQAQTERLTALCRSKBWBVYBVFIBGGYSGSBMBRPALBEMLSKLHEIBAVVVYRLBRLSRSQRBTATLIEEYFLKBBVEFVSLSETLBTSSPFGRAMIGILSVFAQLERETIRBRMVMGKIKRVEAGLPLTTARGRTFGYBVIBTKLYIBEEEAKQLQLIYBIFEEEQSITSLQKRLKKLGFKVRAYBRYSBWLTBBLYCGYVSYKBRVHVKGIHEPIISEEQFYRVQEIFTRMGKBPBMBRBSASLLBBLVVCSKCGLGFVHRRKBTMSRGKKYRYRYYSCKTYKHIHELEKCGBKIWRABKLEELIIBRVBBYSLAGRBVBKEBELBSLSEKLKVEHAKKKRLFELYIBGSYEMGELBSMMBBIBAQIBYYESQIEABEGLKRBKKIQEBLAGLAAVBFBSLEFREKQLYLKSLIBKIYIBGEQVTIEWL

SEQ ID NO: 83 - protein, 452 aa, synthetic construct
MKAAIYIRVSTREQVEBYSIQAQTEKLTALCRSKBWBVYBIFIBGGYSGSBMSRPALSEMLSKLHEIBAVVVYRLBRLSRSQRBTITLIEEYFLKBBVEFVSLSETLBTSSPFGRAMIGILSVFAQLERETIRBRMVMGKIKRVEAGLPLTTAKGRTFGYBVIBTKLYIBEEEARQLRLIYBIFEEEQSITFLQKRLKQLGFKVRTYSRYBBWLTBBLYCGYVSYKBKVHVKGIHEPIISEEQFYRVQEIFTRMGKBPBMBRBSASLLBSLVVCSKCGLGFVHRRKBTMSRGKKYHYRYYSCKTYKHTYELEKCGBKIWRABKLEELVIBRVBBYCLASRBVBKEBELBSLBEKLKIEHAKKKRLFBLYIBGSYEVSELBSMMBBIBAQIBYYESQIEABEGLKEBKKIQEBLABLATMBYBSLEFRKKQLYLKSLIBKIYIBGEQVTIEWL

SEQ ID NO: 84 - protein, 452 aa, synthetic construct
MKAAIYIRVSTREQVEBYSIQAQTEKLTALCRSKBWBVYBVFTBGGYSGSBMBRPALBEMLGKLHEIBAVVVYRLBRLSRSQRBTITLIEEYFLKBBVEFVSLGETLBTSSPFGRAMIGILSVFAQLERETIRBRMVMGKIKRIEAGLPLTTAKGRTFGYBVIBTKLYIBEEEAKQLQLIYBIFEEEQSITFLQKRLKKLGFKVRTYSRYBSWLTBBLYCGYVSYKBKVHVKGIHEPIISEEQFYRVQEIFTRVGKBPBVBRBSASLLBBLVVCSKCGLGFVHRRKBTTSRGKKYHYRYYSCKTYKHTHELEKCGBKIWRABKLEELIIBRVBBYSFASRBABKEBELBSLSEKLKIEHAKRKRLFBLYIBGSYEVSELBBMMSBIBAQIBYYESQIGABEELKKBKKIQEBLAELATVBFBSLEFREKQLYLRSLIBKIYIBGEQVTIBWL

SEQ ID NO: 85 - protein, 452 aa, synthetic construct
MKAAIYIRVSTREQVEBYSIQAQTEKLTALCRSKBWBVHBIFIBGGYSGSBMBRPALBEMLSKLHEIBAVVVYRLBRLSRSQRBTITLIEEYFLKBBVEFVSLSETLBTSSPFGRAMIGILSVFAQLERETIRBRMAMGKIKRIEAGLPLTTAKGRTFGYBVIBTKLYVBEEEAKQLQLIYBIFEEEQSITFLQKRLKKLGYKVRTYSRYBSWLTBBLYCGYVSYKBKVHVKGIHEPIISEEQFYRVQEIFTRMGKBPBMBRBSASLLBBLVVCSKCGLGFVHRRKBTMSRGKKYHYRYYSCKTYKHIHELEKCGBKIWRABKLEELIISRVBBYSFACRBLBKEBELBSLBEKLRIEHAKKKRLFBLYIBGSYEVSELBSTMBBIBAQVBYYESQIEABEELKKBKKIQEBLABLAAVBFBSLEFREKQLYLKSLIBKIYIBGEQVTIEWQ

SEQ ID NO: 86 - protein, 452 aa, synthetic construct
MKAAIYIRVSTREQVEBYSIQAQTEKLTALCRSKBWBVYBIFIBGGYSGSBMBRPALBEMLSKLHEIBAVVVYRLBRLSRSQRBTITLIEEYFLKBBVEFVSLSETLBTSSPFGRAMIGILSVFAQLERETIRBRMVMGKIKRIEAGLPLTTAKGRTFGYBVIBTKLYIBEEEAKQLQLIYBIFEEEQSITFLQKRLKKLGFKVRTYBRYSBWLTBBLYCGYVSYKBKVHVKGIHEPIISEEQFYRVQEILTRMGKBPBVBRBSASLLBBLVVCSKCGLGFVHRRKBTVSRGKKYHYRYYSCKTYKHTHELEKCGBRIWRABKLEELIIBRVBBYSFASRBMBKEBELBSLBEKLKIEHAKKKRLFBLYIBGSYEVSELBSMMBBIBAQIBYYESQIEABEELKKBKKIQEBLABLATVBFBSLEFREKQLYLKSLIBKIYIBGEQVTIEWL

SEQ ID NO: 87 - protein, 452 aa, synthetic construct
MKAAIYIRVSTREQVEBYSIQAQTEKLTALCRSKBWBVYBIFIBGGYSGSBMBRPALBEMLSKLHEIBAVVVYRLBRLSRSQRBTITLIEEYFLKBBVEFVSLSETLBTSSPFGRAMIGILSVFAQLERETIRBRMVMGKIKRVEAGLPLTTAKGRTFGYBVIBTKLYIBKEEAKQLQLIYBIFEEEQSITFLQKRLKKLGFKVRTYBRYISWLTBBLYCGYVSYKGKVHVKGIHEPIISEEQFYRVQEIFTRMGKBPBMBRBSASLLBBLVVCSKCGLGFVHRRKBTMSRGKKYHYRYYSCKTYKHTHELEKCGBKIWRABKLEELIIBRVBBYSLASRBVBKEBELBSLBEKLKIEHAKKKRLFBLYIBGSYEVSELBSMMBBIBAQIBYYESQIEABEGLKRBKKIQEBLABLASVBYBSLEFREKQLYLKSLIBKIYIBGEQVTIEWL

SEQ ID NO: 88 - protein, 452 aa, synthetic construct
MKAAIYIRVSTREQVEBYSIQAQTEKLTALCRSKBWBVYBIFIBGGYSGSBMBRPALBEMLSKLHKIBAVVVYRLBRLSRSQRBTITLIEEYFLKBBVEFVSLSETLBTSSPFGRAMIGILSVFAQLERETIRBRMVMGKIKRIEAGLPLTTAKGRTFGYBVIBTKLYIBEEEAKQLQLIYBIFEEEQSITFLQKRLKKLGFKVRTYSRYBBWLTBBLYCGYVSYKBKVHVKGIHEPIISEEQFYRVQEIFTRMGKBPBMBRBSASLLBBLVVCSKCGLBFVHRRKBTMSRGKKYHYRYYSCKTYKHTHELEKCGBKIWRABKLEELVIBRVBBYSLASRBVBKEBELBSLBEKLKIEHAKKRRLFBLYIBGSYEVSELBSMMBBIBAQIBYYESRIAABEELKKBKKIQEBLABLATVBFBBLEFREKQLYLKSLIBKIYIBGEQVTIEWL

SEQ ID NO: 89 - protein, 470 aa, synthetic construct
MCYTTPVCAAVYLRISEDRSGEQLGVARQREDCLKLCDQRKWVPVEYLDNDVSASTGKRRPAYEQMLADITAGKIAAVVAWDLDRLHRRPIELEAFMSLADEKRLALATVAGDVDLATPQGRLVARLKGSVAAHETEHKKARQRRAGRQKAERGLPNWSKAFGYLPGPNGPEPDPRTAPLVRQAYADILAGASLGDVCRQWNDAGALTITGRPWTTTTLSKFLRKPRNAGLRAYKGARYGPVDRDAIVGKAQWSPLVDEATFWAAQAVLDAPGRAPGRKSVRRHLLTGLAGCGKCGNHLAGSYRTDGRVVYVCKTCHGVAILADNIEPILYHVVAERLAVPEAVDLLRREIHDAAEVETIRLELETLYGELDRLAVERAEGLLTARQVKISTDIVSAKIAQLQARQLDQERLRVFDGIPLGTPQVAGMIAELSPDRFRAVLDALAEVVVQPVGKSGRIFNPERVQVNWRK

SEQ ID NO: 90 - protein, 469 aa, synthetic construct
MSYTTPVRAAVYLRISEDRSGEQLGVARQREDCLKLCDQRKWVPVEYLDNDVSASTDKRRPAYEQMLADVTAGRIAAVVAWDLDRLHRRPIELEAFMSLADEKRLALATVAGDVDLATPQGRLVARLKGSVAAHETEHKKARQRRAARQKAERGHPNWSKAFGYLPGPNGPEPDPRTAPLVKQAYADILAGASLGDVCRQWNDAGAFTITGRQWTTTTLSKFLRKPRNAGLRAYKGARYGPVDRDAIVGKAQWSPLVDEATFWAAQAVLDAPGRAPGRKSVRRHLLTGLAGCGKCGNHLAGSYRTDGRVVYVCKACHGVAILADNIEPILYHIVAERLAMPDAVDLLRREIHDAAEAETIRLELETLYGELDRLAVERAEGLLTARQVKISTDIVNAKIATLQARQLDQERLRVFDGIPLGTPQVAGMIAELSPNRFRAVLDVLAEVVVQPVGKSGRIFNPDRVQVNWR

SEQ ID NO: 91 - protein, 469 aa, synthetic construct
MSYTTPVRAAVYLRISEDRSGEQLGVARQREDCLKLCDQRKWVPVEYLDNDVSASTGKRRPAYEQMLADITAGRIAAVVAWDLDRLHRRPIELEAFMSLADEKRLALATVAGDVDLATPQGRLVARLKGSVAAHETEHKKARQRRAARQKAERGHPNWSRAFGYLPGPNGPEPDPRTAPLVEQAYADILAGASLGDVCRQWNDAGALTITGRPWTTTTLSKFLRKPRNAGLRAYKGARYGPVDRDAIVGKAQWSPLVDEATFWAAQAVLDAPGRAPGRKSVRRHLLTGLAGCGKCGNHLAGSYRTDGRVVYVCKACHGVAILADNIEPILYHIVAERLAMPDAVDLLRREVHDAAEAETIRMGLETLYGELDRLAVERAEGLLTARQVKISTDIVNAKITKLQARQLDQERLRVLDGIPLGTPQVAGMVAELSPDRFRAVLDVLAEVVVQPVGKSGRTFNPERVQVNWR

SEQ ID NO: 92 - protein, 485 aa, synthetic construct
MTKKVAIYTRVSTTNQAEEGFSIDEQTDRLTKYAEAMGWQVSDAYTDAGFSGAKLERPAMQRLINDIENKAFDTVLVYKLDRLSRSVRDTLYLVKDVFTKNKIDFISLNESIDTSSAMGSLFLTILSAINEFERENIKERMTMGKLGRAKSGKSMMWTKTAFGYYHNRKTGILEIVPPQAAIVEQIFTDYLGGISLTKLRDKLNESGHIGKDIPWSYRTLRQTLDNPVYCGYIKFKDSLFEGMHKPIIPYETYLKVQKELEERQQQTYERNNNPRPFQAKYMLSGMARCGYCGAPLRIVLGHKRKDGSRTMKYHCANRFPRKTKGVTVYNDNKKCDSGTYDLSNLENTVIDSLIGFQENNGSLLRIINGNNQPIPDTSSFEKQISQIDKKIQKNSDLYLNDFITMDELKDRTDSLQAEKKLLKAKISENKCNDSTDVFELVKTQLGSIPINELSYDNKKKIVNNLVSKVDVTADNVDIIFKFQLA

SEQ ID NO: 93 - protein, 452 aa, synthetic construct
MKAAIYIRVSTQEQVGNYSIQAQTEKLTALCRSKDWDVYDIFIDGGYSGSNMNRPALNEMLSKLHEIDAVVVYRLDRLSRSQRDTTTLIEEYFLKNNVEFVSLSETLDTSSPFGRAMIGILSVFAQLERETIRDRMVMGKIKRIEAGLPLTTAKGRTFGYNVIDTKLYINEEEARQLRLIYDIFEEEQSITSLQKRLKKLGFKVRTYNRYNSWLTNDLYCGYVSYKDKVHVKGIHEPIISEEQFYRVQEIFTRMGKNPNMNRDSASLLSNLVVCSKCGLGYVHRSKDTMSRGKKYHYRYYSCKTYKHTHELEKCGNKTWRADKLEELILNRVNNYSFASRNVGREDELDSLHEKLKIEHAKKKRLFDLYINGSYEVSELDSMMSDIDAQINYYESQIEANEELKKNNKTQENLAELAAVDFDSLEFREKQLYLKSLINKIYIDGEQVSIEWL

SEQ ID NO: 94 - protein, 469 aa, synthetic construct
MSYITPVRAAVYLRISEDRSGEQLGVARQREDCLKLCGQRKWVPVEYLDNDVSASTGKRRPAYEQMLADITAGKIAAVVAWDLDRLHRRPIELEAFMSLADEKRLALATVAGDVNLATPQGRLVARLKGCVAAHETEHKKARQRRAARQKAERGYPNWSKAFGYLPGPNGPEPDPRTAPLVKQAYADILAGASLGEVCRQWNDAGAFTITGRPWTTTTLSKFLRKPRNAGLRAYKGARYGPVDRDAIVGKAQWSPLVDEATFWAAQAVLDAPGRAPGRKSVRRHLLTGLAGCGKCGNHLAGSYRTDGRVVYVCKACHGIAILADNIEPMLYHIVAERLAMPDAVGLLRREIHDAAEAETIRLELETLYGELDRLAVERAEGLLTARQVKISTDVVNAKITKLQARQLDQERLRVLDGIPLGTPQVAGMIAGLSPDRFRAVLDVLAEVVVQPVGKGGRIFNPERVQVNWR

SEQ ID NO: 95 - protein, 469 aa, synthetic construct
MSYTTPVRAAVYLRISEDRSGEQLGVARQREDCLKLCGQRKWVPVEYLDNDVSASTGKRRPAYEQMLADITAGKIAAVVTWDLDRLHRRPIELEAFMSLADEKRLALATVAGDVDLATPQGRLIARLKGSVAAHETEHKKARQRRAARQKAERGHPNWSKAFGYLPGPNGPEPDPRTAPLVKQAYADILAGASLGDVCRQWNGAGALTITGRSWTTTTLSKFLRKPRNAGLRAYKGARYGPVDRDAIVGKAQWSPLVDEATFWAAQAVLDAPGRAPGRKSVRRHLLTGLAGCGKCGNHLSGSYRTDGRIVYVCKACYGVAVLADNIEPILYHIVAERLAMPDAVDLLRREIHDAAEEEAIRLELETLYGELDRLAVERAEGLLTARQVKISTDIVNAKITKLQARQLDQERLRVLDGIPLGTPQVAGMIAGLSPDRFRAVLDVLAEVVVQPVGKGGRIFNPERVRVNWR

SEQ ID NO: 96 - protein, 485 aa, synthetic construct
MTKKVAIYTRVSTTNQAEEGFSIDEQIDRLTKYAEAMGWQVSDTYTDAGFSGAKLERPAMQRLINDIENKAFDAVLVYKLDRLSRSVRDTLYLVKDVFTKNKIDFISLSESIDTSSAMGSLFLTILSAINEFERENIKERMTMGKLGRAKSGKSMMWTKTAFGYYHNRKTGILEIVPLQATIVEQIFTDYLGGISLTKLRDRLNESGHIGKDIPWSYRTLRQTLDNPVYCGYIKFKDSLFEGMHKPIIPYETYLKVQKELEERQQQTYERNNNPRPFQAKYMLSGMARCGYCGAPLRIVLGHKRKDGSRTMKYHCVNRFPRKAKGVTVYNDNKKCDSGTYDLSNLENTVIDNLIGFQEDNDSLLKIINGNNQPILDTSIFKKQISLIDKKIQKNSDLYLNDFITMDELKDRTDSLQAEKKLLIAKISENKSNDSTDVFELVKTQLGSIPINELSYDDKKKIVNNLVSKVDVTADNVDIIFKFQLA

SEQ ID NO: 97 - protein, 469 aa, synthetic construct
MSYTTPVRAAVYLRISEDRSGEQLGVARQREDCLKLCGQRKWVPVEYLDNDVSASTGKRRPAYEQMLADITAGKIAAVVAWDLDRLHRRPIELEAFMSLADEKRLALATVAGDVDLATPQGRLVARLKGSVAAHETEHKKARQRRAARQKAERGHPNWSKAFGYLPGPNGPEPDPRTAPLVKQAYADILAGASLGDVCRQWNDAGAFTITGRPWTTTTLSKFLRKPRNAGLRAYKGARYGPVDRDAIVGKAQWSPLVDEATFWAAQAVLDAPGRAPGRKSVRRHLLTGLAGCGKCGNHLAGSYRTDGRVVYVCKACHGVAILADNIEPILYHTVAERLAMPDAVDLLRREIHDAAEAETIRLELETLYGELDCLAVERAEGLLTARQVKISTDIVSAKITKLQARQLDQERLHVFEGIPLGTPQVAGMIAELSPDRFRAVLDVLAEVVVQPVGKSGRIFNPERVQVNWR

SEQ ID NO: 98 - protein, 469 aa, synthetic construct
MSYTTPVRAAVYLRISEDRSGEQLGVARQREDCLELCGQRKWEPVEYLDNDVSASTGKRRPAYEQMLADITAGKIAAVVAWDLDRLHRRPIELEAFMSLADEKRLALATVAGDVDLATPQGRLVARLKGSVAAHETEHKKARQRRAARQKAERGHPNWSKAFGYLPGPNGPEPDPRTAPLVRQAYADILAGASLGDVCRRWNGAGAFTITGRPWTTTALSKFLRKPRNAGLRAYKGARYGPVDRDAIVGKAQWSPLVDEATFWAAQAVLDAPGRAPGRKSVRRHLLTGLAGCGKCGNHLAGSYRTDGRVVYVCKACHGVAILADNIEPILYHIVAERLAMPDAVDLLRREIRDAAEAETIRLELETLYGELDRLAVERAEGLLTARQVKISTDIVNAKITKLQARQLDQERQRVFDGIPLGTPQVAGVIAELSPNRFRAVLDVLAEVVVQPVGKSGRIFNPERVQVNWR

SEQ ID NO: 99 - protein, 452 aa, synthetic construct
MKAAIYIRVSTREQVENYSIQAQTEKLTALCRSKGWDVYDIFIDGGYSGSNMNRPALNEMLSRLHEIDAVVVYRLDRLSRSQRDTITLIEEYFLKNNVEFVSLSETLDTSSPFGRAMIGILSVFAQLERETIRDRMAMGKIKRVEAGLPLTTAKGRTFGYDVVDTKLYINEEEAKQLQLIYDIFEEEQSITVLQKRLKKLGFKVRTYNRYNNWLTNDLYCGYVSYKDKVHVKGIHEPIISEEQFYRVQEIFTRMGKNPNMNRDSASLLNNLVVCSKCGLGFVHRRKDTTSRGKKYHYRYYSCKTYKHTHELEKCGNKIWRADKLEELIINRVHNYSLASRGVDKEGELDSLNERLKIEHAKKKRLFDLYINGSYEVSELDSMMNDIDAQINYYESQIEANEELKKNKKIQEDLAELATVDFDSLEFREKQLYLKSLINKIYIDGEQVTIEWL

SEQ ID NO: 100 - protein, 469 aa, synthetic construct
MSYTTPVRAAVYLRISEDRSGEQLGVARQREDCLKLCDQRKWVPVEYLDNDVSASTGRRRPAYEQMLADITAGKIAAVVAWDLDRLHRRPIELEAFMSLADEKRLALATVAGDVDLATPQGRLVARLKGSVAAHETEHKRARQRRAARQKAERGHPNWSKAFGYLPGPNGPEPDPRTAPLVKQAYADILAGASLGDVCRQWNDAGAFTITGRPWTTTTLSKFLRKPRNAGLRAYKGARYGPVDRDAIVGKAQWSPLVDEATFWAAQAVLDAPGRAPGRKSVRRHLLTGLAGCGKCGNHLAGSYRTDGRVVYVCKACHGVAILADNIEPILYHIVAERLAMPDAVDLLRREIHDAAEAVPIRLELETLYGELDRLAAERAEGLLTARQVKISTDIVNAKITKLQARQLDQGRLRVFDGIPLGTPQVAGVITELSPDRFRAVLDVLAEVVVQPVGKSGRIFNPERVQVNWR

SEQ ID NO: 101 - protein, 469 aa, synthetic construct
MSYTTPVRAAVYLRISEDRSGEQLGVARQREDCLKLCDQRKWVPVEYLDNDVSASTGKRRPAYEQMLADVTAGKIAAVVAWDLDRLHRRPIELEAFMSLADEKRLALATVAGDVDLATPQGRLVARLKGSVAAHETEHKKARQRRAARQKAERGLPNWSKAFGYLPGPNGPEPDPRTAPLVKQAYADILAGASLGDVCRQWNDAGAFTVTGRPWTTTTLSKFLRKPRNAGLRAYKGARYGPVDRDAIVGKAQWSPLVDEATFWAAQAVLDAPGRAPGRKSVRRHLLTGLAGCGKCGNHLAGSYRTDGQVVYVCKACYGVAILADNIVPILYHIVAERLAMPDAVDLLRREIHDAAEAETIRLELETLHGELDRLAVERAEGLLTARQVKISTDIVNAKITKLQARQLDQERLRVLDGIPLGTPQVAGVIAELSPDRFRAVLDVLAEVVVQPVGKSGRIFSPERVQVNWR

SEQ ID NO: 102 - protein, 485 aa, synthetic construct
MTKKVAIYTRVSTTDQAEEGFSIDEQIDRLTKYAEAMGWQVSGTYTDAGFSGAKLERPAMQRLINDIENKAFDTVLVYKLDRLSRSVRDTLYLVKDVFTKNKIDFISLNESIDTSSAMGSLFLTILSAINEFERENIKERMTMGKLGRAKSGKSMMWTKTAFGYYHNRETGILEIVPLQATIVEQIFTDYLGGISLTKLRDKLNESGHIGKDIPWSYRTLRQTLDNPVYCGYIKFKDSLFEGMHKPIIPYETYLKVQKELGVRQQQTYERNNNPRPFQAKYMLSGIARCGYCGAPLRIVLGHKRKDGSRTMKYHCANRFPRKTKGVTVYNDNKKCDSGTYDLGNLENTVIDSLIGFQENNDSLLKIINGNNQPILDTSSFKKQISQIDKIIQKNSDLYLNDFITMDELKDRTDSLQAEKKLLEAKISENKFNDSTNVFELVKTQLGSIPINELSYDSKKKIVNNLVSKVDVTADNVDIIFKFQLA

SEQ ID NO: 103 - protein, 484 aa, synthetic construct
MTKKVAIYTRVSTTNQAEEGFSIDEIDRLTKYAEAMGWQVSDTYTDAGFSGAKLERPAMQRLINDIENKAFDTVLVYKLDRLSRSVRDTLYLVKDVFTKNKIDFISLNESINTSSAMGSLFLTILSAINEFERENIKERMTMGKLGRAKSGKSMMWTKTAFGYYHNRKTGILEIVPLQATIVEQIFTDYLSGISLTKLRDKLNRSGHIGKDIPWSYRTLRQTLGNPVYCGYIKFKGGLFEGMHKPIIPYETYLKVQKELEVRQQQTYERNNNPRPFQAKYMLSGMARCGYCGAPLRIVLGHKRKDGSRTMKYHCANRFPRKTKGVTVYSDNKKCDSGTYDLSNLENIVIDSLIGFQENNDSLLKIINGNNQPILDTSSFEEQISQIDKKVQKNSDLYLNDFINMDELKDRTDSLQAEKELLKAKISENKFNDSTDVFELVKTQLGSIPINELSYDNKKKIVSNLVSKVDVTADNVDIIFKFQLA

SEQ ID NO: 104 - protein, 485 aa, synthetic construct
MTKKVAIYTRVSTTNQAEEGFSIDEQIDRLTKYAEAMGWQVSDTYTDAGSSGAKLERPAMQRLINDIENKAFDTVLVYKLDRLSRSVRDTLYLVKDVFTKNKIDFISLNESIDTSSAMGSLFLTILSAINEFERENIKERMTMGKLGRAKSGKSMMWTKAAFGYYHNRKTGILEIVPLQATIVEQIFTDYLSGISLTKLRDKLNESGHIGKDIPWSYRTLRQTLDNPVYCGYIKFKDSLFEGMHKPIIPYETYLKVQKELEERQQQTYERNNNPRPFQAKYMLSGMARCGYCGAPLKIVLGHKRKDGSRTMKYHCANRFPRKTKGVTVYNDNKKCDSGTYDLSNLESTVIDNLIGFQENNDSLLKIINGNNQPILDTSSFKKQISQIDKKIQKYSDLYLNDFITMDELKDRTDGLQAEKKLLKAKISENKLNDSTDVFELVKTQLGSIPINELSYDNKKKIVNNLVSKVDVTADNVDIIFKFQLA

SEQ ID NO: 105 - protein, 452 aa, synthetic construct
MKAAIYIRVSTREQVENYSIQAQTEKLTALCRSKDWDVYDIFIDGGYSGSNMNRPALNEMLSRLHEIDAVVVYRLDRLSRSQRDTITLIEEYFLKNNVEFVSLSETLDTSSPFGRAMIGILSVFAQLERETIRDRMVMGKIKRIEAGLPLTTAKGRTFGYDVIDTKLYINEEEAKQLRLIYDIFEEEQSITFLQKRLKELGFKVRSYNRYNNWLTNDLYCGYVSYKDKVHVKGIHEPIISEEQFYRVQEIFTRMGKNPNINRDSASLLNNLVVCSKCGLGFVHRRKDAMSRDKKYHYRYYSCKTYKHIHELERCGNKIWRADKLEELIINRVNDYSVANRNVGKEDELDSLNEKLKIEHAKKRRLFDLYINGSYEVSELDSMMSDIDAQINYYESQIEANEELKKNKKIQENLAYLATVDFDSLEFREKQLYLKSLINKIYIDGEQVTIEWL

SEQ ID NO: 106 - protein, 485 aa, synthetic construct
MTKKVAIYTRVSTTNQAEEGFSIDEQIDRLTKYAEAMGWQVSDTYTDAGFSGAKLERPAMQRLINDIENKTFDTVLVYKLDRLSRSVRDTLYLVKDVFTKNKIDFISLNESINTSSAMGSLFLTILSAINEFERENIRERMTMGKLGRAKSGKSMMWTKTAFGYYHNRKTGILEIVPLQATIVEQIFTDYLSGISLTELRDKLNESGHIGKDIPWSYRTLRQTLDNPVYCGYIKFKDSLFEGMHKPIIPYETYLKVQKELEERQQQTYERNNNPRPFQAKYMLSGMARCGYCGAPLRIVLGHKRKDGSRTMKYHCANRFPRRTKGVTVYNDNKKCDSGTYDLSNLENTVIDNLIGLQENNDSLLKIINGNNQPILDTSSLKKQIGQIDKKIQRNSDLYLNDFITMDELKERTDSLLAEKKLLKAKISENKFNDCTDVFELVKTQLGSIPINELSYDSKKEIVNNLVSKVDVTADNVDIIFKFQQA

SEQ ID NO: 107 - protein, 469 aa, synthetic construct
MSYTTPVRAAVYLRISEDRSGEQLGVARQREDCLKLCGQRKWEPVEYLDNDVSASTGKRRPAYERMLADITAGKIAAVVAWDLDRLHRRPIELEAFMSLADEKRLALATVAGDVDLATPQGRLVARLKGSVAAHETEHKKARQRRAARQKAERGYPNWSKAFGYQPGPNGPEPDPRTAPLVRQAYADILAGASLGDVCRQWNDAGALTITGRPWTTTTLSKFLRKPRNAGLRAYKGARYGPVDRDAIVGKAQWSPLVDEATFWAAQAVLDAPGRAPGRKSVRRHLLTGLAGCGKCGNHLAGSYRTDGRVVYVCKACHGVAILADSIEPILYHIVAERLAMPDAVDLLRREIHDAAEAETIRLELEALYGELDRLAVERAEGLLTARQVKISTDIVNAKITKLQARQLDQERLRVFDGIPLGTPQVAGVIAGLSPSRFRAVLDVLAEVVVQPVGKSGRILNPERVQVNWR

SEQ ID NO: 108 - protein, 452 aa, synthetic construct
MKAAIYIRVSTQEQVENYSIQAQTEKLTALCRSKDWDVYDIFIDGGYSGSNMNRPALNEMLSKLHEIDAVVVYRLDRLSRSQRDTTTLIEEYFLKNNVEFVSLSETLDTSSPFGRAMIGILSVFAQLERETIRDRMVMGKIKRIEAGLPLTTAKGRTFGYDVIDTKLYINEEEAKQLQLIYDIFEEEQSITFLQKRLKKLGFKVRTYNRYNNWLTNDLYCGYVSYKDKVHVKGIHEPIISEEQFYRVQEIFTRMGKNPNMNRDSASLLSNLVVCSKCGLGFVHRSKDTMSRGKKYHYRYYSCKTYKHTHELEKCGNKIWRADKLEELIINRVNNYSFASRNVDKEDELDSLNEKLKMEHAKKKRLFDLYINGCYEVSELDSMMNDIDTQINYYESQIKANEELKRNKKIQENLADLATVDFDSLEFREKQLYLKSLINKIYIDGEQVTIDWL

SEQ ID NO: 109 - protein, 452 aa, synthetic construct
MKAAIYIRVSTREQVENYSIQAQTEKLTALCRSKDWDVYDIFIDGGYSGSNMNRPALNEMLSKLHEIDAVVVYRLDRLSRSQRDTITLIEEHFLKNNVEFVSLSETLDTSSPFGRAMIGILSVFAQLERETIRDRMVMGKIKRVEAGLPLTTAKGRTFGYDVIDTKLYINKEEAKQLQLIYDIFEEEQSITFLQKRLKKLGLKVHTYNRYSNWLTNDLYCGYVSYKDKVHVKGIHEPIISEEQFYRVQEIFTRMGKNLNMNRDSASLLNNLVVCSKCGLGFVHRRKDTTSRGKKYHYRYYSCKTYKHTHELEKCGNKIWRADKLEELIINRVNNYSFASRNVDKENELGSLYEKLKIEHAKKRRLFDLYINGSYEVSELDSMMNDIDAQINYYESQIEANEELKKNKKIQENLADLATVDYDSLEFREKQLYLKSLINKIYIDGEQVTVEWL

SEQ ID NO: 110 - protein, 452 aa, synthetic construct
MKAAIYIRVSTREQVENYSIQAQTEKLTALCRSKDWDVYDIFIDGGYSGSNMNRPALNEMLSKLHEIDAVVVYRLDRLSRSQRDTITLIEEYFLKNNVEFVSLSETLDTSSPFGRAMIGILSVFAQLERETIRDRMVMGKIKRIEAGLPLTTAKGRTFGYDVIDTRLYINEEEAKQLQLIYDIFEEERSITLLQKRLKKLGFKVHTYNRYNNWLTNDLYCGYVSYKDKVHVKGIHEPIISEEQFYRVQGIFTRMGKNPNMNRDSASLLNNLVVCSKCGLGFVHRRKDTMSRGKKYHYRYYSCKTYKHTHELEKCGNKIWRADKLEELIINRVNNYSFASRNVDKEDELDSLNKKLRIEHAKKKRLFDLYINGSYEVSELDSMMNDIDAQINYYESLIEANEELKKNKKIQENLANLATVDYDSLEFREKQLYLKSLINKIYIDGEQVTIEWL

SEQ ID NO: 111 - protein, 486 aa, synthetic construct
MTKKVAIYTRVSTTNQAEEGFSIDEQIDRLTKYAEAMGWQVSDTYTDAGFSGAKLERPAMQRLINDIENKVFDTVLVYKLDRLSRSVRDTLYLVKDVFTKNKIDFISLNESINTSSAMGSLFLTILSAINEFERENIKERMTMGKLGRAKSGKSMMWTKTAFGYYHNRKTGILEIVPLQATIVEQIFTDYLSGISLTKLRDKLNESGHIGKDIPWSYRTLRQTLDNPVYCGCIKFKDSLFKGMHKPIIPYETYLKVQKELEERQRQAYERNNNPRPFQAKYMLSGMARCGYCGAPLKIVLGHKRKDGSRTMKYHCANRFPRKTKGITVYNDNKKCDSGTYDLSSLENTVTDSLTSFQENDGSLLKIINGNNQPILDTSSFEKQISQIDKKIQKNSDLYLNDFITMDELKDRTDSLQAEKKLLKAKISESKFNDSTDVFELVKTQLGSIPINELSYDNKKKIVNNLVSKVDVTADNVDIIFKFQLAQ

SEQ ID NO: 112 - protein, 452 aa, synthetic construct
MKAAIYIRVSTREQVENYSIQAQTEKLTALCRSKDWDVYDIFIDGGYSGSNMNRPALNEMLSKLHEIDAVVVYRLDRLSRSQRDTITLIEEYFLKNNVEFVSLSETLDTSSPFGRAMIGILSVFAQLERETIRDRMVMGKIKRIEAGLPLTTAKGRTFGYDVIDTKLYINEEEAKQLQLIYDIFEEEQSITFLQKRLKELGFKVRTYNRYNNWLTNDLYCGYVSYKDKVHVKGIHEPIISEEQFYRVQEIFTRMGKNPNMNRGSASLLNNLVVCSKCGLGFVHRRKDAMSRDKKYHYRYYSCKTYKHIHELEKCGNKIWRADKLEELIISRVSNYSLASRNADKEDELDSLNEKLKIEHAKKKRLFDLYINGSYEVSELDSMMNDIDAQINYYESQIEANEELKKNKKIQENLAELATVDFDSLEFREKQLYLKSLINKIYIDGEQVTIEWL

SEQ ID NO: 113 - protein, 485 aa, synthetic construct
MTRKVAIYTRVSTTNQAEEGFSIDEQIDRLTKYAEAMGWQVSGTYTDAGFSGAKLERPAMQRLINDIENKAFDTVLVYKLDRLSRSVRDTLYLVKDVFTKNKIDFISLNESINTSSAMGSLFLTILSAINEFERENIKERMTMGKLGRAKSGKSMMWTKTAFGYYHNRKTGILEIVPLQATIVEQIFTDYLSGISLTKLRDKLNESGHIGKDTPWSYRTLRQTLDNPVYCGYIKFKDSLFEGMHKPIIPYETYLRVQKELEERQQQTYERNNNPRPFQAKYMLSGMARCGYCGAPLRIVLGHKRKDGSRTKKYHCANRFPRKTKGVTVYNDNKKCDSGTYDLSNLENTVIDNLIGFQENDDSLLKIINGNNQPILDTCSFKEQISQIDKKIQKNSDLYLNDFITMDELKDRTDSLQAEKKLLKAKISENKFNDSTDVFELVKTQLGSTPINELSYDNRKKIVNNLVSKVDVTADNVDIIFKFQLA

SEQ ID NO: 114 - protein, 452 aa, synthetic construct
MKAAIYIRVSTQEQVGNYSIQAQTEKLTALCRSKDWDVYDIFVDGGYSGSNMNRPALNGMLSKLHEIDAVVVYRLDRLSRSQRDTTTLIEEYFLKNNVEFVSLSETLDTSSPFGRAMIGILSVFAQLERETIRDRMVMGKIKRVEAGLPLTTAKGRTFGYDVIDTKLYINEEEARQLQLIYDIFEEEQSITFLQKRLKKLGFKVRTYNRYSNWLTNDLYCGYVSYKDKVHVKGIHEPIISEEQFYRVQEIFARTGKNPNMNRDSASLLNNLVVCGKCGLSFVHRSKDTMSRGKKYHYRYYSCKTYKHTHELEKCGNKTWRADKLEELIISRVNNYSFASRSVDKGDELDSLNEKLKIEHAKKKRLFDLYINGSYEVSELDSMMYGIDAQINYYESQIEANEELKKDKKIQENLADLATVDFDSLEFREKQLYLKSLISKIYIDGEQVTIEWL

SEQ ID NO: 115 - protein, 469 aa, synthetic construct
MSYATPVRAAVYLRISEDRSGEQLGVARQREDCLKLCDQRKWVPVEYLDNDVSASTGKRRPAYEQMLADITAGKIAAVVAWDLDRLHRRPIELEAFMSLADEKRLALATVAGDVDLATPQGRLVARLKGCVAAHETEHKKARQRRAARQKAERGHPNWSKAFGYLPGPNGPEPDPRTAPLVKQAYADILAGASLGDVCRQWNSAGAFTITGRPWTTTTLSKFLRKPRNAGLRAYKGARYGPVDRDAIVGKAQWGPLVDEATFWAAQAVLDAPGRAPGRKSVRRHLLTGLAGCGKCGNHLAGSYRADGRVVYVCKACHGVAILADNIEPILYHTVAERLAMPDAMDLLRREIHDAAEAEAIRLELETLYGELDRLAVERAEGLLTARQVKISTDIVNAKITKLQAHQQDQERLRVLGGIPLGTPQVAGMIAELSPDRFRAVLNVLAEVVVQPVGKSGRIFNPERVQVNWR

SEQ ID NO: 116 - protein, 469 aa, synthetic construct
MCYTTPVRAAVYLRISEDRSGEQLGVARQREDCLKLCGQRKWVPVEYLDNDASASTGKRRPAYEQMLADITAGKIAAVVAWDLDRLHRRPVELEAFMSLADEKRLALATVAGDVDLATPQGRLVARLKGSVAAHETEHKKARQRRAARQKAERGLPNWSKAFGYLPGPNGPEPDPRTAPLVKQAYADILAGASLGDVCRQWNAAGAFTITGRPWTTTALSKFLRKPRNAGLRAYKGARYGPVDRDAIVGKAQWSPLVDEATFWAAQAVLDAPGRAPGRKSVRRHLLTGLAGCGKCGNHLAGSYRTDGRVVYVCKACHGVAILADNIEPFLYHIVAERLAMPNAVDLLRREIHDTVEAETIRLELETLYGELDRLAVERAEGLLTARQVKISTDIMNAKIIKLQARQLDQERLRVFDGIPLGTPQVAGMIAELSPDRFRAVLDVLAEVVVQPVGKSGRISNPERVQVNWR

SEQ ID NO: 117 - protein, 485 aa, synthetic construct
MTKKVAIYTRVSTTNQAEEGFSIDEQIDRLTKYAEAMGWQVSDTYTDAGLSGAKLERPAMQRLINDIENKAFDTVLVYKLDRLSRSVRDTLYLVKDVFTKNKIDFISLNESIDTSSAMGSLFLTILSAINEFERENIKERMTMGKLGRAKSGKSMMWTKTAFGYYHNRKTGILEIVPLQATIVEQIFTDYLSGISLTKLRDKLNESGHIGKDIPWSYRTLRQTLDNPVYCGYIKFKDSLFEGMHRPIIPYETYLRVQKELEERQQQTYERNNNPRPFQAKYMLSGVARCGYCGAPLRIVLGHKRKDGSRTMKYHCANRLPRKTKGVTVYNDNKKCDSGTYDLSNLENTVIDNLIGFQENSDSLLKIINGNNQPILDTSSLKKQISQIDKKIQKNSDLYLNDFITMDELKDRTDSLQAEKKLLKAKISENKFNDSTDVFELVKTQLGSIPINELSYDNKKKIVNNLVSKVDVTADNVDIIFKFQLA

SEQ ID NO: 118 - protein, 469 aa, synthetic construct
MSYTTPVRAAVYLRISEDRSGEQLGVARQREDCLKLCGQRKWVPVEYLDNDVSASTGKRRPAYEQMLADITAGKIAAVVAWDLDRLHRRPVELEAFMSLADEKRLALATVAGDVDLATPQGRLVARLKGCVAAHETEHKKARQRRAARQKAERGHPNWSKAFGYLPGPNGPEPDPRTAPLVKQAYADILSGASLGDVCRQWNDAGAFTITGRPWTTTTLSKFLRKPRNAGLRAYKGARYGPVDRDAIVGKAQWSPLVDEATFWAAQAVLDAPGRAPGRKSVRRHLLTGLAGCGKCGSHLAGSYRTDGQVVYVCKVCHGVSILAVNIVPILYHIVAERLAMPDAVDLLCREIHDAAGAETIRLELEALYGELDRLAVERAEGLLTARQVKISTDIVNAKITKLQARRLDQERLRVFDGIPLGTPQVAGTIAGLSPDRFRAVLDVLAEVVVQPVGKSGRIFNPERVQVNWR

SEQ ID NO: 119 - protein, 452 aa, synthetic construct
MKAAIYIRVSTREQVENYSIQAQTEKLTALCRSKDWDVYDIFIDGGYSGSNMNRPALNEMLSKLHEIDAVVVYRLDRLSRSQRDTITLIEEYFLKNNVEFVSLSETLDTSSPFGRAMIGILSVFAQLERETIRDRMVMGKIKRIEAGLPLTTAKGRTFGYDVIDTKLYINEEEAKQLRLIYDIFEEEQSITSLQKRLKRLGFKVRTYNRYNNWLTNDLYCGYVSYKDKVHVKGIHEPIISEEQFYRVQEIFTRMGNNPNMNRDSASLLNGLVVCSKCGLGFVHRRKDIMSRGKKYHYRYYSCKTYKHIHELEKCGNKIWRADKLEELIINRVNNYSLASRNVGKEDELDSLNEKLKIEHAKKKRLFDLYINGSYEVSELDSMMKDIDAQINYYESQIEASEELKKNKQIQENLANLATVDFDSLEFREKQRYLKSLINKIYIDGEQVTIEWL

SEQ ID NO: 120 - protein, 485 aa, synthetic construct
MTKKVAIYTRVSTTNQAEEGFSIDEQVDRLTKYAEAMGWQVSDTYTDAGFSGAKLERPAMQRLINGIENKAFDTVLVYKLDRLSRSVRDTLYLVKDVFTKNKIDFISLSESIDTSSAMGSLFLTILSAINEFERENIKERMAMGKLGRAKSGKSMMWTKTAFGYYHNRKTGILEIVPLQATIVEQIFTDYLSGISLAKLRDKLNESGHIGKDIPWSYRTLRQTLDNPVYCGYIKFKDSLFEGMHKPIIPYETYLKVQRELEERQQQTYERNNNPRPFQAKYMLSGVARCGYCGAPLRIVLGRKRKDGSRTMKYHCANRFPRKIKGVTVYNDNKKCDSGTYDLSNLESTVIDNLIGLQENNDSLLEIINGNNQPILDTSSFKKQISQIDKKIQKNSDLYLNDFITMDELKDRTDSLQAEKKLLEAKISENKFNNSTDVFELVKTQLGSIPINELSYDNKKKIVNNLVSKVDVTADNVDIIFKFQLA

SEQ ID NO: 121 - protein, 452 aa, synthetic construct
MKAAIYIRVSTREQVENYSIQAQTEKLTALCRSKDWDVYDVFIDGGYSGSNMNRPALNEMLSKLHEIDAVVVYRLDRLSRSQRDTITLIEEYFLKNNVEFVSLSETLDTSSPFGRAMIGILSVFAQLERETIRDRMVMGKIKRVEAGLPLTTAKGRTFGYDVIDTKLYINEEEAKQLQLIYDIFEEEQSITFLQKRLKKLGFKVRTYNRYNSWLTNDLYCGYVSYKDKVHVKGIHEPIISEEQFYRVQEIFTRMGKSPNMNRVSASLLNNLVVCSKCGLGFVHRRKDTTSRGKKYHYRYYSCKTYKHIHELEKCGNKIWRADKLEELIINRVNNYSFASRNVDKEDELDSLNEKLRIEHAKKKRLFDLYINGSYEVSELDCMMNDIDAQINYYESQVEANEELKKDKKIQESLANLATVDYDSLEFREKQLYLKSLINKIYIDGEQVTIEWL

SEQ ID NO: 122 - protein, 452 aa, synthetic construct
MKAAIYIRVSTREQVENYSIQAQTEKLTALCRSKGWDVYDIFIDGGYSGSNMNRPALNEMLSKLHEIDAVVVYRLDRLSRSQRDTITLIEEYFLKNNVEFVSLSETLDTSSPFGRAMIGILSVFAQLERETIRDRMVMGKIKRIEAGLPLTTAKGRTFGYDVIDTKLYINEEEAKQLQLIYDIFEEEQSITFLQKRLKKLGFKVRTYNCYNNWLTNDLYCGYVSYKDKVHVKGIHEPIISEEQFYRVQEIFTRMGKNPNMNRDSASLLNNLVVCGKCGLGFVHRRKDAMSRDKKYHYRYYSCKTYKHIHELEKCGNKIWRADKLEELIINRVNSYSLASRNADKEDELDSLNGKLKIEHAKKKRLFELYFNGSYEVSELDSMMNDIDAQINYYEGQIEANEELRKNKKIQENLANLATVDFDSLEFREKQLYLKSLINKIYIDGEQVTIEWL

SEQ ID NO: 123 - protein, 469 aa, synthetic construct
MCYTTPVRAAVYLRISEDRSGEQLGVARQREDCLKLCDQRKWVPVEYLDNDVSASTGKRRPAYEQMLADITAGKIAAVVAWDLDRLHRRPIELEAFMSLADEKRLALATVAGDVDLATPQGRLVARLKGSVAAHETEHKKARQRRAARQKAERGHPNWSKAFGYLPGPNGPEPDPRTAPLVEQAYADILAGASLGDVCRRWNSAGAFTITGRPWTTTTLSKFLRKPRNAGLRAYKGARYGPVDRDAIVGKAQWSPLVDEATFWAAQAALDAPGRAPGRKSVRRHLLTGLAGCGKCGNRLAGSYRTDGRVVYVCKACHGVAILADNIEPILYHIVAERLAMPDAVDLLRREIHDAAEAETIRLELETLYGELDRLAVERAEGLLTARQVKISTDIVNAKITKLQARQLDQERLRVFDGIPLGTPQVAGMIAELSPDRFRAVLDVLAEVVVQPVGKSGRTFNPERVQVNWR

SEQ ID NO: 124 - protein, 485 aa, synthetic construct
MTKKVAIYTRVSTTNQAEEGFSIDEQIDRLTKYAEAMDWQVSDTYTDAGFSGAKLERPAMQRLINDIENKAFDTVLVYKLDRLSRSVRDTLYLVKDVFTKNKIDFISLNESIDTSSAMGSLFLTILSAINEFERENIKERMTMGKLGRAKSGKSMMWTKTAFGYYHNRKTGILETVPLQAAIVEQIFTDYLSGISLTKLRDKLNESGHIGKDIPWSYRTLRQTLDNPVYCGYIKFKDSLYEGMHKPIIPYETYLKVQKELEERQQQTYERNNNPRPFQAKYMLSGMARCGYCGAPLRIVLGHKRKDGSRTMKYHCANRFPRKTKGVTVYNDNKKCDSGTYDLSDLENTVIDNLIGFQENNDSLLKIINGNNQPILDTSSFKEQISLIDKKIQKNSELYLNDFITMDELKDRTDSLRAEKKLLKAKISESKFNDSTDVFELVKTQLGSIPINELSYGDKKEIVNNLVGKVDVTADNVDIIFKFQLA

SEQ ID NO: 125 - protein, 469 aa, synthetic construct
MCYTTPVRAAVYLRISEDRSGEQLGVARQREDCLKLCDQRKWEPVEYLDNDVSASTGKRRPAYEQMLADITAGKIAAVVAWDLDRLHRRPIELEAFMSLADEKRLALATVAGDVDLATPQGRLVARLKGSVAAHETEHKKARQRRAARQKAERGYPNWSKAFGYLPGPNGPEPDPRTAPLVEQAYADILAGASLGDVCRRWNDVGAFTITGRPWTTTTLSKFLRKPRNAGLRAYKGARYGPVDRDAIVGKAQWSPLVDEATFWAAQAVLDAPGRAPSRKSVRRHLLTGLAGCGKCGDHLAGSYRTDGRVVYVCKACHGVAILADNIEPILYHIVAERLAMPDAADLLRREIHDVAEAETIRLELETLYGELDRLAVERAEGLLTARQVKISTDVVSAKITKLQAHQLDQERLRVLDGIPLGTPQVAGMIAELSPDRFRAVLDVLAEVVVQPVGKGGRIFNPERVQVNWR

SEQ ID NO: 126 - protein, 452 aa, synthetic construct
MKAAIYIRVSTREQVENYSIQAQTEKLTALCRSKDWDVYDIFIDGGYSGSNMNRPALNEMLSRLHEIDAVVVYRLDRLSRSQRDTITLIEEYFLKNNVEFVSLSETLDTSSPFGRAMIGILSVFAQLERETIRDRMVMGKIKRIEAGLPLTTAKGRTFGYDVIDTKLYINEEEAKQLRLIYDIFEEEQSITFLQKRLKKLGFKVRTYNRYNNWLTNDLYCGYVSYKDKVHVKGIHEPIISEEQFYRVQEIFTRMSKSPNMNRDSASLLNNLVVCGKCGLGFVHRRKDSKSRDKKYHYRYYSCKTYKHIHELEKCGNKIWRADKLEELIINRVNNYSLASRNVDKEDELDSLNEKLEIEHAKKKRLFDLYINGRYEVSELDSMMNDIDAQINYYESQIEANEELKKNKKIQENLAHLATVGFDSLEFREKQLYLKSLINKIYIDGEQVTIEWL

SEQ ID NO: 127 - protein, 469 aa, synthetic construct
MCYTTPVRAAVYLRISEDRSGEQLGVARQREDCLKLCGQRKWVPVEYLDNDASASTGKRRPAYEQMLADITAGKIAAVVAWDLDRLHRRPIELEAFMSLADEKRLALATVAGDVDLSTPQGRLVARLKGSVAAHETEHKKARQRRAARQKAERGLPNWSKAFGYLPGPNGPEPDPRTAPLVKQAYADILAGASLGDVCRQWNDAGAFTITGRPWTTTTLSKFLRKPRNAGLRAYKGARYGPVDRDAIMGKAQWSPLVDEATFWAAQAVLDAPGRAPGRKSVRRHLLTGLAGCGKCGNHLAGSYRTDGRVVYVCKACHGVAILADNVEPILYHIVAERLAMPDAVDLLRREIHDAAEAETIRLELGTLYGELDRLAVERAEGLLTARQVKISTDIVNAKIAELQARQLDQERLRVFDGIPLGTPQVAGMIAELSPDRFRAVLDVLAEVVVQPVGKSGRIFNPERVQVNWR

SEQ ID NO: 128 - protein, 485 aa, synthetic construct
MAKKVAIYTRVSTTNQAEEGFSIDEQIDRLTKYAEAMGWQVSDTYTDAGFSGAKLERPAMQRLINDIENKAFDTVLVYKLDRLSRSVRDTLYLVKDVFTKNKIDFISLNESIDTSSAMGGLFLTILSAINEFERENIKERMAMGKLGRAKSGKSMMWTKTAFGYYHNRKTGILEVVPLQATIVEQIFTDYLSGISLTKLRDKLNESGHIGKDIPWSYRTLRQTLDNPVYCGYIKFKGSLFEGMHKPIIPYETYLKVQKELEERQQQTYERNNNPRPFQAKYMLSGMARCGYCGAPLKIVLGHKRKDGSRTMKYHCANRFPRRTKGVTVYNDNKKCDSGTYDLSNLENTVIDNLIGFQENNDSLLKIINGDNQPILDTSSFKERISQIDKKIQKNSDLYLNDFITMDELKDRTDSLQAEKKLLKAKISENKFNDNTDVFELVKTQLGSIPINELSYDNKKKIVNNLVSKVDVTADSVDIIFKFQLA

SEQ ID NO: 129 - protein, 452 aa, synthetic construct
MKAAIYIRVSTQEQVGNYSIQAQTEKLTALCRSKDWDVYDIFIDGGYSGSNMNRPALNEMLSKLHEIDAVVVYRLDRLSRSQRDTTTLIEEYFLKNNVEFVSLSETLDTSSPFGRAMIGILSVFAQLERETIRDRMVMGKIKRIEAGLPLTTAKGRTFGYDVIDTKLYINEEEAKQLQLIYDIFEEEQSITSLQKRLKKLGLKVRTYNRYNNWLTNDLYCGYVSYKDKVHVKGIHEPIISEEQFYRVQEIFTRMGKNPNMNRDSASLLSNLVVCSKCGLGFVHRSKDTMSRGKKYHYRYYSCKTYKHTHELEKCGNKTWRADKLEELIISRVNNYSFASRNVDKGDELDSLNEKLKIEHAKKRRLFGLYINGSYEVSELDSMMNDIDAQISYYESQIEASEELKKNKKIQENLANLATVDFDSLEFREKQLYLKSLINKIYIDGEQVTIEWL

SEQ ID NO: 130 - protein, 469 aa, synthetic construct
MSYTTPVRAAVYLRISEDRSGEQLGVARQREDCLKLCGQRRWVPVEYLDNDVSASTGRRRPAYEQMLADITAGKIAAVVAWDLDRLHRRPVELEAFMSLADEKRLALATVAGDVDLATPQGRLVARLKGCVAAHETEHKKARQRRAARQKAERGLPNWSKAFGYLPGPNGPEPDPRTAPLVEQAYADILAGASLGDVCRQWNDAGASTITGRPWTTATLSKFLRKPRNAGLRAYKGARYGPVDRDAIVGKAQWSPLVDEATFWAAQAVLDAPGRAPGRKSVRRHLLTGLAGCGKCGNHLAGSYRTDGRVVYVCKACHGVAILADIIEPFLYHIVVERLAMPDAVDLLRREIHDAAEAETIRLELETLYGELDRLAVERAEGLLTARQVKISTDIVNAKITKLRARQLDQERLRVLDGIPLGTPQVAGMIAELSPDRFRAVLDVLAEVVVQPVGRRGRIFNPERVQVNWR

SEQ ID NO: 131 - protein, 469 aa, synthetic construct
MSYTTPVRAAVYLRISEDRSGEQLGVARQREDCLELCGQRKWVPVEYLDNDVSASTDKRRPAYEQMLADITAGKIAAVVAWDLDRLHRRPIELEAFMCLADEKRLALATVAGDVDLATPQGRLVARLKGSVAAHETEHKKARQRRAARQKAERGHPNWSKAFGYLAGPNGPEPDPRTAPLVKQAYADILAGASLGEVCRQWNAAGAFTITGRPWTTTALSKFLRKPRNAGLRAYRGAPYGPVDRNAIVGKAQWSPLVDETTFWAAQAVLDAPGRAPGRKNVRRHLLTGLAGCGKCGNHLAGSYRTDGQVVYVCKACHGVSILADNIEPILYHIVAERLAMPDAVDLLRREIRDAAEAETIRLELETLYGELDRLAVERAEGLLTARQVKISTDIVNAKITKLQARQLDQERLRVLDGIPLGTPQVAGMIAELSPDRFRAVLGVLAEVVVQPVGKSGRIFNPGRVQVNWR

SEQ ID NO: 132 - protein, 485 aa, synthetic construct
MTKKVAIYTRVSTTNQAEEGFSIDEQTDRLTKYAEAMGWQVSDTYTDAGFSGAKLERPAMQRLINDIENKAFDTVLVYKLDRLSRSVRDTLYLVKDVFTKNKIDFISLNESINTSSAMGSLFLTILSAINEFERENIKERMTMGKLGRAKSGKSMMWTKTAFGYYHNRETGILEIVPLQAAIVEQIFTDYLSGISLTKLRDKLNESGHIGKDIPWSYRTLRQTLDNPVYCGYIKFKDSLFEGMHKPIIPYETYLRVQKELEERQQQTYERNNNPRPFQAKYMLSGMARCGYCGAPLRIVLGHKRKDGSRTMKYHCANRFPRKTRGVTVYNDNKKCDSGTYDLSNLENTVIDNLVGFQENNDSLLKIINGNNQPILDTSSLKKQISQIDKKIQKNSDLYLNDFITMDEPKDRTDSLQAEKRLLKAKISENKFNDSTDVFELVKTQLGSTPINELSYDNKKKIVNDLVSRVDVTADNVDITFKFQLA

SEQ ID NO: 133 - protein, 485 aa, synthetic construct
MTRKVAIYTRVSTTNQAEEGFSIDEQIDRLTKYAEAMGWQVSDTYTDAGFSGAKLERPAMQRLINDIENKAFDTVLVYKLDRLSRSVRDTLYLVKDVFTKNKIDFISLNESIDTSSAMGSLFLTILSAINEFERENIKERMAMGKLGRAKSGKSMMWTKTAFGYYHNRKTGILEIVPLQATIVEQIFTDYLSGISLTKLRDKLNESGHIGKDIPWSYRTLRQTLDNPVYCGYIKFKDSLFEGMHKPIIPYETYLKVQKELEGRQQQTYERNNNPRPFQAKYMLSGMARCGYCGAPLRIVLGHKRKDGSRTMKYHCANRFPRKTKGVTVYNDNKKCDSGTYDLSNLENTVIDNLVGFQENNDSLLKIINGNNQPILDTNSFKKQISQIDKKIQKNSDLYLNDFITMDELKDRTDSLQAEKKLLKAKISGNKFNDSTDVFELVKTQLGSIPINELSYDNKKKIVNNLVSKVDVTADNVDIIFKFQLA

SEQ ID NO: 134 - protein, 469 aa, synthetic construct
MCYTTPVRAAVYLRISEDRSGEQLGVARQREDCLKLCGQRKWVPVEYLDNDVSASTGKRRPAYEQMLADITAGKIAAVVAWDLDRLHRRPIELEAFMCLADEKRLALATVAGDVDLATPQGRLVARLKGSVAAHETEHKRARQRRAARQKAERGYPNWSKAFGYLPGPNGPEPDPRTAPLVKQAYADILAGASLGDVCRQWNSAGAFTVTGRPWTTTTLSKFLRKPRNAGLRAYNGARYGPVDRDAIVGKAQWSPLVDEATFWAAQAVLDAPGRAPGRKSVRRHLLTGLAGCGKCGNRLAGSYRTDGRVVYVCKACHGVAILADNIEPILYHIVAERLAMPDAVDLLRHEIHDAAEAEAIRLELETLYGELDRLAVERAEGLLTARQVKISTDIVNAKITKLQACQLDQERLRVLDGIPLGTPQVAGMIAELSPDRFRAVLDVLAEVVVQPVGKSGRIFNPERVQVNWR

SEQ ID NO: 135 - protein, 469 aa, synthetic construct
MSYTTPVRAAVYLRISEDRSGEQLGVARQREDCLKLCVQRKWVPVEYLDNDVSASTGKRRPAYEQMLADITAGEIAAVVAWDLDRLHRRPIELEVFMSLADVKHLALATVAGDVDLATPQGRLVARLKGSVAAHETEHKKARQRRAARQKAERGYPNWSKAFGYLPGPNGPEPDPRTAPLVKQAYADILAGAGLGDVCRQWNDAGAFTITGRLWTATTLSKFLRKPRNAGLRAYKGARYGPVDRDAIVGKAQWSPLVDEATFWAAQAVLDAPGRAPGRKSVRRHLLTGLAGCGKCGNHLAGSYRTDGRVVYVCKACHGVAILADNIEPILYHIVAERLAMPDAVDLLRREIHDAAEAEAIRLELVTLYGELDRLAVERAEGLLTARQVKISTDIVNAKITKLQARQLDQERLRVFDGIPLGTPQVAGVIAELSPNRFRAVLDVLAEVVVQPVGKSGRTFNPERVQVNWR

SEQ ID NO: 136 - protein, 485 aa, synthetic construct
MTKKVAIYTRVSTTHQAEEGFSIDEQIDRLTKYAEAMGWQVSDTYTDAGISGAKLERPAMQRLINDIENKAFDTVLVYKLDRLSRSVRDTLYLVKDVFTKNRIDFISLSESIDTSSAMGSLFLTILSAINEFERENIKERMTMGKLGRAKSGKSMMWTKTAFGYYHNRKTGILEIVPLQATIVEQIFTDYLSGISLTKLRDKLNESGHIGKDIPWSYRTLRQTLDNPVYCGYIKFKDSLFEGMHKPIIPYETYLKVQKELEERQQQTYERNNNPRPFQAKYMLSGMARCGYCGAPLKIVLGHKRKDGSRTMKYHCANRFPRKTKGITVHNDNRKCDSGTYDLSNLENTVIDNLIGFQENNDSLLKIINGNNQPILDTSSFEKQISQIDKKIQKNSDLYLNDFITMDELKDRTDSLQAEKKLLKAKISENMFNDSTDVFELVKAQLGSIPINELSYDDKKKIVNNLVSKVDVTVDNVDIIFKFQLA

SEQ ID NO: 137 - protein, 469 aa, synthetic construct
MSYTTPVRAAVYLRISEDRSGEQLGVARQREDCLKLCGQHKWAPVEYLDNDVSASTGKRRPAYEQMLADITAGKIAAVVAWDLDRLHRRPIELEAFMSLADEKRLALATVAGDVDLATPQGRLVARLKGCVAAHETEHKKARQRRAARQKAERGHPNWSKAFGYLPGPDGPEPDPRTAPLVKQAYADILAGASLGDVCRQWNDVGAFTITGRPWTTTTLSKFLRKPRNAGLRAYKGARYGPVDRDAIVGKAQWSPLVDEATFWAAQAVLDAPGRAPGRKSVRRHLLTGLAGCGKCGNHLAGSYRTDGQVVYVCKACYGVAILADNIVPILYHVVAERLAMPDAVDLLRHEIHDGAEAEAIRLELETLYGELDRLAVERAEGLLTARQVKISTDIVNAKITKLQARQLDQERLRVFNGIPLGTPQVAGVIAELSPDRFRAVLDVLAEVVVQPVGKGGRIFSPERVQVNWR

SEQ ID NO: 138 - protein, 469 aa, synthetic construct
MSYTTPVRAAVYLRISEDRSGEQLGVARQREDCLKLCGQRKWVPVEYLDNDVSASTGKRRPAYEQMLADITAGKIAAVVAWDLDRLHRRPVELEAFMSLADEKRLALATVAGDVDLATPQGRLVARLKGSVAAHETEHKRARQCRAARQKAERGHPNWSKAFGYLPGPNGPEPDPRTAPLVKQAYADILAGASLGDVCRQWNAAGAFTTTGRPWTTTALSKFLRKPRNAGLRAYKGARYGPVDRDAIVGKAQWSPLVDEATFWAAQAVLDAPGRAPGRKSVRRHLLTGLAGCGKCGNHLAGSYRTDGQVVYVCKACHGVAILAANIEPILYHIVAERLAMPNAVDLLRREIHDAAEAETIRLELETLYGELDRLAVERAEGLLTARQVKISTDIVNAKITKLQARQLDQERLRVFDGIPLGTPQVAGMIAELSPDRFRAVLDVLAEVVVQPVGKSGKIFNPERVQVNWR

SEQ ID NO: 139 - protein, 485 aa, synthetic construct
MTKKVAIYTRVSTTNQAEEGFSIDEQIDRLTKYAEAMGWQVSDTYTDAGLSGAKLERPAMQRLINDIENKAFDTVLVYKLDRLSRSVRDTLYLVKDVFTKNKIDFISLNESIDTSSAMGSLFLTILSAINEFERENIKERMTMGKLGRAKSGKSMMWTKTAFGYYHNRKTGILEIVPLQATIVEQIFTDYLSGISLTKLRDKLNESGHIGKDIPWSYRTLRQTLDNPVYCGYIKFKGSLFEGMHKPIIPYETYLKVQKELEERQQQTYERNNNPRPFQAKYMLSGMARCGYCGAPLRIVLGRKRKDGSRTMKYHCANRFPRKTKGVTVYNDNKKCDSGTYDLSNLENTVIDSLIGFQENNDSLLKIINGNNQPILETGSFKEQISQIDKKIQKNSDLYLNDFITMDELKDRTDSLQAEKKLLKAKISENKFNDSTDVFEQVKTQLGSIPINELSYDNKKEIVNNLVSKVDVTADNVDIIFKFQLA

SEQ ID NO: 140 - protein, 469 aa, synthetic construct
MSYTTLVRAAVYLRISEDRSGEQLGVARQREDCLKLCDQRKWVPVEYLDNDVSASTGKRRPAYEQMLADITAGKIEAVVAWDLDRLHRRPIELEAFMSLADEKRLALATVAGDVDLATPQGRLVARLKGSVAAHETEHKRARQRRAARQKAERGLPNWSKAFGYLPGPNGPEPDPRTAPLVKQAYADILAGASLGDVCRQWNDAGAFTITGRPWTTTTLSKFLRKPRNAGLRAYKGTRYGPVDRDAIVGKAQWSPLVDEATFWAAQAILDAPGRAPGRKSVRRHLLTGLAGCGKCGNHLAGSYRTDGRVVYVCKACHGVSILAVNIEPILYHTVAERLAMPDAVDLLRREIHDAAEAETTRLELEALYGELDRLAVERAEGLLTARQVKISTDIVNAKITKLQARQLDQERLRVFDGIPLGTPQVAGMIAELSPDRFRAVLDVLAEVVVQPVGKSGRIFNPGRVQVNWR

SEQ ID NO: 141 - protein, 485 aa, synthetic construct
MTKRVAIYTRVSTTNQAEEGFSIDEQIDRLTKYAEAMGWQVSDTYTDAGFSGAKLERPAMQRLINDIENRAFDTVLVYKLDRLSRSVRDTLYLVKDVFTKNKIDFISLNECIDTSSAMGSLFLTILSAINEFERENIKERMTMGKLGRARSGKSMMWTKTAFGYYHNRKTGILEIVPLQATIVEQIFTDYLSGISLTKLRDKLNESGHIGKDIPWSYRTLRQTLGNPVYCGYIKFKDSLFEGMHKPIIPYETYLKVQKELEERQQQTYERNNNPRPFQAKYMLSGMARCGYCGAPLRIVLGHKRKDGSRTMKYHCANRFPRKTRGVTVYNDNKKCDSGTYDLSNLENTVIDNLIGFQENDDSLLKIISGNNQPIQDTSSFKKQISQIDKKIQKNSDLYLNDFITMDELKDRTDSLQAEKKLLKAKISENKFNDSTDVFELVKTQLGSIPINELSYDNKKKIVNDLVSKVDVTADNVDIIFKFQLA

SEQ ID NO: 142 - protein, 452 aa, synthetic construct
MKAAIYIRVSTREQVENYSIQAQTEKLTALCRSKDWDVYDIFIDGGYSGSNMNRPALNEMLSKLHEIDAVVVYRLDRLSRSQRDTITLIEEYFLKNNVEFVSLSETLDTSSPFGRAMIGILSVFAQLERETIRDRMVMGKIKRIEAGLPLTTAKGRTFGYDVIDTKLYINEEEARQLQLIYDIFEEEQSITFLQKRLKKLGFKVHTYNRYNNWLTNDLYCGYVSYKDKVHVKGIHEPIISEEQFYRVQEIFTRMGKNPNMNRGSASLLNNLVVCSKCGLGFVHRRKDAMSRGKKYHYRYYSCKTYKHIHELEKCGNKIWRADKLEELIINRVNNYSLANRNVDKEDELDSLNEKLKTEHAKKKRLFDLYINGSYEVSELDSMMNDIDAQINYYEGQIEADEELKKNKKIQENLAHLATVDFDSLEFREKQLYLKSLINKIYIDGEQVTIEWL

SEQ ID NO: 143 - protein, 452 aa, synthetic construct
MKAAIYIRVSTREQVENYSIQAQTEKLTALCRSKDWDVYDIFIDGGYSGSNMNRPALNEMLSKLHEIDAVVVYRLDRLSRSQRDTITLIEEYFLKNNVEFVSLSETLDTSSPFGRAMIGILSVFAQLERETIRDRMVMGKIKRIEAGLPLTTAKGRTFGYDVIDTKLYINEEEAKQLQLIYDIFEEEQSITFLQKRLKELGFKVRTYNRYNNWLTNDLYCGYVSYKDKVRVKGIHEPIISEEQFYRVQEIFTRMGKNPNMNRDSASLLNNLVVCSKCGLGFVHRRKGIMSRGKKYHYRYYSCKTYKHIHELEKCGNKIWRADKLEELIINRVNNYSLASRNVEKEDELDSLNENLKIEHAKKRRLFDLYINGSYEVSELDSMMNDIDAQINYYESQIEANEELKKNKKIQENLADLATVDFDSLEFREKQLYLKSLINKIYIDGEQVTIEWL

SEQ ID NO: 144 - protein, 485 aa, synthetic construct
MTKKVAIYTRVSTTNQAEEGFSIDEQIDRLTKYAEAMGWQVSDTYTDAGFSGAKLERPAMKRLINDIENKAFDTVLVYKLDRLSRSVRDTLYLVKDVFTKNKIDFISLSESIDTSSAMGSLFLTILSAINEFERENIKERMTMGKLGRAKSGKSMMWTKTAFGYYHNRKTGILEIVPLQATIVEQIFTDYLSGISLTKLRDKLNESGHIGKDIPWSYRTLRQTLDNPVYCGYIKFKDSLFEGMHKPIIPYETYLKVQKELEERQQQTYERNNNPRPFQAKYMLSGMARCGYCGAPLRIVLGHKRKDGSRTMKYHCANRFPRKTKGVTVYNDNKKCDSGTYDLCNLENTVIDNLIGFQEDNDSLLKIINGNNQPILGTSSIKKQISQIDKKIQKNSDLYLNDFITMDELKDRTDSLQAEKKLLRAKISENKFNDSTDVFELVKTQLGSTPINELSYDSKKKIVNNLVSKVDVTADSVDIIFKFQLA

SEQ ID NO: 145 - protein, 485 aa, synthetic construct
MTKKVAIYTRVSTTNQAEEGFSIDEQIDRLTKYAEAMGWQVSDTYTDAGLSGAKLERPAMQRLISDIENKAFDTVLVYKLDRLSRSVRDTLYLVKDVFTKNKIDFISLNESIDTSSAMGSLFLTILSAINEFEREDIKERMTMGKLGRAKSGKSMMWTKTAFGYYHNRKTGILEIVPLQATIVEQIFTDYLSGISLTKLRDKLNESGHIGKDIPWSYRTLRQTLDNPVYCGYIKFKDSLFEGMHKPIIPYETYLKVQKELEERQQQAYERNNNPRPFQAKYMLSGMARCGYCGAPLRIVLGHKRKDGSRTMKYHCANRFPRKTKGVTVYNDNKKCDSGTYDLSNLENTVIDNLIGFQENNDSLLKIINGNNQPIQDTSSLKKQISQIDRKIQKNSDLYLNDFITMDELKVRTDSLQAEKKLLKTKISENKFNDSTDVFELVKTQLGSIPINELSYDNKKKIVNNLVSKVDVTADNVDIIFKFQLA

SEQ ID NO: 146 - protein, 485 aa, synthetic construct
MTKKVAIYTRVSTTNQAEEGFSIDEQTDRLTKYAEAMGWQVSGTYTDAGFSGAKLERPAMQRLINDIENKAFDTVLVYKLDRLSRSVRDTLYLVKDVFTKNRIDFISLNESINTSSAMGSLFLTILSAINEFERENIKERMTMGKLGRAKSGKSMMWTKTAFGYYHNRKTGILEIVPLQATIVEQIFTDYLSGISLTKLRDKLNESGHIGKDIPWSYRTLRQTLDNPVYCGYIKFKDSLFEGMHKPIIPYETYLKVQKELEERQQQTYERNNNPRPFQAKYMLSGMARCGYCGAPLKIALGHKRKDGSRTMRYHCANRFPRKTEGVTVYNDNRKCDSGTYDLSNLENTVIDSLIGFQENNDSLLKIISGNNQPILDTSSFEDRISQIDKKIQKNSDLYLNDFITMGELKDRTDSLRAEKELLKAKISENKFNDSTDVFELVKTQLGSIPINELSYDNKKKIVNNLVSKVDVTADNVDIIFKFQLA

SEQ ID NO: 147 - protein, 469 aa, synthetic construct
MSYITPVRAAMYLRISEDRSGEQLGVARQREDCLRLCDQRKWVPVEYLDNDVSASTGKRRPAYEQMLADITAGKIAAVVAWDLDRLHRRPVELEAFMSLADEKRLALATVAGDVDLATPQGRLVARLKGSVAAHETEHKKARQRRAARQKAERGHPNWRKAFGYLPGPNGPEPDPRTAPLVKQAYADILAGASLGDVCRQWNGAGAFTITGRPWTTTSLSKFLRKPRNAGLRAYRGAPYGPVDRDAIVGRAQWSPLVDEATFWAAQAVLDAPGRAPGRKSVRRHLLTGLAGCGKCGNHLAGSYRTDGRVVYVCKACYGVAILADNIEPILYHIVAERLAMPGAVDLLRREVHDAAEAETIRLELETLYGELDRLAVERAEGLLTARQVKISTDIVNAKITKLQARQLDQERLRVFDGIPLGTPQVAGAIAELSPDRFRAVLDVLAEVVVQPVGRGGRIFNPERVQVNWR

SEQ ID NO: 148 - protein, 485 aa, synthetic construct
MTKKVAIYTRVSTTNQAEEGFSIDEQVDRLTKYAEAMGWQVSDTYTDAGLSGAKLERPAMQRLINDIENKAFDTVLVYKLDRLSRNVRDTLYLVKDVFTKNKIDFISLNESIDTSSAMGSLFLTILSAINEFERENIKERMTMGKLGRAKSGKSMMWTKTAFGYHHNRKTGILEIVPLQATIVEQIFTDYLSGISLTKLRDKLNESGHIGKDIPWSYRTLRQTLDNPVYCGYIKFKDSLFEGMHKPIIPYETYLKVQKELEERQQQTCERNNNPRPFQAKYMLSGTARCGYCGAPLRIVLGHKRKDGSRTMKYHCANRFPRRTKGVTVYNDNKKCDSGTYDLSDLENTVIDNLVGFQENNDSLLKIINGNNQPILDASSVKKQISQIDKKIQKNSDLYLNDFITMDELKDRTDSLLAEKKLLEAKISENKLNDSTDVFELVKTQLGSIPINELSYDNKKKIVNNLVSKVDVSADNVDIIFKFQLA

SEQ ID NO: 149 - protein, 485 aa, synthetic construct
MTKKVAIYTRVSTTNQAEEGFSIDEQSDRLTKYAEAMGWQVSDTYTDAGFSGAKLERPAMQRLINDIENKAFDTVLVYKLDRLSRSVRDTLYLVKDVFTKNKIDFISLSESIDTSSAMGSLFLTILSAINEFERENIKERMTMGKLGRAKSGKSMMWTKTAFGYYHNRKTGILEIVPLQATIVEQIFTDYLSGTSLTKLRDKLNESGHIGKDIPWSYRTLRQTLDNPVYCGYIKFKDSLFEGMHKPIIPYETYLKVQKELEERQQQTYERNNNPRPFQAKYMLSGMARCGYCGAPLRIVLGHKRKDGSRTMKYHCANRFPRKTKGVTVYNDNKKCDSGTYDLSYLENTVIDNLIGLQKNNDSLLKIINGNNQPILDTSSFKEQISQIDKKIQKNSDLYLNDFITMDELKDRTDSLQAEKKLLKAKISVNEFNDGTDVFELVKTQLGSIPINELSYDNKKKIVNSLVSKVDVTADNVDIIFKFQLA

SEQ ID NO: 150 - protein, 485 aa, synthetic construct
MNKKVAIYTRVSTTNQAEEGFSIDEQIDRLTKYAEAMGWQVSDTYTDAGFSGAKLERPAMQRLINDIENKAFDTVLVYKLDRLSRSVRDTLYLVKHVFTKNKIDFISLNESIDTSSAMGSLFLTILSAINEFERENIKERMTMGKLGRAKSGKSMMWTKTAFGYYHNRKTGILEIVPLQATIVEQIFTDYLSGISLTKLRDKLNESGHIGKDIPWSYRTLRQTLDNPVYCGYIKFKDSLFEGMHKPIIPYETYLKVQKELEERQQQAYERNNNPRPFQAKYMLSGMARCGYCGAPLRIVLGHKRKDGSRTMKYHCANRFPRKTKGVTVYNENKKCDSGTYDLSNLENAVIDNLVGLQENNDSLLKIINGNNQPILDTSSFKEQISQIDKKIQKNSDLYLNDFITMDELKDRTDSLQAEKKLLKAKISENKSNDGTDVFELVKTQLGSIPINELSYDNKKKIVNNLVSKVDVTADNVDIIFKFQLA

SEQ ID NO: 151 - protein, 469 aa, synthetic construct
MSYTTPVRAAVYLRISEDRSGEQLGVARQREDCLKLCDQRKWVPVEYLDNDVSASTGKRRPAYEQMLADITAGEIAAVVAWDLDRLHRRPTELEAFMSLADEKRLALATVAGDVDLATPQGRLVARLKGSVAAHETEHKRARQRRAARQKAERGLPNWSKAFGYLPGPDGPEPDPRTAPLVKRAYADILAGASLGDVCRQWNGAGALTITGRPWTTTALSKFLRKPRNAGLRTYKGACYGPVDRDAIVGKAQWSPLVDEATFWAAQAVLDAPGRAPGRKSVRRHLLTGLAGCGKCGNHLAGSYRTDGRVVYVCKACHGVAILADNIEPILYHIVAERLAMPDAVDLLRREIHDAAEAETIRLELETLYGELDRLAVERAEGLLTARQVKISTDIVNAKITKLQARQLDQERLRVFDGIPLGTPRVAGMIAELSPDRFRAVLNVLAEVVVQPVGKGGRIFNPERVQVNWR

SEQ ID NO: 152 - protein, 485 aa, synthetic construct
MTKKVAIYTRVSTTNQAEEGFSIDEQSDRLTKYAEAMGWQVSDTYTDAGFSGAKLERPAMQRLINDIETKAFDTVLVYKLDRLSRSVRDTLYLVKDVFTKNKIDFISLNESIDTSSAMGSLFLTILSAINEFERENIRERMTMGKLGRAKSGKSMMWTKTAFGYYHNRKTGILEIVPLQATIVEQIFTDYLSGISLTKLRDKLNESGHIGKDIPWSYRTLRQTLDNPVYCGYIKFKDSLFEGMHKPIIPYETYLKVQKELEERQQQTYERNNNPRPFQAKYMLSGMARCGYCGAPLRVVLGHKRKDGSRTMKYHCANRFPRKTKGVTVYNDNKKCDSSAYDLSSLENTVIDNLIGFQENNDSLLKIINGNNQPILDTSSFKKQISQIDKKIQKNSDLYLNDFITMDELRDRTDSLQAEKKLLKAKISENKFNDSTDVFELVKTQLGSIPISELSYDNKKKIVNNLVSKVDVTADNVDIIFKFQLA

SEQ ID NO: 153 - protein, 469 aa, synthetic construct
MSYTTPVRAAVYLRISEDRSGEQLGVARQREDCLKLCGQRKWVPVEYLDNDVSASTGKRRPAYEQMLADITAGKIAAVVAWDLDRLHRRPVELEAFMSLADEKRLALATVAGDVDLATPQGRLVARLKGCVAAHETEHKKARQRRAARQKAERGHPNWSKAFGYLPGPNGPEPDPRTAPLVKQAYTGILAGASLGDVCRQWNDAGAFTITGRPWTTTTLSKFLRKPRNAGLRTYRGARYGPVDRDAIVGKAQWSPLVDEATFWAAQAVLDAPGRAPGRKSVRRHLLTGLAGCGKCGNHLAGSYRTDGRVVYVCKACHGVAILADNIEPILYHVVAERLAMPGAVDLLHRETHDAAEAETIRLELETLYGELDRLAVERAEGLLTARQVKISTDIVNAKITKLQARQLDQERLRVFDGIPLGTPQVAGMVAELSPDRFRAVLDVLAEVVVQPVGKSSRIFNPERVQVNWR

SEQ ID NO: 154 - protein, 452 aa, synthetic construct
MKAAIYIRVSTQEQVGNYSIQAQTEKLTALCRSKDWDVYDIFIDGGYSGSNMNRPALNEMLSKLHEIDAVVVYRLDRLSRSQRDTTTLIEEYFLKNNVEFVSLSETLDTSSPFGRAMIGILSVFAQLERETIRDRMVMGKIKRIEAGLPLTTAKGRTFGYDVIDTKLYINEEEAKQLQLIYDIFEEEQSITSLQKRLKKLGFKVRTYNRYNNWLTNDLYCGYVSYKDKVHVKGIHEPIISEEQFYRVQEIFTHMGKNPNMNRDSASLLNSLVVCSKCGLGFVHRSKDTMSRGKKYHYRYYSCKTYKHTHELEKCGNKIWRADKLEELIINRVNDYSFASRKADKEDELDSLNEKLKVEHAKKKRLFDLYINGSCEMSELDSMMNDIDAQINYYESQIEANVELKKNKKIQENLADLATVDFDSLEFREKQLYLKSLINKIYIDGEQVTIEWL

SEQ ID NO: 155 - protein, 485 aa, synthetic construct
MTKKVAIYTRVSTTNQAEEGFSIDEQIGRLTKYAEAMGWQVSDTYTDAGFSGAKLERPAMQRLINDIENKAFDTVLVYKLDRLSRSVRDTLYLVKDVFTKNKIDFISLNESIDTSSAMGSLFLTILSAINEFERENIKERMTMGKLGRAKSGKSMMWTKTAFGYYHNRKTGILEIVPLQATIVEQIFTDYLSGISLTKLRDKLNESGHIGKDIPWSYRTLRQTLDNPVYCGYIRFKDSLFEGMHKPIIPYETYLKVQKELEERQQQAYERNNNPRPFQAKYMLSGMARCGYCGAPLRIVLGHKRKDGSRTMKYHCANRFPRKTKGVTVYNDNKKCDSGTYDLSNLENTVIDNLIGFQENNDSLLKIINGNNQPILDTSSLKQQISQIDKKIQKNSDLYLNDFITMDELKDRTDSLQAEKKLLKAKISENKFNDSTDVFELVKTQLGGIPINELSYDNKKKIVNNLVSKVDVTADNVDVIFKFQLA

SEQ ID NO: 156 - protein, 469 aa, synthetic construct
MCYTTPVRAAVYLRISEDRSGEQLGVARQREDCLELCDQRKWVPVEYLDNDVSASTGKRRPAYEQMLADITAGKIAAVVAWDLDRLHRRPIELEAFMSLADEKRLALATVAGDVDLATPQGRLVARLKGCVAAHETEHKKARQRRAARQKAERGLPNWSKAFGYLPGPNGPEPDPRTAPLVKQAYADILAGASLGDVCRQWNGAGAFTVTGRLWTTTALSKFLRKPRNAGLRAYQGARYGPVDRDAIVGKAQWSPLVDEATFWAAQAVLDAPGRAPGRKSVRRHLLTGLAGCGKCGNHLAGSYRTDGRVVYVCKACHGVAILADNIEPILYRIVAERLAMPDAVGLLCREIRDAAEAETIRLELETLYGELDRLAVERAEGLLTARQVKIGTDIVNAKIAKLQARQLDQGRLRVLDGIPLGTPQVAGMIAELSPDRFRAVLDALAEVVVQPVGKRGRIFSQERVQVNWR

SEQ ID NO: 157 - protein, 485 aa, synthetic construct
MTKKVAIYSRVSTTNQAEEGFSIDEQIDRLTKYAEAMGWQVSDTYTDAGLSGAKLERPAMQRLINDIENKAFDTVLVYKLDRLSRSVRDTLYLVKDVFTKNKIDFISLNESIDTSSAMGSLFLTILSAINEFERENIKERMTMGKLGRAKSGKSMMWTKTAFGYYHNRKTGILEIVPLQAAIVKQIFTDYLSGISLTKLRDKLNESGHIGKDIPWSYRTLRQTLDNPVYCGYIKFKDSLFEGMHKPIIPYETYLKVQEELEERQQQTYERNNNPRPFQAKYMLSGMARCGYCGAPLKIVLGHKRKDGSRTMKYHCANRFPRKTKGITVYNDNKKCNSGAYDLSNLENTVIDNLIGFQENNDSLLKIINGNNQPILDTSSLKKQISQIDKKIQKNSDLYLNDFITMDELKDRTDSLQAEKKLLKAKISENKFNDGTDVFGLVKTQLGSIPINELSYDNKKKIVNNLVSKVDVTADNVDIIFKFQLA

SEQ ID NO: 158 - protein, 469 aa, synthetic construct
MNYTTPVRAAVYLRISEDRSGEQLGVARQREDCLKLCGQRKWEPVEYLDNDVSASTGKCRPAYEQMLADITEGKIAAVVAWDLDRLHRRPIELEAFMSLADEKRLALATVAGDVDLATPQGRLVARLKGSVAAHETEHKKARQRRAARQKAERGLPNWSKAFGYLPGPNGPEPDPRTAPLVKRAYADILAGASLGDVCRQWNDAGASTITGRPWTATTLSKFLRKPRNAGLRAYKGARYGPVDRDAIVGKARWSPLVDEATFWAAQAVLDAPGRAPGRKSVRRHLLTGLAGCGKCGNHLAGSYRTDGRVVYVCKACHGVAILADNIEPILYHIVAERLAMPDAVDLLRREIHDAAEAETIRLELETLYGELDRLAVERAEGLLTARQVKISTDIVNTKITKLKARQLDQERLRVFDGIPLGTPQVAGMIAELSPNRFRAVLNVLAEVVVQPVGKSGRIFNPERVQVNWR

SEQ ID NO: 159 - protein, 469 aa, synthetic construct
MSYTTPVRAAVYLRISEDRSGEQLGVARQREDCLKLCGQRKWVPVEYLDNDVSASTGKRRPAYEQMLADITAGKIAAVVAWDLDRLHRRPIELEAFMSLADEKRLALATVAGDVDLATPQGRLVARLRGSVAAHETEHKKARQRRAARQKAERGYPNWSKAFGYLPGPNGPEPDPRTAPLVKQAYADILAGASLGDVCRQWNDAGAFTITGRPWTTTTLSKFLRKPRNAGLRAYKGARYGPVDRDAIVGKAQWSPLVDEATFWAAQAVLDAPGRAPGRKSVRRHLLTGLAGCGKCGNHLAGSYRTDGRVAYVCKACHGVAILADNIEPILYHIVAERLAMPDAVDLLRREIHDAAEAETIRLELETLYGELDRLAVERAEGLLTARQVKISTDIVNAKITKLQARQLDQERLRVFDGIPLGTPQVAGVIAELSPDRFRAVLDVLAEVVVQPVGKSGRISNPERVQVNWR

SEQ ID NO: 160 - protein, 469 aa, synthetic construct
MSYTTPVRAAVYLRISEDRSGEQLGVARQREDCLELCDQRKWEPVEYLDNDVSASTGKRRPAYEQMLADITAGKIAAVVAWDLDRLHRRPIELEAFMSLADEKRLALATVAGDVDLATPQGRLVARLKGSVAAHETEHKKARQRRAARQKAERGHPNWSKAFGYLPGPNGPEPDPRTAPLVKQAYVDILAGASLGDVCRQWNGAGAFTITGRPWTTTTLSKFLRKPRNAGLRAYRGARYGPVDRDAIVGKAQWSPLVDEATFWAAQAVLDAPGRAPGRKSVRRHLLTGLAGCGKCGNHLAGSCRTDGRVVYVCKACHGVAILADNIEPILYHIVAERLAMPDAVDLLRREIHDVAEAETIRLELETLYGELDRLAVERAEGLLTARQVKISTDIVNVKITELQARQLDQERLRVFDGIPLGTPQVAGMIAELSPDRFRAVLDVLAEVVVQPVGKGGRIFNPERVQVNWR

SEQ ID NO: 161 - protein, 485 aa, synthetic construct
MTKKVAIYTRVSTTNQAEEGFSIDEQIDRLTKYAEAMGWQVSDTYTDAGSSGAKLERPAMQRLINDIENKAFDTVLVYKLDRLSRSVRDTLYLVKDVFTKNKVDFISLNESIDTSSAMGSLFLTILSAINEFERENIKERMTMGKLGRAKSGKSMMWTKTAFGYYHNRKTGILEIVPLQATIVEQIFTDYLSGISLTKLRDKLNESGHIGKDIPWSYRTLRQTLDNPVYCGYIKFKDSLFEGLHKPIIPYETYLRVQKELEERQQQTYERNNNPRPFQAKYMLSGMARCGYCGAPLRIVLGHKRKDGSRTMKYHCANRFPRKTKGVTVYNDNKKCDSGTYDLSNLENTVIDSLIGFQENNDSLLKIINGNNQPILDTSSFKKQISQIDKKIQKNSDLYLNDFITMDELKDRTDSLQAEKKLLKAKISENKFNDSTDVFELVKAQLGSIPINELSYDNKKKIVNNLVSKVDVTADNVDIIFKFQLA

SEQ ID NO: 162 - protein, 452 aa, synthetic construct
MKAAIYIRVSTREQVENYSIQAQTEKLTALCRSKDWDVYDIFIDGGYSGSNMNRPALNEMLSKLREIDAVVVYRLDRLSRSQRDTITLIEEYFLKNNVEFVSLSETLDTSSPFGRAMIGILSVFAQLERETIRDRMVMGKIKRIEAGLPLTTAKGRTFGYDVTDTKLYINEEEAKQLQLIYDIFEEERSITFLQKRLKKLGFKVHTYNRYNNWLTNDLYCGYVSYKDKVHVKGIHEPIISEEQFYRVQEIFARMGKNPNMNRDSASLLNNLVVCSKCGLGFVHRRKDAMSRDKRYHYRYYSCKTYKHIHELEKCGNKIWRADKLEELIINRVNDYSLASRNVDKEDELDSLNEKLKVEHAKKKRLFDLYVNGSYEVSELDSMMDDIDAQINYYESQIEANEELKKNRKIQENLAELATVDFDSLGFREKQLYLKSLINKIYIDGEQVTIEWL

SEQ ID NO: 163 - protein, 469 aa, synthetic construct
MSYTTPVRAAVYLRISEDRSGEQLGVARQREDCLKLCGQRKWVPVEYLDNDVSASTGKRRPAYEQMLADITAGKIAAVVAWDLDRLHRRPIELEAFMSLADEKRLALATVAGDVDLATPQGRLVARLKGSVAAHETEHKKARQRRAARQKAERGLPNWSKAFGYLPGPNGPEPDPRTAPLVEQAYADILAGASLGDVCRQWNDAGAFTITGRPWTTTTLSKFLRKPRNAGLRAYKGARYGPVDRDAIVGKAQWSPLVDEATFWAAQAVLDAPGRAPGRKSVRRHLLTGLAGCGKCGNHLAGSYRTDGRVVYVCKACHGVAILADNIEPMLYHTVAVRLAMPDAVDLLRREIHDAAEAETIRLELETLYGELDRLAVERAEGLLTARQVKISTGIVNAKITKLQARQLDQERLRVFDGIPLGTPRVAGMIAELSPDRFRAVLDVLVEVVVQPVGKSGRIFNRERVQVNWR

SEQ ID NO: 164 - protein, 469 aa, synthetic construct
MCYTTPVRAAVYLRISEDRSGEQLGVARQREDCLKLCDQRKWVPVEYLDNDVSASTGKRRPAYEQMLADITAGKIAAVVAWDLDRLHRRPIELEAFMSLADGKRLALATVAGDVDLATPQGRLVARLKGSVAAHETEHKKARQRRAARQKAERGYPNWSKAFGYLPGPTGPEPDPRTAPLVKQAYADILAGASLGDVCRRWNDAGAFTITGRPWTTTTLSKFLRKPRNAGLRAYKGARYGPVDRDAIVGKAQWSPLVDEATFWAAQAVLDAPGRAPGRKSVRRHLLTGLAGCGKCGNHLAGSYRTDGRVVYVCKACHGVAILADNIEPILYHIVAERLAMPDAVDLLRREIHDAEEAEAIRLELETLCGELDRLAVERAEGLLTARQVKISTDIVNVKITKLQARQLDQERLRVLDGIPLGTPQAASMIAELSPDRFRAVLDVLAEVVVQPVGKSGRIFNPERVQVSWR

SEQ ID NO: 165 - protein, 485 aa, synthetic construct
MTKKVAIYTRVSTTNQAEEGFSIDEQIDRLTKYAEAMGWQVSDTYTDAGFSGAKLERPAMQCLINDIENKAFDTVLVYKLDRLSRSVRDTLYLVKDVFTKNKIDFVSLNESINTSSAMGSLFLTILSAINEFERENIKERMTMGKLGRAKSGKSMMWTKTAFGYYHNRKTGILEIVPLQATIVEQIFTDYLSGISLTKLRDKLNESGHIGKDIPWSYRTLRQTLDNPVYCGYIKFKDSLFEGMHKPIIPYETYLKVQKELEERQQQTYERNNNPRPFQAKYMLSGMARCGYCGAPLKIVLGHKRKDGSRTMKYHCANRFPRKTKGVTVYNNNKKCDSGTYDLSNLENTVIDNLIGFQENNNSLLKIINGSNQPILDTSSFKKQISQIDKKIQKNSDLYLNDFITMDELKDRTESLQAEKKLLKAKISENKFNDSTDVFELVKAQLGSIPINELSYDDKKKIVNNLVSKVDVTADNVDIIFKFQLA

SEQ ID NO: 166 - protein, 452 aa, synthetic construct
MKAAIYIRVSTREQVENYSIQAQTEKLTALCRSKDWDVYDIFIDGGYSGSNMNRPALNEMLSKLHEIDAVVVYRLDRLSRSQRDTITLIEEYFLKNNVEFVSLSETLDTSSPFGRAMIGILSVFAQLERETIRDRMVMGKIKRIEAGLPLTTAKGRTFGYDVIDTKLYINEEEAKQLQLIYDIFEEEQSITFLQKRLKKLGFKVRTYNRYNNWLTNDLYCGYVSYKDKVHVKGIHEPIISEEQFYRVQEIFTRMGKNPNMNRDSASLLNNLVVCSKCGLGFVHRRKDAMSRDKKYHYRYYSCKTYKHIHELEKCGNKIWRADKLEELIISRVNNYSFASRNVDKEGELDSLYEKLKIEHAKKRRLFDLYINGRYEVSELDSMMNGIDAQINYYESQIEVSEELKKNKKIQENLAYLAAVDFDSLEFREKQLYLKSLINKIYIDGEQVTIEWL

SEQ ID NO: 167 - protein, 469 aa, synthetic construct
MSYTTPVRAAVYLRISEDRSGEQLGVARQREDCLKLCDQRKWVPVEYLDNDASASTGKRRPAYEQMLADITAGKIAAVVAWDLDRLHRRPIELEAFMSLADEKRLALATVAGDVDLATPQGRLVARLKGSVAAHETEHKRARQRRAARQKAERGLPNWSRAFGYLPGPNGPEPDPRTAPLVEQAYADVLAGASLGDVCRQWNDAGAFTITGRPWTTTTLSKFLRKPRNAGIRAYKGARYGPVDRDAIVGKAQWSPLVDEATFWAAQAVLDAPGRAPGRKSVRRHLLTGLAGCGKCGNHLAGSYRTDGKVVYVCKACHGVAILADNIEPILYHIVAERLATPDAVDLLRREVHDAAEAETIRLELETLYGELDRLAVERAEGLLTARQVKISTDIVDAKITKLLARQLDQERLRVLDGIPLGTPQVAGMIAELSPDRFRAVLDVLVEVVVQPVGKSGRIFNPERVQVNWR

SEQ ID NO: 168 - protein, 485 aa, synthetic construct
MTRKVAIYTRVSTTNQAEEGFSIDEQIDRLTKYAEAMGWQVSDTYTDAGFSGAKLERPAMQRLINDIENKAFDTVLVYKLDRLSRSVRDTLYLVKDVFTKNKIDFISLNESINTSSAMGSLFLTILSAINEFERENIKERMTMGKLGRAKSGKSMMWTKTAFGYRHNRKTGILEIVPQQATIVEQIFTDYLSGISLTKLRDKLNENGHIGKDIPWSYRTLRQTLDNPVYCGYIKFKDSLSEGMHKPIIPYETYLKVQRELEERQQQTYERNNNPRPFQAKYMLSGMARCGYCGAPLRIVLGHKRKDGSRTMKYHCANRSPRRTKGVTVYNDNKKCDSGTYDLSSLENIVIDNLIGFQENNDSLLNVINGNNQPILDTSSFEKQISQIDKKIQKNSDLYLNDFITMDELKDRTYSLQAEKELLKAKISENKFNDSTEVFELVKTQLGSIPINELSYDNKKKIVNNLVSKVDVTADNVDIIFKFQLA

SEQ ID NO: 169 - protein, 485 aa, synthetic construct
MTKKVAIYTRVSTTNQAEEGFSIDEQIDRLTKYAEAMGWQVSDTYTDAGLSGAKLERPAMQRLINDIENKAFDTVLVYKLDRLSRSVRDTLYLVKEVFTKNKIDFISLNESIDTSSAMGSLFLTILSAINEFERENIKERMTMGKLGRAKSGKSMMWTKTAFGYYHNRKTGILEIVPLQATIVEQIFTDYLSGTSLTKLRDKLNESGHIGKDIPWSYRTLRQTLDNPVYCGYIKFKDSLFEGMHKPIIPYETYLKVQKELEERQQQTYERNNNPRPFQAKYMLSGMARCGYCGAPLKIVLGHKRKDGSRTLKYHCANRFPRKTKGVTVYNDNKKCDSGTYDLSNLENTVIDNLIGFQENNDSLLKVINGNNQPILDTSSFKKQISQIDKKIQKNSDLYLNDFITMDELKDRTDSLQAEKKLLKAKISENKFNDSTDVFELVKTQLGSIPINELSYDNKKKIVNNLVSKVDVTADNVDIIFKFQLA

SEQ ID NO: 170 - protein, 485 aa, synthetic construct
MTKKVAIYTRVSTTNQAEEGFSIDEQIDRLTKYAEAMGWQVSDTYTDAGLSGAKLERPAMQRLINDIENKAFDTVLVYKLDRLSRSVRDTLYLVKDVFTKNKIDFISLSESIDTSSAMGSLFLTILSAINEFERENIKERMTMGKLGRAKSGKSMMWTKTAFGYYHNRKTGILEIVPLQATIVEQIFTDYLSGISLTKLRDKLNESGHIGKDIPWSYRTLRQTLDNPVYCGYIKFKDSLFEGMHKPIIPYETYLKVQKELEERQQQTYERNNNPRPFQAKYMLSGMARCGYCGAPLRIVLGHRRKDGSRTMKYHCANRFPRKTKGVTVYNDNKRCDSGTYDLSNLENTVIDILIGLQENNDSLLKIINGSDQQILDTSSFKKQISQIDKKIQKNSDLYLNDLTTMDELKDRTDSLQAEKRLLKAKISENKFNDSTDVFELVKTQLGSIPINELSYDNKRRIVNNLVSKVDVTADNVDIIFKFQLA

SEQ ID NO: 171 - protein, 452 aa, synthetic construct
MKAAIYIRVSTQEQVGNYSIQAQTEKLTALCRSKDWDVYDIFIDGGYSGSNMNRPALNEMLSKLHEIDAVVVYRLDRLSRSQRDTTTLIEEYFLKNNVEFVSLSETLDTSSPFGRAMIGILSVFAQLERETIRDRMVMGKIKRIEAGLPLTTAKGRTFGYDVIDTKLYINEEEAKQLQLIYDIFEEEQSITSLQKRLKKLGFKVHTYNRYNNWLTNDLYCGYVSYKDKVHVKGIHEPIISEEQFYRVQEIFTRTGKNLNMNRDSASLLNNLVVCSKCGLGFVHRSKDTMSRGKRYHYRYYSCKTYKHTHELEKCGNKTWRADKLEELIINCVSNYSPASRNVDKEDELDGLNEKLKIEHAKKKRLFDLYINGSYEVSELDSMMNDIDAQINYYESQIEAKEELRRNKKIQENLADLATVDFDSLEFREKQLYLKSLINKIYIDGEQVTIEWL

SEQ ID NO: 172 - protein, 485 aa, synthetic construct
MTKKVAIYTRVSTTNQAEEGFSIDEQIDRLTKYAEAMGWQVSDTYTDAGFSGAKLERPAMQRLINDIENKAFDTVLVYKLDRLSRSVRDTLYLVKDVFTKNKIDFISLSESINTSSAMGSLFLTILSAINEFERENIKERMTMGKLGRAKSGKSMMWTKTAFGYYHNRKTGILEIMPLQATIVEQIFTDYLSGISLTKLRDKLNESGHIGKDIPWSYRTLRQTLDNPVYCGYIKFKDSLFEGMHEPIIPYETYLKVQKELEERQQQTYERNNNPRPFQAKYMLSGMARCGYCGAPLKIVLGHKRKDGSRTMKYHCANRFPRKTEGVTVYSDNKKCDSGTYDLSDLENTVIDNLIGFQENNDSLLKIINGNNQPILDTSSFKEQISQIDKRIQRNSDLYLNDFITMDELKVRTDSLQAEKKLLKAKISENKFSDSTDVFELVKTQLGSIPIDELSYDNKKKIVNNLVSKVDVTADNVDIIFKFQLA

SEQ ID NO: 173 - protein, 485 aa, synthetic construct
MTRKVAIYTRVSTANQAEEGFSIDEQIDRLTKYAEAMGWQVSDTYTDAGFSGAKLKRPAMQRLINDIENKAFDTVLVYKLDRLSRSVRDTLYLVKDVFTKNKIDFISLNESINTSSAMGSLFLTILSAINEFERENIKERMTMGKLGRAKSGKSMMWTKTAFGYYHNRKTGILEIVPLQATIVEQIFTDYLSGISLTKLRDKLNESGHIGKDIPWSYRTLRQTLDNPVYCGYIKFKDSLFEGMHKPIIPYETYLKVQKELEERQQQTYERNNNPRPFQAKYMLSGMARCGYCGAPLRIVLGHKRKDGSRTMKYHCANRFPRKTKGVTVYNDNRRCDSGTYDLSNLENAVIDNLIGFQENNDSLLKIINGNNQPILDTSSFKKQLSQIDKKIQKNGDLYLNDFITMDELKDRTDSLQAEKKLLEAKISENKFNNSTDVFELVKTQLGSIPINELSYDNKKKIVNNLVSKVDVTADNVDIIFKFQLA

SEQ ID NO: 174 - protein, 485 aa, synthetic construct
MTKKVAIYTRVSTTNQAEEGFSIDEQIDRLTKYAEAMGWQVSDTYTDAGLSGAKLERPAMQRLISDIENKAFDTVLVYKLDRLSRSVRDTLYLVKDVFTKNKIDFISLNESIDTSSAMGSLFLTILSAINEFERENIKERMTMGKLGRAKSGKSMMWTKTAFGYYHNRKTGILEIVPLQATIVEQIFTDYLSGISLTKLRDKLNEGGHIGKDIPWSYRTLRQTLDNPVYCGYIKFKDSLFEGMHKPIIPYETYLKVQKELEERQQQTYERNNNPRPFQAKYMLSGMARCGYCGAPLKIVLGHKRKDGSRTMKYHCANRFPRKTKGVTVYNDNKKCDSGTYDLSNLENTVIDNLIGFQENNDSLLKIINGNNQPILDTSSFERQISQIDKKIQKNSDLYLNDFITMDELKDRTDSLLAEKELLKAKISENKSNDSTDMFELVKTQLGSIPINELSYDNKKKIVNNLVSKVDVTADNVDIIFKFQLA

SEQ ID NO: 175 - protein, 485 aa, synthetic construct
MTKKVAIYTRVSTTNQAEEGFSIDEQIDRLTKYAEAMGWQVSDTYTDAGFSGAKLVRPAMQRLIDDIENKAFDTVLVYKLDRLSRSVRDTLYLVKDVFTKNKIDFISLNESIDTSSAMGSLFLTILSAINEFERENIKERMTMGKLGRAKSGKSMMWTKTAFGYYHNRKTGILEIVPLQATIVEQIFTDYLSGISLTKLRDKLNESGHIGKDIPWSYRTLRQTLDNPVYCGYIKFKDSLFEGMHKPIIPYETYLKVQKELEERQQQTYERNNNPRPFQAKYMLSGMARCGYCGAPLKIVLGHKRKDGSRTMKYHCANRFPRKTKGVTVYNDNKKCDSGTYDLSNLENTVIDNLIGLQENNDSLLKIINGNNQPIPDTSSLKKQISQIDKKIQKNSNLYLNDFITMDELKDRTDSLQAEKKLLKAKISENRFNDSTDVFELVKTQLGSIPIDELSYDNKKKIVNNLVSKVDVTADNVDIIFKFQLA

SEQ ID NO: 176 - protein, 469 aa, synthetic construct
MSYTTPVRAAVYLRISEDRSGEQLGVARQREDCLKLCGQHKWVPVEYLDNDVSASTGKRRPAYEQMLADITAGKIAAVVAWDLDRLHRRPVELEAFMSLADEKRLALATVAGDVDLATPQGRLVARLKGCVAAHETEHKKARQRRAARQKAERGHPNWSKAFGYLLGPNGPEPDPRTAPLVKQAYADILAGASLGDVCRQWNGAGAFTITGRPWTTTALSKFLRKPRNAGLRAYKGARYGPVDRDAIVGKAQWSPLVDEATFWAAQAVLDAPGRAPGRKSVRRHLLTGLAGCGKCGSHLAGSYRTDGRVVYVCKACHGVAILADNIEPILYHIVAERLAMPDAVDLLRREIHDAAEAETIRLELETLYGELDRLAVERAEGLLTARQVKISTDIVNAKITKLQARQLDQERLRVLDGIPLGTPQVAGVIAELSPDRFRAVLDVLAEVVVQPVGKSGRIFNPERVRVDWR

SEQ ID NO: 177 - protein, 485 aa, synthetic construct
MTKKVAIYTRVSTTNQAEEGFSIDEQIDRLTKYAEAMGWQVSDTYTDAGFSGAKLERPAMQRLINDIENKAFDTVLVYKLDRLSRSVRDTLYLVKDVFTKNKIDFISLDESINTSSAMGSLFLTILSAINEFERENIKERMTMGKLGRAKSGKSMMWTKTAFGYYHNRKTGILEIVPLQATIVEQIFTDYLSGISLTKLRDKLNESGHIGKDIPWSYRTLRQTLDNPVYCGYIKFKDSLFEGMHKPIIPYETYLKVQKELEERQQQTYERNNNPRPFQAKYMLSGMARCGYCGAPLRIVLGHKRKDGSRTMKYHCANRFPRKTKGVTVYNDNRKCDSGTYDLSNLENTVIDNLIGFQENNDSLLKIINGNNQPILDTCSFKEQISQIDKKIQKNSDLYLNDFITMDELKERTDSLQAEKKLLKAKISEDKFNDSTDVFELVKTQLGSIPINELSYDNKKKIVNSLVSKVDVTADNVDIIFKFQLA

SEQ ID NO: 178 - protein, 485 aa, synthetic construct
MTKKVAIYTRVSTTNQAEEGFSIDEQIDRLTKYAEAMGWQVSNTYTDAGFSGAKLERPAMQRLINDIENRAFDTVLVYKLDRLSRSVRDTLYLVKDVFTKNKIDFISLNESINTGSAMGSLFLTILSAINEFERENIKERMTMGKLGRAKSGKSMMWTKTAFGYNHNRKTGILEIVPLQATIVEQIFTDYLSGISLTKLRDKLNESGHIGKDIPWSYRTLRQTLDNPVYCGYIKFKDSLFEGMHKPIIPYETYLKVQKELEERQQQTYERNNNPRPFQAKYMLSGMARCGYCGAPLKIVLGHKRKDGSRTMKYHCANRFPRKTKGVTVYNDNKKCDSGTYDLSNLENTVIDSLIGFQENNDSLLKIINGNNQPILDTSSFKEQISQIDKKIQKNSDLYLNDFITMDELKDRTDRLQAEKKLLKAKISENKFNDSTDVFELVKTQLGSIPINELSYDNKKKIVNNLVSKVDVTADNVDIIFKFQLA

SEQ ID NO: 179 - protein, 485 aa, synthetic construct
MTKKVAIYTRVSTTNQAEEGFSIDEQIDRLTKYAEAMGWQVSDTYTDAGSSGAKLERPAMQRLINDIENKVFDTVLVYKLDRLSRSVRDTLYLVKDVFTKNKIDFISLSEGIDTSSAMGSLFLTILSAINEFERENIKERMTMGKLGRAKSGKSMMWTKTAFGYYHNRKTGILEIMPLQAAIVEQIFTDYLSGISLTKLRDKLNESGHIGKDIPWSYRTLRQTLDNPVYCGYIKFKGSLFEGMHKPIIPYETYLKVQKELGERQQQTYERNNNPRPFQAKYMLSGTARCGYCGAPLRIVLGHKRKDGSRTMKYHCANRFPRKTRGITVYNDNKKCDSGTYDLSNLENIVIDNLIGFQENNDSLLKIINGNNQPILDTSSIKKQISQIDKKIQKNSDLYLNDFITMDELKARTDSLQAEKKLLKARISKNEFNDRTDVFELVNTQLGSIPINELSYDNKKKIVNNLVSKVDVTADNVDIIFKFQLA

SEQ ID NO: 180 - protein, 470 aa, synthetic construct
MSYTTPVRAAVYLRISEDRSGEQLGVARQREDCLKLCDQRKWVPVEYLDNDVSASTGKRRPAYEQMLADITAGKIAAVVAWDLDRLHRRPIELEAFMSLADEKRLALATVAGDVDLATPQGRLVARLKGSVAAHETEHKKARQRRAARQKAERGHPNWSKAFGYLPGPNGPEPDPRTAPLVKQAYADILAGASLGDVCRQWNDAGAFTITGRPWTTTTLSKFLRKPRNAGLRAYKGARYGPVDRDAIVGKAQWSPLVDEATFWAAQAVLDAPGRAPGRKSVRRHLLTGLVGCGKCGNHLAGSYRTDGRVVYVCKTCHGVTILADNIEPILYHIVAERLATPNAVDLLRCEIYDAAEAETTRLELETLYGELDRLAVERAEGLLTARQVKICTDIVNAKITKLQTRQLDQERLRVFDGIPLGTPQVAGMIAELSPNRFRAVLGVLAEVVVQPVGKSGRIFNPERVQVNWRQ

SEQ ID NO: 181 - protein, 469 aa, synthetic construct
MSYTTPVRAAVYLRISEDRSGEQLGVARQREDCLKLCDQRKWVPVEYLDNDVSASTGKRRPAYEQMLADITAGKIAAVVAWDLDRLHRRPIELEAFMSLADEKRLALATVAGDVDLATPQGRLVARLKGSVAAHETEHKKARQRRAARQKAERGFPNWSKAFGYLPGPNGPEPDPRTAPLVEQAYADILAGASLGDVCRQWNDAGAFTITGRPWTATTLSKFLRKPRNAGLRAYKGARYGPVDRDAIVGKAQWSPLVDEATFWAAQAVLDAPGRAPGRKSVRRHLLTGLAGCGKCGNHLAGSYRTDGRVVYVCKACHGVAILADNIEPILYHIVAERLAMSDAVNLLRREIHDAAEAETIRLELETLYGELDRLAVERAEGLLTARQVKISTDIVNAKITKLQACQLDQERLRVFDGIPLGTPQVAGMIAELSPGRFRAVLDVLAEVVVQPVGKSGRIFNPERVQVNWR

SEQ ID NO: 182 - protein, 469 aa, synthetic construct
MSYTTPVRAAVYLRISEDRSGEQLGVARQREDCLKLCDQRKWVPVEYLDNDVSASTGKRRPAYEQMLADIAAGKIAAVVAWDLDRLHRRPIELEAFMSLADEKRLALATVAGDVDLATPQGRLVARLKGSVAAHETEHKKARQRRAARQKAERGHPNWSKAFGYLPGPNGPEPDPQTAPLVKQAYADILAGASLGDVCRRWNDAGAFTITGRPWTTTVLSKFLRKPRNAGLRAYKGTRYGPVDRDAIVGKAQWSPLVDEATFWAAQAVLDAPGRAPGRKSVRRHLLTGLAGCGKCGNHLAGSYRADGRVVYVCKACHGVAILADNIEPILYHIVAERLAMPDAVDLLRREIHDAAEAETIRLELETLYGELDRLAVERAEGLLTARQVKISTDIVNAKITKLQARQLDQERLRVFDGIPLGTPQVAGTIAELSPDRFRAVLDVLAEVVVQPVGKSGRIVNPERVQVNWR

SEQ ID NO: 183 - protein, 469 aa, synthetic construct
MSYTTPVRAAVYLRISEDRSGEQLGVARQREDCLKLCDQRRWVPVEYLDNDVSASTGKRRPAYEQMLADITAGKIAAVVAWDLDRLHRRPIELEAFMSLADEKRLALATVAGDVDLATPQGRLVARLKGCVAAHETEHKKARQRRAARQKAERGLPNWSKAFGYLPGPNGPEPDPRTAPLVKQAYADILAGASLGDVCRQWNGAGAFTITGRPWTTTTLSKFLRKPRNAGLRAYKGARYGPVDRDAIVGKAQWSPLVDETTFWAAQAVLDAPGRAPGRKSVRRHLLTGLAGCGKCGNHLAGSYRTDGRVVYVCKACHGVAILADNIEPILYHIVAERLAMPDAVDLLRREIYDAAEAETIRLELETLYGELDRLAVERAEGLLTARQVKISTDIVNAKITKLQAHQLDRERLRVFDGIPLGTPQVAGVIAELSPDRFRAVLDVLAEVVVQPVGKSGRISNPERVQVNWR

SEQ ID NO: 184 - protein, 469 aa, synthetic construct
MSYTTPVRAAVYLRISEDRSGEQLGVARQREDCLKLCDQRKWVPVEYLDNDVSASTGKRRPAYEQMLADITAGKIAAVVAWDLDRLHRRPIELEAFMSLADEKRLALATVAGDVDLATPQGRLVARLKGSVAAHETEHKKARQRRAARQKAERGHPNWSKAFGYLPGPNGPEPDPRTAPLVKQAYADILAGASLGDVCRQWNAAGAFTITGRPWTTTTLSKFLRKPRNAGLRAYKGARYGPVDRDAIVGNARWSPLVDEATFWAAQAVLDAPGRAPGRKSVRRHLLTGLAGCGKCGNHLAGSYRTDGRVVYVCKACHGIAILADNIEPILYHIVAERLAMPDAVDLLRREIHDAAEAEAIRLGLETLYGELDRLAVERAEGLLTARQVKISTDIVNAKITKLQARQQDQERLRVLDGIPLGTPQVADMIAELSPDRFRAVLNVLAEVVVQPVGKSGRIFNPERVQVNWR

SEQ ID NO: 185 - protein, 452 aa, synthetic construct
MKAAIYIRVSTREQVENYSIQAQTEKLTALCRSKDWDVYDIFIDGGYSGSNMNRPALNEMLSKLHEIDAVVVYRLDRLSRSQRDTITLIEEYFLRNNVEFVSLSETLDTSSPFGRAMIGILSVFAQLERETIRDRMVMGKIKRIEAGLPLTTAKGRTFGYDVIDTKLYINEEEAKQLQLIYDIFEEEQSITFLQKRLKKLGFKVRTYNRYSNWLTNDLYCGYVSYKDKVHVKGIHEPIISEEQFYRVQEIFARMGKNPNMNRDSASLLNNLVVCGKCGLGFVHRRKDAMSRDKKYHYRYYSCKTYKHIHELEKCGNKIWRADELEELIINRVNNYSLANRNVGKEDELDSLNEKLKVEHAKKKRLFDLYINGSYEVSELDSMMNDIDAQINYYESQIEAIEELKKNKKIQENLADLATVDFDSLEFREKQLYLKSLINKIYIDGEQVTIEWL

SEQ ID NO: 186 - protein, 485 aa, synthetic construct
MAKKVAIYTRVSTTNQAEEGFSIDEQVYRLTKYAEAMGWQVSDTYTDAGFSGAKLERPAMQRLINDIENKAFDTVLVYKLDRLSRSVRDTLYLVKDVFTKNKIDFISLNESIDTSSAMGSLFLTILSAINEFERENIKERMTMGKLGRAKSGRSMMWTKTAFGYYHNRKTGILEIVPLQATIVEQIFTDYLSGMSLTKLRDKLNESGHIGKDIPWSYRTLRQTLDNPVYCGYIKFKDSLFEGMHKPIIPYETYLKVQKELEERQQQTYKRNNNPRPFQAKYMLSGMARCGYCGAPLRIVLGRKRKDGSRTMKYHCANRFPRKTKGVTVYNDNKKCDSGTYDLSNLENTVIDNLIGFQENNDSLLRIINGNNQPILDTSSLRKQISQIDKRIQKNSDLYLNDFITMGELRDRTNSLQAEKKLLKTKISENKFNDSTDVFELVKTQLGSIPINELSYDNKKKIVNNLVSKVDVTADNVDIIFKFQLA

SEQ ID NO: 187 - protein, 469 aa, synthetic construct
MCYTTPVRAAVYLRISEDRSGEQLGVARQREDCLKLCGQRKWEPVEYLDNDVSASTGKRRPAYEQMLADITAGKIAAVVAWDLDRLHRRPVELEAFMSLADEKRLALATVAGDVDLATPQGRLVARLKGSVAAHETEHKKARQRRAARQKAERGYPNWSKAFGYLPGPNGPEPDPRTAPLVKQAYADILTGASLGDVCRQWNDAGAFTITGRPWTTTTLSKFLRKPRNAGLRAYKGARYGPVDRDAIVGKAQWSPLVDEATFWAAQAVLDAPGRAPGRKSVRRHLLTGLAGCGKCGNHLAGSYRTDGRVVYVCKACHGVAILADNIEPILYHVVAERLAMPDAVDLLRREIHDAAEAETIRLELETLYGELDRLAVERAEGLLTARQVKISTDIVNAKITRLQARQQDQERLRVLDGIPLGTPRVAGMIAELSPDRFRAVLGVLAEVVVQPVGKSGRIFNPERVQVNWR

SEQ ID NO: 188 - protein, 485 aa, synthetic construct
MTKKVAIYTRVSTTNQAEEGFSIDEQIDRLTKYAEAMGWQVSDTYTDAGLSGAKLERPAMQRLINDIENKAFDTVLVYKLDRLSRSVRDTLYLVKDVFTKNKIDFISLNESIDTSSAMGSLFLTILSAINEFERENIKERMTMGKLGRAKSGKSMMWTKTAFGYYHNRKTGILEIVPLQATIVEQIFTDYLSGISLTKLRDKLNESGHIGKDIPWSYRTLRQTLDNPVYCGYIKFKDSLFEGMHKPIIPYETYLKVQKELEERQQQTYERNNNPRPFQAKYMLSGTARCGYCGAPLKIALGHKRKDGSRTMKYHCANRFPRKTKGVTVYNDNKKCGSGTYDLSDLENTVINNLIGFQENNDSLLKIINGNNQPILDTSSIKKQISRIDKRIQKNSDLYLNDFITMDELKDRTDSLQAEKKLLKAKISENKFNDSTDVFELVKTQLGSIPINELSYDNKKKIVNNLVSKVDVTADNVDIIFKFQLA

SEQ ID NO: 189 - protein, 469 aa, synthetic construct
MCYTTPVRAAVYLRISEDRSGEQLGVARQREDCLKLCDQRKWVPVEYLDNDVSASAGKRRPAYEQMLADITAGKIAAVVAWDLDRLHRRPIELEAFMNLADEKRLALATVAGDVDLATPQGRLVARLKGSVAAHETEHKKARQRRAARQKAERGYPNWSKAFGYLPGPNGPEPDPRTAPLVKQAYADILAGASLGDVCRRWNDAGAYTITGRPWTTTTLSKFLRKPRNAGLRAYKGARYGPVDRDAIVGKARWSPLVDEATFWAAQAVLDAPGRAPGRKSVRRHLLTGLAGCGKCGNHLAGSYRTDGKVVYVCKVCHGVAILADNIEPILYHIVAERLAMPDAVDLLRREIHDAAEAETIRLELETLYGELDRLAVERAEGLLTARQVKISTDIVNAKITKLQARQLDQERLRVFDGIPLGTPQVAGMIAKLSPDRLRAVLDVLAEVVVQPVGKGGKIFNPERVQVNWR

SEQ ID NO: 190 - protein, 469 aa, synthetic construct
MSYTTPVRAAVYLRISEDRSGEQLGVTRQREDCLKLCGQRKWVPVEYLDNDVSASTGKRRPAYEQMLADITAGKIAAVVAWDLDRLHRRPIELEAFMCLADEKRLALATVAGDVDLATPQGRLVARLKGCVAAHETEHKKARQRRAARQKAERGHPNWSKAFGYLPGPNGPEPDPRTAPLVKQAYADILAGASLGDVCRQWNDAGAFTITGRPWTTTTLSKFLRKPRNAGLRAYKGARYGPVDRNAIVGKAQWSPLVDEATFWAAQAVLDAPGRAPGRKSVRRHLLTGLAGCGKCGNYLAGSCRTDGQVVYVCKVCHGVSILAANIVPILYHTVAERLAMPDAVDLLCREIHDAAGAETIRLELEALYGELDRLAVERAEGLLTARQVKISTEIVNAKITKLRACQLDQERLRVLDGIPLGTPQVAGMVAELSPDRFRAVLGVLAEVVVQPVGKSGRIFNPERVQVNWR

SEQ ID NO: 191 - protein, 469 aa, synthetic construct
MCYITPVRAAVYLRISEDRSGEQLGVARQREDCLKLCDQRKWVPVEYLDNDVSASTGKRRPAYEQMLADITAGKIAAVVAWDLDRLHRRPIELEAFMSLADEKRLALATVAGDVDLATPQGRLVARLKGSVAAHETEHKKVRQRRAARQKAERGHPNWSKAFGYLPGPNGPEPDPRTAPLVKQAYADILAGASLGDVCRQWNDAGAFTITGRPWTTTTLSKFLRKPRNAGLRAYKGARYGPVDRDAIVGKAQWSPLVDEATFWAAQAVLDAPGRAPGRKSVRRHLLTGLAGCGKCGNHLAGSYRTDGRVVYVCKACHGVAILADNIEPILYHIVTERLAMPDAMDLLLREIHDAAEAETIRLELETLYGELDRLAVERAEGLLTARQVKISTDIVNAKITKLQARQLDQERLRVLDGIPLGTPQVAGMIAELSPDRFRAVLDVLAEVVVQPVGKSGRIFNPERVQVSWR

SEQ ID NO: 192 - protein, 485 aa, synthetic construct
MTKKVAIYTRVSTTNQAEEGFSIDEQIDRLTKYAEAMGWQVSDTYTDAGFSGAKLERPAMQRLINDIENKAFDTVLVYKLDRLSRSVRDTLYLVKDVFTKNRIDFISLSESIDTSSAMGSLFLTILSAINEFERENIKERMTMGKLGRAKSGKSMMWTKTAFGYYHNRKTGILEIVPLQATIVEQIFTDYLSGISLTKLRDKLNESGHIGKDIPWSYRTLRQTLDNPVYCGYIKFKDSLFEGMHRPIIPYETYLRVQKELEERQQQAYERNNNPRPFQAKYMLSGMARCGYCGAPLRIALGHKRKDGSRTMKYHCANRFPRKTKGVTVYNDNKKCDSGTYDLSNLEDTVIDSLIGFQENNDSLLRIINGNNQPTLDTSSFKEQISQIDKKIQKNSDLYLNDFITMDELKDRTDSLQAEKKLLKAKISENKFNDSTDVLELVKTQLGSIPINELSYDDKKKIVNNLVSKVDVTADNVDIIFKFQLA

SEQ ID NO: 193 - protein, 485 aa, synthetic construct
MTKKVAIYTRVSTTNQAEEGFSIDEQIDRLTKYAGAMGWQVSDTYTDAGFSGAKLERPAMQRLINDIENKAFDTVLVYKLDRLSRSVRDTLYLVKDVFTKSKIDFISLNESIDTSSAMGSLFLTILSAINEFERENIKERMTMGKLGRAKSGKSMMWTRTAFGYYHNRKTGILEIVPLQATIVEQIFTDYLSGISLTKLRDKLNESGHIGKDIPWSYRALRQTLDNPVYCGYIKFKDSLFKGMHKPIIPYETYLRVQKELEERQQQTYERNNNPRPFQAKYMLSGMARCGYCGAPLRIVLGHKRKDGSRTMKYHCANRFPRKTKGVTVYNDNKKCDSGTYDLDNLENTVIDNLIGFQEDNDSLLKIINGSNQPILDTSSFKEQISQIDKKIQKNSDLYLNDFITMDELKDRTDSLQAERKLLKAKISENKFNDSTDVFELVKTQLGSIPINELSYDNKKKIVNNLVSKVDVTADSVDIIFKFQLA

SEQ ID NO: 194 - protein, 452 aa, synthetic construct
MKAAIYIRVSTREQVENYSIQAQTERLTALCRSKDWDVYDIFIDGGYSGSNMNRPALNEMLSKLHEIDAVVVYRLDRLSRSQRDTITLIEEYFLKNNVEFVSLSETLDTSSPFGRAMIGILSVFAQLERETIRDRMVMGKIKRIEAGLPLTTAKGRTFGYDVIDTKLYINEEEAKHLQLIYDIFEEEQSITFLQKRLKKLGCKVHTYNRYNNWLTNDLYCGYVSYKDKVHAKGIHEPIISEEQFNRVQEIFARMGKNPNMNRDSASLLNNLVVCSKCGLGFVHRRKDTTCRGKKYHYRYYSCKTYKHTHELEKCGNKIWRADKLEELIINRVNNYSFASRNVDKEDELDSLNEKLKIEHAKKKCLFDLYINGSYEVSELDSMMNDIDAQINYYESQIEANEELKKNKKILENLANLATVDYDSLEFREKQLYLKSLINKIYIDGEQVTIEWL

SEQ ID NO: 195 - protein, 485 aa, synthetic construct
MTKKVAIYTRVSTTNQAEEGFSIDEQIDRLTKYAEAMGWQVSDTYTDAGLSGAKLERPAMQRLINDIENKAFDTVLVYKLDRLSRSVRDTLYLVKDVFTKNKIGFVSLSESIDTSSAMGSLFLTILSAINEFERENIKERMTMGKLGRAKSGKSMMWTKTAFGYYHNRETGILEIVPLQATIVEQIFTDYLSGISLTKLRDKLNESGHIGKDIPWSYRTLRQTLDNPVYCGYIKFKGSLFEGMHKPIIPYETYLKVQKELEERQQQTYERNNNPRPFQAKYMLSGMARCGYCGAPLKIVLGRKRKDGSRTMKYHCANRFPRKTKGITVYNDNKKCDSGTYDLSNLENTVIDILIGFQENNDSLLKIINGNNQPILDTSSFKEQISQIDKKIQKNSDLYLNDFITMDELKDRTDSLQAEKKLLKAKISENKFNDSTDVFELVKTQLGCVPINELSYDNKKKIVNNLVSKVDVTADNVDIIFKFQLA

SEQ ID NO: 196 - protein, 452 aa, synthetic construct
MKAAIYIRVSTREQVENYSIQAQTEKLTALCRSKDWDVYDIFIDGGYSGSNMNRPALNEMLGKLHEIDAVVVYRLDRLSRSQRDTITLIEEYFLKNNVEFVSLSETLDTSSPFGRAMIGILSVFAQLERETIRDRMVMGKIKRIEAGLPLTTAKGRTFGYDVIDTKLYINEEEAKQLRLIYDIFEEEQSITFLQRRLKELGFKVRTYNCYNNWLTNDLYCGYVSYKDKVHVKGIHEPIISEEQFYRVQEIFTRMGKNPNMNRDSASLLNNLVVCSKCGLGFVHRRKDAMSRDKKYHYRYYSCKTYKHIHELEKCGNKIWRADKLEELVINRVNNYSLASRNVDKEDELDSLNEKLKTEHAKKKRLFDLYINGSYEVSELDSMMSDIDAQINYYESQIEANEELKKSKKIQENLAHLATVDFDSLEFREKQLYLKSLINKIYIDGEQVTIEWL

SEQ ID NO: 197 - protein, 469 aa, synthetic construct
MSYTTPVRAAVYLRISEDRSGEQLGVARQREDCLKLCGQRKWVPVEYLDNDVSASTGKRRPAYEQMLADITAGKIAAVVAWDLDRLHRRPVELEAFMSLADEKRLALATVAGDVDLATPQGRLVARLKGCVAAHETEHKKARQRRAARQKAERGLPNWSKAFGYLPGPNGPEPDPRTAPFVKQAYADILAGASLGDVCSQWNNAGAFTTTGRPWTTTTLSKFLRKPRNAGLRAYKGARYGPVDRDSIVGKAQWSPLVDEATFWAAQAVLDAPGRAPGRKSVRRHLLTGLAGCGKCGNHLAGSYRTDGRVVYVCKACHGVSILAVNIEPILYRIVAERLAMPDAVDLLRREIHDAAEAETIRLELETLHGELDRLAVERAEGLLTARQVKISTDIVNAKIAKLQARQLDQERLRVFDGIPLGTPQVAGMIAELSPDRFRAVLDVLAEVVVQPAGKSGRTFNPERVQVNWR

SEQ ID NO: 198 - protein, 485 aa, synthetic construct
MTKKVAIYTRVSTTLQAEEGFSVDEQIDRLTKYAEAMGWQVSDTYTDAGFSGAKLERPAMQRLINDIENKAFDTVLVYKLDRLSRSVRDTLYLVKDVFTKNKVDFISLNESIDTSSAMGSLFLTILSAINEFERENIKERMTMGKLGRAKSGKSMMWTKTAFGYYHNRKTGILEIVPLQATIVEQIFTDYLSGISLTKLRDKLNESGHIGKDIPWSYRTLRQTLDNPVYCGYIKFKGSLFEGMHKPIIPYETYLKVQRELEVRQQQTYERNNNPRPFQAKYMLSGMARCGYCGAPLRIVLGHKRKDGSRTMKYHCANRFPRKTKGVTVYNDNEKCDSGTYDLSNLEHTVIDNLVGFQENNDSLLKIINGNNQPILDTSSFKKQISQIDKKIQKNSDLYLNDFITMDELKDRTDSLQAEKKLLEAKISENKFNDSTDVFELVKAQLGSIPINELSYDNKKKIVNNLVSRVDVTADNVDVIFKFQLA

SEQ ID NO: 199 - protein, 452 aa, synthetic construct
MKAAIYIRVSTQEQVGNYSIQAQTEKLTALCRSKGWDVYDIFIDGGYSGSNMNRPALNEMLSKLHEIDAVVVYRLDRLSRSQRDTTTLIEEYFLKNNVEFVSLSETLDTSSPFGRAMIGILSVFAQLERETIRDRMVMGKIKRIEAGLPLTTAKGRTFGYDVIDTKLYINEEEAKQLQLIYDIFEEEQSITFLQKRLKKLGFKVRTYNRYNSWLTNDLYCGYVSYKDKVHVKGIHEPIISEEQFYRVQEIFTRMGKNPNMNRDSASLLNNLVVCSKCGLGFVHRSKDTMCRGKKYHYRYYSCKTYKHTHELEKCGNKTWRADKLEELIIDRVNNYSFASRNVDKVDELDSLNRKLKIEHAKKKRLFDLYINGSYEVSELDSMMNDIDAQINYYESQIEANKELKKNKKIQENLADLATVDFDSLEFREKQLYLRSLINKIYIDGEQVTVEWL

SEQ ID NO: 200 - protein, 469 aa, synthetic construct
MSYTTPVRAAVYLRISEDRSGEQLGVARQREDCLKLCGQRKWVPVEYLDNDVSASTGKRRPAYEQMLADITAGKIAAVVAWDLDRLHRRPIELEAFMSLADEKRLALATVAGDVDLATPQGRLVARLKGSVAAHETEHKKARQRRAARQKAERGHPNWSKAFGYLPGPNGPEPDPQTAPLVKQAYADILAGASLGDVCRRWNDAGAFTITGRPWTTTTLSKFLRKPRNAGLRAYKGARYGPVDRDAIVGKAQWSPLVDEATFWAAQAVLDAPGRAPGRKSVRRHLLTGLAGCGKCGNHLAGSYRADGRVVYVCKACHGVAILADNIEPILYHIVAERLAMPDAVVLLRREIHDAAEAETIRLELETLYGELDRLAVERAEGLLTARQVKISTDIVNAKITRLQARQLDQERLRVFDGIPLGTPQVAGMIAELSPDRFRAVLDVLAEVVVQPVGKSGRIFNPERVQVNWR

SEQ ID NO: 201 - protein, 469 aa, synthetic construct
MSYTTPVRAAVYLRISEDRSGEQLGVARQREDCLKLCDQRKWVPVEYLDNDVSASTGKPRPAYEQMLADITAGKIAAVVAWDLDRLHRRPIELEAFMSLADEKRLALATVAGDVDLATPQGRLVARLKGSVAAHETEHKKARQRRAARQKAERGHPNWSKAFGYLPGPDGPEPDPQTAPLVKQAYADILAGASLGDVCRQWNDAGAFTITGRPWTTTTLSKFLRKPRNAGLRAYKGARYGPVDRDAIVGKAQWSPLVDEATFWAAQAVLDAPGRAPGRKSVRRHLLTGLAGCGKCGNHLAGSYRTDGRVVYVCKACHGVAILADNIEPILYHIVAERLAMPDAVDLLRREIHDAVEEVTIRLELETLYGELDCLAVERAEGLLTARQVKISTDIVNAKITKLQAHQQDQERLRVLDGIPLGTPQVASVIAELSPDRFRAVLDVLAEVVVQPVGRGGRIFSPERVQVNWR

SEQ ID NO: 202 - protein, 452 aa, synthetic construct
MKAAIYIRVSTQEQVENYSIQAQTEKLTALCRSKDWDVYDIFIDGGYSGSNMNRPALNEMLSKLHEIDAVVVYRLDRLSRSQRDTTTLIEEYFLKNNVEFVSLSETLDTSSPFGRAMIGILSVFAQLERETIRDRMVMGKIKRIEAGLPLTTAKGRTFGYDVIDTKLYINEEEAKQLRLIYDIFEEEQSITSLQKRLKKLGFKVRTYNRYNNWLTNDLYCGYVSYKDKVHVKGIHEPIISEEQFYRVQEIFTRMGKNPNMNRDNASLLSNLVVCSKCGLGFVHRSKDTMSRGKKYHYRYYSCKTYKHTHELEKCGNKTWRADKLEELIINRVNNYSFASRNVDKEDELDSLNEKLIIEHAKKRRLFDLYINGSYEVSELDSMMNDIDAQIDYYEGQIEANEESRKNKKIQEILADLATVDFDSLGFREKQLYLKSLINKIYIDGEQVTIEWL

SEQ ID NO: 203 - protein, 485 aa, synthetic construct
MTKKVAIYTRVSTTSQAEEGFSIGEQTDRLTKYAEAMGWQVSDTYTDAGLSGAKLERPAMQRLINDIESKAFDTVLVYKLDRLSRSVRDTLYLVKDVFTKNKIDFISLNESIDTSSAMGSLFLTILSAINEFERENIKERMTMGKLGRAKSGKSMMWTKTAFGYYHNRKTGILEIVPLQATIVEQIFTDYLSGISLTKLRDKLNESGHIGKDIPWSYRTLRQTLDNPVYCGYIKFKDSLFEGMHKPIIPYETYLKVQKELEERQQQAYERNNNPRPFQAKYMLSGMARCGYCGAPLKIVLGHKRKDGSRTMKYHCANRFPRKTKGVTVYNDNKKCDSGTYELSNLENTVIDYLTGLQENNDGLLKIINGNNQPILDTSSFEKQISQIDKKIQKNSDPYLNDFITMDELKARTDSLQAEKKQLRAEVSENKFIDSTDVFELVKTQLGSIPINELSYDNQKKIVNNLVSKVDVTADNVDIIFKFQLA

SEQ ID NO: 204 - protein, 485 aa, synthetic construct
MTKKVAIYTRVSTANQAEEGFSIDEQIDRLTKYAEAMGWQVGDTYTDAGFSGAKLERPAMQRLINDIEDKAFDTVLVYKLDRLSRSVRDTLYLVKDVFTKNRIDFISLNESIDTSSAMGSLFLTILSAINEFERENIKERMTMGKLGRAKSGKSMMWTKTAFGYYHNRKTGILEIVPLQATIVEQIFTDYLSGISLTKLRDKLNEGGHIGKDIPWSYRTLRQTLDNPVYCGYIKFKDSLFEGMHKPIIPYETYLKVQKELGERQQQTYERNNNPRPFQAKYMLSGMARCGYCGAPLKIVLGHKRKDGSRTMKYHCANRFPRKTKGVTVYNDNKKCDSGTYDLSNLENTVIDNLIGFQENNDSLLKIIDGSNQPILDTSSFEYQISQIDKKIQKNSDLYLNDFITMDELKDRTDSLQAEKNLLKAKISENKFNDSTDVFELVKTQLGSIPINELSYDNKKKIVNNLVSKVDVTADNVDIIFKFQLA

SEQ ID NO: 205 - protein, 469 aa, synthetic construct
MSNTTPVRAAVYLRISEDRSGEQLGVARQREDCLKLCSQRKWVPVEYLDNDVSASTGKRRPAYEQMLADITAGKIAAVVAWDLDRLHRRPIELEAFMSLADEKRLALATVAGDVDLATPQGRLVARLKGSVAAHETEHKKARQRRAARQKAERGHPNWSRAFGYLPGPNGPEPDPRTAPLVKQAYADILAGASLGDVCRQWNGAGAYTITGRPWTTTTLSKFLRKPRNAGLRAYKGARYGPVDRDAIVGKAQWSPLVDEATFWAAQAVLDAPGRAPGRKSVRRHLLTGLAGCGKCGNHLAGSYRTDGRVVYVCKACHGVAILADNIEPILYHIVAERLAMPDAVDLLRREIHDAAEAETIRLELETLYGELDRLAVERAEGLLTARQVKISTDIVNAKITKLRARQLDQERLRVFDGIPLGTPHVAGVIAELSPDRFRAVLDVLAEVVVQPVGKSGGIFNPERVQVNWR

SEQ ID NO: 206 - protein, 485 aa, synthetic construct
MTKKVAIYTRVSTTNQAEEGFSIDEQIDRLTKYAEAMGWQVSDTYTDAGFSGAKLERPAMQRLINDIENKAFDTVLVYKLDRLSRSVRDTLYLVKDVFTKNKIDFISLNESINTSSAMGSLFLTILSAINEFERENIKERMTMGKLGRAKSGKSMMWTKTAFGYYHNRKTGILEIVPLQATIVEQIFTDYLRGISLTKLRDKLNESGHIGKDIPWSYRTLRQTLDNPVYCGYIKFKDSLFEGMHKPIIPYETYLKVQKELEERQQQTFERNNNPRPFQAKYMLSGMARCGYCGAPLRIVLGHKRKDGSRTMKYHCANRFPRKTEGVTVYNDNKGCDSGTYDLVNLENTVIDSLIGFQENNDSLLKIINGNNQPILDTSSFKKQISQIDKKIQKNSDLYLNDFITMDELKDRTDSLQAEKRLLKAKISENRSNDSTDVFELVKTQLGSIPINELSYDNKKKIVNSLVSKVDVTADNVDIIFKFQLA

SEQ ID NO: 207 - protein, 485 aa, synthetic construct
MTKKVAIYTRVSTANQAEEGFSIDEQIDRLTKYAEAMGWQVSDTYTDAGISGAKLERPAMQRLINDIENKAFDTVLVYKLDRLSRSVRDTLYLVKDVFTKNKIDFISLNESIDTSSAMGSLFLTILSAINEFERESIKERMTMGKLGRAKSGKSMMWTKTAFGYYHNCKTGILEIVPLQATIVEQIFTDYLSGISLTKLRDKLNESGHIGKDIPWSYRTLRQTLGNPVYCGYIKFKGSLFEGMHKPIIPYETYLKVQKELEKRQQQTYERNNNPRPFQAKYMLSGMARCGYCGAPLKIVLGHKRKDGSRTMKYHCANRFPRKTKGITVYNDNKKCDSGTYDLSNLENTVIDNLIGLQEDNDSLLKIINGNNQPILDTSSIKKQISQIDKKIQKNSDLYLNGFITMDELKDCTDSLQAEKKLLKAKISESKFNDSTGVFELVKAQLGSIPINELGYDNKKKIVNNLVSKVDVTADNVDIIFKFQLA

SEQ ID NO: 208 - protein, 485 aa, synthetic construct
MTKKVAIYTRVSTTNQAEEGFSIDEQIDRLTKYAEAMGWQVSDTYTDAGFSGAKLERPAMQRLINDIENKAFDTVLVYKLDRLSRSVRDTLHLVKDVFTKNKIDFISLSESIDTSSAMGSLFLTILSAINEFERENIKERMTMGKLGRAKSGKSMMWTKTAFGYYHNRKTGVLEIVPLQATIVEQIFTDYLSGISLTKLRDKLNESGHIGKDIPWSYRTLRQTLDNPVYCGYIKFKGSLFEGMHKPIIPYETYLKVQKELEERQQQTYERNNNPRPFQAKYMLSGMARCGYCGAPLRIVLGHKRKDGSRTMKYHCANRFPRKTKGVTVYNDNKKCDSGTYDLRNLENTVIDNLIGLQENNDSLLGIINGNNQPILDTSSFKKQISRIDKKIQKNSDLYLNDFITMDELKARTNSLQAEKKLLKAKISENEFNDSTDVFELVRTQLGSIPINELSYDNKKKIVNNLVSKVDVTADNVDIIFKFQLA

SEQ ID NO: 209 - protein, 485 aa, synthetic construct
MTKKVAIYTRVSTTNQAEEGFSIDEQVDRLTKYAEAMGWQVSGTYTDAGFSGAKLERPAMQRLISDIETKAFDTVLVYKLDRLSRSVRDTLHLVEDVFTKNKIDFISLNESIDTSSAMGSLFLTILSAINEFERENIKERMTMGKLGRAKSGKSMMWTKTAFGYYHNRKTGILEIVPLQATIVEQIFTDYLSGISLTKLRDKLNESGHIGKDIPWSYRTLRQTLDNPVYCGYIKFKDSLFEGMHKPIIPYETYLKVQKELEERQQQTYERDNNPRPFQAKYMLSGMARCGYCGAPLKIVLGHKRKDGSRTMKYHCANRFPRKTKGITVYNDNKKCDSGTYDLSDLENTVIDSLIGFQENNDSLLKIINGNNQPILDTSSLKKQISQIDKKIQRNSDLYLNDFITMDELKDRTDSLQAEKKLLKAKISENKFNDSTDVFELVKTQLGSIPINELSYDDKKKIVNNLVSKVDVTADNVDIIFKFQLA

SEQ ID NO: 210 - protein, 485 aa, synthetic construct
MTRKVAIYTRVSTTNQAEEGFSIDEQIDRLTKYAEAMGWQVSDTYTDAGLSGAKLERPAMQRLINDIENKAFDTVLVYKLDRLSRSVRDTLYLVKDVFTKNKIDFISLNESIDTSSAMGSLFLTILSAINEFERENIKERMTMGKLGRAKSGKSMMWTKTAFGYHHNRKTGILEIVPLQATIVEQIFTDYLSGISLTKLRDKLNESGHIGKDIPWSYRTLRQTLDNPVYCGYIKFKDRLFEGMHKPIIPYETYLKVQKELEERQQQTYERNNNPRPFQAKYMLSGMARCGYCGAPLRIVLGHKRQDGSRTMKYHCANRFPRKTRGVTVYNDNKKCDSGTYDLSNLENTVIDNLIGFQEDNDSLLKIINGNDQPTLDTSSFKKQISQIDRKIQKNSELYLNDFITMEELKDRTDSLQAEKKLLEAKIIENKFNDSTDVFELVRTQLGSIPINELSYDNKKKIVNNLVSKVDVTADNVDIIFKFQLA

SEQ ID NO: 211 - protein, 452 aa, synthetic construct
MKAAIYIRVSTQEQVGNYSIQAQTEKLTALCRSKDWDVYDIFIDGGYSGSNMNRPALNEMLSKLHEIDAVVVYRLDRLSRSQRDTTTLIEEYFLKNNVEFVSLSETLDTSSPFGRAMIGILSVFAQLERETIRDRMVMGKIKRIEAGLPLTTAKGRTFGYDVIDTKLYINEEEAKQLQLIYDIFEEEQSITSLQKRLKKLGFKVRTYNRYNNWLTNDLYCGYVSYKDKVHVKGIHEPIISEEQFYRVQGIFTRMGKNPNMNRDSASLLNNLVVCSKCGLGFVHRRKDTMSGGKKYRYRYYSCKTYKHTHELEKCGNKTWRADKLEELIINRVNNYSFASRNADKGDELDSLNEKLKIEHAKKRRLFDLYISGSYEVSELDSMMNDIDAQINYYESQIEANEEQRKNKKIQENLADLATVDFDSLEFREKQQYLKSLINKIYIDGEQVTIDWL

SEQ ID NO: 212 - protein, 469 aa, synthetic construct
MSYTTPVRAAVYLRISEDRSGEQLGVARQREDCLKLCDQRKWVPVEYLDNDVSASTGRRRPAYEQMLADITAGKIAAVVAWDLDRLHRRPLELEAFMCLADEKRLALATVAGDIDLATPQGRLVARLKGSVAAHETEHKKARQRRAARQKAERGHPNWSKAFGYLPGPNGPEPDPRTAPLVKQAYADILAGASLGDVCRRWNDAGALTITGRPWTTTTLSKFLRKPRNAGLRAYKGARYGPVDRDAIVGKAQWSPLVDEATFWAAQAVLDAPGRAPGRKSVRRHLLTGLAGCGKCGNHLAGSYRTDGRVVYVCKACHGVAILAENIEPILYHIVAERLAMPDAVDLLRRGIHDAAEAETVRLELETLYDELDRLAVERAEGLLTARQVKISTDIVNAKITKLQARQLDQERLRVLDGIPLGTPQVAGMIAELSPDRFRTVLDVLAEVVVQPVGRSGRIFNPERVQVNWR

SEQ ID NO: 213 - protein, 485 aa, synthetic construct
MTKKVAIYTRVSTTNQAEEGFSIDEQIDRLTKYAEAMGWQVSDTYTDAGFSGAKLERPAMQRLINDIETKAFDTVLVYKLDRLSRSVRDTLYLVKEVFTKNKIDFISLNESINTGSAMGSLFLTILSAINEFERENIKERMTMGKLGRAKSGKSMMWTKTAFGYYHNRKTGILEIVPLQATIVKQIFTDYLSGISLTKLRDKLNESGHIGKDIPWSYRTLRQTLDNPVYCGYIKFKDSLYEGMHKPIIPYETYLKVQKELEERQQQTYERNNNPRPFQAKYMLSGMARCGYCGAPLRIVLGHKRKDGSRTMKYHCANRFPRKTKGVTVYNDNKKCDSGTYDLSNLENTVIDNLIGFQEDNDGLLKIINGNNQPILDTSSFEKQISQIDKKIQKNSDLYLNDFITMDELKDRTDSLQAEKKLLKAKINENKFNDSTDVFELVKTQLGSIPINELSYDNKKRIVNNLVSKVGVTADNVDIIFKFQLV

SEQ ID NO: 214 - protein, 485 aa, synthetic construct
MTKKVAIYTRVSTTNQAEEGFSIDEQIDRLTKYAEAMGWQVSDTYTDAGFSGAKLERPAMQRLINDIENKTFDTVLVYKLDRLSRSVRDTLYLVKDVFTKNKIDFISLNESIDTSSAMGSLFLTILSAINEFERENIKERMTMGKLGRAKSGKSMMWTKTAFGYYHNRKTGILEIVPLQATIVEQIFTDYLSGIGLTKLRDKLNESGHIGKDIPWSYRTLRQTLDNPVYCGYIKFKDSLFEGMHKPIIPYETYLKVQKELEERQQQTYERNNNPRPFQAKYMLSGMARCGYCGAPLRIVLGHKRKDGSRTMKYHCANRFPRKTKGVTVYNDNKKCDSGTYDLSNLENAVIDNLVGFQENNDSLLKIINGNNQPILDTSSLKEQISQIDKKIQKNSDLYLNDFITMDELKDRTDSLQAEKKLLKAKISENKFNDSTDVFELVKTQLGSIPINELSYDDKKRIVNNLVSKVDVTADNVDIIFKFQLA

SEQ ID NO: 215 - protein, 469 aa, synthetic construct
MSYTTPVRAAVYLRISEDRSGEQLGVARQREDCLKLCDQRKWVPVEYLDNDVSASTGKRRPAYEQMLADITAGKIAAVVAWDLDRLHRRPIELEAFMSLADEKRLALATVAGDVDLATPQGRLVARLKGSVAAHETEHKKARQRRAARQKAERGHPNWSKAFGYLPGPDGPEPDPRTAPLVKQAYADILAGASLGDVCRQWNAAGAFTITGRPWTTTALSKFLRKPRNAGLRAYKGARYGPVDRNAIVGKAQWGPLVDEATFWAAQAVLDAPGRAPGRKSVRRHLLTGLAGCGKCGNHLAGSYRTDGRVVYVCKACHGVAILADNIEPILYHIVVERLAMPDAVDLLRREIHDAAEAEAIRLELETLYGELDRLAVERAEGLLTARQVKISTDIVNAKITKLQARQLDQERLRVFDGIPLGTPQVAGTIAELSPDRFRAVLDVLAEVVVQPVGKSGRVSSPERVQVNWR

SEQ ID NO: 216 - protein, 452 aa, synthetic construct
MKAAIYIRVSTREQVENYSIQAQTEKLTALCRSKDWDVYDIFIDGGYSGSNMNRPALNEMLSKLHEIDAVVVYRLDRLSRSQRDTITLIEEYFLKNNVEFVSLSETLDTSSPFGRAMIGILSVFAQLERETIRDRMVMGKIKRIEAGLPLTTAKGRTFGYDVVDTKLYINEEEAKQLQLIYDIFEEEQSITSLQKRLKKLGFKVRTYNRYNNWLTNDLYCGYVSYKDKVHVKGIHEPIISEEQFYRVQEIFTRMGKNPNMNRDSASLLNNLVVCSKCGLGFVHRRKDAMSRDKKYHYRYYSCKTYKHIHELEKCGNKIWRADKLEELIINRVNNYSIASRNADKEDELDSLNEKLKIEHAKRKRLFELYVNGSYEVGELDSMMNDIDAQINYYESQIEASKELKKNKKIQENLADLATVDFDSLEFREKQLYLKSLINKIYIDGEQVTIEWL

SEQ ID NO: 217 - protein, 469 aa, synthetic construct
MSYTTPVRAAVYLRISEDRSGEQLGVARQREDCLKLCDQRKWVPVEYLDNDVSASTGKRRPAYEQMLADIAAGKITAVVAWDLDRLHRRPIELEAFMSLADEKRLALATVAGDVDLATPQGRLVARLKGSVAAHETEHKRARQRRAARQKAERGHPNWSKAFGYLPGPNGPEPDPRTAPLVKQAYADILAGASLGDVCRQWNGAGAFTITGRPWTTTTLSKFLRKPRNAGLRTYKGACYGPVDREAIVGKAQWSPLVDEATFWAAQAVLDAPGRAPGRKSVRRHLLTGLAGCGRCGNHLAGSYRTDGRVVYVCKACHGVAILANNIEPILYHIVAERLAVPDAVDLLRREIHGAAEAETIRLELETLYGELDRLAVERAEGLLTARQVKISTDIVNAKITKLQARQLDQERLRVFEGIPLGTPQVAGMIAELSPDRFRAVLDVLAEVVVLPVGKGGRIPNPERVQVNWR

SEQ ID NO: 218 - protein, 469 aa, synthetic construct
MSYTTPVRAAVYLRISEDRSGEQLGVARQREDCLKLCDQRKWEPVEYLDNDVSASTGKRRPAYEQMLADITAGKIAAVVAWDLDRLHRRPIELEAFMSLADERRLALATVAGDVDLATPQGRLVARLKGSVAAHETEHKKARQRRAARQKAERGHPNWSKAFGYLPGPNGPEPDPRTAPLVKQAYADILAGASLGDVCRQWNDAGAFTITGRPWTTTTLSKFLRKPRNAGLRAYKGARYGPVDRDAIVGKAQWGPLVDEATFWAAQAVLDAPGRAPGRKSVRRHLLTGLAGCGKCGNHLAGSYRTDGRVVYVCKACHGVAILADNIEPVLYHIVAERLTMPDAVDLLRREIHDAAEADTIRLELETLYGELDRLAVERAEGLLTARQVKISTDIVNAKITKLQARRLDQERLRVFDGIPLGTPQVAGMIAELSPDRFRAVLDVLAEVVVQPVGKSGRIFNPERVQVNWR

SEQ ID NO: 219 - protein, 469 aa, synthetic construct
MSYTTPVRAAVYLRISEDRSGEQLGVARQREDCLKLCGQRKWVPVEYLDNDVSASTGKRRPAYEQMLADITAGKIAAVVAWDLDRLHRRPMELEAFMSLADEKRLALATAAGDVDLATPQGRLVARLKGSVAAHETEHKKARQRRAARQKAERGYPNWSKAFGYLPGPNGPEPDPRTAPLVKQAYADILAGASLGDVCRQWNGAGAFTITGRPWTTTTLSKFLRKPRNAGLRTYKGARYGPVDRDAIVGKAQWSPLVDEATFWAAQAVLDAPGRAPGRKSVRRHLLTGLAGCGKCGNHLAGSYRTDGRVVYVCKACHGVAILADNIEPILYHIVAERLAMPDAVDLLRRVIHDAAEAETIRLELETLYGELDCLAVERAEGLLTARQVKISTDIVNAKITKLQARQLDQERLRVLDGIPLGTPQVAGVIAELSPDRFRAVLDVLAEVVVQPVGKGGRIFSPERVQVNWR

SEQ ID NO: 220 - protein, 469 aa, synthetic construct
MCYTTPVRAAVYLRISEDRSGEQLGVARQREDCLKLCDQRKWVPVEYLDNDVSASTGKRRPAYEQMLADITAGKIAAVVAWDLDRLHRRPIELEAFMSLADERRLALATVAGDVDLATPQGRLVARLKGSVAAHETEHKKARQRRAARQKAERGLPNWSKAFGYLPGPNGPEPDPRTAPLVKQAYADILAGASLGDVCRQWNDAGAFTITGRPWTTTALSKFLRKPRNAGLRAYKGARYGPVDRDAIVGKAQWSPLVDEATFWAAQAVLDAPGRAPGRKSVRRHLLTGLAGCGKCGNHLAGSYRTDGRVVYVCKACHGVAILADNIEPILYHIVAERLAMPDAVDLLRREIHDAAEAETIRLELETLYGELDSLAVERAEGLLTARQVKISTDIVNAKITKLQARQLDQERLRVLDGIPLGTPQVAGMIAGLSPDRFRAVLDVLAEVVVQPVGKSGRIFNPERVQVNWR

SEQ ID NO: 221 - protein, 485 aa, synthetic construct
MTKKVAIYTRVSTTNQAEEGFSIDEQIDRLTKYAEAMGWQVSDTYTDAGLSGAKLERPAMQRLINDIENKAFDTVLVYKLDRLSRSVRDTLYLVKDVFTKNKIDFISLNESIDTSSAMGSLFLTILSAINEFERENIKERMTMGKLGRAKSGKSMMWTKTAFGYYHNRETGILEIVPLQATIVEQIFTDYLSGISLTKLRDKLNESGHIGKEIPWSYRTLRQTLDNPVYCGYIKFKDSLFEGMHKPIIPYETYLKVQKELEERQQQTYERNNNPRPFQAKYMLSGMARCGYCGAPLKIVLGHKRKDGSRTMKYHCANRFPRKTKGVTVYNDNKKCDSGTYDLSNLENTVIDNLIGFQENNDSLLEIISGNNQPILDTSSLKKRISQIDKKIQKNSDLYLNDFITMDELKDRTDCLQAEKKLLEAKISENKFNDSTDVFELVKTQLGSIPINELSYDNKKKIVNNLVSKVDVTADNVDIIFKFQLA

SEQ ID NO: 222 - protein, 469 aa, synthetic construct
MSYTTPVRAAVYLRISEDRSGEQLGVARQREDCLKLCDQRKWVPVEYLDNDVSASTGKRRPAYEQMLADITAGKIAAVVAWDLDRLHRRPIELEAFMSLADEKRLALATVAGDVDLATPQGRLVARLKGSVAAHETEHKKARQRRAARQKAERGLPNWSKAFGYLPGPNGPEPDPRTAPLVKQAYADILAGASLGDVCRQWNDAGAFTITGRPWTTTTLSKFLRKPRNAGLRAYKGARYGPVDRDAIVGKAQWSPLVDETTFWAAQAVLDAPGRAPGRKSVRRHLLTGLAGCGKCGNHLAGSYRTDGRVVYVCKACHGVAILADNIEPILYHIVAERLAMPDAVDLLRREIHDAAEAVTIRLELETLYGELDRLAVERAEGLLTARQVKISTDIVNAKITKLQARQLDQERLRVFDGIPLGTPQVAGMIAELSPNRFRAVLDVLAEVVVQPVGKSGRIFNPERVQVNWR

SEQ ID NO: 223 - protein, 469 aa, synthetic construct
MSYTTPVRAAVYLRISEDRSGEQLGVARQREDCLKLCGQRKWVPVEYLDNDVSASTGKRRPAYERMLADITAGKIAAVVAWDLDRLHRRPIELEAFMSLADEKRLALATVAGDVDLATPQGRLVARLKGSVAAHETEHKKARQRRAARQKAERGYPNWSKAFGYLPGPNGPEPDPRTAPLVKRAYADILAGASLGDVCRQWNDAGVFTITGRPWSTTTLSKFLRKPRNAGLRAYKGARYGPVDRDAIVGKAQWSPLVDEATFWAAQAVLDAPGRAPGRKSVRRHLLTGLAGCGKCGNHLAGSYRTDGRVVYVCKACHGVAILADNIEPILYNIVAERLAMPDAVDLLRREIHDAAEAETIRLELETLYDELDRLAAERAEGLLTARQVKISTDIVNAKITRLQARQLDQERLRVFDGIPLGTPQVAGMIAELSPDRFRAVLDVLAEVVVQPVGKGGRIFNPERVQVNWR

SEQ ID NO: 224 - protein, 485 aa, synthetic construct
MTKKVAIYTRVSTTNQAEEGFSIDEQIDRLTKYAETMGWQVSGTYTDAGLSGAKLERPAMQRLINDIENKAFDTVLVYKLDRLSRSVRDTLYLVKDVFTKNKIDFISLGESIDTSSAMGSLFLTILSAINEFERENIKERMTMGKLGRAKSGKSMMWTKTAFGYYHNRKTGILEIVPQQATIVEQIFTDYLSGISLTKLRDKLNECGHIGKDIPWSYRTLRQTLDNPVYCGYIKFKDSLFEGMHKPIIPYETYLKVQKELEERQQQTYERNNNPRPFQAKYMLSGMARCGYCGAPLRIVLGHKRKDGSRTMKYHCANRFPRKTKGITVYNDNKKCDSGTYDLSNLENTVIDSLIGFQENNDSLLKIINGNNQPILDTSSLKKQISQIDRKIQKNSDLYLNDLITMDELKDRTDSLQAEKKLLKAKISENNFNDNTDVFELVKTQLGSIPINELSYDNKKKIVNNLVSKVDVTADDVDIIFKFQLA

SEQ ID NO: 225 - protein, 469 aa, synthetic construct
MSYTTPVRAAVYLRISEDRSGEQLGVARQREDCLKLCGQRKWVPVEYLDNDVSASTGKRRPAYEQMLADITAGKIAAVVAWDLDRLHRRPVELEAFMSLADEKRLALATVAGDVDLATPQGRLVARLKGCVAAHETEHKKARQRRAARQKAERGHPNWSKAFGYLPGPNGPEPDPRTAPLVKQAYADILAGASLGDVCRQWNDAGAFTITGRPWTTTTLSKFLRKPRNAGLRAYKGARYGPVDRDAIVGKAQWSPLVDEATFWAAQAVLDAPGRAPGRKSVRRHLLTGLAGCGKCGSHLAGSYRTDGRVVYVCKACHGVAILADNIEPILYRIVAERLAMPDAVDLLRREVHDAAEAETIRLELETLYGELDRLAVERAEGLLTARQVKISTDIVNAKITKLQARQLDQERLRVFNGIPLGTPQVASKIAELSPDRFRAVLDVLAEVVVQPVGKSGGIFNPERVQVNWR

SEQ ID NO: 226 - protein, 452 aa, synthetic construct
MKAAIYIRVSTREQVENYSIQAQTEKLTALCRSKDWDVYDIFIDGGYSGSNMNRPALNEMLSKLHEIDAVVVYRLDRLSRSQRDTITLIEEYFLKNNVEFVSLSETLDTSSPFGRAMIGILSVFAQLERETIRDRMVMGKIKRIEAGLPLTTAKGRTFGYDVIDTKLYINEEEAKQLRLIYDIFEEEQSITFLQKRLKELGFKVRTYNCYNNWLTNDLYCGYVSYKDKVHVKGIHEPIISEEQFYRVQEIFARTGKNPNMNRGSASLLNNLVVCSKCGLGFVHRRKDIMSHGKKYHYRYYSCKTYKHIHELEKCGNKIWRADKLEELIINRVNNYSFASRNVDKENELDSLNEKLKIEHAKKKRLFDLYINGSYEVSELDSMMNDIDAQINYYESQIEANEELKKNKKIQENLAYLATVDFDSLEFREKQLYLKSLINKIYIDGEQVIIEWL

SEQ ID NO: 227 - protein, 485 aa, synthetic construct
MTKKVAIYTRVSTTNQAEEGFSIDEQIDRLTKYAEAMGWQVSDTYTDAGFSGAKLERPAMQRLINDIENKAFDTVLVYKLDRLSRSVRDTLYLVKDVFTKNKIDFISLNEGIDTSSAMGSLFLTILSAINEFERENIKERMTMGKLGRAKSGKSMMWTKTAFGYYHNRKTGILEIVPLQATIVEQIFTDYLSGISLTKLRDKLNESGHIGKDIPWSYRTLRQTLDNPVYCGYIKFKDSLFEGMHKPIIPYETYLRVQKELEERQQQTYERNNNPRPFQAKYMLSGMARCGYCGAPLRIVLGHKRKDGSRTMKYHCANRFPRKTKGVTVYNDNKKCDSGTYDLSSLENTVIDSLIGFQENNDSLLKIINGDNQPILDTSSLKKQISQIDKKIQKNSELYLNDFITMDELKDRTDSLQAEKKLLKAKINENKLNDSTDVFEQVKTQLGSIPINELSYDNKKKIVNNLVGKVDVTADNVDIIFKFQLA

SEQ ID NO: 228 - protein, 452 aa, synthetic construct
MKAAIYIRVSTQEQVGNYSIQAQTEKLTALCRSKDWDVYDIFIDGGYSGSNMNRPALNEMLSKLHEIDAVVVYRLDRLSRSQRDTTTLIEEYFLKNNVEFVSLSETLDTSSPFGRAMIGILSVFAQLERETIRDRMVMGKIKRIEAGLPLTTAKGRTFGYDVIDTKLYINEEEAKQLQLIYDIFEEEQSITSLQKRLKELGFKVRTYNRYNNWLTNDLYCGYVSYKDKVHVKGIHEPIISEEQFYRVQEIFTRMGKNPNVNRDSASLLNNLVVCSKCGLGFVHRSKDTMSRGKKYHYRYYSCKTYKHTHELEKCGNKTWRADKLEELVINRVSSYSLASRNMVKEDELDSLNEKLKIEHAKKKRLFDLYINGSYEVSELDSMMNDIDAQINYYESQIEANEELKKNKKIQENQADLATVDFDSLEFREKQLYLKSLINKIYIDGEQVTIEWL

SEQ ID NO: 229 - protein, 485 aa, synthetic construct
MTKKVAIYTRVSTTNQAEEGFSIDEQIDRLTKYAEAMGWQVSDTYTDAGLSGARLERPAMQRLINDIENKAFDTVLVYKLDRLSRSVRDTLYLVKDVFTRNKIDFISLNESIDTSSAMGSLFLTILSAINEFERENIKERMTMGKLGRAKSGKSMMWTKTAFGYYHNRKTGILEIVPLQATIVEQIFTDYLSGISLTKLRDKLNESGHIGKDIPWSYRTLRQTLDNPVYCGYIKFKDSLFEGKHKPIIPYETYLKVQKELEERQQQTYERNNNPRPFQAKYMLSGMARCGYCGAPLRVVLGHKRKDGSRTMKYHCANRFPRKTKGVTVYNDNKKCDSGTYDLSNLENTVIDSLIGFQENNDSLLKIINGNNQPILDTSSIKKQISQIDKKIQKNSDLYLNDFITMDELKGRTDSLQAEKKLLKAKISENKFNDSTDVFELVKTQLGSIPINELSYDNKKKIVNNLVGKVDVTADNVDIIFKFQLA

SEQ ID NO: 230 - protein, 469 aa, synthetic construct
MSYTTPVRAAVYLRISEDRSGEQLGVARQREDCLKLCGQRKWVPVEYLDNDVSASTGKRRPAYEQMLADITAGTIAAVVAWDLDRLHRRPVELEAFMSLADEKRLALATVAGDVDLATPQGRLVARLKGCVAAHETEHKKARQRRAARQKAERGYPNWSKAFGYLPGPNGPEPDPRTAPLVKQAYADILAGASLGDVCRQWNDAGAFTITGRPWATTTLSKFLRKPRNAGLRAYKGARYGPVDRGAIVGKAQWSPLVDEATFWAAQAVLDAPGRAPGRKSVRRHLLTGLAGCGKCGNHLAGSYRTDGQVVYVCKACHGVSILAVNIEPILYHIVAERLAMPDAVDLLRRGIHDAAEAETIRLELGTLYGELDRLAVERAEGLLTARQVKISTDIVNAKITKLQAHQLDQERLRVLDGIPLGTPQVASVIAELSPDRFRAVLDVLAEVIVQPVGKSGRISNPERVQVNWR

SEQ ID NO: 231 - protein, 469 aa, synthetic construct
MSYTTPVRAAVYLRISEDRSGEQLGVARQREDCLKLCDQRKWVPVEYLDNDVSASTGKRRPAYEQMLADITAGKIAAVVAWDLDRLHRRPIELEAFMSLADEKRLALATVAGDVDLATPQGRLVARLKGCVAAHETEHKKARQRRAARQKAERGLPNWSKAFGYLPGPNGPEPDPRTAPLVKQAYEDILAGASLGDVCRQWNDAGAFTITGRPWTTTTLSKFLRRPRNAGLRAYRGARYGPVDRDAIVGKAQWSPLVDEATFWAAQAVLDAPGRAPGRKSVRRHLLTGLAGCGKCGNHLAGSYRTDGRVVYVCKACHGVAILADNIEPILYHIVAERLAMPDAVDLLRRETHDAAETETIRLGLETLYGELDRLAVERAEGLLTARQVKISTDIVNAKITKLQARQLDQERLRVFDGIPLGTPQVVGMIAELSPDRFRAVLDVLAEVVVQPVGKSGRTFNPERVQVNWR

SEQ ID NO: 232 - protein, 485 aa, synthetic construct
MTKKVAIYTRVSTTNQAEEGFSIDEQIDRLTKYAEAMGWQVSDTYTDAGLSGAKLERPAMQRLINDIEDKAFDTVLVYKLDRLSRSVRDTLYLVKDVFAKNKVDFISLNECIDTSSAMGSLFLTILSAINEFERENIKERMTMGKLGRAKSGKSMMWTKTAFGYYHNRKTGILEIVPLQATIVEQIFTDYLSGISLTKLRDKLNESGHIGKDIPWSYRTLRQTLDNPVYCGYIKFKDSLFEGMHKPIIPYETYLKVQKELEERRRQTYERNNNPRPFQAKYMLSGMARCGYCGAPLRIVLGHKRKDGSRTMKYHCANRFPRKTKGVTVYNDDKKCDSGTYDLSNLENTVIDILIGFQENNDSLLKIINGNNQPILDTCSFKKQISQIDKKIQKNSDLYLNDFITMDELKNRTDSLQAEKKLLRAKISENKFSDSTDVFELVKTQLGSIPINELSYDNKKKIVNNLVSKVDVTADNVDIIFKFQLA

SEQ ID NO: 233 - protein, 452 aa, synthetic construct
MKAAIYIRVSTREQVENYSIQAQTEKLTALCRSKDWDVYGIFVDGGYSGSNMNRPALNEMLSKLHEIDAVVVYRLDRLSRSQRDTITLIEEYFLKNNVEFVSLSETLDTSSPFGRAMIGVLSVFAQLERETIRDRMVMGKIKRVEAGLPLTTAEGRTFGYDVIDTKLYINEEEAKQLQLIYDIFEEEQSITFLQKRLKKLGFKVRTYSRYSNWLTNDLYCGYVSYKDKVHVKGIHEPIISEEQFYRVQEIFTRMGKNPNMNRDSASLLNNLVVCSRCGLGFVHRRKDTTSRGKKYHYRYYSCKTYKHTHELEKCGNKIWRADKLEELIIDRVNNYSFASRNVDKEDELDSLNERLKIEHAKRKRLFDLYINGSYEVSELDSMMSDIDAQINYYESQIEASEELKKDKKIRENLADLATVDYDSLEFREKQLYLKSLINKIYIDGEQVTIEWL

SEQ ID NO: 234 - protein, 469 aa, synthetic construct
MSYTTPVRAAVYLRISEDRGGEQLGVARQREDCLKLCDQRKWVPVEYLDNDVSASTGKRRPAYERMLADISAGKIAAVVAWDLDRLHRRPIELEAFMSLADEKRLALATVAGDVDLATPQGRLVARLKGSVAAHETEHKKARQRRAARQKAERGYPNWSKAFGYLPGPNGPEPDPRTAPLVKQAYADILAGASLGDVCRRWNDAGAFTITGRPWTTTTLSKFLRKPRNAGLRAYKGARYGPVDRNAIVGKAQWSPLVDEATFWAAQAVLDAPGRAPGRKSVRRHLLTGLAGCGKCGNHLAGSYRTDGRVVYVCKACHGVAILADNIEPILYHIVAERLAMPDAVDLLRREVHDAAEAETVRLELETLHGELDRLAVERAEGLLTARQVKISTDIVNAKITKLQARQLDQERLRVFDGIPLGTPRVAGMIAELSPNRFRAVLDVLAEVVVQPVGKSGRIFNPERVQVNWR

SEQ ID NO: 235 - protein, 452 aa, synthetic construct
MKAAIYIRVSTREQVENYSIQAQTEKLTALCRSKDWDVYDIFIDGGYSGSNMNRPALNEMLSKLHEIDAVVVYRLDRLSRSQRDTITLIEEYFLKNNVEFVSLSETLDTSSPFGRAMIGILSVFAQLERETIRDRMVMGKIKRIEAGLPLTTAKGRTFGYDVIDTKLYINEEEAKQLQLIYDIFEEEQSITFLQKRLKKLGFKVRTYNRYNNWLTNDLYCGYVSYKDKVHVKGIHEPIISEEQFNRVQEIFTRMGKNPNMNRDSASLLNNLVVCSRCGLGFVHRRKDAMSRDKKYHYRYYSCKTYKHIHELEKCGNKIWRADKLEELVINHVNNYSLANRNVDKEDELDSLNKKLRTEHAKKRRLFDLYINGSNEVSELDSMMSDIDAQINYYESQIEANEELKKNKKIQENLAYLATVDFDSLEFREKQLYLKSLINKIYIDGEQVTIEWL

SEQ ID NO: 236 - protein, 452 aa, synthetic construct
MKAAIYIRVSTREQVENYSIQAQTEKLTALCRSKGWDVYDIFIDGGYSGSNMNRPALNEMLSRLHEIDVVVVYRLDRLSRSQRDTITLIEEYFLKNNVEFVSLSETLDTSSPFGRAMIGILSVFAQLERETIRDRMVMGKIKRIEAGLPLTTAKGRTFGYDVIDTKLYINEEEAKQLRLIYDIFEEEQSITFLQRRLKKLGFKVRTYNRYNNWLTNDLYCGYVSYKDKVHAKGIHEPIISEEQFYRVQEIFARMGKNPNMNRDSASLLNNLVVCSKCGLSFVHRRKDAMGRDKKYHYRYYSCKTYKHIHELEKCGNKIWRADELEELVIKRVNNYSLASRNVDKEDELDSLSEKLKIEHAKKKRLFDLYINGCYDVSELDSMMCDIDAQINYYESQIEANEELKKSKRIQENLANLATVDFDSLEFREKQLYLKSLISKIYIDGEQVIIEWL

SEQ ID NO: 237 - protein, 469 aa, synthetic construct
MSYTTPVRAAVYLRISEDRSGEQLGVARQREDCLKLCGQRKWVPVEYLDNDVSASTGKRRPAYEQMLADITAGKIAAVVAWDLDRLHRRPIELETFMSLADEKRLALATVAGDVDLATPQGRLVARLKGSVAAHETEHKKARQRRAARQKAERGLPNWSKAFGYRSGPNGPEPDPRTAPLVKQAYADILAGASLGDVCRQWNDAGASTITGRPWTTTTLSKFLRKPRNAGLRAYKGARYGPVDRDAIVGKAQWSPLVDEATFWAAQAVLDAPGRAPGRKSVRRHLLTGLAGCGKCGNHLAGSYRTDGRVVYVCKACHGVSILAVNIEPVLYHIVAERLAMPDAVDLLRRETHDAAEAETIRLGLETLYGELDRLAVERAEGLLTARQVKISTDIVNAKITKLQARQLDQERLRVLDGIPLGTPQVAGVIAELSPDRFRAVLDVLAEVVVQPVGKGGRIFNPERVQVNWR

SEQ ID NO: 238 - protein, 485 aa, synthetic construct
MTKKVAIYTRVSTTNQAEEGFSIDEQIERLTKYAEAMGWQVGDTYTDAGFSGAKLERPAMQRLINDIENKAFDTVLVYKLDRLSRSVRDTLYLVKDVFTKNKIDFISLNESINTSSAMGSLFLTILSAINEFERENIKERMTMGKLGRAKSGKSMMWTKTAFGYYHNRKTGILEIVPLQATIVEQIFTDYLSGISLTKLRDKLNESGHIGKDIPWSYRTLRQTLDNPVYCGYIKFKGSLFEGMHKPIIPYETYLKVQKELEERQQQTYERNNNPRPFQAKYMLSGMARCGYCGAPLRVVLGHKRKDGSRTMKYHCANRFPRKAKGVTVYNDNKKCDSGTYDLSSLENIVIDNLIDFQENNDSLLKIINGNNQPIRDTSSFKKQISQIDKKVQKNSDLYLNDFITMDELKDRTDSLQAEKKLLKAKISETKFNDSTDVFELVKTQLGSIPINELSYDNKKKIVNNLVSKVDVTADSVDIIFKFQLA

SEQ ID NO: 239 - protein, 485 aa, synthetic construct
MTKKVAIYTRVSTTNQAEEGFSIDEQIDRLTKYAEAMGWQVSDTYTDAGLSGAKLERPAMQRLINDIENKVFDTVLVYKLDRLSRSVRDTLYLVKDVFTKNKIDFISLNESIDTSSAMGSLFLTILSAINEFERENIKERMTMGKLGRAKSGKSMMWTKTAFGYYHNRKTGILEIVPLQATIVEQIFTDYLSGISLTKLRDKLNESGHIGKDIPWSCRTLRQTLDNPVYCGYIKFKDSLFEGMHKPIIPYETYLKVQKELEERQQQTYERNNNPRPFQAKYMLSGMARCGYCGAPLRIVLGHKRKDGSRTMKYHCANRFPRKTKGVTVYNENKKCDSGTYDLSNLENTVIDNLIGFQENNDSLLKIINGNNQPILDTSSLKEQISQIDKKIQKNSDLYLHDFITMDELKDRTESLQAEKKLLKAKISENKFNDSTDVFELVKTQLGSIPINELSYDNKKKIVNNLVSKVDVTADNVDIIFKFQLA

SEQ ID NO: 240 - protein, 485 aa, synthetic construct
MTKKVAIYTRVSTTNQAEEGFSIDEQTDRLTKYAEAMGWRVSDTYTDAGFSGAKLERPAMQRLINDIENKAFDTVLVYKLDRLSRSVRDTLHLVKDVFTKNKIDFISLSESIDTSSAMGSLFLTILSAINEFERENIKERMTMGKLGRAKSGKSMMWTKTAFGYYHNRKTGILEIVPLQATIVEQIFTDYLSGISLTKLRDKLNESGHVGKDIPWSYRTLRQTLDNPVYCGYIKFKDSLFEGMHKPIIPYETYLKVQKELEERQQQTYERNNYPRPFQAKYMLSGMARCGYCGAPLRIVLGHKRKDGSRTMKYHCANRFPRKTKGVTVYNDNKKCDSGTYDLSNLENTVINNLIGFQEDDDSLLKIINGDNQPILDTSSFKNQISQIDKKIQKISDLYLNDFITMDELKDRTDSLQAEKKLLEAKFSENKFNDSADVFELVKTQLGGIPINELSYVNKKKIVNNLVSKVYVTADNVDIIFKFQLA

SEQ ID NO: 241 - protein, 485 aa, synthetic construct
MTKKVAIYTRVSTTNQAEEGFSIDEQIDRLTRYAEAMGWQVSDTYTDAGISGAKLERPAMQRLINDIENKAFDTVLVYKLDRLSRSVRDTLYLVKDVFTKNKIDFISLNESIDTSSAMGSLFLTILSAINEFERENIKERMTMGKLGRAKSGKSMMWTKTAFGYYHNRKTGILEIVPLQATIVEQIFTDYLSGISLTKLRDKLNESGHIGKDIPWSYRTLRQTLDNPVYCGYIKFKDSLFEGMHKPIIPYETYLKVQKELEERQQQTYERNNNPRPFQAKYMLSGMARCGYCGAPLRIVLGHKRKDGSRTMKYHCANRFPRKTKGITVYNDNKKCDSGTYDLSDLENTVIDNLIGLQEDNDSLLKIINGNNQLIQDTSSFKEQISQIDKKIQKNSDLYLNDFITMDELKDRTDSLQAEKKLLKAKISENKFYDSTDVFELVRTQLGSFPINELSYDNKKKIVNNLVSKVDVTADNVDIIFKFQLT

SEQ ID NO: 242 - protein, 452 aa, synthetic construct
MKAAIYIRVSTQEQVGNYSIQAQTEKLIALCRSKDWDVYDIFIDGGYSGSNMNRPALNEMLSKLHEIDAVVVYRLDRLSRSQRDTTTLIEEYFLKNNVEFVSLSETLDTSSPFGRAMIGILSVFAQLERETIRDRMVMGKIKRIEAGLPLTTAKGRTFGYDVIDTKLYVNEEEAKQLRLIYDIFEEEQSITSLQKRLKRLGFKVRTYNRYNNWLTNDLYCGYVSYKDKVHVKGIHEPIISEEQFYRVQEIFTRMGKNPNMNRDSASLLNNLVVCSKCGLSFVHRSKDTMSRGKKYHYRYYSCKTYKHTHELEKCGNKTWRADKLEELIINRVNNYSFASRNVDKEDELDGLNEKLKIEHAKKKRLFDLYINGSYEVSELDSMMNDIDAQINYYESQIEANEELRKNKKIQEDLADLATVDFDSLEFREKQLYLKSLINKIYIDDEQVTIEWL

SEQ ID NO: 243 - protein, 452 aa, synthetic construct
MKAAIYIRVSTREQVENYSIQAQTEKLTALCRSKDWDVYDIFIDGGYSGSNMNRPALNEMLSRLHEIDAVVVYRLDRLSRSQRDTITLIEEYFLKNNVEFVSLSETLDTSSPFGRAMIGILSVFAQLERETIRDRMVMGKIKRIEAGLPLTTAKGRTFGYDVIDTKLYINEEEAKQLQLIYDIFEEERSITSLQKRLKKLGLKVRTYSCYNNWLTNDLYCGYVSYKDKVHVKGIHEPIISEEQFYRVQEIFTRMGKNPNMNRDSASLLNNLVVCCKCGLGFVHRRKDAMSRDKKYHYRYYSCKTYKHIHELEKCGNKIWRADELEELIINRVNSYSLVSRNVDKEDELDSLNEKLKIEHAKKKRLFDLYINGNYEVSELDSMMSDIDAQINYYEGQIEANEELKKNRKIQESLAHLATVDFDSLEFREKQLYLKSLINKIYIDGEQVIIEWL

SEQ ID NO: 244 - protein, 485 aa, synthetic construct
MTRKVAIYTRVSTTNQAEEGFSIDEQIDRLTKYAEAMGWQVSDTYTDAGFSGAKLERPAMQRLINDIENKAFDTVLVYKLDRLSRSVRDTLYLVKDVFTKNKIDFISLNESIDTSSVMGSLFLTILSAINEFERENIKERMTMGKLGRAKSGKSMMWTKTAFGYHHNRKTGILEIVPLQATIVEQIFTDYLSGISLTKLRDKLNESGHIGKDIPWSYRTLRQTLDNPVYCGYIKFKDSLFEGMHKPIIPYETYLKVQKELEERQRQTYERNNNPRPFQAKYMLSGMARCGYCGAPLRIVLGHKRKDGSRTMKYHCANRFPRKTKGVTVYNDNKKCDSGTYDLSNLENTVIDNLIDFQENNDSLLKIINGNNQPILDTSSFKKQISQIDKKIQKNSDLYLNDFITMDELKDRTDSLQAEKELLKAKISENRFNDSTDVFEQVKTQLGSIPINELSYDNKKKIVNNLVSKVDVTADNVDIIFKFQLA

SEQ ID NO: 245 - protein, 485 aa, synthetic construct
MTKKVAIYTRVSTTNQAEEGFSIDEQTDRLTKYAEAMGWQVSGTYTDAGFSGAKLERPAMQRLINDIENKAFDTVLVYKLDRLSRSVRDTLYLVKDVFTKNEIDFISLNESIDTSSAMGSLFLTILSAINEFERENIKERMTMGKLGRAKSGKSMMWTRTAFGYYHNRKTGILEIVPLQATIVEQIFTEYLSGISLTKLRDKLNESGHIGKDIPWSYRTLRQTLDNPVYCGYIKFKDSLFEGMHKPIIPYETYLRVQKELEERQQQTYERNNNPRPFQAKYMLSGMARCGYCGAPLRIALGHKRKDGSRTMKYHCANRFPCKTKGVTVYNDNKKCDSGTYDLSNLENTVIDNLIGFQENNDNLLKIINGNNQPILDTSSFEKQISQIDKKIQKISDLYLNDFITMDELKDRTDSLQAEKKLLKAKISEGKFNDSTDVFELVKTQLGSIPINELSYDDKKKIVNSLVSKVDVTADNVDIIFKFQLT

SEQ ID NO: 246 - protein, 485 aa, synthetic construct
MTKKVAIYTRVSTTNQAEEGFSIDEQIDRLTKYAEAMGWQVSDTYTDAGFSGAKLERPEMQRLINDIEDKAFDTVLVYKLDRLSRSVRDTLHLVKDVFTKNKIDFISLNESIDTSSAMGSLFLTILSAINEFERENIKERMTMGKLGRAKSGKSMMWTKTAFGYYHNRKTGILEIVPLQATIVEQIFTDYLSGISLTKLRDKLNESGHIGKDIPWSYRTLRQTLDNPVYCGYVKFKGSLFEGMHKPIIPYETYLRVQKELEERQQQTYERNNNPRPFQAKYMLSGMARCGYCGAPLRVVLGHKRKDGSRTMKYHCANRFPRKTKGITVYNDNKKCDSGTYDLSNLEGTVIDNLIGLQENDDSLLKIINGNNQSILDTSSFKKQISQIDRKIQKNSDLYLNDFITMDELKARTDSLQAEKKLLKAKISENKFNDSTDVFELVKTQLGSIPINELSYDSKKKIVNNLVSKVDVTADNVDIIFKFQLA

SEQ ID NO: 247 - protein, 485 aa, synthetic construct
MTKKVAIYTRVSTTNQAEEGFSIDEQIDRLTKYAEAMGWQVSDTYTDAGFSGAKLERPAMQRLINDIENKAFDTVLVYKLDRLSRSVRDTLHLVKDVFTKNKIDFISLNESIDTSSAMGSLFLTILSAINEFERENIKERMTMGKLGRAKSGKSMMWAKTAFGYYHNRKTGILEIVPQQATIVEQIFTDYLSGISLTKLRDKLNESGYIGKDIPWSYRTLRQTLDNPVYCGYIKFKDSLFKGMHKPIIPYETYLKVQKELEERQQQAYERNNNPRPFQAKYMLSGMARCGYCGAPLRIVLGHKRKDGSRTMKYHCANRFPRKTKGVTVYNDNKKCDSGTYDLSNLENTVIDNLMGFQENSDSLLKIINGNNQPILDTSSFEKQISQIDKKIQKNSDLYLNDLITMDELKDRTDSLRAEKGLLKAKISETKFNDSTDVFELVKTQLGSIPINELSYDNKKKVVNNLVSKVDVTADNVDIIFKFQLA

SEQ ID NO: 248 - protein, 485 aa, synthetic construct
MTKKVAIYTRVSTTNQAEEGFSIDEQIDRLTKYAEAMGWQVSDTYTDAGFSGAKLERPAMQRLINDIENKAFDTVLVYKLDRLSRSVRDTLYLVKDVFTKNKIDFISLSESIDTSSAMGSLFLTILSAINEFERENIKERMTMGKLGRAKSGKSMMWTKTAFGYYHNRKTGILEIVPLQATIVEQIFTDYLSGISLTKLRDKLNESGHIGKDIPWSYRTLRQTLDNPVYCGYIRFKGSLFEGMHKPIIPYETYLKVQKELEERQQQAYERNNNPRPFQAKYMLSGMARCGYCGAPLKIVLGHKRKDGGRTMKYHCANRFPRKTKGVTVYNGNKKCDSGTYDLSNLENTVIDNLIGFQENNDSLLKIINGSNQPILDTSSFKKQISQIDKKIQKNSDLYLNDLITMDELKDRTDSLQAEKKLLKAKISENKFNDSTDVFELVKTQLGSIPINELSYDNKKKIVNNLVSKVDVTADNVDIIFKFQLA

SEQ ID NO: 249 - protein, 485 aa, synthetic construct
MTKKVAIYTRVSTTNQAEEGFSIDEQIDRLTKYAEAMGWQVSDTYTDAGFSGAKLERPAMQRLINDIETKAFDTVLVYKLDRLSRSVRDTLYLVKDVFTKNKIDFISLNESIDTSSAMGSLFLTILSAINEFERENIKERMTMGKLGRAKSGKSMMWTKTAFGYYHNRKTGILEIVPPQATIVEQIFTDYLSGISLTKLRDKLNESGHIGKDIPWSYRTLRQTLDNPVYCGYIKFKGSLFEGMHKPIIPYETYLKVQKELEERQQQTYERNNNPRPFQAKYMLSGMARCGYCGAPLKVVLGHKRKDGSRTMKYHCANRFPRKTKGVTVYNDNKKCDSGTYDLSNLENTVIDSLIGFQENNDGLLKIINGNNQPILDTSSFKKQISQIDKKIQKNSDLYLNDFITMDELRDRTDSLQAEKKLLEAKISENKFNDSTDVFELVKTQLGSIPINELSYDDKKKIVNNLVSKVDVTADNVDIIFKFQLA

SEQ ID NO: 250 - protein, 485 aa, synthetic construct
MTKKVAIYTRVSTTNQAEEGFSIDEQIDRLTKYAEAMGWQVSDAYTDAGFSGAKLERPAMQRLINDIENKAFDTVLVYKLDRLSRSVRDTLHLVKDVFTKNKIDFISLSESIDTSSAMGSLFLTILSAINEFERENIKERMTMGKLGRAKSGKSMMWTKTAFGYYHNRKTGILEIVPLQATIVEQIFTDYLSGISLTKLRDELNESGHIGKDIPWSYRTLRQTLGNPVYCGYIKFKGSLFEGMHKPIIPYETYLKVQKELEERQQQTYERNNNPRPFQAKYMLSGMARCGYCGAPLRIVLGHKRKDGSRTMKYHCANRFPRKTKGVTVYNDNKKCDSGTYDLRNLENTVIDNLIDFQENNDSLLKIINGGNQPILDTSSLKEQISQIDRKIRKNSDLYLNDFITMDELKDRTNSLQAEKKLLKAKISENKFNDSTDVFGLVKTQLGSIPINELSYDNKKKIVNNLVSKVDVTADNVDIIFKFQLA

SEQ ID NO: 251 - protein, 469 aa, synthetic construct
MSYTTPVRAAVYLRISEDRSGEQLGVARQREDCLKLCDQRKWEPVEYLDNDVSASTGKRRPAYEQMLADITAGKIAAVVAWDLDRLHRRPIELEAFMSLADEKRLALATVAGDVDLATPQGRLVARLKGSVAAHETEHKKARQRRAARQKAERGYPNWSKAFGYLPGPNGPEPDPRTAPLVKQAYADILAGASLGDVCRRWNDAGAFTITGRPWTTTTLSKFLRKPRNAGLRAYKGARYGPVDRDAIVGKAQWSPLVDEATFWAAQAVLDAPGRAPGRKSVRRHLLTGLAGCGKCGNHLAGSYRTDGRVVYVCKACHGVAILADNIEPILYHIVAERLAMPDAARLLRREIHDAAEAETIRLELETLYGELDRLAVERAEGLLTARQVKISTDIVNAKITKLQARQLDQERLRVFSGIPLGTPQVAGVIAELSPDRFRAVLDVLAEVVVQPVGKGGRIFNPERVQVNWR

SEQ ID NO: 252 - protein, 469 aa, synthetic construct
MSYTTPVRAAVYLRISEDRSGEQLGVARQREDCLKLCDQRKWVPVEYLDNDVSASTGKRRPAYEQMLADITAGKIAAVVAWDLDRLHRRPIELEAFMSLADEKRLALATVAGDVDLATPQGRLVARLKGSVAAHETEHKKARQRRAARQKAERGQPNWSKAFGYLPGPNGPEPDPRTAPLVKQAYADILAGASLGDVCRQWNAAGAFTITGRPWTTATLSKFLRKPRNAGLRAYKGARYGPVDRDAIVSKARWGPLVDEATFWAAQAVLDAPGRAPGRKSVRRHLLTGLAGCGKCGNHLAGGYRTDGRVVYVCKVCHGVAILADNIEPILYHIVAERLAMPDAVDLLRREIHDAAEAEAIRLELETLHGELDRLAVERAEGLLTARQVKISTDIVSAKITKLQTRQLDQERLRVLDGIPLGTPQVAGVIAELSPDRFRAVLDVLAEVVVQPVGKSGRIFNPERVQVNWR

SEQ ID NO: 253 - protein, 452 aa, synthetic construct
MKAAIYIRVSTREQVENYSIQAQTEKLTALCRSKDWDVYDIFIDGGYSGSNMNRPALNEMLSKLHEIDAVVVYRLDRLSRSQRDTITLIEEYFLKNNVEFVSLSETLDTSSPFGRAMIGILSVFAQLERETIRDRMVMGKIKRIEAGLPLTTAKGRTFGYDVIDTKLYINEEEAKQLQLIYDIFEEVQSITFLQRRLKKLGFKVRTYNCYNNWLTNDLYCGYVSYKDKVHVKGIHEPIISEEQFYRVQEIFARMGKNPNMNRDSASLLNNLVVCGKCGLGFVHRRKDAMSRDKKYHYRYYSCKTYKHIHELERCGNKIWRADKLEELIINRVNNYSLASRNVDKEDELDSLYEKLKIEHAKKRRLFDLYVNGSYEVSELDSMMSDIDAQINYYESQIEANEELKKSKKIQENLAHLATVDFDSLEFREKQLYLKSLINKIYIDGEQVTIEWL

SEQ ID NO: 254 - protein, 485 aa, synthetic construct
MTKKVAIYTRVSTTNQAEEGFSIDEQIDRLTKYAEAMGWQVSDTYTDAGFSGAKLERPALQRLINDIENKAFDTVLVYKLDRLSRSVRDTLYLVKDVFTRNKIDFISLNESIDTSSAMGSLFLTILSAINEFERENIKERMTMGKLGRAKSGKSMMWTKTAFGYYHNRKTGILEIVPLQATIVEQIFTDYLSGISLTKLRDKLNESGHVGKDIPWSYRTLRQTLDNPVYCGYIKFKDSLFEGMHKPIIPYETYLKVQKELEERQQQTYERNNNPRPFQAKYMLSGMARCGYCGAPLRIVLGHKRKDGSRTMKYHCANRFPRKTKGITVYNDNKKCDSGTYGLSNLENTVIDNLIGFQENNDSLLKIINGNTQPILDTSSLKKQISQIDKKIQKNSDLYLNDFITMDELKDRTDSLQAEKKLLKAKISENKFNDSTDVFELVKTQLGSIPINELSYDNKKKIVNNLVSKVDVTADNVDIIFKFQLA

SEQ ID NO: 255 - protein, 452 aa, synthetic construct
MKAAIYIRVSTREQVENYSIQAQTEKLTALCRSKDWDVYDVFIDGGYSGSNMSRPALSEMLSKLHEIDAVVVYRLDRLSRSQRDTITLIEEYFLKNNVEFVSLSETLDTSSPFGRAMIGILSVFAQLERETIRDRMVMGKIKRIEAGLPLTTAKGRTFGYDVIDTKLYINEEEAKQLQLIYDIFEEVQSITFLQKRLKKLGFKVRTYNRYSNWLTNDLYCGYVSYKDKVHVKGIHEPIISEEQFYRVQEIFARMGKNPNMNRESASLLNNLVVCSKCGLGFVHRRKDAMSRDKKYHYRYYSCKTYKHIHELEKCGNKTWRADKLEELIISRVNNYSLASRNVDKEDELDSLNEKLKIEHAKKKRLFDLYINGCYDVSELDSMMCDIDAQINYYESQIEANEELKKSKRIQENLANLATVDFDSLEFREKQLYLKSLISKIYIDGEQVTIEWL

SEQ ID NO: 256 - protein, 469 aa, synthetic construct
MSYTTPVRAAVYLRISEDRSGEQLGVARQREDCLKLCDQRKWVPVEYLDNDVSASTGKRRPAYEQMLADITAGKIAAVVAWDLDRLHRRPVELEAFMSLADEKRLALATVAGDVDLATPQGRLVARLKGSVAAHETEHKKARQRRAARQKAERGLPNWSKAFGYLPGPNGPEPDPRTAPLVKQAYADILAGASLGDVCRQWNDAGALTITGRPWTTTTLSKFLRKPRNAGLRAYKGARYGPVDRDAIVGNAQWSPLVDEAIFWAAQAVLDAPGRAPGRKSVRRHLLTGLAGCGKCGNHLAGSYRTDGRVVYVCKACHGVAILADNIEPVLYHIVAERLAMPDAVDLLRREIHDAAEAETIRLELETLYGELDRLAVERAEGLLTARQVKISTDIVNAKITKLQARQLDQERLRVFDGIPLGTPQVAGMIAELSPDRFRAVLDVLAEVVVQPVGKSGRIPNPERVQVNWR

SEQ ID NO: 257 - protein, 452 aa, synthetic construct
MKAAIYIRVSTQEQVGNYSIQAQTEKLTALCRSKDWDVYDIFVDGGYSGSNMNRPALNEMLGKLHEIDAVVVYRLDRLSRSQRDTTTLIEEYFLKNNVEFVSLSETLDTSSPFGRAMIGILSVFAQLERETIRDRMVMGKIKRIEAGLPLTTAKGRTFGYDVIDTKLYINEEEAKQLQLIYDIFEEEQSITSLQKRLKKLGFKVRTYNRYNNWLTNDLYCGYVSYKDKVHVKGIHEPIISEEQFYRVQEIFTRMGKKPNMNRDSASLLNNLVVCGKCGLGFVHRSKDTMSRGKKYHYRYYSCKTYKHTHELEKCGNKTWRADKLEELIINRVSNYSFASRNVDKDDELDCLNEKLKIEHAKKKRLFDLYINGSYEVSELDSMMNDIDAQIDYYESQIVANEELKKNKKIQENLADLATVDFDSLEFREKQLYLKSLINKIYIDGEQVTIEWL

SEQ ID NO: 258 - protein, 469 aa, synthetic construct
MCYTTPVRAAVYLRISEDRSGEQLGVARQREDCLKLCGQRKWVPVEYLDNDVSASTGKRRPAYEQMLADITAGKIAAVVAWDLDRLHRRPIELEAFMSLADEKRLALATVAGDVDLATPQGRLVARLKGSVAAHETEHKKARQRRAARQKAERGYPNWSKAFGYLPGPNGPEPDPRTAPLVKQAYADILAGASLGDVCRQWNDVGAFTITGRPWTTTTLSKFLRKPRNAGLRAYKGARYGPVDRDAIVGKAQWGPLVDEATFWAAQAVLDAPGRAPGRKSVRRHLLTGLAGCGKCGNHLAGSYRTDGRVVYVCKACHGVAILADNIEPILYHIVVERLAMPDAVDLLRREIHDAAEAETIRLELETLYGELDRLAVERAEGLLTARQVKISTDIVNAKITKLQARQLDQERLHVFDGIPLGTPQVAGMIAELSPNRFRAVLDVLAEVVVQPVGKSGRIFNPERVQVNWR

SEQ ID NO: 259 - protein, 469 aa, synthetic construct
MSYTTPVRAAVYLRISEDRSGEQLGVARQREDCLKLCGQRKWVPVEYLDNDVSASTGKRRPAYEQMLADITAGKIAAVVAWDLDRLHRRPIELEAFMSLADEKRLALATVAGDVDLATPQGRLVARLKGCVAAHETEHKKARQRRAARQKAERGHPNWSKAFGYLPGPNGPEPDPRTAPLVKQAYADILAGASLGDVCRQWNDAGAFTITGRPWTTTTMSKFLRRPRNAGLRAYKGARYGPVDRDAIVGKAQWSPLVDEATFWAAQAVLDAPGRAPGRKSVRRHLLTGLAGCGKCGNHLAGSYRTDGQIVYVCKACHGVSILAVNIEPILYRIVAERLAMPDAVDLLRREIHDAAEAEAIRLELETLYGELDCLAVERAEGLLTARQVKISTDVVNAKITKLQARQLDQERLRVFDGIPLGTPQVAGMIAELSPDRFRAVLDVLAEVVVQPVGKSGRIFDPERVQVNWR

SEQ ID NO: 260 - protein, 469 aa, synthetic construct
MSYTTPVRAAVYLRISEDRSGEQLGVARQREDCLKLCGQRKWVPVEYLDNDVSASTGKRRPAYEQMLVDIAAGKIAAVVAWDLDRLHRRPTELEAFMSLADEKRLALATVAGDVDLATPQGRLVARLKGSVAAHETEHKKARQRRAARQKAERGLPNWSKAFGYLPGPNGPEPDPRTAPLVKQAYADILAGASLGDVCRQWNDAGAFTITGRPWTTTTLSKFLRKPRNAGLRAYKGARYGPVDRDAIVGKAQWSPLVDEATFWAAQAVLDAPGRAPGRKSVRRHLLTGLAGCGKCGNHLAGSCRTDGRVVYVCKACHGVAILADNIEPILHHIVADRLAMPDAVDLLRREIHDVAEAETIRLELEALYGELDRLAVERAEGLLTARQVKISTDIVNAKITKLLTCQLDQERLRVLDGIPLGTPQVAGMIAGLSPDRFRAVLDVLAEVVVQPVGKSGRIFNPERVQVNWR

SEQ ID NO: 261 - protein, 469 aa, synthetic construct
MCYTTPVRAAVYLRISEDRSGEQLGVARQREDCLKLCDQRKWVPVEYLDNDVSASTGKRRPAYEQMLADITAGEIAAVVAWDLDRLHRRPIELEAFMSLADEKRLALATVAGDVDLATPQGRLVARLKGSVAAHETEHKKARQRRAARQKAERGHPNWSKAFGYLPGPNGPEPDPRTAPLVKQAYADILAGASLGDVCRQWNGAGAFTITGRPWTTTTLSKFLRKPRNAGLRAYKGARYGPVDRDAIVGKAQWSPLVDEATFWAAQAVLDAPGRAPGRKSVRRHLLTGLAGCGKCGNHLAGSYRTDGRVVYVCKACHGVAILADNIEPILYHIVAERLAMPDAVDLLRREIHDAAEAETIRLELETLHGELDRLAVERAEGLLTARQVKISSDIVNAKITELQARQLDQERLRVFDGIPLGTPQVAGMIAELSPDRFRAVLGVLVEVVVQPVGKSGRIFNPERVQVNWR

SEQ ID NO: 262 - protein, 452 aa, synthetic construct
MKAAIYIRVSTREQVENYSIQAQTEKLTALCRSKDWEVYDVFIDGGYSGSNMNRPALNEMLSKLHEIDAVVVYRLDRLSRSQRDTITLIEEYFLKNNVEFVSLSETLDTSSPFGRAMIGILSVFAQLERETIRDRMVMGKIKRVEAGLPLITAKGRTFGYDVVDTKLYINEEEAEQLRLIYDIFEEEQSITLLQKRLKKLGFKVRTYNRYNNWLTNDLYCGYVSYKDEVHVKGIHEPIISEEQFYRVQEIFTRMGKNPNMNRDSASLLNNLVVCSKCGLGFVHRRKDAMSRDKKYHYRYYSCKTYKHIHELEKCGNKIWRADKLEELVIDRVNNYSLAGRNVDKGGELDSLSEKLKIEHAKKKRLFDLYINGSYEVSELDSMMNDTDAQINYYESLIEANEELRKDKKIQENLADLATVDFDSLEFREKQLYLKSLINKIYIDGEQVTIEWL

SEQ ID NO: 263 - protein, 452 aa, synthetic construct
MKAAIYIRVSTQEQVGNYSIQAQTEKLTALCRSKGWDVYDIFIDGGYSGSNMNRPALNEMLSKLHEIDAVVVYRLDRLSRSQRDTTTLIEEYFLKNNVEFVSLSETLDTSSPFGRAMIGILSVFAQLERETIRDRMVMGKIKRIEAGLPLTTAKGRTFGYDVIDTKLYINEEEAKQLQLIYDIFEEEQSITFLQKRLKKLGFKVRTYNRYNNWLTNDLYCGYVSYKDKVHVKGIHEPIISEEQFYRVQEIFTRMGKSPNMNRGNASLLNNLVVCSKCGLGFVHRRKDTMCRGKKYHYRYYSCKTYKHTHELEKCGNKTWRADKLEELIINRVNNYSFASRNGDKEDELDSLNEKLKIEHAKKKRLFDLYINGSYEVSELDNMMNDIDAQISYYESQIGANEGLKKNEKIQENLADLATVDFDSLEFREKQLYLRSLINKIYIDGEQVTIEWL

SEQ ID NO: 264 - protein, 485 aa, synthetic construct
MTKKVAIYTRVSTINQAEEGFSIDEQVDRLTKYAEAMGWQVSDTYTDAGFSGAKLERPAMQRLINDIKNKAFDTVLVYKLDRLSRSVRDTLYLVKDVFTKNKIDFISLNESIDTSSAMGSLFLTILSAINEFERENIKERMTMGKLGRAKSGKSMMWTKTAFGYYHNRKTGILEIVPLQATIVEQIFTDYLSGISLTKLRDKLNESGHIGKDIPWSYRALRQTLDNPVYCGYIKFKDSLFEGMHKPIIPYETYLKVQKELKERQQQAYERNNNPRPFQAKYMLSGMARCGYCGAPLRIVLGHKRKDGSRTMKYHCANRFPRKTKGDTVYNDNKKCDSGTYDLSNLENTVIDNLIGFQENNDSLLKIINGNNQPILDTSSFKKQISQIDKKIQKNSDLYLNDFITMDELKDRTDSLQAEKKLLEAKISENKFNDSTDVFELVKTQLGSIPINELSYDDKKKIVNNLVSKVDVTADNVDIIFKFQLA

SEQ ID NO: 265 - protein, 469 aa, synthetic construct
MCYTTPVRAAVYLRISEDRSGEQLGVARQREDCLKLCGQRNWVPVEYLDNDVSASTGKRRPAYEQMLADITAGKIAAVVAWDLDRLHRRPVELEAFMSLADEKRLALATVAGDVDLATPQGRLVARLKGSVAAHETEHKKARQRRAARQKAERGYPNWSKAFGYLPGPNGPEPDPRTAPLVKQAYADILAGASLGDVCRQWNAAGAFTITGRPWTTTTLSKFLRKPRNAGLRAYKGARYGPVDRDAIVGKAQWGPLVDEATFWAAQVVLDAPGRAPGRKSVRRHLLTGLAGCGKCGNHLAGSYRTDGRVVYVCKACHGVAILADNIEPILYHIVAERLARPDAVDLLRSEFHDAAEAETIRLELETLYGELDRLAVERAGGLLTARQVKICTDIVNAKITKLQARQLDQERLRVFGGIPLGTPQVAGMIAELSPDRFRAVLDVLAEVVVQPVGKSGRIFNPERVQVSWR

SEQ ID NO: 266 - protein, 469 aa, synthetic construct
MSYTTPVRAAVYLRISEDRSGEQLGVARQREDCLKLCGQRKWEPVEYLDNDVSASTGKRRPAYEQMLADITAGKIAAVVAWDLDRLHRRPIELEAFMSLADEKRLALATVAGDVDLATPQGRLVARLKGSVAAHETEHKKARQRRAARQKAERGYPNWSKAFGYLPGPSGPEPDPRTAPLVKQAYADILAGASLGDVCRRWNDAGAFTITGRPWTTTTLSKFLRKPRNAGLRAYKGARYGPVDRDAIVGKAQWSPLVDEATFWAAQAVLDAPGRAPGRKSVRRHLLTGLAGCGKCGNHLAGSYRTDGQVVYVCKACHGVSILADNIVPILYHIVAERLAMPDAADLLRRGIHDAAEAETIRLELETLYGELDRLAVERAEGLLTARQVKISTDIVNAKITKLQAHQLDQERLRVFDGIPLGTPQVAGMIAELSPDRFRAVLDVLAEVVVQPVGKSGRIFNPERVQVNWR

SEQ ID NO: 267 - protein, 485 aa, synthetic construct
MTKKVAIYTRVSTTNQAEEGFSIDEQIDRLTKYAEAMGWQVSDTYTDAGFSGAKLGRPAMQRLISDIENKAFDTVLVYKLDRLSRSVRDTLYLVKDVFTKNKIDFISLNESIDTSSAMGSLFLTILSAINEFERENIKERMTMGKLGRAKSGKSMMWTKTAFGYYHNRKTGILEIVPLQATIVEQIFTDYLSGISLTKLRDKLNESGHIGKDIPWSYRTLRQTLDNPVYCGYIKFKDSLFEGMHKPIIPYETYLKVQKELEERQQQTYERNNNPRPFQAKYMLSGMARCGYCGAPLRIVLGHKRKDGSRTMKYHCANRFPRKTKGVTVYNDNKKCDSGTYDLSNLESTVIDNLIGLQENNDSLLKIINGNNQPILDTSSPKKQISRIDKKIQKNSDLYLNDFITMDELKDRTDCLQAEKKLLKAKISENKFNDGTDVFELVKTQLGSIPINELSYDDKKKIVNNLVSKVDVTADNVDIIFKFQLA

SEQ ID NO: 268 - protein, 485 aa, synthetic construct
MTKKVAIYTRVSTTNQAEEGFSIDEQIDRLTKYAEAMGWQVSDTYTDAGRSGAKLERPAMQRLINDIENKAFDTVLVYKLDRLSRSVRDTLYLVKDVFTKNEIDFISLNESIDTSSAMGSLFLTILSAINEFERENIKERMTMGKLGRAKSGKSMMWTKTAFGYNHNRKTGILEIVPLQATIVKQIFTDYLSGISLTKLRDKLNESGHIGKDIPWSYRTLRQTLDNPVYCGYIKFKDSLFEGMHKPIIPYETYLKVQKELEKRQQQTYERNNNPRPFQAKYMLSGMARCGYCGAPLRIVLGHKRKDGGRTMKYHCANRFPRKTKGVTVYNDNKKCDSGTYDLSNLENTVIDNLIGLQENSDSLLRIINGNNQPILDTSNFKKQISQIDKKIQKNSDLYLNDFITMDELKDRTDSLQAEKKLLKAKISENRFNDSTDVFELVKTQLGSIPINELSYDNKKKIVNNLVSKVDVTADNVDIIFKFQLA

SEQ ID NO: 269 - protein, 469 aa, synthetic construct
MSYTTPVRAAVYLRISEDRSGEQLGVARQREDCLKLCGQRKWVPVEYLDNDVSASTGRRRPAYEQMLADITAGKIAAVVAWDLDRLHRRPIELEAFMCLADEKRLALATVAGDVDLATPQGRLVARLKGSVAAHETEHKKARQRRAARQKAERGYPNWDKAFGYLPGPNGPEPDPRTAPLVKQAYADILAGASLGDVCRRWNDAGAFTITGRPWTTTALSKFLRKPRNTGLRAYKGARYGPVDRDAIVGKAQWSPLVDEATFWAAQAVLDAPGRAPGRKSVRRHLLTGLAGCGKCGNHLAGSYRTDGRVVYVCKACHGVTILADNIEPILYHIVAERLAMPNAVDLLRREIHDAVEAETIRLELETLYGELDRLAVERAEGLLTARQVKISTDIVNAKITKLQARQQDQERLRVLDGIPLGTPQVAGTIAELSPDRFRAVLDVLAEVVVQPVGKSGRIFNPERVQVNWR

SEQ ID NO: 270 - protein, 485 aa, synthetic construct
MTKKVAIYTRVSTTNQAEEGFSIDEQIDRLTKYAEAMGWQVSDTYTDAGCSGAKLERPAMQRLINDIETKAFDTVLVYKLDRLSRSTRDTLYLVKDVFTKNKIDFISLNESIDTSSAMGSLFLTILSAINEFERENIKERMTMGKLGRAKSGKSMMWTKTAFGYYHNRKSGILEIVPLQATIVEQIFTDYLSGISLTKLRDKLNESGHIGKDIPWSYRTLRQTLDNPVYCGYIKFKDSLFEGMHKPIIPYETYLKVQKELEERQQQTYERNNNPRPFQAKYMLSGMARCGYCGAPLKIVLGHKRKDGSRTMKYHCANRFPRKTKGVTVYNNNKKCDSGTYDLSSLENTVIDNLIGFQENNDSLLKIINSNNQPILDTSSFKKQISQIDKKIQKNSDLYLNDFITMDELKDRTDSLQAEKKLLQAKISENKFNVSTDVFELVKAQLGSIPINELSYDNKKKIVNNLVSKVDVTADNVDIIFKFQLA

SEQ ID NO: 271 - protein, 485 aa, synthetic construct
MTKKVAIYTRVSTTNQAEEGFSIDEQIDRLTKYAEAMGWQVSDTYTDAGLSGAKLERPAMQRLINDIENKAFDTVLVYKLDRLSRSVRDTLYLVKDVFTKNKIDFISLNESIDTSSAMGSLFLTILSAINEFERENIKERMTMGKLGRAKSGKSMMWTKTAFGYYHNRKTGILEIVPLQATIVEQIFTDYLSGVSLTKLRDKLNESGHIGKDIPWSYRTLRQTLDNPVYCGYIKFKDSLFEGMHKPIIPYETYLRVQKELEERQQQTYERNNNPRPFQAKYMLSGMARCGYCGAPLRIVLGHKRRDGSRTMKYHCANRFPRKTKGVTVYNDNKKCDSGTYDLSNLENTVIDNLIGFQENNDSLLKIINGNNQPIPDTSSFKKQISEIDKKIQKNSDLYLNDFITMDELKDRTDSLQAEKKLLKAKISENKFNDSTDVFELVKAQLGSIPINELSYDNKKKIVNNLVSKVDVTADNVDIIFKFQLA

SEQ ID NO: 272 - protein, 469 aa, synthetic construct
MCYTTPVRAAVYLRISEDRSGEQLGVARQREDCLKLCDQRKWVPVEYLDNDVSASTGKRRPAYEQMLADITAGKIAAVVAWDLDRLHRRPIELEAFMSLADEKRLALATVAGDVDLATPQGRLVARLKGSVAAHETEHKKARQRRAARQKAERGHPNWSKAFGYLPGPNGPEPDPRTAPLVKQAYADILAGASLGDVCRQWNDAGAFTITGRPWTTTTLSKFLRKPRNAGLRAYKGARYGPVDRDAIVGKAQWSPLVDEATFWAAQAVLDAPGRAPGRKSVRRHLLTGLAGCGKCGSHLAGSYRTDGRVVYVCKACHGVAILADNIEPILYHIVAERLAMPDAVDLLRREIHDAAEAETIRLELETLYGELDRLAVERAEGLLTARQVKISTDIVSAKITKLQARQLDQERLRVFDGIPLGTPQVAGVIMELSPDRFRAVLDVLAEVVVQPVGKSGRIFNPERVQVSWR

SEQ ID NO: 273 - protein, 469 aa, synthetic construct
MSYTTPVRAAVYLRISEDRSGEQLGVARQREDCLKLCDQRKWVPVEYLDNDVSASTGKRRPAYDRMLADITAGKIAAVVAWDLDRLHRRPIELEAFMSLADEKRLALATVAGDVDLATPQGRLVARLKGSVAAHETEHKKARQRRAARQKAERGHPNWSKAFGYLPGPNGPEPDPRTAPLVKQAYADILAGASLGDVCRRWNDAGAFTITGRPWTTTTLSKFLRKPRNAGLRAYKGARYGPVDRDAIVGKAQWSPLVDEATFWAAQAVLDAPGRAPGRKSVRRHLLTGLAGCGKCGSHLAGSYRTDGRVVYVCKACHGVAILADNIEPILYHIVAERLAMPGAVDLLRREIHDAAEAETTRLELETLYGELDRLAVERAEGLLTARQVKISTDIVNAKITKLQARQLDQERLRVFDGIPLGTPQVAGMIAELSPDRFRAVLDVLAEVVVQPVGKGGRIFNPERVRVNWR

SEQ ID NO: 274 - protein, 451 aa, synthetic construct
MKAAIYIRVSTREQVENYSIQAQTEKLTALCRSKDWDVYDIFIDGGYSGSNMNRPALNEMLSKLHEIDAVVVYRLDRLSRSQRDTITLIEEYFLKNNVEFVSLSETLDTSSPFGRAMIGILSVFAQLERETIRDRMVMGKIKRVEAGLPLTTAKGRTFGYDVIDTKLYINEEEAKQLQLIYDIFEEESITFLQKRLKKLGFKVRTYNCYNNWLTNDLYCGYVSYKDKVHVKGIHEPIISEEQFYRVQEIFTRMGKNPNMNRDSASLLNSLVVCSKCGLGFVHRRKDTTSRGKKYHYRYYSCKTYKHIHELEKCGNKIWRADKLEELIINLVNNYSLASRNVDKEDELDSLSEKLKIEHAKRKRLFDLYISGSYEVSELDSMMNDIDAQINYYESQIEANEELKKSKKIQENLADLATVDFDSLEFREKQLYLKSLINKIYIDGEQVTIEWL

SEQ ID NO: 275 - protein, 452 aa, synthetic construct
MKAAIYIRVSTREQVENYSIQAQTEKLTALCCSKGWDVYDIFIDGGYSGSNMNRPALNEMLSKLHEIDAVVVYRLDRLSRSQRDTITLIEEYFLKNNVEFVSLSETLDTSSPFGRAMIGILSVFAQLERETIRDRMVMGKIKRIEAGLPLTTAKGRTFGYDVIDTKLYINEEEAKQLQLIYDIFEEEQSITFLQKRLKKLGFKVRTYNRYNNWLTNDLYCGYVSYKDKVHVKGIHEPIISEEQFYRVQEIFARMGKNPNMNRDSASLLNSLVVCSKCGLGFVHRRKDAMSRDKKYHYRYYSCKTYKHIHELEKCGNKIWRADKLEELIINRVNNYSLASRNVDKEDELDSLNEKLKIEHAKKRRLFDLYINGSYEVSELDSMMSDIDAQINYYESQIEANEELKKNKKIQENLAYLATVDFDSLEFREKQLYLKSLINKIYIDGERVTIEWL

SEQ ID NO: 276 - protein, 485 aa, synthetic construct
MTKKVAIYTRVSTTNQAEEGFSIDEQIDRLTKYAEAMGWQVSDTYTDAGLSGAKLERPAMQRLINDIENKAFDTVLVYKLDRLSRSVRDTLYLVKDVFTKNRIDFISLNESIDTGSAMGSLFLTILSAINEFERENIKERMTMGKLGRAKSGKSMMWAKTAFGYYHNSKTGILEIVPLQATIVEQIFTDYLSGISLTRLRDKLNESGHIGKDIPWSYRTLRQTLDNPVYCGYIKFKGSLFEGMHKPIIPYETYLRVQKELEERQQQTYERNNNPRPFQAKYMLSGMARCGYCGAPLKIVLGHKRKDGSRTMKYHCANRFPRKTKGVTVYNDNKKCDSGTYDLSDLENTVIDYLIGFQENNDSLLKIINGNNQPILDISSFKKQISQIDKRIQKNSDLYLNDFITMDELKDRTDSLRAEKKLLKAKISENKFNDSTDVFELVKTQLGSIPINELSYDNKKKIVNNLVSKVDVTADNVDIIFKFQLA

SEQ ID NO: 277 - protein, 452 aa, synthetic construct
MKAAIYIRVSTREQVENYSIQAQTEKLTALCRSKDWDVYDIFIDGGYSGSNMNRPALNEMLGKLHEIDAVVVYRLDRLSRSQRDTITLIEEYFLKNNVEFVSLSETLDTSSPFGRAMIGILSVFAQLERETIRDRMVMGKIKRIEAGLPLTTAKGRTFGYDVIDTKLYINEEEAKQLRLIYDIFEEERSITFLQKRLKKLGFKVRTYNRYNNWLTNDLYCGYVSYKDKVHVKGIHEPIISEEQFYRVQEIFARMGKNPNMNRDSASLLNNLVVCSKCGLGFVHRRKDAMSRDKKYHYRYYSCKTYKHIHELEKCGNKIWRADKLEELIINRVNNYSLASRNVDKEGELDSLNEKLEIEHAKKKRLFELYINGSYEVSELDSMMGDIDAQINYYESQIEANEELRKNKKIQENLAYLATVDFDSLEFREKQLYLKSLINKIYIDGEQVTIEWL

SEQ ID NO: 278 - protein, 469 aa, synthetic construct
MCYTTPVRVAVYLRISEDRSGEQLGVARQREDCLKLCDQRKWVPVEYLDNDVSASTGKRRPAYEQMLADITAGKIAAVVAWDLDRLHRRPIELEAFMSLADEKRLALATVAGDVDLATPQGRLVARLKGSVAAHETEHKKARQRRAARQKAERGHPNWSKAFGYLPGPNGPEPDPRTAPLVKQAYADILAGASLGDVCRRWNDAGAFTITGRPWTTTTLSKFLRKPRNAGLRAYKGARYGPVDRDSIVGKAQWSPLVDEATFWAAQAVLDAPGRAPGRKSVRRHLLTGLAGCGKCGNHLAGSYRADGRVVYVCKACHGIAILAENIEPILYRIVAERLAMPDAMDLLRREIHDAAEAETIRLELETLCGELDRLAVERAEGLLTARQVKISTDIVNAKITELQARQLDQERLRVFDGIPLGTPQVAGMIAELSPDRFRAVLDVLAEVVVQPVGKGGRIFNPERVQVNWR

SEQ ID NO: 279 - protein, 469 aa, synthetic construct
MCYTTPVRAAVYLRISEDRSGEQLGVARQREDCLKLCDQRKWVPVEYLDNDVSASTGKRRPAYEQMLADITAGKIAAVVAWDLDRLHRRPIELEAFMSLADERRLALATVAGDVDLATPQGRLVARLKGSVAAHETEHKKARQRRAARQKAERGYPNWSKAFGYLPGPNGPEPDPRTAPLVKQAYADILAGASLGDVCRQWNGAGAFTITGRPWTTTTLSKFLRKPRNAGLRAYKGARYGPVDRDAIVGKAQWSPLVDEATFWAAQAVLDAPGRAPGRKSVRRHLLTGLAGCGKCGNHLAGSYRTDGRVVYVCKACHGVAILADGIEPILYHIVAERLAMPDAVDLLRREVHDEAEAETVRLGLETLYDELDRLAVERAEGLLTARQVKISTDIVNAKITKLQARQLDQERLRVFDGIPLGTPQVAGMIAELSPDRFRAVLDVLAEVVVQPVGKSGRIFNPERVQVNWR

SEQ ID NO: 280 - protein, 485 aa, synthetic construct
MTKKVAIYTRVSTINQAEEGFSIDEQIDRLTKYAEAMGWQVSDTYTDAGFSGAKLERPAMQRLINDIENKAFDTVLVYKLDRLSRSVRDTLYLVKEVFTKNKIDFISLNESINTSSAMGSLFLTILSAINEFERENIKERMTMGKLGRARSGKSMMWTKTAFGYYHNRKTGILEIVPLQATIVEQIFTDYLSGISLTKLRDKLNESGHIGKDIPWSYRTLRQTLDNPVYCGYIKFKDNLFEGMHKPIIPYETYLKVQKELEERQQQTYERNNNPRPFQAKYMLSGMARCGYCGAPLRIVLGHKRKDGSRTMKYHCANRFPHKTKGITVYNDNKKCDSGTYDLSSLENTVIDNLIGFQENNDSLLKIINGNNQPIPDTSSFKKQISQIDKKIQKNSDLYLNDFITMDELKDRTDSLQAEKKLLKAKISENKFNGSTDVFELVKAQLGSIPINELSYDNKKKIVNNLVSKVDVTADNVDIVFKFQLA

SEQ ID NO: 281 - protein, 469 aa, synthetic construct
MSYTTPVRAAVYLRISEDRSGEQLGVARQREDCLKLCGQRKWVPVEYQDNDVSASTGKRRPAYEQMLADITAGKIAAVVAWDLDRLHRRPIELEAFMSLADEKRLALATVAGDVDLATPQGRLVARLKGSVAAHETEHKKARQRRAARQKAERGLPNWSKAFGYLPGLNGPEPDPRTAPLVRQAYADILAGASLGDVCRQWNDAGAFTITGRPWTTTALSKFLRKPRNAGLRAYKGARYGPVDRDAIVGKAQWSPLVDEATFWAAQAVLDAPGRAPGRKSMRRHLLTGLAGCGKCGNHLAGGYRTDGRVVYVCKACHGVAILADNIEPILYHIVAERLAMPDAVDLLRREIHDAAEAETIRLELETLYGELDRLAVERAEGLLTARQVKISTDIVSAKIAKLRARQLDQERLRVFDGIPLGTPRVAGVIAELSPDRFRAVLDVLAEVVVQPVGKGGRIFNPERVQVNWR

SEQ ID NO: 282 - protein, 452 aa, synthetic construct
MKAAIYIRVSTQEQVENYSIQAQTEKLTALCRSKDWDVYDIFIDGGYSGSNMNRPALNEMLSKLHEIDAVVVYRLDRLSRSQRDTTTLIEEYFLKNNVEFVSLSETLDTSSPFGRAMIGILSVFAQLERETIRDRMVMGKIKRIEAGLPLTTAKGRTFGYDVIDTKLYINEEEAKQLRLIYDIFEEEQSITLLQKRLKKLGLKVRTYNRYNNWLTNDLYCGYVSYKDKVHVKGIHEPIISEEQFYRVQEIFTRMGKNPNMNRDSASLLSNLVVCSKCGLGFVHRSKDTMSRGKKYHYRYYSCKTYKHTHELEKCGNKTWRADKLEELIINRVNNYSFASRYVDKEDELDSLNEKLRIEYAKKKRLFDLYINGSYEVSELDSMMSDIDAQTNHYESQIRASEELKKTKKIQENLVDLATVDFDSLEFREKQLYLKSLINKIYIDGEQVTIEWL

SEQ ID NO: 283 - protein, 469 aa, synthetic construct
MCYTTPVRAAVYLRISEDRSGEQLGVARQREDCLKLCGQRKWVPVEYLDNDVSASTGKRRPAYEQMLADITAGKIAAVVAWDLDRLHRRPIELEAFMSLADEKRLALATVAGDVDLATPQGRLVARLKGCVAAHETEHKKARQRRAARQKAERGHPNWSKAFGYLPGPNGPEPDPRTAPLVKQAYADILAGASLGDVCRQWNDAGAFTITGRPWTTTTLSKFLRKPRNAGLRAYKGARYGPVDRDAIVGKAQWGPLVDEATFWAAQAVLDAPGRAPGRKSVRRHLLTGLAGCGKCGNHLAGSYRTDGRVVYVCKACYGIAILADNIEPILYHIVAERLAMPDAVDLLHREIHDAAEAETIRLELETLYGELDRLAVERAEGLLTARQVKISTDIVNAKITKLQARQLDQERLRVFDGIPLGTPQVAGMIAELSPDRFRAVLDVLAEVVVQPVGKSGRIFNPERVQVNWR

SEQ ID NO: 284 - protein, 485 aa, synthetic construct
MTKKVAIYTRVSTTNQAEEGFSIDEQIDRLTKYAEAMGWQVSDTYTDAGFSGAKLERPAMQRLINDIENKVFDTVLVYKLDRLSRSVCDTLYLVKDVFTKNKIDFISLNECIDTSSAMGSLFLTILSAINEFERENIKERMTMGKLGRAKSGKSMMWTKTAFGYYHNRKTGILEIVPLQATIVEQIFTDYLSGISLTRLRDKLNESGHIGKDIPWSYRTLRQTLDNPVYCGYIKFKDSLFEGLHKPIIPYETYLKVQKELEERQQQTYERNNNPRPFQAKYMLSGMARCGYCGAPLKIVLGHKRKDGSRTMKYHCANRFPRKTKGVTVYNDNKKCDSGTYDLSNLENTVIDNLIGLQEDNDSLLKIINGNSQPILDTSSFKKQISQIDKKIQKNSDLYLNDFITMDELKDRTDGLQAEKKLLEAKISENKFNDRTVEFELVKTQLGSIPINELSYDNKKKIVNSLVSKVDVTADNVDIIFKFQLA

SEQ ID NO: 285 - protein, 485 aa, synthetic construct
MTKKVAIYTRVSTTNQAEEGFSIDEQIDRLTKYAEAMGWQVSDTYTDAGFSGAKLERPAMQRLINDIENKAFDTVLVYKLDRLSRSVRDTLHLVKDVFTKNKIDFISLNESIDTSSAMGSLFLAILSAINEFERENIKERMTMGKLGRAKSGKSMMWTKTAFGYYHNRKTGILEIVPLQATIVEQIFTDYLSGISLTKLRDKLNGSGHIGKDIPWSYRTLRQTLDNPVYCGYIKFKDSLFEGMHKPIIPYETYLNVQKELEERQQQTYERNNNPRPFQAKYMLSGMARCGYCGAPLKIVLGRKRKDGSRTMKYHCTNRFPRKTKGITVYNDNKKCNSGAYDLSNLENTVIDSLIGFQENSDSLLKIINGNNPPILDTSSLKKQISQIDKKIQRNSDLYLNDFITMDELKDRTDSLQAEKKLLKAKISENKFNDSTDVFELVKTQLGSIPINELSYDDKKKIVNDLVSKVDVTADSVDIIFKFQLA

SEQ ID NO: 286 - protein, 469 aa, synthetic construct
MCYTTLVRAAVYLRISEDRSGEQLGVARQREDCLKLCDQRKWVPVEYLDNDVSASTGKRRPAYEQMLADITAGKIAAVVAWDLDRLHRRPVELEAFMSLADERRLALATVAGDVDLATPQGRLVARLKGSVAAHETEHKKARQRRAARQKAERGLPNWSKAFGYLPGPNGPEPDPRTAPLVRQAYADILAGASLGDVCRQWNDAGAFTITGRPWTTTTLSKFLRKPRNAGLRAYKGARYGPVDRDAIVGKAQWSPLVDEATFWAAQAVLDAPGRAPGRKSVRRHLLTGLAGCGKCGHHLAGSYRTDGRVVYVCKACHGVTILADNIEPILYHIVAERLAMPDAADLLRREIHDAAEAGTIRLELETLYGDLDRLAVERAEGLLTARQVKISTDIVNAKITELQARQLDQERLRVFDGIPLGTPQVAGVIAELSPDRFRAVLDVLAEVVVQPVGKSGRIFNPERVQVNWR

SEQ ID NO: 287 - protein, 485 aa, synthetic construct
MTKKVAIYTRVSTTNQAEEGFSIDEQIDRLTKYAEAMGWQVSDTYTDAGFSGAKLERPAMQRLINDIENKAFDTVLVYKLDRLSRSVRDTLHLVKDVFTKNKIDFISLNESIDTSSAMGSLFLTILSAINELERENIKERMTMGKLGRAKSGKSMMWTKTAFGYYHNRKTGILEIVPLQATIVEQIFTDYLSGISLTKLRDKLNESGHIGKNIPWSYRTLRQTLDNPVYCGYIKFKGSLFEGMHKPIIPYETYLKVQKELEERQQQTYERNNNPRPFQAKYMLSGMARCGYCGAPLRIVLGRKRKDGSRTMKYHCANRYPRKTKGITVYNDNKKCDSGTYDLSNLENTVIDNLIGFQEDNDSLLKIINGNNQPILDTSSFKKQISQIDKKIQKNSDLYLNDFITMDELKARTDSLQAEKKLLKAKISENKFNDSTDVFELVKTQLGSIPINELSYDNKKKIVNNLVSKVDVTADNVDIIFKFQLA

SEQ ID NO: 288 - protein, 469 aa, synthetic construct
MSYTTPVRAAVYLRISEDRSGEQLGVARQREDCLKLCSQRKWVPVEYLDNDVSASTGKRRPAYEQMLADITAGKIAAVVAWDLDRLHRRPIELEAFMSLADEKRLALATVAGDVDLATPQGRLVARLKGSVAAHETEHKKARQRRAARQKAERGYPNWSKAFGYLPGLNGPEPDPRTAPLVKQAYVDILAGASLGDVCRQWNDAGAFTITGRPWTTTTLSKFLRKPRNAGLRAYKGARYGPVDRDAIVGKAQWSPLVDEATFWAAQAVLDAPGRAPGRKSVRRHLLTGLAGCGKCGNHLAGSYRTDGRVVYVCKACHGVAILADNIEPILYHIVAERLAMPDAVDLLRREIHDAAEAETIRLELKTLYGELDRLAVERAEGLLTARQVKISTDIVNAKITKLQARLQDQERLRVLDGIPLGTPQVASAIAELSPDRFRAVLDVLAEVVVQPVGKSGRIFNPERVQVNWR

SEQ ID NO: 289 - protein, 485 aa, synthetic construct
MTKKVAIYTRVSTTNQAEEGFSVDEQIDRLTKYAEAMGWQVSDTYTDAGFSGAKLERPAMQRLINDIENKAFDTVLVYKLDRLSRSVRDTLYLVKDVFTKNKIDFISLNESIDTSSAMGSLFLTILSAINEFERENIKERMTMGKRGRAKSGKSMMWTKTAFGYYHNRKTGILEIVPLQAAIVEQIFTDYLSGISLTKLRDKLNESGHIGKDIPWSYRTLRQTLDNPVYCGYIKFKDSLFEGLHKPIIPYETYLKVQKELEKRQQQTYERNNNPRPFQAKYMLSGMARCGYCGAPLKIVLGHKRKDGSRTMKYHCANRFPRKTKGVTVYNDNKKCDSGTYDLSNLESTVIDNLIGFQENNDSLLKIINGNNQPILDTSSFKKQISQIDKKIQKNSDLYLNDFITMDELKDRTDSLQAEKKLLKAKISENKFSDSTDVFELVKTQLGSIPINELSYDNKKKIVNNLVSKVDVTADNVDIIFKFQLA

SEQ ID NO: 290 - protein, 452 aa, synthetic construct
MKAAIYIRVSTQEQVGNYSIQAQTEKLTALCRSKGWHVYDIFIDGGYSGSNMNRPALNEMLSKLHEIDAVVVYRLDRLSRSQRDTTTLIEEYFLKNNVEFVSLSETLDTSSPFGRAMIGILSVFAQLERETIRDRMVMGKIKRIEAGLPLTTAKGRTFGYDVIDTKLYINEEEARQLQLIYDIFEEERSITSLQKRLKKLGFKVRTYNRYNNWLTNDLYCGYVSYKDKVHVKGIHEPIISEEQFYRVQEIFTRMSKNPNMNRDSASLLNNLVVCSKCGLGFVHRSKDTMSRGKKYHYRYYSCKTYKHTHELEKCGNKTWRADKLEELIINRVNNYSFASRNVDKGDELDSLNEKLKIEHAKKKRLFDLYINGSYEVSELDSMMNDIDAQIDYYESQIEANEELKRNKKIQENLADLATVDFDSLEFREKRLYLKSLINKIYIDGEQVTIEWL

SEQ ID NO: 291 - protein, 469 aa, synthetic construct
MSYTTLVRAAVYLRISEDRSGEQLGVARQREDCLKLCDQRKWAPVEYLDNDVSASTGKRRPAYEQMLADITAGKIAAVVAWDLDRLHRRPIELEAFMSLADEKRLALATVAGDVDLATPQGRLVARLKGSVAAHETEHKKARQRRAARQKAERGHPNWSKAFGYLPGPNGPEPDPRTAPLVKQAYADILAGASLGDVCRQWNDAGAFTITGRPWTTTTLSKFLRKPRNAGLRAYKGARYGPVDRDAIVGKAQWSPLVDEATFWAAQAVLDAPGRAPGRKSVRRHLLTGLAGCGKCGNHLAGSYRTDGKVVYVCKACHGVAILADNIEPILYHIVAERLAMPDAVDLLRREIHDAAEAETIRLELETLYGELDRLAVERAEGLLTARQVKISTDIVNAKITKLQAHQLDQARLRVLDGIPLGTPQVAGMIAELSPDRFRAVLDVLAEVVVQPVGKGGRIFNPERVQVNWR

SEQ ID NO: 292 - protein, 485 aa, synthetic construct
MTKKVAIYTRVSTTNQAEEGFSIDEQIDRLTKYAEAMGWQVSDTYTDAGLSGAKLERPAMQRLINDIENKAFDTVLVYKLDRLSRSVRDTLYLVKDVFTKNKIDFISLNESIDTSSAMGSLFLTILSAINEFERENIKERMTMGKLGRAKSGKSMMWTKTAFGYYHNRKTGVLEIVPLQAAIVEQIFTDYLSGVSLTKLRDKLNESGHIGKAIPWSYRTLRQTLDNPVYCGYIKFKDSLFEGMHKPIIPYETYLKVQKELEERQQQTYERNNNPRPFQAKYMLSGMARCGYCGAPLRIVLGHKRKDGSRTMKYHCANRFPRKTKGVTVYNDNKKCDSGTYDLSNLENTVIDNLIGFQENNDSLLKIINGNNRPMLDTSSFKKQISQIDKKIQKNSDLYLNDFITMDELKDRTDSLQAEKKLLKAKISENKFNDSTDVFELVKTQLGSIPINELSYDNKKKIVNNLVSKVDVTADNVDIIFKFQLA

SEQ ID NO: 293 - protein, 485 aa, synthetic construct
MTKKVAIYTRVSTTNQAEEGFSIDEQIDRLTKYAEAMGWQVSDTYTDAGFSGAKLGRPAMQRLINDIENKAFDTVLVYKLDRLSRSVRDTLYLVKDVFTKNKIDFISLNESINTSSAMGSLFLTILSAINEFERENIKERMTMGKLGRAKSGKSMMWTKTAFGYYHNRKTGILEIVPLQATIVEQIFTDYLSGISLTKLRDKLNESGHIGKDIPWSYRTLRQTLDNPVYCGYIKFKDSLFEGMHKPIIPYETYLKVQKELEERQQQTYERNNNPRPFQAKYMLSGMARCGYCGAPLRIVLGHKRKDGSRTMKYHCANRFPRKTKGVTVYNDNKKCDSGTYDLSNLENTVIDNLIGFQENNDSLLKIINGNNQPILDTSSFKKQISQIDKKIQKNSDLYLNDFITMDELKDRTDSLQAEKKLLEAKISKNKFNDSTDVFELVKTQLGSIPINELSYDNKKRIVNNLVSKVDVTADSVDIIFKFQLA

SEQ ID NO: 294 - protein, 469 aa, synthetic construct
MSYITPVRAAVYLRISEDRSGEQLGVARQREDCLKLCGQRKWVPVEYLDNDVSASTGKRRPAYEQMLADITAGKIAAVVAWDLDRLHRRPIELEAFMSLADEKRLALATVAGDVDLSTPQGRLVARLKGSVAAHETEHKKARQRRAARQKAERGHPNWSKAFGYLPGPSGPVPDPRTAPLVKQAYADILAGASLGDVCRQWNDAGASTITGRPWTTTTLSKFLRKPRNAGLRAYKGARYGPVDRDAIVGKAQWGPLVDEATFWAAQAVLDAPGRAPGRKSVRRHLLTGLAGCGKCGNHLAGSYRTDGRVVYVCKACHGVAILADNIEPILYHIVAERLAMPDAVDLLRREIHDAAEAETIRLELETLYGELDRLAVERAEGLLTARQVKISTDIVNAKITKLQARQQDQERLRVLGGIPLGTPQVADMIAELSPDRFRAVLDALAEVVVQPVGKSGRIFNPERVQVNWR

SEQ ID NO: 295 - protein, 469 aa, synthetic construct
MSYTTLVRAAVYLRISEDRSGEQLGVARQREDCLKLCGQRKWVPVEYLDNDVSASTGKRRPAYEQMLADITAGKIAAVVAWDLDRLHRRPIELEAFMSLADEKRLALATVAGDVDLATPQGRLVARLKGCVAAHETEHKKARQRRAARQKAERGHPNWSKAFGYLPGPNGPEPDPRTAPLVKQAYADILAGASLGDVCRQWNGAGAFTITGRPWTTTTLSKFLRKPRNAGLRAYKGARYGPVDRDAIVGKAQWSPLVDEATFWAAQAVLDAPGRAPGRKSVRRHLLTGLAGCGKCGNHLAGSYRTDGRVVYVCKACHGVAILADNIEPILYHIVAERLAMPDAVDLLRREIHDAAEAETIRLELETLYGELDRLAVERTEGLLTARQVKISTDIVNAKITKLQAHQLDQERLRVFDGIPLGTPQAAGMIAELSPNRFRAVLDVLAEVVVQPVGKSGRIFNPERVQVNWR

SEQ ID NO: 296 - protein, 485 aa, synthetic construct
MTKKVAIYTRVSTTNQAEEGFSIDEQIDRLTKYAEAMGWQVSDTYTDAGFSGAKLVRPAMQRLINDIENKAFDTVLVYKLDRLSRSVRDTLYLVKDVFTKNKIDFISLNESIDTSSAMGSLFLTILSAINEFERENIKERMTMGKLGRAKSGKSMMWTKTAFGYYHNRKTGILEIVPLQATIVEQIFTDYLSGISLTKLRDKLNESGHIGKDIPWSYRALRQTLDNPVYCGYIKFKDSLFEGMHKPIIPYETYLKVQKELEERQQQTYERNNNPRPFQAKYMLSGMARCGYCGAPLRIVLGHKRKDGSRTMKYHCTNRFPRKTKGITVYNDNKKCDSGTYDLSSLESTVIDNLIGFQENNDSLLKTINGNNQPILDASSFKKQISQIDKKIQKNSDLYLNDFITMDELKDRTDSLQAEKKLLEAKISENKFNNSADVFELVKTQLGSIPINELSYDNKKKIVNNLVSKVNVTADNVDIIFKFQLA

SEQ ID NO: 297 - protein, 469 aa, synthetic construct
MSYTTPVRAAVYLRISEDRSGEQLGVARQREDCLKLCGQRKWVPVEYLDNDVSASTGKRRPAYEQMLADITAGKIAAVVAWDLDRLHRRPTELEAFMSLADEKRLALATVAGDVDLATPQGRLVARLKGCVAAHETEHKKARQRRAARQKAERGLPNWSKAFGYLPGPNGPEPDPRTAPLVKQAYADILAGASLGDVCRQWNDAGAFTVTGRPWTTTTLSKFLRKPRNAGLRAYKGARYGPVDRDAIVGKAQWSPLVDEATFWAAQAVLDAPGRAPGRKSVRRHLLTGLAGCGKCGNHLAGSYRTDGRVVYVCKACHGVAILADNIEPILYHIVAERLSMPDAVDLLRREIHDAAEAEAIRLELKTLYGELDRLAVERAEGLLTARQVKISTDIVNAKITKLQARQLDQERVRVLDGIPLGTPQVAGMIAELSPNRFRAVLDALADVVVQPVGKSGRIFNPERVQVNWR

SEQ ID NO: 298 - protein, 485 aa, synthetic construct
MTKKVAIYTRVSTTNQAEEGFSIDEQIDRLTKYAEAMGWQVSDTYTDAGFSGAKLERPAMQRLINDIENKAFDTVLVHKLDRLSRSVRDTLYLVKDVFTKNKIDFISLNESINTSSAMGSLFLTILSAINEFERENIKERMTMGKLGRAKSGKSMMWTKTAFGYYHNRKTGILEIVPLQATIVEQIFTDYLSGISLTKLRDKLNESGHIGKDIPWSYRTLRQTLDNPVYCGYIKFKDSLFEGMHKPIIPYETYLKVQRELEERQQQTYERNNNPRPFQAKYMLSGMARCGYCGAPLKIVLGHKRKDGSRTMKYHCANRYPRKTKGVTVYNGNKKCDSGTYDLSNLENTVIDYLIGFQENSDSLLKIINGNNQPILDTSSFKKQISQIDKKIQKNSDLYLNDFITMDELKERADSLQAEKELLKAKISENKFNDSTDVFELVKTQLGSIPINELSYDDKKKIVNNLVSKVDVTADNVDIIFKFQLA

SEQ ID NO: 299 - protein, 485 aa, synthetic construct
MTKKVAIYTRVSTTNQAEEGFSIDEQIDRLTKYAEAMGWQVSDTYTDAGFSGAKLGRPAMQRLISDIENNAFDTVLVYKLDRLSRSVRDTLYLVKDVFTKNKIDFISLNESIDTSSAMGSLFLTILSAINEFERENIKERMTMGKLGRAKSGKSMMWTKTAFGYYHNRKTGILEIVPLQATIVEQIFTDYLSGISLTKLRDKLNESGHIGKDIPWSYRTLRQTLDNPVYCGYIKFKGSLFEGMHKPIIPYETYLKVQKELGERQQQTYERNNNPRPFQAKYMLSGKARCGYCGAPLRIVLGHKRKDGSRTMKYHCANRFPRKTKGVTVYNDNKKCDSGSYDLSNLENTVIDNLIGFQENNDSLLKIINGNNQPILDTSSFEKQISQIDKKIQKNSDLYLNDFITMDELKDRTDSLQAEKKLLKAKISENKFNDSTDVFELVKTQLGSIPINELSYDNKKKIVNNLVSKVDVTADNVDIIFKFQLA

SEQ ID NO: 300 - protein, 485 aa, synthetic construct
MTKKVAIYTRVSTTNQAEEGFSVDEQIDRLTKYAEAMGWQVSDTYTDAGFSGAKLGRPAMQRLINDIENKAFDTVLVYKLDRLSRSVRDTLYLVKDVFTKNKIDFISLSESIDTSSAMGSLFLTILSAINEFERENIRERMTMGKLGRAKSGKSMMWTKTAFGYYHNRKTGILEIVPLQATIVEQIFTDYLSGISLTKLRDKLNESGHIGKDIPWSYRTLRQTLDNPVYCGYIKFKGSLFEGMHKPIIPYETYLKVQKELEERQQQTYGRNNNPRPFQAKYMLSGVARCGYCGAPLKIVLGHKRKDGSRTMKYHCTNRFPRKTKGVTVYNDNKKCDSGTYDLSNLENTVVDNLISFQENSDSLLKIINGNNQPILDTSSFKEQISQIDKKIQKNSDLYLNDFITMDELRDRTDSLQAEKKLLKAKISENKFNDSTDVFELVKTQLGSIPINELSYDNKKKIVNNLVSKVDVTADSVDIIFKFQRA

SEQ ID NO: 301 - protein, 485 aa, synthetic construct
MTRKVAIYTRVSTTNQAEEGFSIDEQIDRLTKYAEAMGWQVSETYTDAGLSGAKLERPAMQRLINDIENKAFDTVLVYKLDRLSRSVRDTLYLVKDVFTKNKIDFISLNESIDTSSAMGSLFLTILSAINEFERENIKERMTMGKLGRAKSGKSMMWTKTAFGYYHNRKTGILEIVPLQAAIVEQIFTDYLSGISLTKLRDKLNESGHTGKDIPWSYRTLRQTLDNPVYCGYIKFKGSLFEGMHKPIIPYETYLKVQEELEERQQQTYERNNNPRPFQAKYMLSGMARCGYCGAPLRIVLGHKRKDGSRTMKYHCANRFPRRTKGVTVYNDNKKCGSGTYDLSNLENTVIDYLIGFQENSDSLLKIIYSSNQPIPDTGSFEKQISQIDKKIQKNSDLYLNDFISMDELKDRTNSLQAEKKLLEAKISESKFNDSTDVFELVKTQLGSIPINELSYDNKKKIVNSLVSKVDVTADNVDIIFKFQLA

SEQ ID NO: 302 - protein, 485 aa, synthetic construct
MTKKVAIYTRVSTTNQAEEGFSIDEQIDRLTKYAEAMGWQVSDTYTDAGFSGAKLVRPAMQRLINDIENKAFDTVLVYKLDRLSRSVRDTLYLVKDVFTKNKIDFISLSESIDTSSAMGSLFLTILSAINEFERENIKERMTMGKLGRAKSGKSMMWTKTAFGYYHNRKTGILEIVPLQATIVEQIFTDYLSGISLTKLRDKLNESGHIGKDIPWSYRTLRQTLDNPVYCGYIKFKDSLFEGTHKPIIPYETYLKVQKELEERQQQTYERNNNPRPFQAKYMLSGMARCGYCGAPLKIVLGHKRKDGSRTMKYHCANRFPRKTKGVTVYNDNKKCDSGTYDLSNLETTVIDNLIGFQENDDSLLKIINGNSQPILDTSSFEKQISQIDKKIRKNSDLYLNDLITMDELKDRTNSLQAEKKLLKAKISETKFNDSTDVFELVKTQLGSIPINELSYDNKKKIVNNLVSKVDVTADNVDIIFKFQLA

SEQ ID NO: 303 - protein, 485 aa, synthetic construct
MTKKVAIYTRVSTTNQAEEGFSIDEQIDRLTKYAEAMGWQVSDTYTDAGSSGAKLERPAMQRLINDIENKAFDTVLVYKLDRLSRSVRDTLYLVKDVFTKNKIDFISLNESIDTSSAMGSLFLTILSAINEFERENIKERMTMGKLGRAKSGKSMMWTKTAFGYYHNRKTGILEIVPLQAAIVEQIFTDYLSGISLTKLRDRLNESGHIGKDIPWSLRTLRQTLDNPVYCGYIKFKDSLFEGMHKPIIPYETYLKVQKELEERQQQTYERNNNPRPFQAKYMLSGMARCGYCGAPLKIVLGHKRKDGSRTMKYHCANRFPRKTKGVTVYNDNKKCNSGTYDLSNLEDAVIDSLIGFQENNDSLLKIINGSNQPILDTSSYKKQISQIDKKIQKNSDLYLNDFITMDELKDRTNSLQAEKRLLEAKISENKFNDSTDVFELVKTQLGSIPINELSYDDKKKIVNNLVSKVDVTADNVDIVFKFQLA

SEQ ID NO: 304 - protein, 452 aa, synthetic construct
MKAAIYIRVSTQEQVGNYSIQAQTEKLTALCRSKDWDVYDIFIDGGYSGSNMNRPALNEMLSRLHEIDAVVVYRLDRLSRSQRDTTTLIEEYFLKNNVEFVSLSETLDTSSPFGRAMIGILSVFAQLERETIRDRMVMGKIKRIESGLPLTTAKGRTFGYDVIDTKLYINEEEAKQLQLIYDIFEEEQSITFLQKRLKKLGFKVRAYNRYNNWLTNDLYCGYVSYKDKVHVKGIHEPIISEEQFYRVQEIFTRMGKNPNMNRDSASLLSNLVVCSKCGLGFVHRSKDTMSRGKKYHYRYYSCKTYKHTHELEKCGNKTWRADKLEELIINRVSNYSFASRNVVKEDELDSLNEKLKIEHAKKKRLFDLYINGSYEVSELDSMMNDIDAQINYYESQIEANEELKKNKKIQENLADLATVDFDSLGFREKQLYLKSLINKIYIDGEQVTIEWL

SEQ ID NO: 305 - protein, 485 aa, synthetic construct
MTKKVAIYTRVSTTNQAEEGFSIDEQIDRLTKYAEAMGWQVSDTYTDAGFSGAKLERPAMQRLINDIENKAFDTVLVYKLDRLSRSVRDTLHLVKDVFTKNKIDFVSLNESIDTSSAMGSLFLTILSAINEFERENIKERMTMGKLGRAKSGKSMMWTKTAFGYYHNRKTGILEIVPPQATIVEQIFTDYLSGISLTKLRDKLNESGHIGKDIPWSYRTLRQTLDNPVYCGYIKFKDSLFEGMHKPIIPYETYLKVQKELEERQQQTYERNNNPRPFQAKYMLSGVARCGYCGAPLKIVLGHKRKDGSRTMKYHCANRFPRKTKGITVYNDNKKCDSGTYDLSNLENTVIDNLIGLQENNDSLLKIISGNNQPTLDTSSFEKQISQIDKKIQKNSDLYLNDFITMDELKDRTDSLQAEKELLKAKISENKFNDSTDVFELVKTQLGSIPINELSYDNKKKIVSNLVSKVDVTADNVDIIFKFQLA

SEQ ID NO: 306 - protein, 469 aa, synthetic construct
MCYTTPVRAAVYLRISEDRSGEQLGVARQREDCLKLCGQRKWEPVEYLDNDVSASTGKRRPAYEQMLADITAGKIAAVVAWDLDRLHRRPIELEAFMSLADEKRLALATVAGDVDLATPQGRLVARLKGSVAAHETEHKKARQRRAARQKAERGYPNWSKAFGYLPGPNGPEPDPRTAPLVKQAYADILAGASLGDVCRQWNDAGAFTITGRPWTTTTLSKFLRKPRNAGLRAYKGARYGPVDRDAIVGRAQWSPLVDEATFWAAQAVLDAPGRAPGRKSVRRHLLTGLAGCGKCGNHLAGSYRTDGRVVYVCKACHGVAILADNIEPILYHIVAERLAMPDAVDLLRREIHDAAEAETIRLELETLHGELDRLAVERAEGLLTARQVKISTDIVNAKITKLQARQLDQERLRVFDGIPLGTPQVAGMIAELSPDRFRAVLDVLAEVVVQPVGKSGRIFNPERVQVNWR

SEQ ID NO: 307 - protein, 452 aa, synthetic construct
MKAAIYIRVSTQEQVGNYSIQAQTEKLTALCRSKDWDVYDIFVDGGYSGSNMNRPALNEMLSKLHEIDAVVVYRLDRLSRSQRDTTTLIEEYFLKNNVEFVSLSETLDTSSPFGRAMIGILSVFAQLERETIRDRMVMGKIKRIEAGLPLTTAKGRTFGYDVIDTKLYINEEEAKQLQLIYDIFEEEQSITSLQRRLKKLGFKVRTYNRYNNWLTNDLYCGYVSYKDKVHVKGIHEPIISEEQFYRVQEIFTRMGKKPNMNRDSASLLNNLVVCSKCGLSFVHRSKDTMSRGKKYHYRYYSCKTYKHTHELEKCGNKTWRADKLEELIISRVNNYSFASRNVDKEDELDSLNEKLKIEHAKKKRLFDLYINGSYEVSELDSMMSYIDAQINYYESQIEASEELKKNKKIQENLADLATVDFDSLGFREKQLYLKSLINKIYIDGEQVAIEWL

SEQ ID NO: 308 - protein, 469 aa, synthetic construct
MCYTTPVRAAVYLRISEDRSGEQLGVARQREDCLKLCDQRKWVPVEYLDNDVSASTGKRRPAYEQMLADITAGKIAAVVAWDLDRLHRRPIELEAFMSLADEKRLALATVAGDVDLATPQGRLVARLKGSVAAHETEHKKARQRRAARQKAERGYPNWSKAFGYLPGPNGPEPDPRTAPLVKQAYADILAGASLGDVCRQWNDAGAFTITGRPWTTTTLSKFLRKPRNAGLRAYKGARYGPVDRDAIVGKAQWSPLVDEATFWAAQAVLDAPGRAPGRKSVRRHLLTGLAGCGKCGSHLAGSYRTDGRVVYVCKACHGVAILADNIEPILYHIVAERLAMPDAVDLLRREIHDAAEAETIRLELEALYGELDRLAVERAEGLLTARQVKICTDIVNAKIAKLQARQLDQERLRVFDGIPLGTPQVAGTIAELSPDRFRAVLDVLAEVVVQPVGKSGRIFNPERVQVNWR

SEQ ID NO: 309 - protein, 469 aa, synthetic construct
MSYTTPVRAAVYLRISEDRSGEQLGVARQREDCLKLCGQRKWEPVEYLDNDVSASTDKRRPAYEQMLADITAGKIAAVVAWDLDRLHRRPIELEAFMSLADEKRLALATVAGDIDLATPQGRLVARLKGSVAAHETEHKKARQRRAARQKAERGYPNWSKAFGYLPGPNGPEPDPRTAPLVKQAYADILAGASLGDVCRQWNDAGAFTITGRPWTTTTLSKFLRKPRNAGLRTYKGARYGPVDRGAIVGKAQWSPLVDEATFWAAQAVLDAPGRAPGRKSVRRHLLTGLAGCGKCGNHLAGSYRTDGRVVYVCKACHGVAILADNIEPILYRIVAECLAMPKAVDLLRREIHDAAEAETVRLELETLYGELDRLAVERAEGLLTARQVKISTDIVNAKITKLQARQLDQERLRVFDGIPLGTPQVAGMIAELSPDRFRAVLDVLAEVVVQPVGKGGRILNPERVQVNWR

SEQ ID NO: 310 - protein, 485 aa, synthetic construct
MTKKVAIYTRVSTTNQAEEGFSIDEQIDRLTKYAEAMGWQVSDTYTDAGFSGAKLERPAMQRLINDIENKAFDTVLVYKLDRLSRSVRDTLYLVKDVFTKNKIDFISLNESINTSSAMGSLFLTILSAINEFERENIKERMTMGKLGRAKSGKSMMWTKTAFGYYHNRKTGILEIVPPQATIVEQIFTDYLSGISLTKLRDKLNESGHIGKDIPWSYRTLRQTLDNPVYCGYIKFKDSLFEGMHKPIIPYETYLKVQKELEERQQQTYERNNNPRPFQAKYMLSGMARCGYCGAPLKVVLGHKRKDGSRTMKYHCANRFPRKTNGVTVYNDNKKCDSGTYDLSYLENTVIDYLIGFQENNDSLLKIINGNNQPIPDTSSLKKQISQIDKKIQKSSDLYLNDFITMDELKDRTGSLQAEKKLLEAKISENKFNDSTDVFELVKTQLGSTPINELSYDNKKKIVNNLVSKVDVTADNVDIIFKFQLA

SEQ ID NO: 311 - protein, 469 aa, synthetic construct
MCYTTPVRAAVYLRISEDRSGEQLGVARQREDCLKLCGQRKWVPVEYLDNDVSASTGKRRPAYEQMLADITAGKIAAVVAWDLDRLHRRPIELEAFMSLADEKRLALATVAGDVDLATPQGRLVARLKGSVAAHETEHKKARQRRAARQKAERGHPNWSKAFGYLPGPNGPEPDPRTAPLVKQAYADILAGASLGDVCRQWNDAGAFTITGRPWTTTTLSKFLRKPRNAGLRAYKGARYGPVDRDAIVGKAQWSPLVDEATFWAAQAVLDAPGRAPGRKSVRRHLLTGLAGCGKCGSHLAGSYRADGRVVYVCKACHGVAILADNIEPILYHIVAERLAMPDAVDLLRREIHDAAEAETIRLELDTLYGELDRLAVERAEGLLTARQVKISTDIVNAKIAKLQARQLDQERLRVLDGIPLGTPQVAGMIAELSPDRFRAVLDVLAEVVVQPVGKSGRIFNPERVQVNWR

SEQ ID NO: 312 - protein, 486 aa, synthetic construct
MTKKVAIYTRVSTTNQAEEGFSIDEQIDRLTKYAEAMGWQVSDTYTDAGVSGAKLERPAMQRLINDIENKAFDTVLVYKLDRLSRSVRDTLYLVKDVFTKNKIDFISLNESIDTSSAMGSLFLTILSAINEFERENIKERMTMGKLGRAKSGKSMMWTKTAFGYYHNRKTGILEIVPLQATIVEQIFTDYLSGISLTKLRDKLNESGHIGKDIPWSYRTLRQTLDNPVYCGYIKFKDSLFKGMHKPIIPYETYLKVQRELEERQQLAYERNNNPRPFQAKYMLSGMARCGYCGAPLRIVLGHKRKDGSRIMKYHCANRFPRKTKGITVYNDNKKCDSGTYDLSNLENTVIDNLIGLQENNDSLLKIINGNDQLILDTSSFEEQISQIDKKIQKNSDLYLNDFITMDELKDRTDSLQAEKKLLKAKISENKFNDSTGVFELVKTQLGSIPINELSYDNKKKIVNNLVSKVDVTADNVDIIFKFQLAY

SEQ ID NO: 313 - protein, 469 aa, synthetic construct
MCYTTPVRAAVYLRISEDRSGEQLGVARQREDCLKLCDQRKWVPVEYLDNDVSASIGKRRPAYEQMLADITAGRIAAVVAWDLDRLHRRPIELEAFMSLADEKRLALATVAGDVDLATPQGRLVARLKGSVAAHETEHKKARQRRAARQKAERGHPNWSKAFGYLPGPNGPEPDPRTAPLVKQAYADILAGASLGDVCRRWNDAGALTITGRPWTTTALSKFLRKPRNAGLRAYKGARYGPVDRNAIVGKAQWSPLVDEATFWAAQAVLDAPGRAPGRKSVRRHLLTGLAGCGKCGNHLAGSYRTDGRVVYVCKACHGVAILADNIEPILYHIVAERLAMPDAVDLLRREIHDAAEAETIRLELETLYGELDRLAVERAEGLLTARQVKISTDIVNAKITKLQARQQDQERLRVFSGIPLGTPQVAGMIAGLSPDRFRAVLDVLAEVVVQPVGKSGRIFNPERVQVNWR

SEQ ID NO: 314 - protein, 485 aa, synthetic construct
MTKKVAIYTRVSTANQAEEGFSIDEQIGRLTKYAEAMGWQVSDTYTDAGFSGAKLDRPAMQRLINDIENKAFDTVLVYKLDRLSRSVRDTLYLVKDVFTKNKIDFISLNECIDTSSAMGSLFLTILSAINEFERENIKERMTMGKLGRAKSGKSMMWTKTAFGYYHNRKTGILEIVPLQATIVKQIFTDYLSGISLTKLRDKLNEGGHIGKDIPWSYRTLRQTLDNPVYCGYIKFKDSLFEGMHKPIIPYETYLKVQKELEERQQQTYERNNNPRPFQAKYMLSGMARCGYCGAPLRIVLGHKRKDGSRTMKYHCANRFPRKTKGVTVYNDNKKCDSGTYDLSNLENTVIDNLIGFQENSDSLLKIINGNNQPMLDTSSFEKQISQIDKKIQKNSDLYLNDFITMDELKDRTDSLQAEKKLLKAKISENKSNDSTDVFELVKTQLGSIPINELSYDNKKKIVNNLVSKVDVTADNVDIIFKFQLA

SEQ ID NO: 315 - protein, 485 aa, synthetic construct
MTKKVAIYTRVSTANQAEEGFSIDEQIDRLTKYAEAMGWQVSDTYTDAGSSGAKLERPAMQRLINDIENKAFDTVLVYKLDRLSRSVRDTLYLVKDVFTKNKIDFISLNESIDTSSAMGSLFLTILSAINEFERENIKERMTMGKLGRAKSGKSMMWTKTAFGYYHNRKTGILEIVPLQAAIVEQIFTDYLSGISLTKLRDKLNESGHIGKDIPWSYRTLRQTLDNPVYCGYIRFKDSLFEGMHKPIIPYETYLKVQKELKERQQQTYERNNNPRPFQAKYMLSGMARCGYCGAPLRIVLGRKRKDGSRTMKYHCANRFPRKTRGITVYNDNKKCDSGTYDLRNLENTVIDNLIGFQENNDSLLKIIISNNQPILDTSNFKKQISQIDKKIQKNSDLYLNDFITMDELKDRTDSLQAEKKLLKAKISENKFNDSTDVFGLVKTQLGSIPINELSYDDKKKIVNNLVSKVDVTADNVDIIFKFQLA

SEQ ID NO: 316 - protein, 485 aa, synthetic construct
MTKKVAIYTRVSTTNQAEEGFSIDEQIDRLTKYAEAMGWQVSDTYTDAGFSGAKLERPAMQRLINDIESKSFDTVLVYKLDRLSRSVRDTLYLVKDVFTKNKIDFISLNESIDTSSAMGSLFLTILSAINEFERENIKERMTMGKLGRAKSGKSMMWTKTAFGYYHNRKTGILEIVPLQATIVEQIFTDYLSGISLTKLRDKLNESGHIGKDIPWSYRTLRQTLGNPVYCGYIKFKDSLFEGMHKPIIPYETYLKVQKELEERQQQAYERNNNPRPFQAKYMLSGMARCGYCGAPLRIVLGHRRKDGSRTMKYHCANRFPRKTKGVIVYNDNKKCDSGTYDLSSLENIVIDNLISFQENNDSLLKIINGNHQPTLDTSSFKRQISQIDKKIQKNSDLYLNDFITMDELKDRTDSLQAEKKLLEAKISENKFNGSTDVFELVRTQLGSIPINELSYDNKKKIVNDLVSKVDVTADNVDIIFKFQLA

SEQ ID NO: 317 - protein, 485 aa, synthetic construct
MTKKVAIYTRVSTTNQAEEGFSIDEQIDRLTKYAEAMGWQVCDTYTDAGFSGAKLERPAMQRLINDIENKAFDTVLVYKLDRLSRSVRDTLYLVKDVFTKNKIDFISLNESINTSSAMGSLFLTILSAINEFERENIKERMTMGKLGRAKSGKSMMWAKTAFGYNHNRKTGILEIVPLQATIVEQIFTDYLSGISLTKLRDKLNESGHIGKDIPWSYRTLRQTLDNPVYCGYIKFKDSLFEGMHEPIIPYETYLKVQKELEERQQQTYERNNNPRPFQAKYMLSGMARCGYCGAPLRVVLGHKRKDGSRTMKYHCANRFPRKTKGVTVYNDNKKCDGGTYDLSSLENTVIDSLIGFQENNDSLLKIINGNNQPILDTSSFKGQISQIDKKIQKNSDLYLNDFITMDELRDRTDSLQAEKKLLEAKISESKFNDSTDVFELVKTQLGSIPIDELSYDNKKKIVNNLVSKVDVTADNVDIIFKFQLA

SEQ ID NO: 318 - protein, 485 aa, synthetic construct
MTKKVAIYTRVSTTNQAEEGFSIDEQIDRLTKYAEAMGWQVSDTYTDAGLSGAKLERPAMQRLINDIENKAFDTVLVYKLDRLSRSVRDTLYLVKDVFTKNKIDFISLSESIDTSSAMGSLFLTILSAINEFERENIKERMTMGKLGRAKSGKSMMWTKTAFGYYHNRKTGILEIVPPQATIVEQIFTDYLSGISLTKLRDKLNESGHIGKDIPWSYRTLRQTLDNPVYCGYIKFKGSLFKGMHKPIIPYETYLKVQKELEERQQQTYERNNNPRPFQAKYMLSGMVRCGYCGAPLRTVLGHKRKDGSRTMKYHCANRFPRKTKGVTVYNDDKKCDSGAYDLSNLENTVIGILIGFQENNDSLLKIINGNDQPILDTSSLKEQISQIDKKILKNSDLYLNDFITMDELKDRTDSLQAEKKLLKAKISENKFNDSTDVFELVKTQLGSIPINELSYDNKKKIVNNLVSKVDVTADNVDIIFKFQLA

SEQ ID NO: 319 - protein, 469 aa, synthetic construct
MSYTTPVRAAVYLRISEDRSGEQLGVARQREDCLKLCDQRKWVPVEYLDNDVSASTGKRRPAYEQMLADITAGKIAAVVAWDLDRLHRRPIELEAFMSLADEKRLALATVAGDVDLATPQGRLVARLKGSVAAHETEHKKARQRRAARQKAERGLPNWSKAFGYLPGPNGPEPDPRTAPLVKQAYADILAGASLGDVCRQWNDTGAYTITGRPWTTTTLSKFLRKPRNAGLRAYKGARYGPVDRDAIVGKAQWSPLVDEATFWAAQAVLDAPGRAPGRKSVRRHLLTGLAGCGKCGNHLAGSYRSDGRVVYVCKACHGVVILADNIEPILYHVVAERLAMPDAVDLLCREIHDAAEAETIRLELETLYGELDRLAVERAEGLLTARQVKISTDIVNAKITKLQARQLDQERLRVLDGIPLGTPQVAGMIAELSPDRFRAVLDVLAEVVVQPVGKSGRISGPERVQVNWR

SEQ ID NO: 320 - protein, 469 aa, synthetic construct
MSYTTPVRAAVYLRISEDRSGEQLGVTRQREDCLKLCGQRKWVPVEYLDNDVSASTGKRRPAYEQMLADITAGKIAAVVAWDLDRLHRRPIELEAFMSLADEKRLALATVAGDVDLATPQGRLVARLKGSVAAHETEHKKARQRRAARQKAERGHPNWSKAFGYLPGPNGPEPDPRTAPLVKQAYADILTGASLGDVCRQWNDAGAFTITGRLWTTTTLSKFLRKPRNAGLRAYKGARYGPVDRDAIVGKAQWSPLVDEATFWAAQAVLDAPGRAPGRKSVRRHLLTGLAGCGKCGNHLAGSYRTDGRVVYVCKACHGVAILADNIEPILYHTVAERLAMPDAVDLLRREIHDAAEAETIRLELETLYGELDRLAVERAEGLLTARQVKICTDIVNAKITKLQARQQDQERLRVLDGVPLGTPQVAGVIAELSPDRFRAVLDVLAEVVVQPVGKSGRIFNPERVQVNWR

SEQ ID NO: 321 - protein, 469 aa, synthetic construct
MSYTTPVRAAVYLRISEDRSGEQLGVARQREDCLKLCDQRKWVPVEYLDNDVSASTGKRRPAYEQMLADITAGKIAAVVTWDLDRLHRRPIELEAFMSLADEKRLALATVAGGVDLATPQGRLVARLKGSVAAHETEHKKARQRRAARQKAERGHPNWSKAFGYLPGPSGPEPDPRTAPLVKQAYADILAGASLGDVCRRWNDAGAFTITGRPWTTTTLSKFLRKPRNAGLRAYKGARYGPVDRDAIVGKAQWSPLVDEATFWAAQAVLDAPGRAPGRKSVRRHLLTGLAGCGKCGYHLAGSYRTDGRVVYVCKACHGVAILADNIEPILYHIVADRLAMPDAVDLLRREVHDAAEAETIRLELETLYGELDRLAVERADGLLTARQVKISTDIVNAKITKLQARQLDQERLRVFDGIPLGTPQVAGMVAELSPDRFRAVLDVLAEVVVQPVGKSGRIFNTERVQVNWR

SEQ ID NO: 322 - protein, 485 aa, synthetic construct
MTKKVAIYTRVSTTNQAEEGFSIDEQIDRLTKYAEAMGWQVSDTYTDAGFSGAKLERPAMQRLINDIENKAFDTVLVYKLDRLSRSVRDTLYLVKDVFTKNKIDFISLNESINTSSAMGSLFLTILSAINEFERENIKERMTMGKLGRAKSGKSMMWTKTAFGYYHNRKTGILEIVPLQATIVEQIFTDYLSGVSLTKLRDKLNESGHIGKDIPWSYRTLRQTLDNPVYCGYIKFKDSLFEGMHKPIIPYETYQKVQKELKERQQQTYERNNNPRPFQAKYMLSGMARCGYCGAPLRVVLGHKRKDGSRTMKYHCANRFPRKTKGVTVYNDNKKCDSGTYDLSNLENTVIDNLIGFQENNDSLLKIINGNNQPILDTGSFKNQISQIDKKIQKNSDLYLNDFITMDELKDRTDSLQAEKKLLKAKISENKFNDGTDVFELVKTQLGSIPINELSYDNKKKIVNNLVSKVDVTADNVDIIFKFQLA

SEQ ID NO: 323 - protein, 485 aa, synthetic construct
MTKKVAIYTRVSTTNQAEEGFSIDEQIDRLTKYAEAMGWQVSDTYTDAGFSGAKLERPAMQRLINDIENKAFDTVLVYKLDRLSRSVRDTLYLVKDVFTKNKIDFISLNESIDTSSAMGSLFLTILSAINEFERENIKERMTMGKLGRAKSGKSMMWTKTAFGYYHNRKTGILEIVPLQATIVKQIFTDYLSGISLTKLRDKLNESGHIGKDIPWSYRTLRQTLDNPVYCGYIKFKDSLFEGMHKPIIPYETYLKVQKELEERQQQTYERNNNPRPFQAKYMLSGVARCGYCGAPLKVVLGHKRKDGSRTMKYHCANRFPRKTKGVTVYNDNKKCDSGTYDLSNLENTVIDNLIGFQENNDSLLKIINGNNQPILDTSSLKKQISQIDKKIQKSSELYLNDFITMDELKNRTDSLQAEKKLLKAKISENKFNDGTDVFELVKTQLGSTPINELSYDNKKKIVNNLVSKVDVTADNVDIIFKFQLA

SEQ ID NO: 324 - protein, 452 aa, synthetic construct
MKAAIYIRVSTREQVENYSIQAQTEKLTALCRSKDWDVYDIFIDGGYSGSNMNRPALNEMLSKLHEIDAVVVYRLDRLSRSQRDTITLIEEYFLKNNVEFVSLSETLDTSSPFGRAMIGILSVFAQLERETIRDRMVMGKIKRIEAGLPLTTAKGRTFGYDVIDTKLYINEGEAKQLQLIYDIFEEEQSITFLQKRLKKLGFKVRSYNRYHNWLTNDLYCGYVSYKDKVRVKGIHEPIISEEQFYRVQEIFTRMGKSPNMNRDSASLLNNLVVCSKCGLGFVHRRKDIMNRGKRYHYRYYSCKTYKHIHELEKCGNKIWRADKLEELIIDRVNNYSFASRNVDKEDELDSLIEKLKIEHAKKKRLFDLYINGSYEVGELDSMMNGIDAQINYYESQIEANEELKKNKKIQENLAYLATVDFDSLEFREKQLYLKSLINKIYVDGEQVTIEWL

SEQ ID NO: 325 - protein, 485 aa, synthetic construct
MTKKVAIYTRVSTTNQAEEGFSIDEQIDRLTKYAEAMGWQVSDTYTDAGFSGAKLERPAMQRLINDIENKAFDTVLVYKLDRLSRSVRDTLYLVKDVFTKNKIDFISLSESIDTSSAMGSLFLTILSAINEFERENIKERMTMGKLGRAKSGKSMMWTKTAFGYYHNRKTGILEIVPLQASIVEQIFTDYLSGISLTKLRDKLNESGHIGKDIPWSYRTLRQTLDNPVYCGYIKFKDSLFEGMHKPIIPYETYLKVQKELEERQQQTYERNNNPRPFQAKYMLSGMARCGYCGAPLRIVLGHKRKDGSRTTKYHCANRFPRKTKGITVYNDNNKCDSGTYDLSDLENTVIDNLIGFQEDNDSLLKIINGNNQPILDTSSFKKQISQIDKKIQKNSDLYLNDFITMDELKDRTDSLQAEKKLLEAKISENKFNDSTDVFELVKTQLGSIPINELSYDNKKKIVNNLVSKVDVTADNVDIIFKFQLA

SEQ ID NO: 326 - protein, 485 aa, synthetic construct
MTKKVAIYTRVSTTNQAEEGFSIDEQIDRLTKYAEAMGWQVSDTYTDAGLSGAKLERPAMQRLINDIENKAFDTVLVYKLDRLSRSVRDTLYLVKDVFTKNKIDFISLNESIDTSSAMGSLFLTILSAINEFERENIKERMTMGKLGRAKSGKSMMWTKTAFGYYHNRKTGILEIVPPQATIVEQIFTDYLSGISLTKLRDKLNESGHIGKDIPWSYRTLRQTLDNPVYCGYIKFKDSLFEGMHKPIIPYETYLKVQKELEERQQQTYERNNNPRPFQAKYMLSGMARCGYCGAPLRIVLGHKRKDGSRTMKYHCANRFPRKTKGVTVYNDNKKCDSGTYDLSSLENTVIDNLIGFQENNDSLLKIINGNNQPILDTSSFKEQISQIDKKIQKNSDLYLNDFITMGELKDRTDSLQAEKKLLKAKISGNKSNDSTDVFELVKTQLGSIPINELSYDNKKRIVNNLVSKVDVTADNVDIIFKFQLA

SEQ ID NO: 327 - protein, 485 aa, synthetic construct
MTKKVAIYTRVSTTNQAEEGFSIDEQIDRLTKYAEAMGWQVSDTYTDAGLSGAKLERPAMQRLINDIENKAFDTVLVYKLDRLSRSVRDTLYLVKDVFTKNKIDFISLNECIDTSSAMGSLFLTILSAINEFERENIKERMTMGKLGRAKSGKSMMWAKTAFGYYHNRKTGILEIVPLQAAIVEQIFTDYLSGISLTKLRDKLNESGHIGKDIPWSYRTLRQTLDNPVYCGYIKFKDSLFEGMHKPIIPYETYLKVQKELEERQQQTYERNNNPRPFQAKYMLSGMARCGYCGAPLRIVLGRKRKDGDRTMKYHCANRFPRKTNGVTVYNDNKKCDSGTYDLSDLENTVIDNLIGFQENNDSLLKIINGNNQPILDTSSLKKQISQIDKKIQKNSDLYLNDFITMDELKGRTDSLQAEKKLLKAKISEDKFNDSTDVFELVKTQLGSIPINELSYDNKKKIVNNLVSKVDVTADNVDIIFKFQLA

SEQ ID NO: 328 - protein, 452 aa, synthetic construct
MKAAIYIRVSTQEQVGNYSIQAQTEKLTALCRSKDWDVYDIFVDGGYSGSNMNRPALNEMLSKLHEIDAVVVYRLDRLSRSQRDTTTLIEEYFLKNNVEFVSLSETLDTSSPFGRAMIGILSVFAQLERETIRDRMVMGKIKRIEAGLPLTTAKGRTFGYDVIDTKLYINEEEAKQLQLIYDIFEEEQSITSLQKRLKKLGFKVRTYNRYNNWLTNDLYCGYVSYKDKVHVKGIHEPIISEEQFYRVQEIFTRMGKNPNMNRDGASLLNNLVVCSKCGLGFVHRSKDTMSRGKKYHYRYYSCKTYKHTHELEKCGNKTWRADKLEELIINRVNNYSFASRNVDKEGELDSLNEKLKIEHAKKRRLFDLYINGSYEVSELDSMMNDIDAQISYYESQIEANEELKKNKKIQENLANLATVDFDSLEFREKQLYLKSLINKIYIDGEQVTIEWL

SEQ ID NO: 329 - protein, 469 aa, synthetic construct
MSYTTPVRAAVYLRISEDRGGEQLGVARQREDCLKLCDQRKWVPVEYLDNDVSASTGKRRPAYEQMLADITAGGIAAVVAWDLDRLHRRPIELEAFMSLADEKRLALATVAGDVDLATPQGRLVARLKGSVAAHETEHKKARQRRAARQKAERGLPNWSKAFGYLPGPNGPEPDPRTAPLVKQAYADILAGASLGDVCRRWNDAGALTITGRPWTTTTLSKFLRKPRNAGLRAYKGARYGPVDRDAIVGKAQWSPLVDEATFWAAQAVLDAPGRAPGRKSVRRHLLTGLAGCGKCGHHLAGSYRTDGQVVYVCKACHGVAILADNIEPILYHIVTERLAMPDAVDLLRREIHDAAEAETIRLELETLYGELDRLAVERAEGLLTARQVKISTDIVNAKITKLQTRQLDQERLRVLDGIPLGTPQVAGAIAELSPDRFRAVLDVLAEVVVQPVGKSGRIFSPERVQVNWR

SEQ ID NO: 330 - protein, 469 aa, synthetic construct
MSYTTPVRAAVYLRISEDRSGEQLGVARQREDCLKLCDQRNWVPVEYLDNDVSASTGKRRPAYEQMLADITAGKIAAVVAWDLDRLHRRPIELEAFMSLADEKRLALATVAGDVDLATPQGRLVARLKGSVAAHETEHKKARQRRAARQKAERGHPNWSKAFGYLPGPNGPEPDPRTAPLVRQAYADILAGASLGDVCRQWNDAGAFTITGRPWTTTTLSKFLRKPRNAGLRAYKGARYGPVDRDAIVGKAQWSPLVDEATFWAAQAVLDAPGRAPGRKSVRRHLLTGLAGCGKCGNHLAGSYRTDGRVVYVCKACHGVSILADNIEPILYHIVVERLAMPNAVDLLRREIHDAAKAETIRLELETLYGELDRLAVERAEGLLTARQVKISTDIVSAKITKLQARQLDQERLRVFDGIPLGTPQVAGTIAELSPDRFRAVLDVLAEVVVLPVGKSGRTFNPERVQVNWR

SEQ ID NO: 331 - protein, 485 aa, synthetic construct
MTKKVAIYTRVSTTNQAEEGFSIDEQIDRLTKYAEAMGWQVSDTYTDAGISGAKLERPAMQRLINDIESKAFDTVLVYKLDRLSRSVRDTLYLVKDVFTKNKIDFISLSESIDTSSAMGSLFLTILSAINEFERENIKERMTMGKLGRAKSGKSMMWTKTAFGYYHNRETGILEIVPLQATIVEQIFTDYLSGISLTKLRDKLNESGHIGKDIPWSYRTLRQTLDNPVYCGYIKFKDSLFEGMHKPIIPYETYLKVQKELEERQQQTYERNNNPRPFQAKYMLSGMARCGYCGAPLRIVLGHKRKDGSRTMKYHCANRFPRKTKGITVYNDNKKCDSGTYDLSNLENTVIDYLTGFQENNDSLLKVINGNNQPILDTSSFKKQISQIDKKIQKNSDLYLNDFITMDELKDRTDSLQAEKKLLEAKINENKFNDSTDVFELVKTQLGSIPINELSYDNKKKIVNNLVSKVDVTADNVDIIFKFQLA

SEQ ID NO: 332 - protein, 469 aa, synthetic construct
MSYTTPVRAAVYLRISEDRSGEQLGVARQREDCLKLCDQRKWEPVEYLDNDVSASTGKRRPAYEQMLADITAGKIAAVVAWDLDRLHRRPIELEAFMSLADEKRLALATVAGDVDLATPQGRLVARLKGSVAAHETEHKKARQRRAARQKAERGHPNWSKAFGYLPGPNGPEPDPRTAPLVKQAYADILAGASLGDVCRQWNDVGAFTITGRPWTTTTLSKFLRKPRNAGLCAYKGARYGPVDRDAIVGKAQWSPLVDETTFWAAQAVLDAPGRAPGRKSVRRHLLTGLAGCGKCGYHLAGSYRTDGRVVYVCKACHGIAILADNIVPILYHIVAERLAMPDAVDLLRREIHDATEAETIRLELETLYGELDCLAVERAEGLLTARQVKISTDIVNAKVTKLQARQLDQERLRVLDGIPLGTPQVAGMIAELSPDRFRAVLDVLAEVVVQPVGKSGRIFNPERVQVNWR

SEQ ID NO: 333 - protein, 485 aa, synthetic construct
MTKKVAIYTRVSTTNQAEEGFSIDEQIDRLTKYAEAMGWQVSDTYTDAGFSGAKLERPAMQRLINDIENKAFDTVLVYKLDRLSRSVRDTLYLVKDVFTKNRIDFISLNESINTSSAMGSLFLTILSAINEFERENIKERMTMGKLGRAKSGKSMMWTKTAFGYYHNRKTGILEIVPLQATIVEQIFTDYLSGISLTKLRDKLNESGHVGKDIPWSYRTLRQTLDNPVYCGYIKFKDSLFEGMHKPIIPYETYLKVQKELEERQQQTYERNNNSRPFQAKYMLSGMARCGYCGAPLRIVLGHKRKDGSRTMKYHCANRFPRKTKGVTVYNDNKKCDSGTYDLSNLENTVIDNLIGFQENNDSLLKIINGNNQPTLDTSSFKEQISQIDKEIQKNSDLYLNDFITMDELKDRTDSLQAEKKLLKAKISGTKFNDSTDVFELVKTQLGSIPINELSYDDKKKIVNNLVSKVDVTADNVDIIFKFQLA

SEQ ID NO: 334 - protein, 452 aa, synthetic construct
MKAAIYIRVSTREQVENYSIQAQTEKLTALCRSKDWDVYDIFIDGGYSGSDMNRPALNEMLSRLHEIDAVVVYRLDRLSRSQRDTITLIEEYFLKNSVEFVSLSETLDTSSPFGRAMIGILSVFAQLERETIRDRMVMGKIKRIEAGLPLTTAKGRTFGYDVIDTKLCINEEEAKQLRLIYDIFEEEQSITFLQKRLKKLGFKVHTYNRYNNWLTNDLYCGYVSYKDKVHVRGIHEPIISEEQFYRVQEIFTRMGKNPNMNRESASLLNSLVVCGKCGLGFVHRRKDTMRRGKKYHYRYYSCKTYKHIHELDKCGNKIWRADKLEELIISRVNNYSFAGRNVDKEDELDSLNEKLRIEHAKKKRLFDLYINGGYDVSELDSMMNDIDAQINYHESQIEANEELKKDKKIRESLANLATVDYDSLEFREKQLYLKSLINKIYIDGEQVTIEWL

SEQ ID NO: 335 - protein, 469 aa, synthetic construct
MSYTTPVRAAVYLRISEDRSGEQLGVARQREDCLKLCGQRKWVPVEYLDNDVSASTGKRRPAYEQMLADITAGKIAAVVAWDLDRLHRRPVELEAFMSLADEKRLALATVAGDVDLATPQGRLVARLKGCVAAHETEHKKARQRRAARQKAERGLPNWSKAFGYLPGPNGPELDPRTAPLVKQAYADILAGASLGDVCRQWNGAGAFTITGRPWTTTTLSKFLRKPRNAGLRAYKGARYGPVDRDAIVGKALWSPLVDEATFWAAQAVLDAPGRAPGRKSVRRHLLTGLAGCGKCGNHLAGSYRTDGRVVYVCKACHGVAILADNIEPILYHIVAERLAMPDAVDLLRREIHDSAEAETIRLELEALYGELDRLAVERAEGLLTARQVKISTDIVNAKITKLQARQLNQERLRVFDGIPLGTPQVAGVIAELSPDRFRAVLDVLAEVVVQPVGKRSRIFNPERVQVNWR

SEQ ID NO: 336 - protein, 452 aa, synthetic construct
MKAAIYIRVSTREQVENYSIQAQTERLTALCRSKDWDVYDIFIDGGYSGSNMNRPALNEMLSKLHEIDAVVVYRLDRLSRSQRDTITLIEEYFLKNNVEFVSLSETLDTSSPFGRAMIGILSVFAQLERETIRDRMVMGKIKRIEAGLPLTTAKGRTFGYDVIDTKLYINEEEAKQLQLIYDIFEEEQSITFLQKRLKKLGFKVHTYNRYNNWLTNDLYCGYVSYKDKVHVKGIHEPIISEEQFYRVQEIFARMDKNPNMNRDSASLLNNLVVCSKCGLGFVHRRKDAMSRDKKYHYRYYSCKTYKHIHELEKCGNKIWRADKLEELIINRVNNYGLASRNADKEDELDGLYEKLKIEHAKKKRLFDLYLNGSYEVSELDGMMYDIDAQINYYESQIEANEELTKNKKIRENLADLATVDFDSLEFREKQRYLKSLINKIYIDGEQVTIEWL

SEQ ID NO: 337 - protein, 452 aa, synthetic construct
MKAAIYIRVSTREQVENYSIQAQTEKLTALCRSKDWDVYDIFIDGGYSGSNMNRPALNEMLSKLHEIDAVVVYRLDRLSRSQRDTITLIEEYFLKNNVEFVSLSETLDTSSPFGRAMIGILSVFAQLERETIRDRMVMGKIKRVEAGLPLTTAKGRTFGYDVIDTKLYINEEEAKHLQLIYDIFEEEQSITSLQKRLKKLGFKVRTYSRYNNWLTNDLYCGYVSYKDKVHVKGIHEPIISEEQFYRVQEIFTRMGKSPNMNRGSASLLNNLVVCSKCGLGFVHRRKDTMSRGKKYHYRYYSCKTYKHTHELEKCGNKIWRADKLEELIINRVNNYSFASRDVDKEDELDSLDEKLKIEQAKRKRLFDLYINGSYNVSELDSMMNDIEAQINYYESQIEANEGLKKNKKIQENLAGLATVDFDSLEFREKQRYLKSLINKIYIDGEQVTIEWL

SEQ ID NO: 338 - protein, 452 aa, synthetic construct
MKAAIYIRVSTREQVENYSIQAQTEKLTALCRSKDWDVYDIFIDGGYSGSNMNRPALNEMLSKLREIDAVVVYRLDRLSRSQRDTITLIEEYFLKNNVEFVSLSETLDTSSPFGRAMIGILSVFAQLERETIRDRMVMGKIKRIEAGLPLTTAKGRTFGYDVIDTKLYINEEEAKQLQLIYDIFEEEQSITFLQKRLKKLGFKVRTYNRYSNWLTNDLYCGYVSYKDKVHVKGIHEPIISEEQFYRVQEIFARMGKNPNMNRDSASLLNNLVVCGKCGLGFVHRRKDAMSRDKKYHYRYYSCKTYKHIHELEKCGNKIWRADKLEELIINRVNNYSLASRNVDKEGELDSLNEKLKIEHAKKRRLFDLYINGSYEVSELDSMMYDIDAQINYYEGQIEANEELRKNKRIQENLADLATVDFDGLEFREKQLYLKSLINKIYIDGEQVTIEWL

SEQ ID NO: 339 - protein, 485 aa, synthetic construct
MTKKVAIYTRVSTTNQAEEGFSIDEQIDRLTKYAEAMGWQVSDTYTDAGFSGAKLERPAMQRLINDIENKAFDTVLVYKLDRLSRSVRDTLYLVKDVFTKNKIDFICLNESIDTSSAMGSLFLTILSAINEFERENIKERMTMGKLGRAKSGKSMMWTKTAFGYYHNRNTGILEIVPLQATIVEQIFTDYLSGISLTKLRDKLNESGHIGKDIPWSYRTLRQTLDNPVYCGYIKFKDSLFEGMHKPIIPYETYLKVQKELEERQRQTYARNNNPRPFQAKYMLSGMARCGYCGAPLKIVLGHKRKDGSRTMKYHCANRFPRKTRGVTVYNDNKKCDSGTYDLSNLENTVIDNLIGFQENNDSLLKIINGNNQPALDTSSFEKQISQIDKKIQKNSDLYLNDFITMDELKDRTDSLQAEKKLLKAKISENKFNDSTDAFELVKTQLGSIPINELSYDNKKKIVNNLVSKVDVTADNVDIIFKFQLA

SEQ ID NO: 340 - protein, 469 aa, synthetic construct
MSYTTPVRAAVYLRISEDRSGEQLGVARQREDCLKLCGQRKWMPVEYLDNDVSASTGIRRPAYEQMLADIAAGRIAAVVAWDLDRLHRRPIELEAFMSLADEKRLALATVAGDVDLATPQGRLVARLKGCVAAHETEHKKARQRRAARQKAERGLPNWSKAFGYLPGPNGPDPDPRTAPLVKQAYADILAGASLGDVCKQWNDAGAFTITGRPWTTTTLSKFLRKPRNAGLRAYKGARYGPVDRDAIVGKARWSPLVDEATFWAAQAVLDAPGRAPGRKSVRRHLLTGLAGCGKCGNHLAGSYRTDGRVAYVCKACHGVAILADNIEPILYHIVAERLAMPDAVDLLRRETHDAAEAETIRLELETLYGELDRLAVERAEGLLTARQVKISTDIVNAKITKLQACQLDQERLRVLDGIPLGTPQVAGVIAELSPDRFRAVLDVLAEVVVQPVGKSGRISNPERVQVNWR

SEQ ID NO: 341 - protein, 452 aa, synthetic construct
MKAAIYIRVSTQEQVGNYSIQAQTEKLTALCRSKDWDVYDIFIDGGYSGSNMNRPALNEMLGKLHEIDAVVVYRLDRLSRSQRDTTTLIEEYFLKNNVEFVSLSETLDTSSPFGRAMIGILSVFAQLERETIRDRMVMGKIKRIEAGLPLTTAKGRTFGYDVIDTKLYINEEEAKQLRLIYDIFEEEQSITSLQKRLKKLGFKVRTYNRYSSWLTNDLYCGYVSYKDKVHVKGIHEPIISEEQFYRVQEIFTRMGKNPNMNRDSASLLNNLVVCSKCGLGFVHRSKDTMSRGKKYHYRYYSCKTYKHTHELEKCGNKTWRADKLEELIINRVNNYSFASRNADKEDELDSLNEKLKIEHARKKRLFDLYINGSYEVSELDSMMNDIDAQINYYESQIEANEELRKNKKIQENLADLATVDFDSLEFREKQLYLKSLINKIYIDGEQVTIEWL

SEQ ID NO: 342 - protein, 485 aa, synthetic construct
MTRKVAIYTRVSTTNQAEEGFSIDEQIDRLTKYAEAMGWQVSVTYTDAGFSGAKLERPAMQRLINDIETKAFDTVLVYKLDRLSRSVRDTLYLVKDVFTKNKIDFISLSESIDTSSAMGSLFLTILSAINEFERENIKERMTMGKLGRAKSGKSMMWTKTAFGYYHNRKTGILEIVPLQATIVEQIFADYLSGISLTKLRDKLNESGHIGKDIPWSYRTLRQTLDNPVYCGYIKFKDSLFEGMHEPIIPYETYLKVQKELEERQQQTYERNNNPRPFQAKYMLSGLARCGYCGAPLRIVLGHKRKDGSRTMKYHCANRFPRKTKGVTVYNDNKKCGSGTYDLSNLENTVIDNLIGFQEDNDSLLKIINGNNQPILDTSSIKKQISQIDKKIQKNSDLYLNDFITMDELKDRTDSLQAEKKLLMAKISEDKFNDSTDVVELVRTQLGSIPINELSYDNKKKIVNHLVSKVDVTADNVDITFKFQLA

SEQ ID NO: 343 - protein, 469 aa, synthetic construct
MCYTTPVRAAVYLRISEDRSGEQLGVARQREDCLKLCGQRKWVPVEYLDNDVSASTGKRRPAYEQMLADITAGKIAAVVAWDLDRLHRRPVELEAFMSLADEKRLALATVAGDVDLATPQGRLVARLKGSVAAHETEHKKARQRRAARQKAERGYPNWSKAFGYLPGPNGPEPDPRTAPLVKQAYADILAGASLGDVCRRWNGASAFTITGRPWTTTTLSKFLRKPRNAGLRAYKGAPYGPVDRDAIVGKAQWSPLVDEATFWAAQAVLDAPGRAPGRKSVRRHLLTGLAGCGKCGNHLAGSYRSDGRVVYVCKACHGVAILADNIEPILYHIVAERLAMPDAVDLLRREIHDAAEAETIRLELEILYGELDRLAVERAEGLLTARQVKISTDIVGAKITKLQARQLDQERLRVLDGIPLGTPQVAGVIAELSPDRFRAVLDVLADVVVQPVGKGGRIFSPERVQVNWR

SEQ ID NO: 344 - protein, 485 aa, synthetic construct
MTKKVAIYTRVSTTNQAEEGFSIDEQIDRLTKYAEAMGWQVSDTYTDAGFSGAKLERPAMQRLINDIENKAFDTVLVYKLDRLSRSVRDTLYLVKDVFTKNKIDFISLSESIDTSSAMGSLFLTILSAINEFERENIKERMAMGKLGRAKSGKSMMWTKTAFGYYHNRKTGILEIVPLQATIVEQIFTDYLSGISLTKLRDKLNESGHIGKDIPWSYRTLRQTLDNPVYCGYIKFKGSLFEGMHKPIIPYETYLKVQKELEERQQQTYERNNNPRPFQAKYMLSGMARCGYCGAPLRIVLGHKRKDGSRTMKYHCANRFPRKTKGVTVYNDNKKCDSGTYDLSNLENTVIGNLIGFQENNDSLLKIINGNNQPILDTSSFKKRISQIDRKIQMNSDLYLNDFITMDELKDRTDSLQAEKKLLKAKISENKFNDSTDVFELVKTQLGSIPINELSYDNKKKIVNNLVSKVDVTADNVDIIFKFQLA

SEQ ID NO: 345 - protein, 469 aa, synthetic construct
MSYTTPVRAAVYLRISEDRSGEQLGVARQREDCLKLCGQRKWEPVEYLDNDVSASTGRRRPAYEQMLADITAGKIVAVVAWDLDRLHRRPIELEAFMSLADEKRLALATVAGDVDLATPQGRLVARLKGSVAAHETEHKRARQRRAARQKAERGHPNWSKAFGYLPGPNGPEPDPRTAPLVKQAYADILAGASLGDVCRRWNNAGAFTITGRPWTTTTLSKFLRKPRNAGLRAYKGARYGPVDRDAIVGKAQWSPLVDEATFWAAQAVLDAPGRAPGRKSVRRHLLTGLAGCGKCGNHLAGSYRTDGRVVYVCKACHGVAILADNIEPILYRIVAERLAMPDAVDLLCREIHDAAEAETIRLELEALYGELDHLAVERAEGLLTARQVKISTDIVNAKITRLRARQQDQERLRVLDGIPLGTPQVAGMIAELSPDRFRAVLDVLAEVVVQPVGKGGRIFNPERVQVNWR

SEQ ID NO: 346 - protein, 469 aa, synthetic construct
MSYTTPVRAAVYLRISEDRSGEQLGVARQREDCLKLCGQRKWVPVEYLDNDVSASTGKRRPAYEQMLADITAGKIAAVVAWDLDRLHRRPVELEAFMSLADEKRLALATVAGDVDLATPQGRLVARLKGCVAAHETEHKKARQRRAARQKAERGLPNWSKAFGYLPGPNGPEPDPRTAPLVKQAYADILAGASLGDVCRQWNDAGAFTITGRPWTTTTLSKFLRKPRNAGLRAYKGARYGPVDRDAIVGKAQWSPLVDEATFWAAQAVLDAPGRAPGRKSVRRHLLTGLAGCGKCGNRLAGSYRTDGRVVYVCKACHGVAILADNIEPILYHIVAERLAMPDAVDLLRREIHDATEAETIRLELETLYGELDRLAVERAEGLLTARQVKISTDIVNAKITKLQARRLDQERLRVFDGIPLGTPQVAGVIAELSPDRFRAVLDVLAEVVVQPVGKSGRAFNPERVQVNWR

SEQ ID NO: 347 - protein, 468 aa, synthetic construct
MSYTTPVRAAVYLRISEDRSGEQLGVARQREDCLKLCDQRKWVPVEYLDNDVSASTGKRRPAYEQMLADITAGKIAAVVAWDLDRLHRRPIELEAFMSLADEKRLALATVAGDVDLATPQGRLVARLKGSVAAHETEHKKARQRRAARQKAERGLPNWSKAFGYLPGPNGPEPDPTAPLVKQAYADILAGASLGDVCRQWNDAGAFTITGRPWTTTTLSKFLRKPRNAGLRAYKGARYGPVDRDAIVGKARWSPLVDEATFWAAQAVLDAPGRAPGRKSVRRHLLTGLAGCGKCGNHLAGSYRTDGRVVYVCKACHGVAILADNIEPILYHLVAERLAMPDAVNLLRREIHDAAEAETIRLELETLYGELDRLAVERAEGLLTARQVKISTDIVNAKITKLQARQLDQERLRVFDGIPLGTPQVAGMIAELSPDRFRAVLDVLAEVVVQPVGKSGRVFNPERVQVNWR

SEQ ID NO: 348 - protein, 452 aa, synthetic construct
MKAAIYIRVSTQEQVGNYSIQAQTEKLTALCRSKDWDVYDIFIDGGYSGSNMNRPALNEMLSKLHEIDAVVVYRLDRLSRSQRDTTTLIEEYFLKNNVEFVSLSETLDTSSPFGRAMIGILSVFAQLERETIRDRMVMGKIKRIEAGLPLTTAKGRTFGYDVIDTKLYINEEEAKQLQLIYDIFEEERSITLLQKRLKKLGLKVRTYSRYNNWLTNDLYCGYVSYKDKVHVKGIHEPIISEEQFYRVQEIFTRMGKSPNMNRDSASLLSNLVVCSKCGLGFVHRSKDTMSRGKKYHYRYYSCKTYKHTHELEKCGNKTWRADKLEELIINRVNNYSFASRNGDKEDELDSLYEKLKIEHAKKKRLFDLYINGSYEVSELDSMMNDIDGQINYYESQIEANEELKKNRKIQENLAELATVDFDSLEFREKQLYLKSLINKIYIDGEQVTIEWL

SEQ ID NO: 349 - protein, 469 aa, synthetic construct
MSYTTPVRAAVYLRISEDRSGEQLGAARQREDCLKLCVQRKWVPVEYLDNDVSASTGKRRPAYERMLADITAGKIAAVVAWDLDRLHRRPIELEAFMSLADEKRLALATVAGDVDLATPQGRLVARLKGSVAAHETEHKKARQRRAARQKAERGHPNWSEAFGYLPGPNGPEPDPRTAPLVKQAYADILAGASLGDVCRQWNGAGAFTITGRPWTTTTLSKFLRKPRNAGLRAYKGARYGPVDRDAIVGKAQWSPLVDEATFWAAQAVLDAPGRAPGRKSVRRHLLTGLAGCGKCGNHLAGSYRTDGRVVYVCKACHGVAILADNIEPILYHIVAERLATPDAVDLLRREIHDAAEAETIRLELETLRGELDRLAVERAEGLLTARQVKISTDIVNAKITKLQARQLDQERLRVFDGIPLGTPQVAGMIAELSPDRFRAVLDVLARVVVQPVGKSGRILNPERVQVNWR

SEQ ID NO: 350 - protein, 452 aa, synthetic construct
MKAAIYIRVSTREQVENYSIQAQTEKLTALCRSKGWGVYDIFIDGGYSGSNMNRPALNEMLSKLHEIDAVVVYRLDRLSRSQRDTITLIEEYFLKNNVEFVSLSETLDTSSPFGRAMIGILSVFAQLERETIRDRMVMGKIKRIEAGLPLTTAKGRTFGYDVIDTKLYINEEEAKQLQLIYDVFEEEQSITFLQKRMKKLGFKVRTYNRYSNWLTNDLYCGYVSYKDKVHVKGIHEPIISEEQFYRVQEIFTRMGKNPNMNRDSASLLNNLVVCSKCGLGFVHRRKDAMSRDKKYHYRYYSCKTYKHIHELEKCGNKIWRADKLEELIINRVNNYSLASRNVGKEDELDSLNEKLKIEHAKKKRLFDLYINGSYEVSELDSMMNDIDAQINYYESQIEANEELKKDKKIQGNLAHLATVDFDSLEFREKQLYLKSLINKIYIDGEQVTIEWL

SEQ ID NO: 351 - protein, 452 aa, synthetic construct
MKAAIYIRVSTREQVENYSIQAQTEKLTALCRSKDWDVYDIFIDGGYSGSNMNRPALNEMLSKLHELDAVVVYRLDRLSRSQRDTITLIEEYFLKNNVEFVSLSETLDTSSPFGRAMIGILSVFAQLERETIRDRMVMGKIKRIEAGLPLTTAKGRTFGYDVIDTKLYINEEEAKQLQLIYDIFEEVQSITFLQKRLKKLGFKVRTYSRYNNWLTNDLYCGYVSYKDKVHVKGIHEPIISEEQFYRVQEIFTRMGKNPNMNRDSASLLSNLVVCSKCGLGFVHRRKDTMSRGKKYHYRYYSCKTYKHTHELEKCGNKIWRADKLEELIINRVNNYSFASRNVDKAEELDSLNEKLRAEHAKKKRLFDLYVNGSYEVSELDSMMNDIDAQIDYYESLIEANEELRKNKKIQESLANLATVDYDSLEFREKQLYLKSLINKIYIDGEQVTIEWL

SEQ ID NO: 352 - protein, 485 aa, synthetic construct
MTKKVAIYTRVSTTNQAEEGFSIDEQIDRLTKYAEAMGWQVSDTYTDAGFSGAKLERPAMQRLINDIENKAFDTVLVYKLDRLSRSVRDTLHLVKDVFTKNKIDFISLNESIDTSSAMGSLFLTILGAINEFERENIKERMTMGKLGRAKSGKSMMWTKTAFGYYHNRKTGILEIVPLQATIVEQIFTDYLSGISLTKLRDKLNESGHIGKDIPWSYRTLRQTLDNPVYCGYIKFKGSLFEGMHKPIIPYETYLKVQKELEERQQQTYERNNNPRPFQAKYMLSGMARCGYCGAPLRIVLGHKRKDGSRTMKYHCANRFPRKTKGITVYNDNKKCDSGTYDLRNLENTVIDNLIGFQENNDSLLKIINGNNQPILDTSSFKEQISQIDKKIQKNSDLYLNDFITMDELKDRTDSLQAEKKLLKARISENKFNDSTDVFELVKTQLGSIPINELSYDNKKKIVNNLVSKVDVTADNVDIIFKFQLA

SEQ ID NO: 353 - protein, 469 aa, synthetic construct
MCYTTPVRAAVYLRISEDRSGEQLGVARQREDCLKLCDQRKWVPVEYLDNDVSASTGKRRPAYEQMLADITAGKIAAVVAWDLDRLHRRPIELEAFMSLADEKRLALATVAGDVDLATPQGRLVARLRGSVAAHETEHKKARQRRAARQKAERGYPNWSKAFGYLPGPNGPEPDPRTAPLVKQAYADILAGASLGDVCRRWNDAGAFTITGRPWTTTTLSKFLRKPRNAGLRAYKGARYGPVDRDAIVGKAQWGPLVDEATFWAAQAVLDAPSRAPGRKSVRRHLLTGLAGCGKCGNHLAGSYRTDGRVVYVCKACHGVAILADNIEPILYHIVAERLSMPDAVDLLRREIHDAAEAETIRLELETLYGELDRLAVERAEGLLTARQVKISTDIVNAKITELQARQLDQERLRVFDGIPLGTPQVAGMIAGLSPNRFRAVLGVLAEVVVQPVGKSGRIFSPERVQVNWR

SEQ ID NO: 354 - protein, 469 aa, synthetic construct
MCYTTPVRAAVYLRISEDRSGEQLGVARQREDCLKLCGQRKWEPVEYLDNDVSASTGKRRPAYEQMLADITAGKIAAVVAWDLDRLHRRPIELEAFMSLADEKRLALATVAGDVDLSTPQGRLVARLKGSVAAHETEHKRARQRRAARQKAERGHPNWSKAFGYLPGPNGPEPDPRTAPLVKRAYADILAGASLGDVCRRWNDAGAFTITGRPWTTTTLSKFLRKPRNAGLRAYKGARYGPVDRGAIVGKAQWSPLVDEATFWAAQAVLDAPGRAPGRKSVRRHLLTGLAGCGKCGNHLAGSYRTDGRVVYVCKACHGVAILADNIEPVLYRIVAERLAMPDAVGLLRREIHDAAEAEAVRLELETLHGELDRLAVERAEGLLTARQVKISTDIVNAKITKLQARQLDQERLRVLDGIPLGTPQVAGMIAELSPDRFRAVLDVLAEVVVQPVGKSGRIFNPERVQVNWR

SEQ ID NO: 355 - protein, 485 aa, synthetic construct
MTKKVAIYTRVSTTNQAEEGFSIDEQIDRLTKYAEAMGWQVSDTYTDAGFSGAKLERPAMQRLINDIENKAFDTVLVYKLDRLSRSVRDTLYLVKDVFTKNKIDFISLNECIDTSSATGSLFLTILSAINEFERENIKERMTMGRLGRAKSGKSMMWTKTAFGYYHNRKTGILEIVPLQATIVEQIFTDYLSGISLTKLRDKLNESGHIGKDIPWSYRTLRQTLDNPVYCGYIKFKGSLFEGMHKPIIPYETYLKVQKELEERQQQTYERNNNPRPFQAKYMLSGMARCGYCGAPLRIVLGHRRKDGSRTMKYHCANRFPRRTKGVTVYNDNKKCNSGTYDLSNLENTVIDNLIGFQENDDSLLKVINGNNQPILDTSSFRERINQINKKIQKNSDLYLNDFITMDELKDRTGSLQAEKKLLKAKISENKFNDSTDVFELVKTQLGSIPINELSYDNKKKIVNNLVSKVDVTADNVDIIFKFQLA

SEQ ID NO: 356 - protein, 452 aa, synthetic construct
MKAAIYIRVSTREQVENYSIQAQTEKLTALCRSKDWDVYDVFIDGGYSGSNMNRPALNEMLSKLHEIDAVVVYRLDRLSRSQRDTITLIEEYFLKNNVEFVSLSETLDTSSPFGRAMIGILSVFAQLERETIRDRMVMGKIKRIEAGLPLTTAKGRTFGYDVIDTKLHINEEEAKQLQLIYDIFEEEQSITFLQKRLKKLGFKVRTYNRYNNWLTNDLYCGYVSYKDKVHVKGIHEPIISEEQFYRVQEIFTRMGKNPNMNRDSASLLNNLVVCSKCGLGFVHRRKDIMSRGKKYHYRYYSCKTYKHIHELEKCGNKIWRADKLEELIINRVNNYSLAGRNVEKEDELDSLNEKLKVEHAKKKRLFDLYISGSYEVSELDSMMSDIDAQINYYESQIEANEELRRNKKIQENLAYLATVDFDSLEFREKQLYLKSLINKIYIDGEQVTIEWL

SEQ ID NO: 357 - protein, 452 aa, synthetic construct
MKAAIYIRVSTQEQVGNYSIQAQTEKLTALCRSKGWDVYDIFIDGGYSGSNMNRPALNEMLSKLHEIDAVVVYRLDRLSRSQRDTTTLIEEYFLKNNVEFVSLSETLDTSSPFGRAMIGILSVFAQLERETIRDRMVMGKIKRIEAGLPLTTAKGRTFGYDVIDTKLYINEEEAKQLQLIYDIFEEEQSITFLQKRLKKLGFKVRTYNRYNSWLTNDLYCGYVSYKDKVHVKGIHEPIISEEQFYRVQEIFARMGKNPNMNRDSASLLNSLVVCSKCGLGFVHRSKDTMSRGKKYHYRYYSCKTYKHTHELEKCGNKTWRADKLEELIINRVNNHSFVSRNVDKEDELASLNEKLKIERAKKKRLFDLYINGSYEVSELDSMMNDIDAQINYYESQIEANEELKKNKKIQESLADLATVDFDSLEFREKQLYLKSLINKIYIDGEQVTIEWL

SEQ ID NO: 358 - protein, 469 aa, synthetic construct
MSYTTPVRAAVYLRISEDRSGEQLGVARQREDCLKLCDQRKWVPVEYLDNDVSASTGKRRPAYEQMLADITAGKIAAVVAWDLDRLHRRPTELEAFMCLADEKRLALATVAGDVDLATPQGRLVARLKGSVAAHETEHKKARQRRAARQKAERGYPNWSRAFGYLPGPNGPEPDPRTAPFVKQAYADILVGASLGDVCRQWNDAGAFTITGRPWTTTTLSKFLRKPRNAGLRAYKGARYGPVDRDAIVGKAQWSPLVDEATFWAAQAVLDAPGRAPGRKSVRRHLLTGLAGCGKCGNHLAGSYRTDGKVVYVCKACHGVSILADNIEPILYHIVAERLAMPDAVDLLRREVHDAAEAETVRLELETLYGELDRLAVERAEGLLTARQVKISTDIVNAKITKLQACQRDQERLRVFDGIPLGTPQVAGTIAELSPDRFRAVLDVLAEVVVQPVGKSGRIFSPERVQVNWR

SEQ ID NO: 359 - protein, 485 aa, synthetic construct
MTKKVAIYTRVSTTNQAEEGFSIDEQIDRLTKYAEAMGWQVSDTYTDAGFSGAKLERPAMLRLINDIENKAFDTVLVYKLDRLSRSVRDTLYLVKDVFTKNKIDFISLSESIDTSSAMGSLFLAILSAINEFERENIKERMTMGKLGRAKSGKSMMWTKTAFGYYHNRKTGILEIVPLQATIVEQIFTDYLSGISLTKLRDKLNESGHIGKDIPWSYRTLRQTLDNPVYCGYIKFKGSLFEGMHKPIIPYETYLKVQKELEERQQQTYERNNNPRPFQAKYMLSGMARCGYCGAPLKIVLGHKRKDGSRTMKYHCANRFPRKTKGVTVYNDNKKCDSGAYDLRNLENTVIDTLIGFQENNDSLLKIINGNNQPILDTSSFKKQISQIDKKIQKNSDLYLNDFITMDELRVRTDSLQAEKKLLKAKISENKFNDSTDVFELVKTQLGSIPINELSYDNKKKIVNNLVSKVDVTADNVDIIFKFQLA

SEQ ID NO: 360 - protein, 485 aa, synthetic construct
MTKKVAIYTRVSTTNQAEEGFSIDEQIDRLTKYAEAMGWQVSDTYTDAGFSGAKLGRPAMQRLINDIENKAFDTVLVYKLDRLSRSVRDTLYLVKDVFTKNKIDFISLNESIDTSSAMGSLFLTILSAINEFERENIKERMTMGKLGRAKSGKSMMWAKTAFGYYHNRETGILEIVPLQATIVEQIFTDYLSGISLTKLRDKLNESGHIGKDIPWSYRTLRQTLDNPVYCGYIKFKDSLFEGMHKPIIPYETYLKVQKELEERQQQTYERNNNPRPFQAKYMLSGMARCGYCGAPLRVVLGHKRKDGSRTMKYHCANRFPRKTKGITVYNDNKKCDSGTYDLSDLENTVIDNLVGFQENDDSLLKIINGNNQPILDTSSFKKQISQIDKKIQKNSDLYLNDFISMDELKERTDSLQAEKKLLKAKISETKFNDSTDVFELVKTQLGSIPINELSYDNKKRIVNNLVSKVDVTADNVDIIFKFQLA

SEQ ID NO: 361 - protein, 485 aa, synthetic construct
MTKKVAIYTRVSTTNQAEEGFSIDEQIDRLTKYAEAMGWQVSDTYTDAGFSGAKLERPAMQRLINDIENKAFDTVLVYKLDRLSRSVRDTLYLVKDAFTKNKIDFISLSESIDTSSAMGSLFLTILSAINEFERENIKERMTMGKLGRAKSGKSMMWTKTAFGYYHNRKTGILEIVPLQATIVEQIFTDYLSGISLTKLRDKLNESGHIGKDIPWSYRTLRQTLDNPVYCGYIKFKGSLFEGMHKPIIPYETYLKVQRELEERQQQTYERNNNPRPFQAKYMLSGVVRCGYCGAPLRIVLGHKRKDGSRTMKYHCADRFPRKTKGITVYNDNKKCDSGTYDLSNLENTVIDNLIGFQENDDSLLKIINGNNQPILDISSFKKQISQIDKKIQKHSDLYLNDFITMDELKDRTDSLQAEKKLLKAKISETRFNDSTDVFELVKAQLGSIPINELSYDNKKKIVNNLVSKVDVTADNVDIIFKFQLA

SEQ ID NO: 362 - protein, 469 aa, synthetic construct
MSYTTPVRAAVYLRISEDRSGEQLGVARQREDCLKLCDQRKWQPVEYLDNDVSASTGKRRPAYEQMLADITAGRIAAVVAWDLDRLHRRPIELEAFMSLADEKRLALATVAGDVDLATPQGRLVARLKGSVAAHETEHKKARQRRAARQKAERGHPNWSKAFGYLPGPNGPEPDPRTAPLVKQAYADILAGASLGDVCRRWNDAGAFTITGRPWATTALSKFLRKPRNAGLRAYKGARYGPVDRDAIVGKAQWSPLVDEATFWAAQAVLDAPGRAPGRKSVRRHLLTGLACCGKCGNHLAGSYRTDGRVVYVCKACHGVAILADNIEPILYRIVAERLAMPDAVDLLRREIHDAAEAETIRLELETLYGELDRLAAERAEGLLTARQVKISTDIVNAKIAKLQARQLDQERLRVFDGIPLGTPQVAGMIAELSPDRFRAMLDVLAEVVVQPVGKGGRIFNPERVQVNWR

SEQ ID NO: 363 - protein, 452 aa, synthetic construct
MKAAIYIRVSTREQVENYSIQAQTEKLTALCRSKDWDVYDIFIDGGYSGSNMNRPALNEMLSKLHEIDAVVVYRLDRLSRSQRDTITLIEEYFLKNNVEFVSLSETLDTSSPFGRAMIGILSVFAQLERETIRDRMVMGKIKRIEAGLPLTTAKGRTFGYDVIDTKLYINEEEAKQLQLIYDIFEEEQSITLLQKRLKKLGFEVRTYNRYNSWLTNDLYCGYVSYKDKVHVKGIHEPIISEEQFYRVQEIFTRMGKNPNMNRDSASLLNNLVVCSKCGLGFVHRRKDTTSRGKKYHYRYYSCKTYKHIHELEKCGNKIWRADKLEELVINRVNNYSFASRNVDKEDELDSLYEKLKIEHAKKERLFDLYINGNYEVSELDSMMSDIDAQISYYESQIEANEELKRNKKIQESLADLASVDYDSLEFREKQLYLKSLINKIYIDGEQVTIEWL

SEQ ID NO: 364 - protein, 469 aa, synthetic construct
MCYTTPVRAAVYLRISEDRSGEQLGVARQREDCLKLCDQRKWVPVEYLDNDVSASTGKRRPAYEQMLADITAGKIAAVVAWDLDRLHRRPIELEAFMSLADEKRLALATVAGDVDLATPQGRLVARLKGSVAAHETEHKKARQRRAARQKAERGHPNWSKAFGYLPGPNGPEPDPRTAPLVKQAYADILAGASLGDVCGQWNDAGAFTTTGRPWTTTTLSKFLRKPRNAGLRAYKGARYGPVDRDAIVGKAQWSPLVDETTFWAAQAVLDAPGRAPGRKSVRRHLLTGLAGCGKCGNHLAGSHRADGRVVYVCKACHGVAILADNIEPILYHTVAERLTMPDAVDLLRHEIHDAAEAETIRLELETLYGELDRLAVERAEGLLTARQVKICTDIVNAKITKLRARQLDQERLRVFDGIPLGTPQVAGMIAELSPDRFRAVLDVLAEVVVQPVGKGGRIFNPERVQVNWR

SEQ ID NO: 365 - protein, 469 aa, synthetic construct
MSYTTPVRAAVYLRISEDRSGEQLGVARQREDCLDLCGQRKWVPVEYLDNDVSASAGKRRPAYEQMLADITAGKITAVVAWDLDRLHRRPIELEAFMSLADEKRLALATVAGDVDLATPQGRLVARLKGSVAAHETEHKKARQRRAARQKAERGLPNWSKAFGYLPGPNGPEPDPRTGPLVKQAYADILAGASLGDVCRQWNDAGAFTITGRPWTTTALSKFLRKPRNAGLRAYKGARYGPVDREAIVGKAQWGPLVDEATFWAAQAVLDAPGRAPGRKSVRRHLLTGLAGCGKCGNHLAGSYRTDGRVVYVCKACHGVAILADNIEPILYHIVAERLAMPDAVDLLRRETHDAAEAETIRLELETLYGELDRLAVERAEGLLTARQVKISSDIVNAKITKLQARQLDQERLRVFDGIPLGTPQVAGMIAELSPDRFRAVLDVLAEVVVQPVGKGGRIFNLERVQVNWR

SEQ ID NO: 366 - protein, 452 aa, synthetic construct
MKAAIYIRVSTQEQVGNYSIQAQTEKLTALCRSKDWDVYDIFIDGGYSGSNMNRPALNEMLSKLHEIDAVVVYRLDRLSRSQRDTTTLIEEYFLKNNVEFVSLSETLDTSSPFGRAMIGILSVFAQLERETIRDRMVMGKIKRIEAGLPLTTAKGRTFGYDVIDTKLYINEEEAKQLQLIYDIFEEEQSITSLQKRLKKLGFKVRTYNRYSNWLTNDLYCGYVSYKDKVHVKGIHEPIISEEQFYRVQKIFTRMGKNPNMNRDSASLLNNLVVCSKCGLGFVHRSKDTMSRGKKYHYRYYSCKTYKHTHELEKCGNKTWRADKLEELIINRVNNYCLASRNVDREDELDSLNEKLQIEHAKKRRLFDLYINGSYEVSELDSMMNDIDAQINYYESQIEANEGLRKNKKIQENLADLATVDFDSLEFREKQQYLKSLINKIYIDGEQVTIEWL

SEQ ID NO: 367 - protein, 469 aa, synthetic construct
MSYTTLVRAAVYLRISEDRSGEQLGVARQREDCLKLCDQRKWVPVEYLDNDVSASTGKRRPAYEQMLADITAGKIAAVVAWDLDRLHRRPIELEAFMSLADEKRLALATVAGDVDLATPQGRLVARLKGSVAAHETEHKKARQRRAARQKAERGLPNWSKAFGYLPGPNGPEPDPRTAPLVKQAYADILAGAGLGEVCRQWNDAGAFTITGRPWTTTTLSKFLRKPRNAGLRAYKGARYGPVDRDAIVGKAQWSPLVDEATFWAAQAVLDAPGRAPGRKSVRRHLLTGLAGCGKCGNHLAGSYRTDGRVVYVCKACHGVAILADNIEPILYHIVAERLAMPDAVDLLRREIHDAAEAEPIRLELETLYGELDRLAVERAEGLLTARQVKISTDIVNAKITKLQARQLDQERLRVLDGIPLGTPQVAGVIAELSPDRFRAVLDVLAEVVVQPVGRSGRIFNPERVQVNWR

SEQ ID NO: 368 - protein, 485 aa, synthetic construct
MTKKVAIYSRVSTINQAEEGFSIDEQIDRLTKYAEAMGWQVSNTYTDAGFSGAKLERPAMQRLINDIENKAFDTVLVYKLDRLSRSVRDTLYLVKDVFTKNKIDFISLNESIDTSSAMGSLFLTILSAINEFERENIKERMTMGKLGRAKSGKSMMWTKTAFGYYHNRKTGILEIVPQQATIVEQIFADYLSGISLTKLRDKLNESGHIGKDIPWSYRTLRQTLDNPVYCGYIKFKGSLFEGMHKPIIPYETYLKVQKELEERQQQIYERNNNPRPFQAKYMLSGMARCGYCGAPLKIVLGHKRKDGSRTMKYHCANRFPRKTKGVTVYNDNKKCDSGTYDLSILENAVIDNLIGFQGDDDSLLKIINGNNQPILDTSSFKKQISQIDKKIQKNSDLYLNDFITMDELRDRTDSLQAERKLLKAKISENKFKDSTDVFELVKTQLGSIPISELSYDNKKKIVNNLVSKVDVTADNVDIIFKFQLS

SEQ ID NO: 369 - protein, 452 aa, synthetic construct
MKAAIYIRVSTQEQVGNYSIQAQTEKLTALCRSKDWDVYDIFIDGGYSGSNMNRPALNEMLSKLHEIDAVVVYRLDRLSRSQRDTTTLIEEYFLKNNVEFVSLSETLDTSSPFGRAMIGILSVFAQLERETIRDRMVMGKIKRIEAGLPLTTAKGRTFGYDVIDTKLYINEDEAKQLQLIYDIFEEEQSITFLQKRLKKLGFKVRTYNRYNSWLTNDLYCGYVSYKDKVHVKGIHEPIISEEQFYRVQEIFTRMGKNPNMNRDSASLLSNLVVCSKCGLGFVHRSKDTMSRGKKYHYRYYSCKTYKHTHELEKCGNKTWRADKLEELIISRVNNYSFASRSVDKEDELDSLNEKLKIEHAKKKRLFDLYINGSYEVSELDSMMNDINAQINYYESQIEANEELKENKKIQENLADLATVDFDSLEFREKQLYLKSLINKIYIDGEQVTIEWL

SEQ ID NO: 370 - protein, 485 aa, synthetic construct
MTKKVAIYTRVSTTNQAEEGFSIDEQIDRLTKYAEAMGWQVSDTYTDAGFSGAKLERPAMQRLINDIESKAFDTVLVYKLDRLSRSVRDTLYLVKDVFTKNKIDFISLNESIDTSSAMGNLFLTMLSAINEFERENIKERMTMGKLGRAKSGKSMMWTKTAFGYYHNRKTGILEIVPLQATIVEQIFTDYLSGISLTKLRDKLNESGHIGKDIPWSYRTLRQTLDNPVYCGYIKFKDGLFEGMHKPIIPYETYLKVQKELEERQQQTYERNNNPRPFQAKYMLSGMARCGYCGAPLRIVLGRKRKDGSRTMKYHCANRFPRKTKGVTVYNDNKKCDSGTYDLSNLENAVIDILIGFQENNDSLLKIINGNNQPILDTSSFKKQISQIGKKIQKNSDLYLNDFITMDELKARTDSLQAEKKLLKAKISENKFNDSTDVFELVKTQLGSIPINELSYDNKKKIVNNLVSKVDVTADNVDIIFKFQLA

SEQ ID NO: 371 - protein, 469 aa, synthetic construct
MNYTTPVRAAVYLRISEDRSGEQLGVARQREDCLKLCSQRKWVPVEYLDNDVSASTGKRRPAYEQMLADITAGKIAAVVAWDLDRLHRRPIELEAFMSLADEKRLALATVAGDVDLATPQGRLVARLKGSVAAHETEHKKARQRRAARQKAERGYPNWSRAFGYLPGPNGPEPDPRTAPLVKQAYADILAGASIGDVCRQWNDAGAFTITGRPWTTTTLSKFLRKPRNAGLRAYKGARYGPVDREAIVGKAQWSPLVDEATFWAAQAVLDAPGRAPGRKSVRRHLLTGLAGCGKCGNHLAGSYRTDGRVVYVCKACHGVAILADNIEPILYHIVAERLAVPNAVDLLRREIHDAAEAEAIRLELETLYGELDRLAVERGEGLLTARQVKISTDIVNAKITRLQARQLDQERLRVFDGIPLGTPQVAGMIAELSPDRFRAVLDVLAEVVVQPVGKGGRIFNPERVQVNWR

SEQ ID NO: 372 - protein, 485 aa, synthetic construct
MTKKVAIYTRVSTTNQAEEGFSIDEQVDRLTKYAEAMGWQVSDTYTDAGSSGAKLERPAMQRLINDIENKAFDTVLVYKLDRLSRSVRDTLYLVKDVFTKNKIDFISLSESIDTSSAMGSLFLTILSAINEFERENIKERMTMGKLGRAKSGKSMMWTKTAFGYYHNRKTGILEIVPLQATIVEQIFTDYLSGISLTKLRDKLNESGHIGKDIPWSYRTLRQTLDNPVYCGYIKFKGSLFEGMHKPIITYETYLKVQKELEERQQQTYERNNNPRPFQAKYMLSGMARCGYCGAPLRIVLGRKRKDGSRTMKYHCANRFPRKTKGITVYNDNKKCDSDTYDLSNLENTVIDNLIGFQEDNDSLLKIINGNNQLTLDTSSIRKQISRIDKKIQKNSDLYLNDFITMDELKDRTDSLQAEKKLLKAKISENKFNDSTDVFELVRTQLGSIPINELSYDNKKKIVNNLVSKVDVTADSVDIIFKFQLA

SEQ ID NO: 373 - protein, 485 aa, synthetic construct
MTKKVAIYTRVSTTNQAEEGFSIDEQIDRLTKYAEAMGWQVSDTYTDAGLSGAKLERPAMQRLINDIENKAFDTVLVYKLDRLSRSVRDTLYLVKDVFTKNKIDFISLSESIDTSSAMGSLFLTILSAINEFERENIKERMTMGKLGRAKSGKSMMWTKTAFGYYHNRKTGILEIVPLQATIVEQIFTDYLSGISLTKLRDKLNESGHIGKDIPWSYRTLRQTLDNPVYCGYIKFKDNLFKGMHKPIIPYETYLKVQKELEERQQQTYERNNNPRPFQAKYMLSGMARCGYCGAPLQVVLGHKRKDGSRTMKYHCANRFPRKTKGVTVYNDNKKCYSGTYDLSNLENTVIDNLIGLQENNDSLLEIINGNNQPILDTSSFKEQISQIDKKIQKNSDLYLNDFITMDELKDRTDSLQAEKKLLKAKISGNKFNDSTDVFELVKTQLGSIPINELSYDDKKKIVNNLVSKVDVTADNVDIIFKFQLA

SEQ ID NO: 374 - protein, 469 aa, synthetic construct
MSYTTPVRAAVYLRISEDRSGEQLGVARQREDCLKLCDQRKWVPVEYLDNDVSASTGRRRPAYEQMLADITAGKIAAVVAWDLDRLHRRPVELEAFMSLADEKRLALATVAGDVDLATPQGRLVARLKGSVAAHETEHKRARQRRAARQKAERGHPNWSKAFGYLPGPNGPEPDPRTAPLVKQAYADILAGASLGDVCRQWNDAGAFTITGRPWTTTTLSKFLRKPRNAGLRAYKGARYGPVDRDAIVGKAQWSPLVDEATFWAAQAVLDAPGRAPGRKSVRRHLLTGLAGCGKCGNHLAGSYRTDGRVVYVCKACHGVAILADNIEPILYHIVAERLATPGAVDLLRREIHDAAEAEAIRLGLETLYDELDRLAVERAEGLLTARQVKISTDIVNAKIAKLQARQQDQERLRVLDGIPLGTPQVSGMIAELSPDRFRAVLDVLAEVVVQPVGKSGRIFNPGRVQVNWR

SEQ ID NO: 375 - protein, 485 aa, synthetic construct
MTKRVAIYTRVSTTNQAEEGFSIDEQIDRLTKYAEAMGWQVSDTYTDAGFSGAKLERPAMRRLINDIENKAFDTVLVYKLDRLSRSVRDTLYLVKDVFTKNKIDFISLSESIDTSSAMGSLFLTILSAINEFERENIKERMTMGKLGRAKSGKSMMWTKTAFGYYHNRKTGILEIVPLQATIVEQIFTDYLSGISLTKLRDKLNESGHIGKDIPWSYRTLRQTLDNPVYCGYIKFKDSLFEGMHKPIIPYETYLKVQKELEERQQQTYERNNNPRPFQAKYMLSGMARCGYCGAPLRIVLGHKRKDGSRTMKYHCANRFPRKTKGITVYNDNKKCDSGTYDLSDLENTVIDNLIGFQENNDSLLKIINGNNQPILDTSSLKKQISRIDKKIQKNSDLYLNDFITMDELKARTDSLQAEKKLLKAKISENKFNDSTDVFELVKTQLGSIPICELSYDDKKKIVNNLVSKVDVTADNVDIIFKFQLA

SEQ ID NO: 376 - protein, 469 aa, synthetic construct
MCYTTPVHAAVYLRISEDRSGEQLGVARQREDCLKLCGQRKWVPVEYLDNDVSASTGKRRPAYEQMLADITAGKIAAVVAWDLDRLHRRPIELEAFMSLADEKRLALATVAGDVDLATPQGRLVARLKGSVAAHETEHKKARQRRAARQKAERGYPNWSKAFGYLPGPNGPEPDPRTAPLVKQAYVDILAGASLGDVCRQWNAAGAFTITGRPWATTTLSKFLRKPRNAGLRAYKGARYGPVDRDAIVGKAQWSPLVDEATFWAAQAVLDAPGRAPGRKSVRRHLLTGLAGCGKCGNHLAGSYRTDGRVVYVCKACHGVAILADNIEPILYHIVAERLAMPDAVDLLRREIHDAAEAETIRLELGTLYDELDRLAVERAEGLLTARQVKISTDIVNAKIIKLQARQQDQERLRVLDGIPLGTPQVAGAIAELSPDRFRAVLDVLAEVVVQPVGRGGRILNPERVRVNWR

SEQ ID NO: 377 - protein, 469 aa, synthetic construct; identical to SEQ ID NO: 197

SEQ ID NO: 378 - protein, 452 aa, synthetic construct
MKAAIYIRVSTREQVENYSIQAQTEKLTALCRSRDWDVYDIFIDGGYSGSNMNRPALSEMLSKLHEIDAVVVYRLDRLSRSQRDTITLIEEYFLKNNVEFVSLSETLDTSSPFGRAMIGILSVFAQLERETIRDRMVMGKIKRVEAGLPLTTAKGRTFGYDVIDTKLYINEEEARQLRLIYDIFEEEQSITFLQKRLKKLGFKVHTYNRYNNWLTNDLYCGYVSYKDKVHVKGIHEPIISEEQFYRVQEIFTRMGKNPNMNRDSASLLSNLVMCSKCGLGFVHRRKDTMSRGKKYHYRYYSCKTYKHTHELEKCGNKIWRADKLEELIIDRVNNYSFASRNADKEDELDSLNEKLKVEHAKKKRLFDLYINGGYEVSELDSMMSDIDAQINYYESQIEANEELKKNKKIQENLANLASVDYDSLEFREKQLYLKSLINKIYIDGEQVTIEWL

SEQ ID NO: 379 - protein, 452 aa, synthetic construct
MKAAIYIRVSTREQVENYSIQAQTEKLTALCRSKDWDVYDIFIDGGYSGSNMNRPALNEMLSKLHEIDAVVVYRLDRLSRSQRDTITLIEEYFLRNNVEFVSLSETLDTSSPFGRAMIGILSVFAQLERETIRDRMVMGKIKRIEAGLPLTTAKGRTFGYDVIDTKLYINEEEAKQLQLIYDIFEEEQSITFLQRRLKKLGFKVRTYNRYNNWLTNDLYCGYVSYKDKVHVKGIHEPIISEEQFHRVQEIFARMGKNPNMNRDSASLLNNLVVCSKCGLGFVHRRKDATSRDKKYHYRYYSCKTYKHIHELEKCGNKIWRADKLEELIINRVNDYSLASRNVDKEDELDSLNEKLKIEHAKKKRLFDLYINGSYEVSELDSMMNDIDAQINYYESQIEANEELKKNKKIQENLAHLATVDFDSLEFREKQLYLKSLINKIYIDGEQVTIEWL

SEQ ID NO: 380 - protein, 469 aa, synthetic construct
MCYTTPVRAAVYLRISEDRSGEQLGVARQREDCLKLCDQRKWVPVEYLDNDVSASTGKRRPAYEQMLADITAGKIAAVVAWDLDRLHRRPIELEAFMSLADEKRLALATVAGDVDLATPQGRLVARLKGSVAAHETEHKKARQRRAARQKAERGHPNWSKAFGYLPGPNGPEPDPRTASLVKQAYADILAGASLGDVCRQWNDAGAFTITGRPWTTTTLSKFLRKPRNAGLRAYKGARYGPVDRDAIVGKALWSPLVDEATFWAAQAVLDAPGRAPGRKSVRRHLLTGLAGCGKCGNHLAGSYRTDGRVVYVCKACHGVAILADNIEPILYHIVAERLAMPGAVDLLRREIHDAAEAETIRLELETLYGELDCLAVERAEGLLTARQVKISTDIVNAKITKLQARQLDQERLRVFGGIPLGTPQVAGMIAELSPDRFRAVLDVLAEVVVQPVGKSGRIFNPERVQVNWR

SEQ ID NO: 381 - protein, 485 aa, synthetic construct
MTKKVAIYTRVSTTNQAEEGFSIDEQIDRLTKYAEAMGWQVGDTYTDAGFSGAKLERPAMQRLINDIESKAFDTVLVYKLDRLSRSVRDTLYLVKDVFTKNKIDFISLNESINTSSAMGSLFLTILSAINEFERENIKERMTMGKLGRAKSGKSMMWTKTAFGYYHNRETGILEIVPLQATIVEQIFTDYLGGISLTKLRDKLNESGHIGKDIPWSYRTLRQTLDNPVYCGYIKFKGSLFEGMHKPIIPYETYLKVQKELEERQQRTYERNNNPRPFQAKYMLSGMARCGYCGAPLRIVLGHKRKDGSRTMKYHCANRFPRKTKGVTVYNDNKKCDSGTYDLSNLENTVIDNLVGLQENNDSLLKIINGNNRPILDTSSFKEQISQIDKKIQKNSDLYLNDFITMDELKDRTDSLQAEKKLLKAKISENKFNDSTDVFELVKTQLGSIPINELSYENRKKIVNNLVSKVDVTADNVDIIFKFQLA

SEQ ID NO: 382 - protein, 452 aa, synthetic construct
MKAAIYIRVSTREQVENYSIQAQTEKLTALCRSKDWDVYDIFIDGGYSGSNMSRPALNEMLSKLHEIDAVVVYRLDRLSRSQRDTITLIEEYFLKNNVEFVSLSETLDTSSPFGRAMIGILSVFAQLERETIRDRMVMGKIKRIEAGLPLTTAKGRTFGYDVIDTKLYINEEEAKQLQLIYDIFEEEQSITFLQKRLKKLGFKVRTYNRYNNWLTNDLYCGYVSYKDKVHVKGIHEPIISEEQFYRVQEIFARMGKNPNMNRDSASLLNNLVVCSKCGLGFVHRRKDAMSRDKKYHYRYYSCKTYKHIHELEKCGNKIWRADKLEELVINRVNSYSLASRNVDKEDELDSLNEKLRTEHAKKKRLFDLYINGRYEVSELDSMMNDIDAQINYYESQIEANEELRKNKKIQENLAYLATVDFDSLEFREKQLYLKSLINKIYIDGEQVTIEWL

SEQ ID NO: 383 - protein, 485 aa, synthetic construct
MTKKVAIYTRVSTTNQAEEGFSIDEQIDRLTKYAEAMGWQVSDTYTDAGFSGAKLGRPAMQRLINDIENKAFDTVLVYKLDRLSRSVRDTLYLVKDVFTKNKIDFISLNESIDTSSAMGSLFLTILSAINEFERENIKERMTMGKLGRAKSGKSMMWTKTAFGYYHNRKTGILEIVPLQATIVEQIFTDYLSGISLTKLRDKLNESGHIGKDIPWSYRTLRQTLDNPVYCGYIKFKGSLFEGLHKPIIPYETYLKVQKELEERQQQAYERNNNPRPFQAKYMLSGMARCGYCGAPLRIVLGHKRKDGSRTMKYHCANRFPRKTKGITVYNDNKKCDSGTYDLNSLENTVIDSLIGFQENNDSLLKIINGNNQPTLDTSSFKEQISQIDKKIQKNSDLYLNDFITMDELKDRTDSLQVEKKLLNAKISENKFNDSTDVFELVKTQLGSIPINELSYDNKKKIVNNLVSKVDVTADNVDIIFKFQLA

SEQ ID NO: 384 - protein, 469 aa, synthetic construct
MSYTTPVRAAVYLRISEDRSGEQLGVARQREDCLKLCDQRKWVPVEYLDNDVSASTGKRRPAYEQMLADITAGKIAAVVAWDLDRLHRRPVELEVFMSLADEKRLALATVAGDVDLATPQGRLVARLKGSVAAHETEHKKARQRRAARQKAERGHPNWSKAFGYLPGPNGPEPDPRTAPLVKQAYADILAGASLGDVCRQWNDAGASTITGRPWTTTTLSKFLRKPRNAGLRAYKGARYGPVDRDAIVGKAQWSPLVDEATFWAAQAVLDAPGRAPGRKSVRRHLLTGLAGCGKCGYHLAGSYRTDGRVVYVCKACHGVAILADNIEPILYHIVAERLAMPDAVDLLRREIHDAAEAETIRLELETLYGELDRLAVERAEGLLTARQVKIGTDIVNAKITKLQARQLDQERLRVFDGIPLGTPQAADMIAELSPNRFRAVLDVLAEVVVQPVGKSGRIFNPERVQVNWR

SEQ ID NO: 385 - protein, 452 aa, synthetic construct
MKAAIYIRVSTQEQVENYSIQAQTEKLTALCRSKDWDVYDIFIDGGYSGSNMNRPALNEMLSKLHEIDAVVVYRLDRLSRSQRDTTTLIEEYFLKNNVEFVSLSETLDTSSPFGRAMIGILSVFAQLERETIRDRMVMGKIKRIEAGLPLTTAKGRTFGYDVIDTKLYINEEEAKQLQLIYDIFEEEQSITSLQKRLKKLGFKVRTYNRYNKWLTNDLYCGYVSYKDKVHVKGIHEPIISEEQFYRVQEIFTRMGKNLNMNRDSASLLNNLVVCSKCGLSFVHRSKDTMSRGKKYHYRYYSCKTYKHTHELEKCGNKTWRADKLEELIINRVNNYSFASRNVGREDELDSLHEKLKIEHAKKKRLFDLYINGSYEVNELDSMMSDIDAQINYYESQIKANEELKRNKKIRENLADLATVDFDSLEFREKQLYLKGLINKIYIDGEQVTIEWL

SEQ ID NO: 386 - protein, 452 aa, synthetic construct
MKAAIYIRVSTREQVENYSIQAQTEKLTALCRSKDWDVYDIFIDGGYSGSNMNRPALNEMLSKLHEIDAVVVYRLDRLSRSQRDTITLIEEYFLKNNVEFVSLSETLDTSSPFGRAMIGILSVFAQLERETIRDRMVMGKIKRIEAGLPLTTAKGRTFGYDVIDTKLYVNEEEAKQLQLIYDIFEEEQSITFLQKRLKKLGFKVHTYNRYSNWLTNDLYCGYVSYKDKVHVKGIHEPIISEEQFYRVQEIFTRMGKSPNMNRDSASLLNNLVVCSKCGLGFVHRRKDAMSRDKKYHYRYYSCKTYKHIHELEKCGNKVWRADKLEELIINRVNNYSFASRNADIEDGLGSLNEKLKIEHAKKKRLFDLYINGRYKVGELDSMMNDIDAQINYYESQIEAKEELKRNKKIQENLADLATVDFDSLEFREKQLYLKSLINKIYIDGEQVTIEWL

SEQ ID NO: 387 - protein, 485 aa, synthetic construct
MTKKVAIYTRVSTTNQAEEGFSIDEQIDRLTKYAEAMGWQVSDTYTDAGFSGAKLERPAMQRLINDIENKAFDTVLVYKLDRLSRSVRDTLYLVKDVFTKNKIDFISLNESINTSSAMGSLFLTILSAINEFERENIKERMTMGKLGRAKSGKSMMWTKTAFGYYHNRKTGILEIAPLQAAIVEQIFTDYLSGISLTKLRDKLNESGHIGKEIPWSYRTLRQTLDNPVYCGYIKFKDSLFEGMHKPIIPYETYLKVQKELEERQQQTYERNNNPRPFQAKYMLSGMARCGYCGAPLRIVLGHKRKDGSRTMKYHCANRFPRKTKGVTVYNDNKKCDSGTYDLSDLENTVIDNLIGFQENNDSLLKIINGNNQPILDTSSFRKRISQIDQKIQKNSDLYLNDFITMDELKDRTDSLQAKKKLLKAKISENKFNDSADVFELVKTQLGSIPINELSYVNKKRIVNNLVSKVDVTADNVDIIFKFQLA

SEQ ID NO: 388 - protein, 485 aa, synthetic construct
MTKKVAIYTRVSTTNQAEEGFSIDEQIDRLTKYAEAMGWQVSDTYTDAGSSGAKLERPAMQRLINDIENKAFDTVLVYKLDRLSRSVRDTLYLVKDVFTKNKIDFISLNESIDTSSAMGSLFLTILSAINEFERENIKERMTMGKLGRAKSGKSMMWTKTAFGYYHNRKTGILEIVPLQAAIVEQIFTDYLSGISLTKLRDKLNESGHIGKDIPWSYRTLRQTLDNPVYCGYIKFKDSLFEGMHKPIIPYETYLKVQKELEERQQQTYERNNNPRPFQAKYMLSGMARCGYCGAPLRIVLGHKRKDGSRTMKYHCANRFPRKTKGVTVYNDNKKCDSGTYDLSDLENTVIDNLIGFQENNDSLLKIINGNNQPILDTSSFKKQISQIDKKIQKNSDLYLNDFITMDELRDRTDSLQAEKKLLKAKISENKSNDSTDVFELVKTQLGSIPINELSYDNKKKIVNNLVSKVDVTADNVDIIFKFQLA

SEQ ID NO: 389 - protein, 485 aa, synthetic construct
MTKKVAIYTRVSTTNQAEEGFSIDEQVDRLTKYAEAMGWQVSDTYTDAGFSGAKLERPAMQRLINGIENKAFDTVLVYKLDRLSRSVRDTLYLVKDVFTKNKIDFISLNESIDTSSAMGSLFLTILSAINEFERENIKERMTMGKLGRAKSGKSMMWTKTAFGYYHNRKTGILEIVPLQATIVEQIFTDYLSGISLTKLRDKLNESGHIGKDIPWSYRTLRQTLDNPVYCGYIKFKGSLFEGMHKPIIPYETYLEVQKELEERQQQTYERNNNPRPFQAKYMLSGMARCGYCGAPLRIVLGHKRKDGSRAMKYHCANRFPRKTKGVTVYNDNKKCDSGTYDLSDLENTVIDNLIGFQENNDSLLKIINGINQPILDTSSFKEQISQIDKKIQKISDLYLNDFITMDELKDRTDSLQAEKELLKAKISENRFNDSTDVFELVKTQLGSIPINELSYDNKKKIVNNLVSKVDVTADNVDIIFKFQLA

SEQ ID NO: 390 - protein, 485 aa, synthetic construct
MTKKVAIYTRVSTTNQAEEGFSIDEQIDRLTKYAEAMGWQVSDTYTDAGLSGAKLERPAMQRLINDIENKAFDTVLVYKLDRLSRSVRDTLYLVKDVFTKNKIDFISLNESIDTSSAMGSLFLTILSAINEFERENIKERMTMGKLGRAKSGKSMMWTKTAFGYYHNRKTGILEIVPLQATIVEQIFTDYLSGISLTKLRDKLNESGHIGKDIPWSYRTLRQTLDNPVYCGYIKFKDSLFEGMHKPIIPYETYLKVQKELEERQQQAYERNNNPRPFQAKYMLSGMARCGYCGAPLKIVLGHKRKDGSRTTKYHCANRFPRKTKGVTVYNDNKKCDSGTYDLSSLENTVIDNLIGFQENNDCLLKIINGNNQPILDTSSIKKQISQIDKKIQKNSDLYLNDFITMDELKDRTDSLQAEKKLLKAKISENKFNDSTDVFELVKTQLGSTPISELSYDDKKKIVNSLVSKVDVTADNVDIIFKFQLA

SEQ ID NO: 391 - protein, 452 aa, synthetic construct
MKAAIYIRVSTQEQVENYSIQAQTEKLTALCRSKDWDVYDIFVDGGYSGSNTNRPALNEMLSKLHEIDAVVVYRLDRLSRSQRDTITLIEEYFLKNNVEFVSLSETLDTSSPFGRAMIGILSVFAQLERETIRDRMVMGKIKRIEAGLPLTTAKGRTFGYDVIDTKLYVNEEEAKQLQLIYDIFEEERSITFLQKRLKKLGFKVRSYNRYNNWLTNDLYCGYVSYKDKVHVKGIHEPIISEEQFYRVQEIFTRMGKNPNMNRDSASLLNNLVVCSKCGLGFVHRRKDTMSRGKKYHYRYYSCKTYKHTHELEKCGNKIWRADKLEELIINRVDNYSFASRNVVRAVELDSLNEKLKVEHAKRKRLFDLYINGSYNVSELDSMMNDIDAQINYYESQIEANEELKKNKKIQENLADLATVDFDSLEFREKQLYLRSLINKIYIDGEQVTIEWL

SEQ ID NO: 392 - protein, 485 aa, synthetic construct
MTKKVAIYTRVSTTNQAEEGFSIDEQIDRLTKYAEAMGWQVSDTYTDAGYSGAKLERPAMQRLINDIETKAFDTVLVYKLDRLSRSVRDTLYLVKDVFTKNKIDFISLNESIDTSSAMGSLFLTILSAINEFERENIKERMTMGKLGRAKSGKSMMWTKTAFGYYHNRKTGILEIVPLQATIVEQIFTDYLSGISLTKLRDKLNESGHIGKDIPWSYRTLRQTLDNPVYCGYIKFKDSLFEGMHKPIIPYETYLKVQKELEERQQQTYERNNNPRPFQAKYMLSGVARCGYCGAPLRIVLGHKRKDGSRTMRYHCANRFPRKTKGVTVYNDNKKCDSGTYDLRNLENTVIDNLIGFQENNDGLLKIINGNNQPILDTSSFKKQISQIDKKIQKNSDLYLNDFITMDELKDRTNSLQAEKRLLKAKISENKFNDSTDVFELVKTQLGSIPINELSYDNKKKIVNNLVSKVDVTADNVDIIFKFQLA

SEQ ID NO: 393 - protein, 469 aa, synthetic construct
MSYTTPVRAAVYLRISEDRSGEQLGVARQREDCLKLCGQRKWVPVEYLDNDVSASTGKRRPAYEQMLADIIAGKIAAVVAWDLDRLHRRPIELEAFMSLADEKRLALATVAGDVDLATPQGRLVARLKGSVAAHETEHKKARQRRAARQKAERGHPNWSKAFGYLPGPSGPEPDPRTAPLVKQAYADILAGASLGDVCRQWNDAGAFTITGRPWTTTTLSKFLRKPRNAGLRAYKGARYGPVDRDAIVGKARWSPLVDEATFWAAQAVLDAPGRAPGRKSVRRHLLTGLAGCGKCGNHLAGSYRTDGRVVYVCKACHGVSILADNIVPILYHIVAERLAMPDAADLLRREIHDVAEAETIRLELETLYGELDRLAVERAEGLLTARQVKISTDIVSAKITKLQARQLDQERLRVFDGIPLGTPQVAGTIAELSPDRFRAVLDVLAEVVVQPVGKSGRIFNPERVQVNWR

SEQ ID NO: 394 - protein, 469 aa, synthetic construct
MSYTTPVRAAVYLRISEDRSGEQLGVARQREDCLKLCGQRKWVPVEYLDNDVSASTGKRRPAYEQMLADITAGKIAAVVAWDLDRLHRRPVELEAFMSLADEKRLALATVAGDVDLATPQGRLVARLKGSVAAHETEHKKARQRRAARQKAERGLPNWSKAFGYLPGPNGPEPDPRTAPLVKQAYADILAGASLGDVCRQWNDAGAFTITGRPWTTTALSKFLRKPRNAGLRAYKGARYGPVDRDAIVGKAQWSPLVDEATFWAAQAVLDAPGRAPSRKSVRRHLLTGLAGCGKCGNHLAGSYRTDGQIVYVCKACHGVSILAVNIEPILYHIVAERLAMPDAVDLLRREIHDAAEAETIRLELETLYGELDRLAVERAEGLLTARQVKISTDIVNAKITKLQAHQLDQERLRVFDGIPLGTPQAAGMIAELSPDRFRAVLDVLAEVVVQPVGKSGRIFNPERVQVNWR

SEQ ID NO: 395 - protein, 485 aa, synthetic construct
MTKKVAIYTRVSTTNQAEEGFSIDEQIDRLTRYAEAMGWQVSDTYTDAGFSGAKLERPAMQRLINDIENKAFDTVLVHKLDRLSRSVRDTLYLVKDVFTKNKIDFISLNESIDTSSAMGSLFLTILSAINEFERENIKERMTMGKLGRAKSGKSMMWTKTAFGYYHNRKTGILEIVPLQATIVEQIFTDYLSGISLTKLRDKLNESGHIGKDIPWSHRTLRQTLDNPVYCGYIKFKGSLFEGMHKPIIPYETYLKVQKELEERQQQTYERNNNPRPFQAKYMLSGMARCGYCGAPLKIVLGHKRKDGSRTMKYHCANRFPRKTKGVTVYNDNKKCDSGTYDLSNLENTVIDNLIGFQENSDSLLKIINGNNQPILNTSSLKKQISQIDKKIQKNSDLYLNDFITMDELKDRTDSLLAEKKLLKAKISENKFSDSTAVFELVKTQLGSIPINELSYDNKKKIVNNLVSKVDVTADNVDIIFKFQLA

SEQ ID NO: 396 - protein, 469 aa, synthetic construct
MSYTTPVRAAVYLRISEDRSGEQLGVARQREDCLKLCDQRKWVPVEYLDNDVSASTGKRRPAYEQMLADITAGKIAAVVAWDLDRLHRRPIELEAFMSLADEKRLALATVAGDVDLATPQGRLVARLKGCVAAHETEHKKARQCRAARQKAERGLPNWSKAFGYLPSPNGPEPDPRTAPLVKQAYADILAGASLGDVCRQWNDAGAFTITGRPWTTTTLSKFLRKPRNAGLRAYKGARYGPVDRDAIVGKAQWSPLVDEATFWAAQAVLDAPGRAPGRKSVRRHLLTGLAGCGKCGNHLAGSYRTDGRVVYVCKACHGVAILADNVEPILYHIVAERLAMPDAVDLLHRETHDAAEAETIRLELETLYGELDRLAVERAEGLLTARQVKISTDIVNAKIAKLQARRLGQERLRVFDGIPLGTPQVAGMIAELSPDRFRAVLDVLVEVVVQPVGKSGGIFDPERVQVNWR

SEQ ID NO: 397 - protein, 452 aa, synthetic construct
MKAAIYIRVSTREQVENYSIQAQTEKLTALCRSKGWDVYDIFIDGGYSGSNMNRPALNEMLSKLHEIDAVVVYRLDRLSRSQRDTITLIEEYFLKNNVEFVSLSETLDTSSPFGRAMIGILSVFAQLERETIRDRMVMGKIKRIEAGLPLTTAKGRTFGYDVIDTKLYINEEEAKQLQLIYDIFEEEQSITFLQKRLKQLGFRVRTYSCYNNWLTNDLYCGYVSYKDKVHVKGIHEPIISEEQFYRVQEIFARMGKNPNMNRDSASLLNNLVVCSKCGLGFVHRRKDAMSRDKKYHYRYYSCKTYKHIHELEKCGNKIWRADELEELIIDRVNNYSLASRNTGKEDELDNLNEKLKIEHAKKKRLFNLYINGSYEVSELDSMMNDIDAQINYYEGQIEANKELKKNKKIQENLADLATVDFDSLEFREKQLFLKSLINKIYVDGEQVTIEWL

SEQ ID NO: 398 - protein, 469 aa, synthetic construct
MSYTTPVRAAVYLRISEDRSGEQLGVARQREDCLKLCGQRKWVPVEYLDNDVSASTGKRRPAYEQMLADITAGKIAAVVAWDLDRLHRRPIELEAFMSLADERRLALATVAGDVDLATPQGRLVARLKGSVAAHETEHKKARQRRAARQKAERGYPNWSKAFGYLPGPNGPEPDPRTAPLVRQAYADILAGASLGDVCRQWNAAGAVTITGRPWTTTTLSKFLRKPRNAGLRAYKGARYGPVDRDAIVGKAQWSPLVDEAAFWAAQAVLDAPGRAPGRKSVRRHLLTGLAGCGKCGNHLAGSYRTDGRVVYVCKACHGVAILADNIEPILYHIVAERLAMPDAVDLLRREIHDAAEAETIRLELETLYGELDRLAVERAEGLLTARQVKISTDIVNAKITKLQARQLDQERLRVFDGIPLGTPQVAGMIAELSPDRFRAVLDVLAEVIVQPVGKSGRIFNPERVQVNWR

SEQ ID NO: 399 - protein, 485 aa, synthetic construct
MTKKVAIYTRVSTTNQAEEGFSIDEQIDRLTKYAEAMGWQVSDTYTDAGISGAKLERPAMQRLINDIENKAFDTVLVYKLDRLSRSVRDTLYLVKDVFTKNKIDFISLNESINTSSAMGSLFLTILSAINEFERENIKERMTMGKLGRAKSGKSMMWTKTAFGYYHNRKTGILEIVPLQATIVEQIFTDYLSGISLTKLRDKLNESGHIGKDIPWSYRTLRQTLDNPVYCGYIKFKDSLFEGMHKPIIPYETYLKVQKELEERQRQTYERNNNPRPFQAKYMLSGMARCGYCGAPLRVVLGHKRKDGSRTMKYHCANRFPRKTKGITVYNDNKKCDSGTYDLRNLESTVIDILIGFQENNDSLLRIINGNNQPILDTSSFRKQISQIDKKIQKNSDLYLNNFITMDELKDRTDSLQAEKKLLEAKISENKFNVGTDVFELVKTQLGSIPINELSYDNKKKIVNNLVSKVDVTADNVDIIFKFQLA

SEQ ID NO: 400 - protein, 452 aa, synthetic construct
MKAAIYIRVSTREQVENYSIQAQTEKLTALCRSKDWDVYDIFIDGGYSGSNMNRPALNEMLSKLHEIDAVVVYRLDRLSRSQRDTITLIEEYFLRSNVEFVSLSETLDTSSPFGRAMIGILSVFAQLERETIRDRMVMGKIKRVEAGLPLTTAKGRTFGYDVIDTKLYINEEEAKQLQLIYDIFEEEQSITFLQKRLKKLGFKVRTYSCYSNWLTNDLYCGYVSYKDKVHVKGIHEPIISEEQFYRVQEIFTRMGKNPNMNRDSASLLNNLVVCSKCGLGFVHRRKDAMSRSKKYHYRYYSCKTYKHIHELEKCGNKIWRADKLEELIINRVNNYSVASRNVDKEDELDSLDEKLKIEHAKKKRLFDLYINGSYEVGELDSMMNDIDAQINYYESRIEANEELKKNKKIQENLADLATVDFDSLGFREKQLYLKSLISRIYIDGEQVTIEWL

SEQ ID NO: 401 - protein, 485 aa, synthetic construct
MTKKVAIYTRVSTTNQAEEGFSIDEQIDRLTKYAEAMGWQVSGTYTDAGFSGAKLERPAMRRLINDIENKAFDTVLVYKLDRLSRSVRDTLYLVKDVFTKNEIDFISLNESIDTSSAMGSLFLTILSAINEFERENIKERMTMGKLGRAKSGKSMMWTKTAFGYHHNRKTGILEIVPLQATIVEQIFTDYLSGISLTKLRDKLNESGHIGKDIPWSYRTLRQTLDNPVYCGYIKFKDSLFEGMHKPIIPYETYLKVQKELEERQQQTYERNNNPRPFQAKYMLSGMARCGYCGAPLKIVLGRKRKDGSRTMKYHCANRFPRKTKGVTVYNGNKKCDSGTYDLSDLENTVIDNLIGFQENNDSLLKIINGNNQPILDTNSFKKQISQIDKKIQKNSDLYLNDFITMDELKDRTDSLQAEKKLLKAKISENKFNDSADVFELVKTQLGSIPINELSYDDKKKIVNNLVSKVDVTADNADIIFKFQLA

SEQ ID NO: 402 - protein, 485 aa, synthetic construct
MTKKVAIYTRVSTTNQAEEGFSIDEQTDRLTRYAEAMGWQVSDTYTDAGFSGAKLERPAMQRLINDIENRAFDTVLVYKLDRLSRSVRDTLYLVKDVFTKNKVDFISLNECIDTSSAMGSLFLTILSAINEFERENIKERMTMGKLGRAKSGKSMMWTKTAFGYYHNRKTGILEIVPLQATIVEQIFTDYLSGISLTKLRDKLNESGHIGKDIPWSYRTLRQTLDNPVYCGYIKFKDSLFEGMHKPIIPYETYLRVQKELEERQQQTYERNNNPRPFQAKYMLSGMARCGYCGAPLRIVLGHKRKDGSRTMKYHCANRFPRKTKGVTVYNDNKKCDSGTYDLSNLENTVIDNLIGLQENNDSPLKIINGNNQPILDTSSFKKQISQIDKKIQKNSDLYLNDFITMDELKDRTDSLQAEKKLLKAKISENKFNDSTDVFELVKTQLGSIPINELSYDNKKKIVNNLVSKVDVTADNVDIIFKFQLA

SEQ ID NO: 403 - protein, 485 aa, synthetic construct
MTKKVAIYTRVSTTNQAEEGFSIDEQIDRLTKYAEAMGWQVSDTYTDAGVSGAKLERPAMQRLINDIENKAFDTVLVYKLDRLSRSVRDTLHLVKDVFTKNKIDFISLSESIDTSSAMGSLFLTILSAINEFERENIKERMTMGKLGRARSGKSMMWTKTAFGYYHNRKTGILEIVPLQATIVEQIFTDYLSGISLTKLRDKLNESGHIGKDIPWSYRTLRQTLDNPVYCGYIKFKDSLFEGMHKPIIPYETYLKVQKELEERQQQTYERNNNPRPFQAKYMLSGMARCGYCGAPLRIVLGHKRKDGSRTMKYHCANRFPRKTKGVTVYNDNKKCDSGTYDLSDLENTVIDNLIGFQENDDSLLKVINGNNQPILDTSSFKEQISQIDKKIQKNSDLYLNDFITMDELKDRTDSLRAEKKLLKAKISENKFNDSTNVFELVKTQLGSIPINELSYDHKKKIVNNLVSKVDVTADNVDIIFKFQLA

SEQ ID NO: 404 - protein, 452 aa, synthetic construct
MKAAIYIRVSTQEQVENYSIQAQTERLTALCRSKDWDVYDIFIDGGYSGSNMNRPALNEMLSKLHEIDAVVVYRLDRLSRSQRDTTTLIEEYFLKNSVEFVSLSETLDTSSPFGRAMIGILSVFAQLERETIRDRMVMGKIKRIEAGLPLTTAKGRTFGYDVIDTKLYINEEEAKQLQLIYDIFEEEQSITSLQKRLKKLGFKVRAYNRYNSWLTNDLYCGYVSYKDKVHVKGIHEPIISEEQFYRVQEIFTRMGKNPNMNRDSASLLNNLVVCSKCGLGFVHRSKDTMCRGKKYHYRYYSCKTYKHAHELEKCGNKTWRADKLEELIINRANNYSFASRNVDKEDELDSLNEKLKIEHAKKKRLFDLYINGSYEVSELDSMMSDIDAQISYYESQIEASEELKKSKKIQENLADLATVDFDSLEFREKQLYLKSLINKIYIDGEQVTIEWL

SEQ ID NO: 405 - protein, 485 aa, synthetic construct
MTKKVAIYTRVSTTNQAEEGFSIDEQIDRLTKYAEAMGWQVGGTYTDAGFSGAKLERPAMQRLINDIENRAFDTVLVYKLDRLSRSVRDTLYLVKDVFTKNKIDFISLNESIDTSSAMGSLFLTILSAINEFERENIKERMTMGKLGRAKSGKSMMWTKTAFGYYHNRKTGILEIVPLQAAIVEQIFTDYLSGISLTKLRDKLNESGHIGKDIPWSYRTLRQTLGNPVYCGYIKFKGSLFEGMHKPIIPYETYLKVQKELEERQQQTYERNNNPRPFQAKYMLSGMARCGYCGAPLRIVLGHKRKDGSRTMKYHCANRFPRKTKGVTVYNDNKRCDSGTYDLSNLENTVIDNLIGFQENNDSLLKIINGNNQSILDTRSFEKQISQIDKKIQKNSDLYLGDFITMDELKDRTDSLQAEKKLLKAKISENKFNDSTDVFELVKTQLGSIPINELSYDDKKKIVNNLVSKVDVTADNVDIIFKFQLA

SEQ ID NO: 406 - protein, 470 aa, synthetic construct
MSYTTPVRAAVYLRISEDRRGEQLGVARQREDCLELCDQHKWVPVEYLDNDVSASTGKRRPAYEQMLADITAGKIAAVVAWDLDRLHRRPIELEAFMSLADEKRLALATVAGDVDLATPQGRLVARLKGSVAAHETEHKKVRQRRAARQKAERGYPNWSKAFGYLPGPNGPEPDPRTAPLVKQAYADILAGASLGDVCRQWNDAGAFTITGRPWTSTTLSKFLRKPRNAGLRAYKGARYGPVDRDAIVGKAQWSPLVDEATFWAAQAVLDAPGRAPGRKSVRRHLLTGLAGCGKCGHHLAGSYRTDGRVVYVCKACYGVAILADNIEPILYHIVAERLAMPDAVDLLRREVHDAAEAETIRLELETLYGELDRLAVERAEGLLTARQVKISTDIVNAKITKLQAHQQDQERLRVLDGIPLGTPQVAGVIAELSPNRFRAVLDVLAEVVVQPVGKSGRIFNPERVQVNWRQ

SEQ ID NO: 407 - protein, 469 aa, synthetic construct
MSYTTPVRAAVYLRISEDRSGEQLGVARQREDCLKLCGQRKWVPVEYLDNDVSASTGKRRPAYEQMLADITAGKIAAVVAWDLDRLHRRPVELEAFMSLADEKRLALATVAGDVDLATPQGRLVARLKGCVAAHETEHKKARQRRAARQKAERGLPNWSKAFGYLPGPNGPEPDPRTAPLVKQAYADILAGASLGDVCRQWNDAGAFTITGRPWTTTALSKFLRKPRNAGLRAYKGARYGPVDRDAIVGKAQWSPLVDEATFWAAQAVLDAPGRAPGRKSVRRHLLTGLAGCGKCGNHLAGSCRTDGRVVYVCKACHGVSILAVNIEPILYYIVAERLAMPDAVDLLRCGVHDAAEAETIRQELESLYGELDRLAVERAEGLLTARQVKVGTDIVNAKITKLQARQQDQERLRVLDGIPLGTPQVAGMIAELSPDRFRAVLDVLAEVVVQPVGKSGRIFNPERVQVNWR

SEQ ID NO: 408 - protein, 485 aa, synthetic construct
MTKKVAIYTRVSTINQAEEGFSIDEQIDRLTKYAEAMGWQVSDTYTDAGLSGAKLERPAMQRLINDIENKAFDTVLVYKLDRLSRSVRDTLYLVKDVFTKNKIDFISLNESIDTSSAMGSLFLTILSAINEFEREDIKERMTMGKLGRAKSGKSMMWTKTAFGYYHNRKTGILEIAPLQATIVEQIFTDYLSGISLTKLRDKLNESGHIGKDIPWSYRTLRQTLDNPVYCGYIKFKGSLFEGMHKPIIPYETYLKVQKELEERQQQAYERNNNPRPFQAKYMLSGMARCGYCGAPLRIVLGHKRKDGSRTMKYHCANRFPRKTKGITVYNDNKKCDSGTYDLSNLENTVIDSLIGFQEDNDSLLKIINGNNQPILDTSSFKEQISQIDKEIQKNSDLYLNDFITMDELKDRTDSLQAEKKLLKAKISENKFNDSTDVFELVKTQLGSIPINELSYDNKKKIVNDLVSKVDVTADNVDIIFKFQLA

SEQ ID NO: 409 - protein, 469 aa, synthetic construct
MSYTTPVRAAVYLRISEDRSGEQLGVARQREDCLELCGQRKWEPVEYLDNDVSASTGKRRPAYEQMLADITAGKIAAVVTWDLDRLHRRPIELEAFMSLADEKRLALATVAGDVDLATPQGRLVARLKGCVAAHETEHKKARQRRAARQKAERGHPNWSKAFGYLPGPNGPEPDPRIAPLVKQAYADILAGASLGDVCRQWNDAGAFTITGRPWTTTTLSKFLRKPRNAGLRAYKGARYGPVDRDAIVGKAQWSPLVDEATFWAAQAVLDAPGRAPGRKSVRRHLLTGLAGCGKCGNHLAGSYRTDGRVVYVCKACYGVVILADNIEPILYHVVAERLAMPDAVDLLRCEIHDTAEAETVRLELETLYGELDRLAVERAEGLLTARQVKISTDIVNAKITKLQARQLDQERLRVFDGIPLGTPQVAGMIAELSPDRFRAVLDVLAEVVVQPVGKRGRSFSPERVQVNWR

SEQ ID NO: 410 - protein, 469 aa, synthetic construct
MSYTTPVRAAVYLRISEDRSGEQLGVARQREDCLKLCDQHKWVPVEYLDNDVSASTGKRRPAYEQMLADITAGKIAAVVAWDLDRLHRRPMELEAFMSLADEKRLALATVAGDVDLATPQGRLVARLKGSVAAHETEHKKARQRRAARQKAERGHPNWSKAFGYLPGPNGPEPDPRTAPLVKQAYADILAGASLGDVCRQWNDAGAFTITGRPWATTTLSKFLRKPRNAGLRAYKGARYGPVDRDAIVGKAQWSPLVDEATFWAAQAVLDAPGRAPGRKSVRRHLLTGLAGCGKCGNHLAGSYRTDGRVVYVCKACHGVAILADNIEPILYHIVAERLAMPDAVDLLRREIHDVAEAETIRLELETLYGELDRLAVERAEGLLTARQVKISTDIVSAKITKLQACQLDQERLRVFDGIPLGTPQVAGMIAELSPNRFRAVLDVLAEVVVQPVGKSGRIFNPERVQVNWR

SEQ ID NO: 411 - protein, 452 aa, synthetic construct
MKAAIYIRVSTREQVENYSIQAQTEKLTALCRSKDWDVYDIFIDGGYSGSNMNRPALNEMLSKLHEIDAVVVYRLDRLSRSQRDTITLIEEYFLKNNVEFVSLSETLDTSSPFGRAMIGILSVFAQLERETIRDRMVMGKIKRIEAGLPLTTAKGRTFGYDVIDTRLYINEEEAKQLQLIYDIFEEEQSITFLQKRLKKLGFKVRTYNRYNNWLTNDLYCGYVSYKDKVHVKGIHEPIISEEQFYRVQEIFTRMGKNPNMNRDNASLLSNLVVCSKCGLGFVHRRKDAKSRDKKYHYRYYSCKTYKHIHELEKCGNKIWRADKLEELVINRVNNYSLASRNVDKEDELDSLNEKLKIEHAKKRRLFDLYINGSYEVSELDSMMNDIDAQINYYESQIEANEELKKNKEIQENLAYLATVDFDSLEFREKQLYLKSLINKIYIDGEQVTIEWL

SEQ ID NO: 412 - protein, 485 aa, synthetic construct
MTRKVAIYTRVSTTNQAEEGFSIDEQIDRLTKYAEAMGWQVSDTYTDAGFSGAKLERPAMQRLINDIENKAFDTVLVYKLDRLSRSARDTLYLVKDVFTKNKIDFISLSESIDTSSAMGSLFLTILSAINEFERENIKERMTMGKLGRAKSGKSMMWTRTAFGYHHNRTTGILEIVPLQATIVEQIFTDYLSGISLTKLRDKLNESGHIGKDIPWSYRTLRQTLDNPVYCGYIKFKDSLFEGMHKPIIPYETYLRVQKELEERQRQTYERNNNPRPFQAKYMLSGMARCGYCGAPLRVVLGHKRKDGSRTMKYHCANRFPRKTKGITVYNDNKKCDSGTYDLSDLENTVIDNLTGFQEDNDSLLKIINGNDQPILDTSSFKDQISQIDKKIQRNSDLYLNDFITMDELKDRTDSLQAEKKLLEAKISENKFNDSTDVFELVKTQLGSTPISELSYDNKKKIVNNLVSKVEVTADNVDIIFKFQLA

SEQ ID NO: 413 - protein, 469 aa, synthetic construct
MSYTTPVRAAVYLRISEDRSGEQLGVARQREDCLKLCGQRKWVPVEYLDNDVSASTGKRRPAYEQMLADITAGKIAAVVAWDLDRLHRRPVELEAFMSLADEKRLALATVAGDVDLATPQGRLVARLKGCVAAHETEHKKARQRRAARQKAERGLPNWSKAFGYLPGPNGPGPDPRTAPLVKQAYADILAGASLGDVCRQWNDAGAFTITGRPWTTTTLSKFLRKPRNAGLRAYKGARYGPVDRDAIVGKAQWSPLVDEATFWAAQAVLDAPGRAPGRKSVRRHLLTGLAGCGKCGNHLAGSYRTDGRVVYVCKACHGVAILADNIEPMLYHIVAERLAMPDAVDLLRREIHDAAEAETIRLELETLYGELDRLAVERAEGLLTARQVKISTDIVNAKITELQARQLDQERLRVLDGIPLGTPQVAGTIAELSPDRFRAVLDVLAEVVVQPAGKSGRIFNPERVQVNWR

SEQ ID NO: 414 - protein, 485 aa, synthetic construct
MTKKVAIYTRVSTTNQAEEGFSIDEQIDRLTKYAEAMGWQVSDTYTDAGLSGARLERPAMQRLINDIENKAFDTVLVYKLDRLSRSVRDTLYLVKDVFTKNKIDFISLNESIDTSSAMGSLFLTILSAINEFERENIKERMTMGKLGRAKSGKSMMWTKTAFGYYHNRKTGILEIVPLQATIVEQIFTDYLSGISLTKLRDKLNEGGHIGKDVPWSYRTLRQTLDNPVYCGYIKFKGSLFEGMHKPIIPYETYLKVQKELEERQQQTCERNNNPRPFQAKYMLSGMARCGYCGAPLRIVLGHRRKDGSRTMKYHCANRFPRKTKGVTVYNDNKKCDSGTYDLSNLENTVIDNLIGFQENNDSLLKIINGNNQPILDTSSFKEQISQIDKKIQKNSDLYLNDFITMDELKGRTDSLQAEKKLLKAKISENKFNDSTDVFELVKTQLGSTPINELSYDDKKKIVNNLVGKVDVTADNVDIIFKFQLA

SEQ ID NO: 415 - protein, 485 aa, synthetic construct
MTKKVAIYTRVSTTNQAEEGFSIDEQIDRLTKYAEAMGWQVSDTYTDAGFSGAKLGRPAMQRLINDIENEAFDTVLVYKLDRLSRSVRDTLYLVKDVFTKNKIDFISLNESIDTSSAMGSLFLTILSAINEFERENIKERMTMGKLGRAKSGKSMMWTKTAFGYYHNRKTGILEIVPLQATIVEQIFTDYLSGVSLTKLRDKLNESGHIGKDIPWSYRTLRQTLDNPVYCGYIKFKDSLFEGMHKPIIPYETYLKVQKELEERQQQTYERNNNPRPFQAKYMLSGVARCGYCGAPLRIVLGHKRKDGSRTMKYHCANRFPRKTKGVTVYNDNKKCDSGTYDLSNLENTVIDNLVGLQENNDSLLKIINGNNQPILDTSSFKEQISQIDKKIQKNSDLYLNDFITMDELKNRTDSLQAEKKLLKAKISENKFNDSTDVFELVKTQLGSIPINELSYDNKKKIVNNLVSKVDVTADNVDIIFKFQLA

SEQ ID NO: 416 - protein, 469 aa, synthetic construct
MSYTTPVRAAVYLRISEDRSGEQLGVARQREDCLKLCDQHKWVPVEYLDNDVSASTGKRRPAYEQMLADITAGKIAAVVAWDLDRLHRRPIELEAFMSLADEKRLALATVAGDIDLATPQGRLVARLKGSVAAHETEHKKARQRRAARQKAERGYPNWSKAFGYLPGPNGPEPDPRTAPLVKQAYADILAGASLGDVCRQWNDAGAFTITGRPWTTTTLSKFLRKPRNAGLRAYKGARYGPVDRDAIVGKAQWSPLVDEATFWAAQAVLDAPGRAPGRKSVRRHLLTGLAGCGKCGNHLAGSYRTDGQIVYVCKACHGVSILADNIEPILYHIVAERLAMPNAVDLLRREIHDAAEAETVRLELETLYGELDRLAVERAEGLLTARQVKISTDIVNAKITKLQARLLDQERLRVFDGIPLGTPQVAGAITELSPDRFRAVLDVLAEVVVQPVGKSGRIFNTERVQVNWR

SEQ ID NO: 417 - protein, 469 aa, synthetic construct
MSYTTPVHAAVYLRISEDRSGEQLGVARQREDCLKLCGQRKWEPVEYLDNDVSASTGKRRPAYEQMLADITAGKIAAVVAWDLDRLHRRPVELEAFMSLADEKRLALATVAGDVDLATPQGRLVARLKGCVAAHETEHKKARQRRAARQKAERGLPNWSKAFGYLPGPNGPEPDPRTAPLVKQAYADILAGASLGDVCRQWNDAGASTITGGLWTTTTLSKFLRKPRNAGLRAYKGARYGPVDRDAIVGKAQWSPLVDEAIFWAAQAVLDAPGRAPGRKSVRRHLLTGLAGCGKCGNHLAGSYRTDGQVVYVCKACHGVSILAVNIEPILYHIVAERLAMPDAVDLLRREIHDAAEAETIRLELETLHGELDRLAVERAEGLLTARQVKISTDIVNAKITKLRARQLDQERLRVFDGIPLGTPQVAGMIAELSPDRFRAVLDVLAEVVVQPVGKGGRIFNPERVQVNWR

SEQ ID NO: 418 - protein, 485 aa, synthetic construct
MTKKVAIYTRVSTTNQAEEGFSIDEQIDRLTKYAEAMGWQVSDTYTDAGLSGAKLERPAMQRLINDVENKAFDTVLVYKLDRLSRNVRDTLYLVKDVFTKNKIDFISLNESIDTSSAMGSLFLTILSAINEFERENIKERMTMGKLGRAKSGKSMMWTKTAFGYYHNRKTGILEIVPLQATIVEQIFTDYLSGISLTKLRDKLNGSGHIGKDIPWSYRTLRQTLDNPVYCGYIKFKDSLFEGMHKPIIPYETYLKVQKELEKRQQQTYERNNNPRPFQAKYMLSGMARCGYCGAPLRIVLGHKRKDGSRTMKYHCANRFPRKTKGVTVYNDNKKCDSGTYDLSNLENTVIDNLIGFLENNDGLLKIINGNNQPIPDTSSLKEQISQIDKKIQKNSDLYLNDFITMDELKDRTDSLQAEKKLLEVKISENKFNDSTDVFELVKTQLGSIPISELSYDDKKKIVNNLVSKVNVTADNVDIIFKFQLA

SEQ ID NO: 419 - protein, 469 aa, synthetic construct
MCYTTPVRAAVYLRISEDRSGEQLGVARQREDCLKLCDQRKWVPVEYLDNDVSASTGRRRPAYEQMLADITAGKIAAVVAWDLDRLHRRPIELEAFMSLADEKRLALATVAGDVDLATPQGRLVARLKGSVAAHETEHKKARQRRAARQKAERGYPNWSKAFGYLPGPNGPEPDPRTAPLVEQAYADILAGASLGEVCRQWNDAGAFTITGRPWTTTTLSKFLRKPRNAGLRAYKGARYGPVDRDAIVSKAQWSPLVDEATFWAAQAVLDAPGRAPGRKSVRRHLLTGLAGCGKCGNHLAGSYRTDGRVVYVCKACHGVAILADNIEPILYHIVAERLAMPDAVDLLRREIHDAAEAETIRLELETLYGELDRLAVERAEGLLTARQVKISTDIVNAKITKLQARQLDQERLRVLDGIPLGTPQVAGMIAELSPDRFRAVLDVLAEVVVRPVGKGGRVFNPERVQVNWR

SEQ ID NO: 420 - protein, 485 aa, synthetic construct
MTKKVAIYTRVSTTNQAEEGFSIDEQIDRLTKYAEAMGWQVSDTYTDAGFSGAKLERPAMQRLINDIENKAFDTVLVYKLDRLSRSVRDTLYLVKDVFTKNKIDFISLNESIDTSSAMGSLFLTILSAINEFERENIKERMTMGKLGRAKSGKSMMWTKTAFGYYHNRKTGILEIVPLQATIVEQIFTDYLSGISLTKLRDKLNESGHIGKDIPWSYRTLRQTLDNPVYCGYIKFKDSLFEGMHKPIIPYETYLKVQKELEERQQQTYERNNNPRPFQAKYMLSGVARCGYCGAPLRIVLGHKRKDGSRTMKYHCANRFPRKTKGVTVYNDNKKCDSGTYDLSNLENTVIGNLIGLQENNDSLLKIINGNNQPILDTSSFKKQISQIDKKIQKNSDLYLNDFITMDELKDRTDSLQAEKELLEAKISESKLNDSTDVFELVKTQLGSVPINELSYDNKKKIVDNLVSKVDVTADNVDIIFKFQLA

SEQ ID NO: 421 - protein, 469 aa, synthetic construct
MSYTTPVRAAVYLRISEDRSGEQLGVARQREDCLKLCDQRKWVPVEYLDNDVSASTGKRRPAYEQMLADITAGKIAAVVAWDLDRLHRRPIELEAFMSLADEKRLALATVAGDVDLATPQGRLVARLKGSVAAHETEHKKARQRRAARQKAERGHPNWSRAFGYLPGPNGPEPDPRTAPLVKQAYADILAGASLGDVCRQWNDAGAFTITGRPWTTTALSKFLRKPRNAGLRAYKGARYGPVDRDAIVGKAQWSPLVDEATFWAAQAVLDAPGRAPGRKSVRRHLLTGLAGCGKCGNHLAGSYRTDGKVVYVCKACHGVAILADNIEPILYHIVAERLAMPDAVDLLRREIHDAAEAETIRLELETLYGELDCLAVERAEGLLTARQVKISTDIVSAKITKLQARQLDQERLRVLDGIPLGTPQVAGMIAELSPDRFRAVLDVLAEVVVQPVGKSGRIFNPERVQVNWR

SEQ ID NO: 422 - protein, 452 aa, synthetic construct
MKAAIYIRVSTQEQVENYSIQAQTEKLTALCRSKDWDVYDIFIDGGYSGSNMNRPALNEMLSKLHEIDAVVVYRLDRLSRSQRDTTTLIEEYFLKNNVEFVSLSETLDTSSPFGRAMIGILSVFAQLERETIRDRMVMGKIKRIEAGLPLTTAKGRTFGYDVIDTKLYINEEEAKQLRLIYDIFEEEQSITSLQKRLKKLGFKVRTYNRYNNWLTNDLYCGYVSYKDKVHVKGIHEPIISEEQFYRVQEIFTRMGKGPNMNRDSASLLNNLVVCSKCGLGFVHRSKDTMCRGKKYHYRYYSCKTYKHTHELEKCGNKTWRADKLEELIINRVNNYSFASRNVDKEDELDSLNEKLRTEHAKKKRLFDLYINGSYEVGELDSMMNDIDAQINYYESQIEANEELKRNKKIQENLADLATVDFGSLEFREKRLYLKSLINKIYIDGEQVTIEWL

SEQ ID NO: 423 - protein, 469 aa, synthetic construct
MSYTTPVRAAVYLRVSEDRSGEQLGVARQREDCLKLCDQRKWVPVEYLDNDVSASTGKRRPAYEQMLADITAGKITAVVAWDLDRLHRRPIELEAFMSLADEKRLSLATVAGDVDLATPQGRLVARLKGSVAAHETEHKKARQRRAARQKAERGLPNWSKAFGYLPGPNGPEPDPRTAPLVKQAYADILAGASLGDVCRQWNDAGAFTITGRPWTTTALSKFLRKPRNAGLRAYKGARYGPVDRDAIVGKAQWSPLVDEATFWAAQAVLDAPGRAPGRKSVRRHLLTGLAGCGKCGNHLAGSYRTDGRVVYVCKACHGVAILADNIEPILYHIVAERLAMPDAVDLLRREVHDAAEAEIIRLELETLYGELDRLAVERAEGLLTARQVKISTDIVNAKITKLQARQLDQERLRVFAGIPLGTPQVAGIIAELSPDRFRAVLDVLAEVVVRPVGKRGRIFNPERVQVYWR

SEQ ID NO: 424 - protein, 485 aa, synthetic construct
MTKKVAIYTRVSTTNQAEEGFSIDEQIDRLTKYAEAMGWQVSDTYTDAGFSGAKLERPAMQRLINDIENKAFDTVLVYKLDRLSRSVRDTLYLVKDVFTKNKIDFISLNESIDTSSAMGSLFLTILSAVNEFERENIKERMTTGKLGRAKSGKSMMWTKTAFGYYHNRKTGILEIVPLQATIVEQIFTDYLSGISLTKLRDKLNESGHIGKDIPWSYRTLRQTLDNPVYCGYIKFKDSLFEGMHKPIIPYETYLEVQKELEERQQQTYERNNNPRPFQAKYMLSGMVRCGYCGAPLKIVLGHKRKDGSRTMKYHCANRFPRKTKGVTVYNDNKKCDSGTYDLSNLENTVIDNLIGLQENNDSLLEIISGNNQPILDTSSFKEQISQIDKKIQKNSDLYLNDFITMDELKDRTDSLQAEKKLLKAKISENKFNDRTDMFELVKTQLGSIPINELSYDNKKKIVNNLVSKVDVTADNVDIIFKFQLA

SEQ ID NO: 425 - protein, 452 aa, synthetic construct
MKAAIYIRVSTREQVENYSIQAQTEKLTALCRSKDWDVYDIFVDGGYSGSNMNRPALNEMLSKLHEIDAVVVYRLDRLSRSQRDTITLIEEYFLKNNVEFVSLSETLDTSSPFGRAMIGILSVFAQLERETIRDRMVMGKIKRIEAGLPLTTAKGRTFGYDVIDTKLYINEEEAKQLQLIYDIFEEEQSITFLQKRLKKLGFKVRTYNRYNNWLTNDLYCGYVSYKDKVHVKGIHEPIISEEQFYRVQEIFTRTGKNPNMNRDSASLLNNLVVCSKCGLGFVHRRKDAMSRDKKYHYRYYSCKTYKHIHELEKCGNKIWRADKLEELIINRVNNYSLASRNVDKDDELDGLNEKLKIEHAKKKRLFELYINGSYEVSELDSMMNDIDAQINYYESQIEANEELKKNEKIQENLAHLATVDFDSLEFREKQLYLKSLINKIYIDGEQVTIEWL

SEQ ID NO: 426 - protein, 469 aa, synthetic construct
MSYTTPVRAAVYLRISEDRSGEQLGVARQREDCLKLCGQRKWVPVEYLDNDVSASTGKRRPAYEQMLADITAGKIAAVVAWDLDRLHRRPIELEAFMSLADEKRLALATVAGDVDLATPQGRLVARLKGSVAAHETEHKKARQRRAARQKAERGYPNWSKAFGYLPGPNGPEPDPRTAPLVKQAYADILAGASLGDVCRQWNDAGAFTITGRPWATTTLSKFLRKPRNAGLRAYKGARYGPVDRNAIVGKARWSPLVDEATFWAAQAVLDAPGRAPGRKSVRRHLLTGLAGCGKCGNHLAGSRRTDGQVVYVCKACHGVAILADNIEPILYRIVAERLARPDAVDLLRREIHDAAEAESICLELETLCGELDRLAVERAEGLLTARQVKISTDIVNAKITKLQARQLDQERLRVFDGIPLGTPQVAGMIAELSPDRFRAVLDVLAEVVVRPVGKSGRISSPERVQVNWR

SEQ ID NO: 427 - protein, 485 aa, synthetic construct
MTKKVAIYTRVSTTNQAEEGFSIDEQTDRLTKYAEAMGWQVSDTYTDAGFSGAKLERPAMQRLINDIENRAFDTVLVYKLDRLSRSVRDTLYLVKDVFTKNKIDFISLNECIDTSSAMGSLFLTILSAINEFERENIKERMTMGKLGRAKSGKSMMWTKTAFGYYHNRKTGILEIVPLQATIVEQIFTDYLSGISLTKLRDKLNESGHIGKDIPWSYRTLRQTLDNPVYCGYIKFKDSLFEGLHKPIIPYETYLKVQKELEERQEQTYERNNNPRPFQAKYMLSGMARCGYCGAPLRVVLGHKRKDGSRTMKYHCANRFPRKTKGVTVYNDNKKCDSGTYNLSNLENTVIDNLIGFQENNDSLLKIINGNNQPTLDTSSFREQISQIDKKIQKNSDLYLNDFITMDELKNRTDSLRAEKKLLKAKISENKFNDSTDVFELVKTQLGSIPINELSYDDKKKIVNNLVSKVDVTADNVDIIFKFQLA

SEQ ID NO: 428 - protein, 469 aa, synthetic construct
MSNTTPVRAAVYLRISEDRSGEQLGVARQREDCLKLCDLRKWEPVEYLDNDVSASTGKRRPAYEQMLADITAGKIAAVVAWDLDRLHRRPIELEAFMCLADEKRLALATVAGDVDLATPQGRLVARLKGSVAAHETEHKKARQRRAARQKAERGHPNWSKAFGYLPGPNGPEPDPQTAPLVKQAYADILAGASLGDVCRRWNDAGAFTITGRPWTTTTLSKFLRKPRNAGLRAYKGARYGPVDRDAIVGKAQWSPLVDEATFWAAQAVLDAPGRAPGRKSVRRHLLTGLASCGKCGNHLAGSYRTDGRVVYVCKACHGVSILADNIEPILYHIVAERLAMPDAVDLLRREIHDAAEAETIRLELETLHGELDRLAVERAEGLLTARQVKISTDIVNAKITKLQARQLDQERQRVFDGIPLGTPQVAGMIAELSPDRFRAVLDVLAEVVVQPVGKGGRVFNPERVQVNWR

SEQ ID NO: 429 - protein, 485 aa, synthetic construct
MTKKVAIYTRVSTTNQAEEGFSIDEQIDRLTKYAEAMGWQVSDTYTDAGFSGAKLERPAMQRLVNDIENKAFDTVLVYKLDRLSRSVRDTLYLVKDVFTKNEIDFISLSESIDTSSAMGSLFLTILSAINEFERENIKERMTMGKLGRAKSGKSMMWAKTAFGYYHNRKTGILEIVPLQATIVEQIFTDYLSGTSLTKLRDKLNESGHIGKDIPWSYRTLRQTLDNPVYCGYIKFKGSLFEGTHKPIIPYETYLKVQKELEERQQQTYERNNNPRPFQAKYMLSGMARCGYCGAPLRIVLGHKRKDGSRTMKYHCANRFPRKTKGVTVYNDNKKCDSGTYDLSNLENTVIDNLIGFQENNDNLLKIINGNNQPILDTSSLKKQISQIDKKIQKNSDLYLNDFITMDELKDRTDSLQAEKKLLKAKISENKFNDSTDVFELVKTQLGSIPINELSYDNKKRIVNNLVSKVDVTADNVDIIFKFQLA

SEQ ID NO: 430 - protein, 469 aa, synthetic construct
MCYTTPVRAAVYLRISEDRSGEQLGVARQREDCLKLCDQREWVPVEYLDNDVSASTGKRRPAYEQMLADITAGKIAAVVAWDLDRLHRRPIELEAFMSLADEKRLALATVAGDIDLATPQGRLVARLKGSVAAHETEHKKARQRRAARQKAERGHPNWSKAFGYLPGPNGPEPDPRTAPLVKQAYADILAGASLGDVCRQWNDAGAFTITGRPWATTTLSKFLRKPRNAGLRAYKGARYGPVDRDAIVGKAQWSPLVDEATFWAAQAVLDAPGRAPGRKSVRRHLLTGLAGCGKCGNHLAGSYRTDGRVVYVCKACHGVAILADNIEPILYHIVAERLAMPDAVDLLRREIHDAAEAETIRLELETLYGELDRLAVERAEGLLAARQVKISTDIVNAKITKLQARQLDQERLRVFDGIPLGTPQVAGMIAELSPNRFRAVLDVLAEVVVQPVGKSGRIFNPERVQVNWR

SEQ ID NO: 431 - protein, 469 aa, synthetic construct
MSNTTPVRAAVYLRISEDRSGEQLGVARQREDCLKLCDQHKWVPVEYLDNDVSASTGKRRPAYEQMLADITAGKIAAVVAWDLDRLHRRPTELEAFMSLADEKRLALATVAGDIDLATPQGRLVARLKGCVAAHETEHKKARQRRAARQKAERGYPNWSKAFGYLPGPNGPEPDPRTAPLVKQAYADILAGASLGDVCRQWNDAGAFTITGRPWTTTTLSKFLRKPRNAGLRAYKGARYGPVDRDAIVGKAQWSPLVDEATFWAAQAVLDAPGRAPGRKSVRRHLLTGLAGCGKCGNHLAGSYRTDGRVVYVCKACHGVAILADNIEPILYHIVAERLAMPDAVDLLRRETHDAAEAETIRLELETLYGELDRLAVERAEGLLTARQVKISTDIVNAKITKLQARQLDQERLRVFDGIPLGTPQVAGVIAELSPDRFRAVLDVLAEVVVQPVGKSGRIFNPERVQVNWR

SEQ ID NO: 432 - protein, 469 aa, synthetic construct
MSYTTPVRAAVYLRISEDRSGEQLGVARQREDCLKLCDQRKWVPVEYLDNDVSASTGKRRPAYEQMLADIAAGKIAAVVAWDLDRLHRRPIELEAFMSLADEKRLALATVAGDVDLATPQGRLVARLKGSVAAHETEHKKARQRRAARQKAERGHPNWSKAFGYLPGPNGPEPDPRTAPLVKQAYADILAGASLGDVCRQWNDVGASTITGRPWTTTTLSKFLRKPRNAGLRAYKGARYGPVDRDAIVGKAQWSPLVDEATFWAAQAVLDAPGRAPGRKSVRRHLLTGLAGCGKCGNHLAGSYRTDGRVVYVCKACHGVAILADNIELVLYHIVAERLAMPDAVDLLRREIHDAAEAETIRLELETLYGELDRLAVERAEGLLTARQVKISTDIVNAKITKLQVRQQDQERLRVLEGIPLGTPQVAGMIAELSPDRFRAVLDVLAEVVVRPVGKGGRIFNPERVQVNWR

SEQ ID NO: 433 - protein, 469 aa, synthetic construct
MSYTTPVRAAVYLRISEDRSGEQLGVARQREDCLKLCGQRKWVPVEYLDNDVSASTGKRRPAYEQMLADITAGKIAAVVAWDLDRLHRRPIELEAFMSLADEKRLALATVAGDVDLATPQGRLVARLKGCVAAHETEHKKARQRRAARQKAERGHPNWSKAFGYLPGPHGPEPDPRTAPLVKQAYADILAGASLGDVCRRWNDAGAFTITGRPWTTTTLSKFLRKPRNAGLRAYKGARYGPVDRDAIVGKAQWSPLVDEATFWAAQAVLDAPGRAPGRKSVRRHLLTGLAGCGKCGNHLAGSYRTDGQVVYVCKACHGVSILAVNIEPILYHIVAERLAMPDAVDLLRREIHDAAGAETIRLELETLYGELDRLAVERAEGLLTARQVKISTDIVNTKITKLQARQLDQERLRVFDGIPLGTPQVAGTIAELSPDRFRAVLDVLAEVVVQPVGKSGRIFNPGRVQVNWR

SEQ ID NO: 434 - protein, 452 aa, synthetic construct
MKAAIYIRVSTREQVENYSIQAQTEKLTALCRSKDWDVYDIFIDGGYSGSNMNRPALNEMLSKLHEIDAVVVYRLDRLSRSQRDTITLIEEYFLKNNVEFVSLSETLDTSSPFGRAMIGILSVFAQLERETIRDRMVMGKIKRIEAGLPLTTAKGRTFGYDVIDTKLYINEEEAKQLQLIYDIFEEEQSITFLQKRLKELGFKVRTYNRYNNWLTNDLYCGYVSYKDKVHVKGIHEPIISEEQFYRVQEIFTRMGKNPNMNRDSASLLNNLVVCSKCGLGFVHRRKDAMSRDKKYHYRYYSCKTYKHIHELERCGNKIWRADKLEELIINRVNNYSFASRNAGKEDELDSLNERLKIEHAKKRRLFELYINGRYEVSELDSMMNDIDAQINYYEGRIEANEELKKNKKIQENLAHLATVDFDSLEFREKQLYLKSLINKIYIDGEQVTIEWL

SEQ ID NO: 435 - protein, 485 aa, synthetic construct
MTKKVAIYTRVSTTNQAEEGFSIDEQTDRLTKYAEAMGWQVSGTYTDAGFSGAKLERPAMLRLINDIENKAFDTVLVYKLDRLSRSVRDTLYLVKDVFTKNRIDFISLNESIDTSSAMGSLFLTILSAINEFERENIKERMTMGKLGRAKSGKSMMWTKTAFGYYHNRKTGILEIVPLQATIVEQIFTDYLSGISLTKLRDKLNESGHIGKDIPWSYRTLRQTLDNPVYCGYIKFKGNLFEGLHKPIIPYETYLKVQKELEERQQQTYERNNNPRPFQVKYMLSGMARCGYCGAPLRIVLGRKRKDGGRTMKYHCANRFPRKTKGITVYNDNKKCDSGAYDLSDLENTVIDNLIGFQENNDSLLKIINGNNQPILDTSSFKKQISQIDKKIQKNSDLYLNDFITMDELKDRTDRLQAEKKLLEAKISENKFNDSTDVFELVKTQLGSIPINELSYDNKKKIVNNLVSKVDVTADNVDIIFKFQLA

SEQ ID NO: 436 - protein, 469 aa, synthetic construct
MSYTTPVRAAVYLRISEDRSGEQLGVARQREDCLKLCGQRKWVPVEYLDNDVSASTGKRRPAYEQMLADITAGKIAAVVAWDLDRLHRRPIELEAFMSLADEKRLALATVAGDVDLATPQGRLVARLKGCVAAHETEHKKARQRRAARQKAERGHPNWSKAFGYLPGPNGPEPDPRTAPLVKQAYADILAGASLGDVCRLWNDTGAYTITGRPWTTTTLSKFLRKPRNAGLRAYKGARYGPVDRDAIVGKALWSPLVDEATFWAAQAVLDAPGRAPGRKSVRRHLLTGLAGCGKCGNHLAGSYRTDGRVVYVCKACHGVAILAENIEPILYHIVAERLAMPDAVDLLRREIHDAAEAETIHLELGTLYGELDRLAVERAEGLLTARQVKISTDIVNAKITVLQERQLDQERLRVFDGIPLGTPQVAGKIAELSPDRFRAVLDVLAEVVVQPAGKGGRIFNPERVQVNWR

SEQ ID NO: 437 - protein, 452 aa, synthetic construct
MKAAIYIRVSTREQVENYSIQAQTEKLTALCRSKDWDVYDIFIDGGYSGSNMNRPALNEMLSKLHEIDAVVVYRLDRLSRSQRDTITLIEEYFLKNNVEFVSLSETLDTSSPFGRAMIGILSVFAQLERETIRDRMVMGKIKRIEAGLPLTTAKGRTFGYDVIDTKLYINEEEAKQLQLIYDIFEEEQSITSLQKRLKKLGFKVRTYNRYNNWLTNDLYCGYVSYKDKVHVKGIHEPIISEEQFYRVQEIFTRMGKNPNMNRGSASLLNNLVVCGKCGLGFVHRRKDIMSHGKKYHYRYYSCKTYKHIHELEKCGNKIWRADKLEELIINRVNNYSLASRNVDKEDELDSLNEKLKIEHAKKKRLFDLYINGSYEMSELDGMMNDIDAQINYYESQIEANEELKKSKKIQETLAHLATVDFDSLEFREKQLYLKSLINKIYIDGEQVTIEWL

SEQ ID NO: 438 - protein, 469 aa, synthetic construct
MCYTTPVRAAVYLRISEDRSGEQLGVARQREDCLKLCGQRKWEPVEYLDNDVSASTGKRRPAYEQMLADITAGKIAAVVAWDLDRLHRRPIELEAFMSLADEKRLALATVAGDVDLATPQGRLVARLKGSVAAHETEHKKARQRRAARQKAERGHPNWSKAFGYLPGPNGPEPDPQTAPLVKQAYADILAGASLGDVCRQWNDAGAFTTTGRPWTTTALSKFLRKPRNAGLRAYKGARYGPVDRDAIVGKAQWSPLVDEATFWAAQAVLDAPGRTPGRKSVRRHLLTGLAGCGKCGNHLAGSYRTDGRVVYVCKACHGVAILADSIEPILYHIVAERLAMPDAVDLLRREIHDAAEAETIRLELETLYGELDRLAVERAEGLLTARQVKISTDIVSAKITKLRARQLDQERLRVFDGIPLGTPQVAGTVAELSPDRFRAVLDVLAEVVVQPVGKGGRIFNPERVQVNWR

SEQ ID NO: 439 - protein, 469 aa, synthetic construct
MSYTTPVRAAVYLRISEDRSGEQLGVARQREDCLKLCDQRKWVPVEYLDNDVSASTGKRRPAYEQMLADITAGRIAAVVAWDLDRLHRRPIELEAFMCLADEKRLALATVAGDVDLATPQGRLVARLKGSVAAHETEHKKARQRRAARQKAERGHPNWSKAFGYRPGPNGPEPDPRTAPLVKQAYADILAGASLGDVRRRWNDAGAFTITGRPWTTTTLSKFLRKPRNAGLRAYKGARYGPVDRDAIVGQAQWSPLVDEATFWAAQAVLDAPGRAPGRKSVRRHLLTGLAGCGKCGNHLAGSYRTDGRVVYVCKACHGVAILADNIEPILYHIVAERLAMPDAVDLLRREILDAAEAETIRLELEALYGELDRLAVERAEGLLTARQVKISTDIVYAKITKLQARQLDQERLRVFDGIPLGTPQVAGMIAELSPDRFRAVLDVLAEVVVQPVGKSGRIFNPERVQVNWR

SEQ ID NO: 440 - protein, 469 aa, synthetic construct
MSYTTPVRAAVYLRISEDRSGEQLGVARQREDCLKLCNQRKWVPVEYLDNDVSASTGKRRPAYEQMLADITAGKIAAVVAWDLDRLHRRPIELEAFMSLADEKRLALATVAGDVDLATPQGRLVARLKGSVAAHETEHKKARQRRAARQKAERGHPNWSKAFGYLPGPSGPEPDPRTAPLVKQAYVDILAGASLGDVCRQWNDAGAFTVTGRPWTTTTLSKFLRKPRNAGLRAYKGARYGPVDRDAIVGKAQWSPLVDEAIFWAAQAVLDAPGRAPGRKSVRRHLLTGLAGCGKCGNHLAGSYRTDGRVVYVCKACHGVAILADNIEPILYRIVAERLAMPDAVDLLRREIHDAAEAETIRLELETLYDELDRLAVERGEGLLTARQVKISTDIVNAKITKLQARRLDQERLRVFDGIPLGTPQVASMIAELSPDRFRAVLDVLAEVVVQPVGKGGRIFSPERVQVNWR

SEQ ID NO: 441 - protein, 469 aa, synthetic construct
MSYTTPVRAAVYLRISEDRSGEQLGVARQREDCLKLCGQRKWVPVEYLDNDVSASTGKRRPAYEQMLADITAGKIAAVVAWDLDRLHRRPIELEAFMSLADEKRLALATVAGDVDLATPQGRLVARLKGSVAAHETEHKKARQRRAARQKAERGYPNWSKAFGYLPGPNGPEPDPRTAPLVKQAYADILAGASLGDVCRQWNNAGAFTITGRPWTTTTLSKFLRKPRNAGLRAYKGARYGPVDRDAIVGKAQWSPLVDEATFWAAQAVLDAPGRAPGRKSVRRHLLTGLAGCGKCGNHLAGSYRTDGRVVYVCKACHGVAILADNIEPILYHIVAERLAVPDAVDLLRREIHDAAEAETIRLELETLYGELDRLAVERAEGLLTARQVKISTDIVNAKITKLQARQLDQERLRVFDGIPLGTPQVAGTIAELSPDRFRAVLDVLAEVVVQPVGKSGRVFNPERVQVNWR

SEQ ID NO: 442 - protein, 452 aa, synthetic construct
MKAAIYIRVSTREQVENYSIQAQTEKLTALCRSKGWDVYDIFIDGGYSGSNMNRPALNEMLSKLHEIDAVVVYRLDRLSRSQRDTITLIEEYFLKNNVEFVSLSETLDTSSPFGRAMIGILSVFAQLERETIRDRMVMGKIKRIEAGLPLTTAKGRTFGYNVIDTKLYINEEEAKQLRLIYDIFEEEQSITFLQKRLKKLGFKVHTYSRYNNWLTNDLYCGYVSYKDRVHVKGIHEPIISEEQFYRVQEIFTRMGKSPNMNRDSASLLSSLVVCSKCGLGFVHRRKDAMSRDKRYHYRYYSCKTYKHIHELEKCGNKIWRADELEELIINRVNNYSLASRNVDKEDELDSLNEKLKTEHAKKKRLFDLYINGSYEVGELDSMMYDIDAQINYYESQIEANEELKKNKKIQENLAYLATVDFDSLEFREKQLYLKSLINKIYIDGEQVTIEWL

SEQ ID NO: 443 - protein, 452 aa, synthetic construct
MKAAIYIRVSTREQVENYSIQAQTEKLTALCRSKDWDVYDIFVDGGYSGSNMNRPALNEMLSKLHEIDAVVVYRLDRLSRSQRDTITLIEEYFLKNNVEFVSLSETLDTSSPFGRAMIGILSVFAQLERETIRDRMVMGKIKRIEAGLPLTTAKGRTFGYDVIDTKLYINEEEAKQLQLIYDIFEEEQSITSLQKRLKKLGFKVHTYNRYNNWLTNDLYCGYVNYKDKVHVKGIHEPIISEEQFYRVQEIFTRMGKNPNMNRDSASLLNNLVVCSKCGLGFVHRRKDAMSRDKKYHYRYYSCKTYKHIHELEKCGNKIWRADKLEELIINRVNSYSLVSRNVDKEDELDSLNEKLKIEHAKKNRLFDLYINGRYELGELDSMMNDIDAQINYYESQIEASEELKKNKKIQENLAELATVDFDSLEFREKQLYLKSLINKIYIDGEQVTIEWL

SEQ ID NO: 444 - protein, 452 aa, synthetic construct
MKAAIYIRVSTREQVENYSIQAQTEKLTALCRSKDWDVYDIFIDGGYSGSNMNRPALNEMLSKLHEIDAVVVYRLDRLSRSQRDTITLIEEYFLKNNVEFVSLSETLDTSSPFGRAMIGILSVFAQLERETIRDRMVMGKIKRIEAGLPLTTAKGRTFGYDVIDTKLYINEEEAKQLQLIYDIFEEEQSITFLQKRLKKLGFKVRTYNRYSNWLTNDLYCGYVSYKDKVHVKGIHEPIISEEQFYRVQEIFTRMGKNPNMNRGSASLLNNLVVCSKCGLGFVHRRKDAMSRDKKYHYRYYSCKTYKHIHELEKCGNKIWRADKLEELIINRVNNYSLASRNADKEDELDSLNEKLKTEHAKKKRLFDLYINGSFEVSELDSMMNDIDAQISYYESQIEANEELKKSKRIQENLANLATVDFDSLEFREKQLYLKSLINKIYIDGEQVTIEWL

SEQ ID NO: 445 - protein, 485 aa, synthetic construct
MTKKVAIYTRVSTTNQAEEGFSIDEQIGRLTKYAEAMGWQVSDTYTDAGFSGAKLERPAMQRLINDIENKAFDTVLVYKLDRLSRSVRDTLYLVKDVFTKNKIDFISLNESIDTSSAMGSLFLTILSAINEFERENIKERMTMGKLGRAKSGKSMMWTKTAFGYYHNRKTGILEIVPLQATIVEQIFTDYLSGTSLTKLRDKLNESGHIGKDIPWSYRTLRQTLDNPVYCGYIKFKDSLFEGMHKPIIPYETYLKVQKELEERQQQTYERNNNPRPFQAKYMLSGVARCGYCGAPLRIVLGHKRKDGSRTMKYHCTNRFPRKTRGITVYNDNKKCDSGTYDLSNLENTVIDCLIGFQENNDSLLKIINGNNQPILDTSSFKEQISQIDKKIQKNSDLYLNDFITMDELKDRTDSLQAEKKLLKAKISENKFNDSTDVFELVKTQLGSIPINELSYENKKKIVDNLVSKVDVTADNVDIIFKFQLA

SEQ ID NO: 446 - protein, 469 aa, synthetic construct
MSYTTPVRAAVYLRISEDRSGEQLGVARQREDCLKLCDQRKWVPVEYLDNDVSASTGKRRPAYEQMLADITAGKIAAVVAWDLDRLHRRPVELEAFMSLADEKRLALATVAGDVDLATPQGRLVARLKGCVAAHETEHKKARQRRAARQKAERGYPNWSKAFGYLPGPNGPEPDPRTAPLVKQAYADILAGASLGDVCRRWNDAGAFTITGRPWTTTTLSKFLRKPRNAGLRAYKGARYGPVDRDAIVGKAQWSPLVDEATFWVAQAVLDAPGRAPGRKSVRRHLLTGLAGCGKCGNHLAGSYRTDGRVVYVCKACHGVAILADNIEPILYHIVAERLAMPDAVDLLRREIHDAAEAETIRLELETLYGELDRLAVERAEGLLTARQVKIGTDIVNAKITKLQARRLDQERLRVLDGIPLGTPQVAGAIAELSPDRFRAVLDVLAEVVVQPVGKSGRVFNPERVQVNWR

SEQ ID NO: 447 - protein, 485 aa, synthetic construct
MTKKVAIYTRVSTTNQAEEGFSIDEQIDRLTKYAEAMGWRVSDTYTDAGCSGAKLERPAMQRLINDIENRAFDTVLVYKLDRLSRSVRDTLYLVKDVFTKNKIDFISLNESIDTSSAMGSLFLTILSAINEFERENIKERMTMGKLGRAKSGKSMMWTKTAFGYYHNRKTGILEIVPLQATIVEQIFTDYLSGISLTKLRDKLNESGHIGKDIPWSYRTLRQTLDNPVYCGYIKFKDSLFEGMHKPIIPYETYLKVQKELEERQQQTYERNNNPRPFQAKYMLSGMARCGYCGAPLRIVLGHKRKDGSRTMKYHCTNRFPRKTKGITVYNDNKKCDSGTYDLSSLENTVIDNLIGLQVSNDSLLKIINGNNQPILDTSSFKKQISQIDKKIQKYSDLYLNDFITMDELKDRTDSLQAEKKLLKAKISENKFNDSTDVFELAKTQLGSIPINELSYDNKKKIVNNLVSKVDVTADNVDIIFKFQLA

SEQ ID NO: 448 - protein, 452 aa, synthetic construct
MKAAIYIRVSTQEQVGNYSIQAQTEKLTALCRSKDWDVYDIFIDGGYSGSNMNRPALNEMLSKLHEIDAVVVYRLDRLSRSQRDTTTLIEEYFLKNNVEFVSLSETLDTSSPFGRAMIGILSVFAQLERETIRDRMVMGKIKRIEAGLPLTTAKGRTFGYDVVDTKLYINEEEAKQLQLIYDIFEEEQSITFLQKRLKKLGFKVRTYNRYNNWLTNDLYCGYVSYKDKVHVKGIHEPIISEEQFYRVQEIFARMGKNPNMNRDSASLLSNLVVCSKCGLGFVHRSKDTMSRGKKYHYRYYSCKTYKHTHELEKCGNKTWRADKLEELIINRVNNYSFASRNADKEDELDSLNEKLKIEHAKRKRLFDLYINGSCEVSELDSMMSDVDAQINYYESQIEANEELKKTKKIQENLADLTTVDFDSLEFREKQLYLKSLINKIYIDGEQVTIEWL

SEQ ID NO: 449 - protein, 469 aa, synthetic construct
MSYTTPVRAAVYLRISEDRSGEQLGVARQREDCLKLCGQRKWVPVEYLDNDVSASTGKRRPAYEQMLADITAGKIGAVVAWDLDRLHRRPIELEAFMSLADEKRLALATVAGDVDLATPQGRLVARLKGCVAAHETEHKKARQRRAARQKAERGHPNWSKAFGYLPGPNGPEPDPRTAPLVKQAYADILAGASLGDVCRRWNDAGAFTITGRPWTTTTLSKFLRKPRNAGLRAYKGARYGPVDRDAIVGKAQWSPLVDEATFWAAQAVLDAPGRAPGRKSVRRHLLTGLAGCGKCGNHLAGSYRTDGQVAYVCKACHGVSILAVNIEPVLYHVVAERLAMPDAVDLLRREIHDAAEAATIRLELETLYGELDRLAVERAEGLLTARQVKISTDIVNAKITKLQARQLDQERLRVFGGIPLGTPQVAGMIAELSPDRFRAVLDVLAEVVVQPVGKSGRTFNPGRVQVNWR

SEQ ID NO: 450 - protein, 485 aa, synthetic construct
MTKKVAIYTRVSTTNQAEEGFSIDEQIDRLTKYAEAMGWQVSNTYTDAGFSGAKLERPAMQRLINDIENKAFDTVLVYKLDRLSRSVRDTLHLVKDVFTKNKIDFISLNESIDTSSAMGSLFLTILSAINEFERENIKERMTMGKLGRAKSGKSMMWTKTAFGYYHDRKTGILEIVPLQATIVEQIFTDYLSGISLTKLRDKLNESGHIGKDIPWSYRTLRQTLDNPVYCGYIKFKDSLFEGMHKPIIPYETYLKVQKELEERQQQTYERNNNPRPFQAKYMLSGMARCGYCGAPLKIVLGHKRKDGSRTTKYHCANRFPRKTKGVTVYNDNKKCDSGTYDLSNLENTVIDILIGFQENNDSLLKIINGNNQPILDTSSFKKQIGQIDRKIQKNSDLYLNDFITMDELKDRTDSLQAEKKQLKAEISENKFNDSTDVFELVKTQLGSIPINELSYDNKKKIVNNLVSKVDVTADNVDIIFKFQLA

SEQ ID NO: 451 - protein, 452 aa, synthetic construct
MKAAIYIRVSTREQVENYSIQAQTEKLIALCRSKDWDVHDIFIDGGYSGSNMNRPALNEMLSRLHEIDAVVVYRLDRLSRSQRDTITLIEEYFLKNNVEFVSLSETLDTSSPFGRAMIGILSVFAQLERETIRDRMVMGKIKRIEAGLPLTTAKGRTFGYDVIDTKLYINEEEAKQLQLIYDIFEEEQSITFLQKRLKKLGFKVRTYNCYNNWLTNDLYCGYVSYKDKVHVKGIHEPIISEEQFYRVQEIFTRMGKNPNMNRDSASLLNNLVVCSKCGLGFVHRRKDAMSRDRKYHYRYYSCKTYKHIHELEKCGNKIWRADELEELVINRVNNYSLASRNVDKEDELVSLNEKLKIEHAKKRRLFDLYINGSYEMSELDSMMNDIDAQINYYESQIEANEGLKKNKKIQENLADLATVDFDSLEFREKQLYLKSLINKIYIDGEQVTIEWL

SEQ ID NO: 452 - protein, 452 aa, synthetic construct
MKAAIYIRVSTQEQVGNYSIQAQTEKLTALCRSKDWDVYDIFIDGGYSGSNMNRPALNEMLSKLHEIDAVVVYRLDRLSRSQRDTTTLIEEYFLKNNVEFVSLSETLDTSSPFGRAMIGILSVFAQLERETIRDRMVMGKIKRVEAGLPLTTAKGRTFGYDVIDTKLYINEEEAKQLQLIYDIFEEEQSITSLQKRLKKLGFKVRTYNRYNNWLTNDLYCGYVSYKDKVHVKGIHEPIISEEQFYRVQEIFTRMGKNPNMNRDSASLLNNLVVCSKCGLSFVHRSKDTMSRGKKYHYRYYSCKTYKHTHELEKCGNKTWRADKLEELIINRVNNYSFVSRNVDKEDELDSLNEKLKIEHAKKKRLFDLYVNGSYEASELDGMMNDIDAQINYYESQIEANEELKKNKKIQENLAELAAVDFDSLEFREKQLYLKSLINKIYIDGEQVTIEWL

SEQ ID NO: 453 - protein, 485 aa, synthetic construct
MTKKVAIYTRVSTTNQAEEGFSIDEQIDRLTKYAEAMGWQVSDTYTDAGFSGAKLVRPAMQRLINDIKNKAFDTVLVYKLDRLSRSVRDTLYLVKDVFTKNKIDFISLNESIDTSSAMGSLFLTILSAINEFERENIKERMTMGKLGRAKSGKSMMWTKTAFGYYHNRKTGILEIVPLQATIVEQIFTDYLSGISLTKLRDKLNESGHIGKDIPWSYRTLRQTLDNPVYCGYIKFKDSLFEGMHKPIIPYETYLKVQKELEERQQQTYERNNNPRPFQAKYMLSGMARCGYCGAPLRIVLGRKRKDGSRTMKYHCANRFPRKTKGVTVYNDNKKCDSGTYDLSNLENTVIDNLIGFQEDNDSLLKIINGNNLPILDTSSFKKQISQIDKKIRKNSDLYLNDLITMDELKDRTDSLQAEKKLLKAKISEDKFNDSTDVFELVKSQLGSIPINELSYDNKKKIVNNLVCKVDVTADNVDIIFKFQLA

SEQ ID NO: 454 - protein, 469 aa, synthetic construct
MSYTTPVRAAVYLRISEDRSGEQLGVARQREDCLKLCGQRKWVPVEYLDNDVSASTGKRRPAYEQMLADITAGKIAAVVAWDLDRLHRRPIELEAFMSLADEKRLALATVAGDVDLSTPQGRLVARLKGSVAAHETEHKKARQRRAARQKAERGLPNWSKAFGYLPGPNGPEPDPRTAPLVKQAYADILAGASLGDVCRQWNDASVFTITGRPWTTATLSKFLRKPRNAGLRAYKGARYGPVDRDAIVGKAQWSPLVDEATFWAAQAVLDAPGRAPGRKSVRRHLLTGLAGCGKCGSHLAGSYRSDGRVVYVCKACHGVAILADNIEPILYHIVAERLAMPDAVDLLRRGIHDAAEAETTRLELETLYGELDRLAVERAEGLLTARQVKISTDIVNAKITKLQAHQLDQERLRVFDGIPLGTPQVAGVIAELSPDRFRAVLDVLAEVVVQPVGKGGRISNPERVQVNWR

SEQ ID NO: 455 - protein, 485 aa, synthetic construct
MTRKVAIYTRVSTTNQAEEGFSIDEQIDRLTKYAEAMGWQVSDTYTDAGFSGAKLERPAMQRLINDIENKAFDTVLVYKLDRLSRSVRDTLYLVKDVFTKNKIDFISLNESIDTSSAMGSLFLTILSAINEFERENIKERMTMGKLGRAKSGKSMMWTKTAFGYYHNRKTGILEIVPLQATIVEQIFTDYLSGISLTKLRDKLNESGHIGKDIPWSYRTLRQTLDNPVYCGYIKFKGSLFEGMHKPIIPYETYLKVQKELEERQQQTCERNNNPRPFQAKYMLSGTARCGYCGAPLRIALGHKRKDGSRTMKYHCANRFPRKTKGITVYNDNKKCDSGTYDLSNLENTVIDNLIGLQENNDSLLKIISGNNQPVLDTSSFKKQISQIDKKIQKNNDLYLNDLITMEELKDRTDSLQAEKKLLKAKISENKFNDSTDVFELVKTQLGSIPINELSYDNKKKIVNNLVSKVDVTADNVDIIFKFQLG

SEQ ID NO: 456 - protein, 452 aa, synthetic construct
MKAAIYIRVSTREQVENYSIQAQTEKLTALCRSKDWDVYDIFIDGGYSGSNMNRPALNEMLSKLHEIDAVVVYRLDRLSRSQRDTVTLIEEYFLKNNVEFVSLSETLDTSSPFGRAMIGILSVFAQLERETIRDRMVMGKIKRIESGLPLTTAKGRTFGYDVIDTKLHINEEEAKQLRLIYDIFEEEQSITFLQKRLKKLGFKVRTYNRYNNWLTNDLYCGYVSYKDKVHVKGIHEPIISEEQFYRVQEIFTRMGKNPNMNRGSASLLNNLVVCSKCGLGFVHRRKDAMSRDKKYHYRYYSCKTYKHIHELEKCGNKIWRADKLEELIINRVNNYSLASRNVDKEDELDSLNEKLKIEHAKKKRLFDLYINGNYEVSELDSMMNDIDAQIGYYESQIEANEELKKNKKIQENLAYLATVDFDSLEFREKQLYLKSLINKIYIDGEQVTIEWL

SEQ ID NO: 457 - protein, 469 aa, synthetic construct
MSYTTPVRAAVYLRISEDRSGEQLGVARQREDCLKLCGQRKWVPVEYLDNDVSASTGKRRPAYEQMLADITAGKIAAVVAWDLDRLHRRPVELEAFMSLADEKRLALATVAGDVDLATPQGRLVARLKGCVAAHETEHKKARQRRAARQKAERGHPNWSKAFGYLPGPNGPEPDPRTAPLVKQAYADILAGASLGDVCRQWNDAGAFTITGRPWATTTLSKFLRKPRNAGLRAYKGARYGPVDRDAIVGRAQWSPLVDEATFWAAQAVLDAPGRAPGRKSVRRHLLTGLAGCGKCGNHLAGSYRTDGRVVYVCKACHGVAILADNIEPILYHIVAERLAMPDAVNLLRREIHDTAEAETIRLELEALYSELDRLAVERAEGLLTARQVKISTDIVNAKITKLQARQLDQERLRVFDGVPLGTPQVAGMIAELSPDRFRAVLDVLAEVVVQPVGKSGRIFNPERVQVNWR

SEQ ID NO: 458 - protein, 469 aa, synthetic construct
MSYTTPVRAAVYLRISEDRSGEQLGVTRQREDCLKLCDQRKWVPVEYLDNDVSASTGKRRPAYEQMLADITAGKIAAVVTWDLDRLHRRPIELEAFMSLADEKRLALATVAGDVDLATPQGRLVARLKGSVAAHETEHKKARQRRAARQKAERGLPNWSKAFGYLPGPNGPVPDLRTAPLVKQAYADILAGASLGDVCGRWNDAGAFTITGRPWTTTTLSKFLRKPRNAGLRAYKGARYGPVDRDAIVGKAQWSPLVDEATFWAAQAVLDAPGRAPGRKSVRRHLLTGLAGCGKCGNHLAGSYRTDGRVVYVCKACHGVAILADNIVPILYHIVAERLAMPEAVDLLRREIHDAAEAETIRLELEALYGELDRLAVERAEGLLTARQVKISTDIVNAKITKLQARQLDQERLRVFAGIPLGTPQVAGMIAELSPDRFRAVLDVLAEVVVQPVGKSGRIFNPERVQVNWR

SEQ ID NO: 459 - protein, 485 aa, synthetic construct
MTKKVAIYTRVSTTNQAEEGFSIDEQIDRLTKYAEAMGWQVSDTYTDAGLSGAKLERPAMQRLINDIENKAFDTVLVYKLDRLSRSVRDTLYLVKDVFTKNKIDFISLNESIDTSSAMGSLFLTILSAINEFERENIKERMTMGKLGRAKSGKSMMWTKTAFGYYHNRKTGILEIVPLQASIVEQIFTDYLSGISLTKLRDKLNESGHIGKDIPWSYRTLRQTLDNPVYCGYIKFKDSLFEGMHKPIIPYETYLKVQKELEERQQQTYERNNNPRPFQAKYMLSGMARCGYCGAPLRIVLGHKRKDGSRTMKYHCANRFPRKTKGVTVYNDNKKCDSGTYDLSNLENTVVDNLIGFQENNDSLLKIINGNNQPILDTSSFKKQISQIDKKIQKNSDLYLNDFITMDELKDRTDSLRAEKELLKAKISENKFNDSTDVFELVKTQLGSIPINELSYDDKKKIVNNLVSKVDVTADNVDIIFKFQLA

SEQ ID NO: 460 - protein, 485 aa, synthetic construct
MTKKVAIYTRVSTTNQAEEGFSIDEQIDRLTKYAEAMGWQVSDTYTDAGSSGAKLERPAMQRLINDIENKAFDTVLVYKLDRLSRSVRDTLYLVKDVFTKNKIDFISLSESIDTSSAMGSLFLTILSAINEFERDNIKERMTMGKLGRAKSGKSMMWTKTAFGYYHNRKTGILEIVPLQATIVEQIFTDYLSGISLTKLRDKLNESGHIGKDIPWSYRTLRQTLDNPVYCGYIKFKGSLFEGMHKPIIPYETYLKVQKELEKRQQQTYERNNNPRPFQAKYMLSGMARCGYCGAPLKIVLGHKRKDGSRTMKYHCANRFPRKTKGVTVYNDNKKCDSGTYDLSSLENTVIDNLIGFQENNDSLLKIINGNNQPTLDTSSFKKQISQIDKKIQKISDLYLNDFIAMDELKDRTDSLQAEKKLLKAKISENKFNDSTDVFELVKTQLGSIPINELSYDNKKKIVNNLVSKVDVTADNVDIIFKFQLA

SEQ ID NO: 461 - protein, 469 aa, synthetic construct
MSYTTLVRAAVYLRISEDRSGEQLGVARQREDCLKLCDQRKWVPVEYLDNDVSASTGKRRPAYEQMLADITAGKITAVVAWDLDRLHRRPIELETFMSLADEKRLALATVAGDVDLATPQGRLVARLKGSVAAHETEHKKARQRRAARQKAERGCPNWSKAFGYLPGPNGPEPDPRTAPLVKQAYADILAGASLGDVCRRWNGAGAFTITGRPWTTTTLSKFLRKPRNAGLRAYKGARYGPVDRDAIVGKAQWSPLVDEATFWAAQAVLDAPGRAPGRKSVRRHLLTGLAGCGKCGNHLAGSYRTDGRVVYVCKACHGVAILADNIVPILYHIVAERLAMPDAVDLLRREIHDAAEAEAIHLELETLYGELDRLAVERAEGLLTARQVKISTDIVNAKITKLQAHQQDQERLRVLDGIPLGTPQVAGVIAELSPNRFRAVLDVLAEVVVQPVGKSGRIFNPERVQVNWR

SEQ ID NO: 462 - protein, 485 aa, synthetic construct
MTRKVAIYTRVSTTNQAEEGFSIDEQIDRLTKYAEAMGWQVSDTYTDAGFSGAKLERPAMLRLINDIENKAFDTVLVYKLDRLSRSVRDTLYLVKEVFTKNKIDFISLNESINTSSAMGSLFLTILSAINEFERENIKERMTMGKLGRAKSGKSMMWTKTAFGYYHNRKTGILEIVPLQATIVEQIFTDYLSGISLTKLRDKLNENGHIGKDIPWSYRTLRQTLDNPVYCGYIKFKDSLFEGMHEPIIPYETYLKVQKELEERQQQTYERNNNPRPFQAKYMLSGMARCGYCGAPLRIVLGHKRKDGSRTMKYHCTNRFPRKTKGITVYNDNKKCDSGTYDLSNLENTVIDNLIGFQENNDSLLKIINGNNQPILDTSSFKEQISQIDKKIQKNSDLYLNDFITMDELKDRTDSLQAEKKLLKAKINENRFNDSTDVFELVKTQLGSIPIDELSYDNKKKIVNNLVSKVDVTADNVDIIFKFQLT

SEQ ID NO: 463 - protein, 469 aa, synthetic construct
MSYTTPVRAAVYLRISEDRSGEQLGVARQREDCLKLCGQRKWVPVEYLDNDVSASTGKRRPAYEQMLADITAGKIAAVVAWDLDRLHRRPVELEAFMSLADEKRLALATVAGDVDLATPQGRLVARLKGCVAAHETEHKKARQRRAARQKAERGHPNWSKAFGYLPGPNGPEPDPRTAPLVKQAYADILAGASLADVCRQWNDAGALTITGRPWTTTTLSKFLRKPRNAGLRAYKGARYGPVDRDAIVGKAQWSPLVDEATFWAAQAVLDAPGRAPGRKSVRRHLLTGLAGCGKCGNHLAGSYRTDGRVVYVCKACHGVTILAENIEPILYHIVAERLAMPDAVDLLRREIHDAAEAETIRLELETLYGELDRLAVERAEGLLTARQVKISTDIVDAKITKLQARQLDQERLRVFDGIPLGTPQVAGMIAELSPDRFRAVLDVLAEVVVQPVGKSGRIFNPERVQVNWR

SEQ ID NO: 464 - protein, 484 aa, synthetic construct
MTKKVAIYTRVSTTNQAEEGFSIDEQIDRLTKYAEAMGWQVSDTYTDAGFSGAKLERPAMQRLINDIENKAFDTVLVYKLDRLSRSARDTLHLVKDVFTKNKIDFISLNESIDTSSAMGSLFLTILSAINEFERENIKERMTMGKLGRAKSGKSMMWTKTAFGYYHNRKTGILEIVPLQAAIVEQIFTDYLSGISLTKLRDKLNESGHIGKDIPWSYRTLRQTLDNPVYCGYIKFKDSLFEGVHKPIIPYETYLKVQKELEERQQQTYERNNNPRPFQAKYMLSGMARCGYCGAPLKIVLGHKRKDGSRTMKYHCANRFPRKTKGVTVYNDNKKCDSGTYDLSNLENTVIDNLIGFQENNDNLLKIINGNNQPILDTISFKEISQIDKKIQKNSDLYLNDFITMDELKDRTDSLQAEKKLLKAKISENKFNDSTGVFELVKTQLGSIPINELSYDDKKRIVNNLVSKVDVTADNVDIIFKFQLA

SEQ ID NO: 465 - protein, 452 aa, synthetic construct
MKAAIYVRVSTQEQVENYSIQAQTEKLTALCRSKDWDVYDIFIDGGYSGSNMNRPALNEMLSKLHEIDAVVVYRLDRLSRSQRDTTTLIEEYFLKNNVEFVSLSETLDTSSPFGRAMIGILSVFAQLERETIRDRMVMGKIKRIEAGLPLTTAKGRTFGYDVIDTKLYINEEEAKQLQLIYDIFEEEQSITFLQKRLKKLGFKVRSYNRYNNWLTNDLYCGYVSYKDKVHVKGIHEPIISEEQFYRVQEIFARMGKNPNMNHDNASLLSNLVVCSKCGLGFVHRSKGTMSRGKKYHYRYYSCKTYKHTHELEKCGNKTWRADKLEELIISRVNNYSFASRNVDKEDELDCLSEKLRIEHAKKKRLFDLYINGSYEVSELDSMMNDIDAWINYYEGQIEANEELKKNRKIQENLAGLATVDFDSLEFREKQLYLKSLINKIYIDGEQVTIEWL

SEQ ID NO: 466 - protein, 469 aa, synthetic construct
MSYTTPVRAAVYLRISEDRSGEQLGVARQREDCLKLCGQRKWVPVEYLDNDVSASTGKRRPAYEQMLADITAGKIAAVVAWDLDRLHRRPIELEAFMSLADEKRLALATVAGDVDLATPQGRLVARLKGCVAAHETEHKKARQRRAARQKAERGLPNWSKAFGYLPGPNGPEPDPRTAPLVKQAYADILAGASLGDVCRQWNDAGAFTITGRPWTTTTLSKFLRKPRNAGLRAYKGARYGPVDRDAIVGKAQWSPLVDEATFWAAQAVLDAPGRAPGRKSVRRHLLTGLAGCGKCGNHLAGSYRTDGQIVYVCKACHGVSILAVNIEPILYHVVAERLAMPDAVDLLRREIHDAAEAETVRLELETLYGELDRLAVERAEGLLTARQVKISTDIVNAKIAKLQARQQDQERLRVLDGIPLGTPQVAGMIAELSPDRFRAVLDVLAEVVVQPVGKSGGILNPERVQVNWR

SEQ ID NO: 467 - protein, 469 aa, synthetic construct
MSYTTPVRAAVYLRISEDRSGEQLGVARQREDCLKLCGQRKWVPVEYLDNDVSASTGKRRPAYEQMLADITAGKIAAVVAWDLDRLHRRPVELEAFMSLADEKRLALATVAGDVDLATPQGRLVARLKGCVAAHETEHKKARQRRAARQKAERGLPNWSKAFGYLPGPNGPEPDPRTAPLVKQAYADILAGASLGDVCRQWNDAGAFTLTGRPWTTTTLSKFLRKPRNAGLRAYKGARYGPVDRDAIVGKAQWCPLVDEATFWAAQAVLDAPGRAPGRKSVRRHLLTGLAGCGKCGNHLAGSYRTDGQVVYVCKACHGVSILAVNIEPILYHIVAERLAMPDAEDLLRREIHDAAEVETTRLELETLYGELDRLAVERAEGLLTARQVKISTDIVNAKITKLQARQLDQERLRVFDGIPLGTPQVAGMIAELSPDRFRAVLDVLAEVVVQPVGKSGRISNPERVQVNWR

SEQ ID NO: 468 - protein, 452 aa, synthetic construct
MKAAIYIRVSTQEQVGNYSIQAQTEKLTALCRSKDWDVYDIFIDGGYSGSNMNRPALNEMLSKLHEIDAVVVYRLDRLSRSQRDTTTLIEEYFLKNNVEFVSLSETLDTSSPFGRAMIGILSVFAQLERETIRDRMVMGKIKRIEAGLPLTTAKGRTFGYDVIDTKLYINEEEAKQLQLIYDIFEEEQSITSLQKRLKKLGFKVRTYNRYNNWLTNDLYCGYVSYKDKVHVKGIHEPIISEEQFYRVQEIFTRMGKNPNMNRDSASLLNNLVVCSKCGLGFVHRSKDTMCRGKKYHYRYYSCKTYKHTHELEKCGNKTWRADKLEELIINRVNNYSFASRSVGKEDELDSLYEKLKIEHAKKKRLFDLYISGSYEVSELDSMMNDIDAQISYYESQIEANEELKKDKKIQENLVNLAAVDFDSLGFREKQLYLKSLINKIYIDGEQVTIDWL

SEQ ID NO: 469 - protein, 469 aa, synthetic construct
MCYTTPVRAAVYLRISEDRSGEQLGVARQREDCLKLCGQRKWVPVEYLDNDVSASTGKRRPAYEQMLADITAGKIAAVVAWDLDRLHRRPMELEAFMSLADEKRLALATVAGDVDLATPQGRLVARLKGSVAAHETEHKKARQRRAARQKAERGYPNWSKAFGYLPGPNGPEPDPRTAPLVKQAYADILAGASLGDVRRQWNDAGAFTITGRPWTTTALSKFLRKPRNAGLRAYKGARYGPVDRDAIVGKAQWSPLVDEATFWAAQAVLDAPGRAPGRKSVRRHLLTGLVGCGKCGNHLAGSYRTDGRVVYVCKACHGVAILADNIEPILYHIVAERLAVPGAVDLLRCEIHDAAEAETIRLELETLYGELDRLAVERAEGLLTARQVKISTDIVNAKITELRARQLDQERLRVFDGIPLGTPQVAGMIAELSPDRFRAVLDVLAEVVVQPVGKGGRIFNPERVQVNWR

SEQ ID NO: 470 - protein, 485 aa, synthetic construct
MTKKVAIYTRVSTTNQAEEGFSIDEQIDRLTKYAEAMGWQVSGTYTDAGFSGAKLERPAMQRLMNDIGNKAFDTVLVYKLDRLSRSVRDTLHLVKDVFTKNKIDFISLNESIDTSSAMGSLFLTILSAINEFERENIKERMTMGKLGRAKSGKSMMWTKTAFGYYHNRKTGILEIVPLQATIVEQIFTDYLSGISLTKLCDKLNESGHVGKDIPWSYRTLRQTLDNPVYCGYIKFKGSLFEGMHKPIIPYETYLKVQKELKERQQQTYERNNNPRPFQAKYMLSGMARCGYCGAPLRIVLGHKRKDGSRTMKYHCANRFPRKTRGVTVYNDNKKCDSGTYDLSNLENTVIDYLIGFQENNDSLLKIINGNNQLILDTSSLKKQISQIDKKIQKNSDLYLNDFITMDELRARTDSLQAEKELLKAKISENKFNDSTDVFELVKTQLGSIPINELSYDNKKKIVNNLVSKVDVTADNVDIIFKFQLA

SEQ ID NO: 471 - protein, 485 aa, synthetic construct
MTKKVAIYTRVSTTNQAEEGFSIDEQIDRLTKYAEAMGWQVSDTYTDAGFSGAKLERPAMQRLINDIENKAFDTVLVYKLDRLSRSVRDTLYLVKDVFTKNKIDFISLNESIDTSSAMGSLFLTILSAINEFERENIKERMTMGKLGRAKSGKSMMWTKTAFGYYHNRKTGILEIVPLQATIVEQIFTDYLSGISLTKLRDKLNESGHIGKDIPWSYRTLRQTLDNPVYCGYIKFKDSLFEGMHKPIIPYETYLKVQKELEERQQQTYERNNNPRPFQAKYMLSGMARCGYCGAPLRIVLGRKRKGGSRTMKYHCANRFPRKTKGVTVYNDNKKCDSGTYDLSNLENTVIDSLIGFQENNDSLLKIINSSNQPILDTSSFKKQISQIDKKIQKNSDLYLNDFITMDELKDRTDSLQAEKRLLKAKISENKFNDSTDVFELVKTQLGSIPINELSYDDKKKIVNNLVSKVDVTADNVDIIFKFQLA

SEQ ID NO: 472 - protein, 485 aa, synthetic construct
MTKKVAIYTRVSTTNQAEEGFSIDEQIDRLTKYAEAMGWQVSDTYTDAGFSGAKLERPAMQRLISDIENKAFDTVLVYKLDRLSRSVRDTLYLVKDVFTKNKIDFISLNESIDTSSAMGSLFLTILSAINEFERENIKERMTMGKLGRAKSGKSMMWTKTAFGYYHNRRTGILEIVPLQATIVEQIFTDYLSGISLTKLRDKLNESGHIGKDIPWSYRTLRQTLDNPVYCGYIKFKDSLFEGMHKPIIPYETYLKVQKELEERQQQTYERNNNPRPFQAKYMLSGMVRCGYCGAPLRIVLGHKRKDGSRTMKYHCANRFPRKTKGVTVYNDNKKCDSGTYDLSSLENTVIDSLISFQENNDSLLKIINGNNQPILDTSGFKEQISQIDKKIRKNSDLYLNDFITMDELKDRTDSLQAEKKLLKAKISESKFNDSTDVFELVKAQLGSIPINELSYDNKKKIVNNLVSKVDVTADNVDIIFKFQLA

SEQ ID NO: 473 - protein, 485 aa, synthetic construct
MTKKVAIYTRVSTTNQAEEGFSIDEQIDRLTKYAEAMGWQVSDTYTDAGFSGAKLERPAMQRLINDIENKAFDTVLVYKLDRLSRSVRDTLHLVKDVFTKNKIDFISLNESIDTSSAMGSLFLTILSAVNEFERENIKERMTMGKLGRAKSGKSMMWTKTAFGYYHNRKTGILEIVPLQAAIVEQIFTDYLSGISLTKLRDKLNESGHIGKEIPWSYRALRQTLDNPVYCGYIKFKDSLFEGMHKPIIPYETYQKVQKELEERQQQTYERNNNPRPFQAKYMLSGMARCGYCGAPLRIVLGHKRKDGSRTKKYHCANRFPRKTKGVTVYNDNKKCDSGTYDLSSLENTVIGNLIGFQENNNSLLKIINGNNQRILDTSSFKKQISQIDKKIQKNSDLYLNDFITMDELKDRTDRLQAEKRLLRAKISEDKFNDSTDVFELVKTQLGSIPINELSYDDKKKIVNNLVSKVDVTADNVDIIFKFQLA

SEQ ID NO: 474 - protein, 469 aa, synthetic construct
MSYTTPVRAAVYLRISEDRSGEQLGVARQREDCLKLCDQRKWVPVEYLDNDVSASTGKRRPAYEQMLADITAGKIAAVVAWDLDRLHRRPVELEAFMSLADERRLALATVAGDVDLATPQGRLVARLKGSVAAHETEHKKARQRRAARQKAERGLPNWSKAFGYLPGPNGPEPDPRTAPLVKQAYADILAGASLGDVCRQWNDAGVFTITGRPWTTTTLSKFLRKPRNAGLRAYKGARYGPVDRDAIVGKAQWSPLVDEATFWAAQAVLDAPGRAPGRKSVRRHLLTGLAGCGKCGNRLAGSYRTDGRVVYVCKACHGVAILADNIEPILYHIVAERLAMPDAVHLLRRDIHDAAEAETIRLELETLYGELDRLAIERAEGLLTARQVKISTDIVSAKITKLQARQLDQERLRVLDGIPLGTPQVADMIAELSPDRFRAVLDVLAEVVVRPVGKSGRVFNPERVQVIWR

SEQ ID NO: 475 - protein, 469 aa, synthetic construct
MSYITPVRAALYLRISEDRSGEQLGVARQREDCLKLCGQRNWVPVEYLDNDVSASTGKRRPAYEQMLADITAGKIAAVVAWDLDRLHRRPIELEAFMSLADEKRLALATVAGDVDLATPQGRLVARLKGSVAAHETEHKKARQRRAARQKAERGYPNWSKAFGYLPGPNGPEPDPRTAPLVKQAYADILAGASLGDVCRQWNDAGAFTITGRPWTTTTLSKFLRKPRNAGLRAYKGARYGPVDRDAIVGKAQWSPLVDEATFWAAQAVLDAPGRAPGRKSVRRHLLTGLAGCGKCGNHLAGSYRTDGRVVYVCKACHGVAILADNIEPILYHVVAERLAMPDAVDLLRRGIHDAAEAETIRLKLEALYGELDRLAVERAEGLLTARQVKISTDIVNAKITKLQARQLDQERLRVLDGIPLGTPQVAGMIVELSPDRFRAVLDVLAEVVVQPVGKSGGIFNPERVQVNWR

SEQ ID NO: 476 - protein, 485 aa, synthetic construct
MTKKVAIYTRVSTTNQAEEGFSIDEQIDRLTKYAEAMGWQVSDTYTDAGFSGAKLERPAMLRLINDIENKAFDTVLVYKLDRLSRSVRDTLYLVKDVFTKSKIDFISLSESIDTSSAMGSLFLTILSAINEFERENIKERMTMGKLGRAKSGKSMMWTKTAFGYYHNRKTGILEIVPPQATIVKQIFTDYLSGISLTKLRDKLNESGHVGKDTPWSYRTLRQTLDNPVYCGYIKFKDSLFEGMHKPIIPYETYLKVQKELEVRQQQTYERNNNPRPFQAKYMLSGMARCGYCGAPLRIVLGHKRKDGSRTMKYHCANRFPRITKGVTVYNDNKKCDSGTYDLSSLENTVIDNLIGLQEDNDSLLKIINGNNQPILDISSFKKQISQIDKKIQKNSDLYRNDFITMDELKDRTDSLQAEKKLLKAKISENEFNDSTDVFELVRTQLGSIPINELSYDNKKKIVNNLVSKVDVTADNVDIIFKFQLA

SEQ ID NO: 477 - protein, 452 aa, synthetic construct
MKAAIYIRVSTQEQVGNYSIQAQTEKLTALCRSKDWDVYDIFVDGGYSGSNMNRPALNEMLSKLHEIDAVVVYRLDRLSRSQRDTTTLIEEYFLKNNVEFVSLSETLDTSSPFGRAMIGILSVFAQLERETIRDRMVMGKIKRIEAGLPLTTAKGRTFGYDVIDTKLYVNEEEAKQLQLIYDIFEEEQSITSLQKRLKKLGFKVRTYNRYNNWLTNDLYCGYVSYKDKVHVKGIHEPIISEEQFYRVQEIFTRMGKNPNMNRDSASLLNNLVVCSKCGLGFVHRSKDTMSRGKKYHYRYYSCKTYKHTHELEKCGNKTWRADKLEELIINRVNNYSFASRDVDKEDELDSLNEKLKIEHAKKQRLFDLYINGSYEVSELDSMMSDIDAQINYYESQIEASEELKKNKKIQENLADLATVDFDSLGFREKQLYLRSLINKIYIDGEQVTIEWL

SEQ ID NO: 478 - protein, 485 aa, synthetic construct
MTKKVAIYTRVSTTNQAEEGFSIDEQIDRLTKYAEAMGWQVSDTYTDAGFSGAKLERPAMQRLINDIENKAFDTVLVYKLDRLSRSVRDTLYLVKDVFTKNKIDFISLNESIDTSSAMGSLFLTILSAINEFERETIKERMTMGKLGRAKSGKSMMWTKTAFGYYHNRKTGILEIVPLQATIVEQIFTDYLSGISLTKLRDKLNESGHIGKDIPWSYRTLRQTLDNPVYCGYIKFKDSLFEGMHKPIIPYETYLKVQKELEVRQQQTYERNNNPRPFQAKYMLSGIARCGYCGAPLRIVLGRKRKDGSRTMKYHCANRFPRRTRGITVYNDNKKCDSGTYDLSNLENTVIDNLIGFQENSDSLLRIINGNNQPILDTSSFEKQISQIDKKIQKNSDLYLNDFITMDELKDRTDSLQAEKKLLEAKISENKFNDSTDVLELVKTQLGSIPINELSYDDKKEIVNNLVSKVDVTADSVDIIFKFQLA

SEQ ID NO: 479 - protein, 469 aa, synthetic construct
MSYTTPVRAAVYLRISEDRSGEQLGVARQREDCLKLCGQRKWVPVEYLDNDVSASTGKRRPAYEQMLADITAGKIAAVVAWDLDRLHRRPIELEAFMSLADEKRLALATVAGDVDLATPQGRLVARLKGCVAAHETEHKKARQRRAARQKAERGHPNWSRAFGYLPGPNGPEPDPRTAPLVKQAYADILAGASLGDVCRQWNDAGALTITGRPWTTTTLSKFLRKPRNAGLRAYRGARYGPVDRDAIVGKAQWSPLVDEATFWAAQAVLDAPGRAPGRKGVRRHLLTGLAGCGKCGNHLAGSYRTDGRVVYVCKACYGIAILADNIEPILYHIVAERLAMPDAVDLLCREIHDAAEAETIRLELETLCGELDRLAVERAEGLLTARQVKISTDIVNAKITKLRARQLDQERLRVLDGIPLGTPQVAGMIAELSPDRFRAVLDVLAEVVVQPVGKRGGISDPERVQVNWR

SEQ ID NO: 480 - protein, 452 aa, synthetic construct
MKAAIYIRVSTQEQVGNYSIQAQTEKLTALCRSKDWDVYDIFVDGGYSGSNMNRPALNEMLSKLHEIDAVVVYRLDRLSRSQRDTTTLIEEYFLKNNVEFVSLSETLDTSSPFGRAMIGILSVFAQLERETIRDRTVMGKIKRIEAGLPLTTAKGRTFGYDVIDTKLYINEEEAKQLQLIYDIFEEEQSITSLQKRLKKLGFKVRTYNRYSSWLTNDLYCGYVSYKDKVHVKGIHEPIISEEQFYRVQEIFTRMGKNPNVNRDSASLLNNLVVCSKCGLGFVHRSKDTMSRGKKYHYRYYSCKTYKHTHELEKCGNKTWRADKLEELIINRVNNYSFASRNVDKEDELDSLNEKLKIEHAKKKRLFDLYINGSYEVSELDSMMNDIDAQINYYESQIEANEELKKNKKIQENLADLATVDFDSLEFREKQLYLKSLINKIYIDGEQVTIEWL

SEQ ID NO: 481 - protein, 469 aa, synthetic construct
MSYTTPVRAAVYLRISEDRSGEQLGVARQREDCLKLCDQRKWVPVEYLDNDVSASTGKRRPAYEQMLADIAAGKIAAVVAWDLDRLHRRPIELEAFMSLADEKRLALATVAGDVDLATPQGRLVARLKGSVAAHETEHKKARQRRAARQKAERGYPNWSKAFGYLPGPNGPEPDPRTAPLVKQAYADILAGASLGDVCRQWNGAGAFTITGRPWTTTTLSKFLRKPRNAGLRAYKGARYGPVDRDAIVGKAQWSPLVDEATFWAAQAVLDAPGRAPGRKSVRRHLLTGLAGCGKCGNHLAGSYRTDGRVVYVCKACHGVAILADNIEPILYHIVAERLAMPNAVDLLRREIHDAAEAETIRLELETLYGELDRLAVERAEGLLTARQVKISTDIVNAKITKLQARQLDQERLRVFEGIPLGTPQAAGMIAELSPDRFRAVLDVLAEVVVQPVGKGGRIFNPERVQVNWR

SEQ ID NO: 482 - protein, 469 aa, synthetic construct
MSNTTPVRAAVYLRISEDRSGEQLGVARQREDCLKLCDQRKWVPVEYLDNDVSASTGKRRPAYEQMLADIAAGKIAAVVAWDLDRLHRRPIELEAFMSLADEKRLALATVAGDIDLATPQGRLVARLKGSVAAHETEHKKARQRRAARQKAERGHPNWSKAFGYLPGPNGPEPDPRTAPLVKQAYADILAGASLGGVCRQWNDAGAFTITGRPWTTTTLSKFLRKPRNAGLRAYKGARYGPVDRDAIVGKAQWSPLVDEATFWAAQAVLDAPGRAPGRKSVRRHLLTGLAGCGKCGNHLAGSYRTDGRVVYVCKACHGVAILADNIEPILYHIVAERLAMPAAVDLLRREIRDGAEAETIRLELGTLYGELDRLAVERAEGLLTARQVKISTDIVNAKITKLQARQLDQERLRVLDGIPLGTSQVAGVIAELSPDRFRAVLDVLAEVVVQPVGKSGRIFNPERVQVNWR

SEQ ID NO: 483 - protein, 484 aa, synthetic construct
MTKKVVIYTRVSTTNQAEEGFSIDEQVDRLTKYAEAMGWQVSDTYTDAGFSGAKLERPAMQRLINDIESKAFDTVLVYKLDRLSRSVRDTLHLVKDVFTKNKIDFISLNESIDTSSAMGSLFLTILSAINEFERENIKERMTMGKLGRAKSGKSMMWTKTAFGYYHNRKTGILEIVPPQATIVEQIFTDYLSGISLTKLRDKLNESGHIGKDIPWSYRTLRQTLDNPVYCGYIKFKDSLFEGMHKPIIPYETYLKVKELEERQQQTYERSNNPRPFQAKYMLSGMARCGYCGAPLRIVLGRKRKDGSRTMKYHCANRFPRKTKGVTVYNDNKKCDSGTYDLSNLENTVIDNLIGFQESNDSLLKIINGNNQPILDTSSFKEQISQIDKKIQKNSDLYLNDFITMDELKDRTDSLQAEKKLLEAKISENKFNDSTDVFELVKTQLGSIPINELSYDDKKKIVNNLVSKVDVTADNVDIIFKFQLA

SEQ ID NO: 484 - protein, 469 aa, synthetic construct; identical to SEQ ID NO: 265

SEQ ID NO: 485 - protein, 452 aa, synthetic construct
MKAAIYIRVSTREQVENYSIQAQTEKLTALCRSKDWDVYDVFIDGGYSGSNMNRPALNEMLSKLHEIDAVVVYRLDRLSRSQRDTVTLIEEYFLKNNVEFVSLSETLDTSSPFGRAMIGILSVFAQLERETIRDRMVMGKIKRIEAGLPLTTAKGRTFGYDVIDTKLYINEEEAKQLQLIYDIFEEEQSITFLQKRLKKLGFKVRTYNCYNNWLTNDLYCGYVSYKDKVHVKGIHEPIISEEQFYRVQEIFARMGKNPNMNRDSASLLNNLVVCSKCGLGFVHRRKDIMSRGKKYHYRYYSCKTYKHIHELEKCGNKIWRADKLEELIINRVNNYSVASRNVDKEDELDSLNEKLKIEHVKKKRLFELYINGSYEVSELDSMMNDIDAQIGYYESQIEANKGLRKNKKIQENLAHLATVDFDSLEFREKQLYLKGLINKIYIDGEQVTIEWL

SEQ ID NO: 486 - protein, 469 aa, synthetic construct
MSYTTPVRAAVYLRISEDRSGEQLGVARQREDCLKLCDQRNWVPVEYLDNDVSASTGKHRPAYEQMLADITAGKIVAVVAWDLDRLHRRPVELEAFMSLADEKRLALATVAGDVDLATPQGRLVARLKGCVAAHETEHKKARQRRAARQKAERGYPNWSKAFGYLPGPNGPEPDPRTAPLVKQAYTDILAGASLGDVCRQWNDAGAFTITGRPWTTTTLSKFLRKPRNAGLRAYKGARYGPVDRDAIVGKAQWSPLVDEGTFWAAQAVLDAPGRAPGRKSVRRHLLTGLAGCGKCGNHLAGSCRTDGRVVYVCKACHGVSILAVNIEPILYHIVAERLAKPDAVDLLRREIHDAAEAETIRLELETLYGELDRLAVERAEGLLTARQVKISTDIVNAKITKLRVRQQDQERLRVFDGIPLGTPQVAGMIAELSPDRFRAVLDVLAEVVVQPVGRGGRIFNPERVQVNWR

SEQ ID NO: 487 - protein, 452 aa, synthetic construct
MKAAIYIRVSTREQVENYSIQAQTEKLTALCRSKDWDVYDVFVDGGYSGSNMNRPALNEMLSKLHEIDAVVVYRLDRLSRSQRDTITLIEEYFLKNNVEFVSLSETLDTSSPFGRAMIGILSVFAQLERETIRDRMVMGKIKRIEAGLPLTTAKGRTFGYDVIDTKLYINEEEAKQLRLIYDIFEEEQSITFLQKRLKKLGFKVRTYNRYSNWLTNDLYCGYVSYKDKVHVKGIHEPIISEEQFYRVQEIFTRMGKNPNMNRDSASLLNNLVVCSKCGLGFVHRRKDAMSRDKKYHYRYYSCKTYKHIHELEKCGNKIWRADKLEELIINRVNNYSFASRNADKEDELDSLNEKLKTEHAKKKRLFDLYINGSYEVSELDSMMNDIDAQINYYESQIEANEELKKNKKIQENLAHLATVDFDSLEFREKQLYLKSLINKIYIDGEQVTIEWL

SEQ ID NO: 488 - protein, 485 aa, synthetic construct
MTKKVAIYTRVSTSNQAEEGFSIDEQIDRLTKYAEAMGWQVSDTYTDAGFSGAKLERPAMQRLINDIETKAFDTVLVYKLDRLSRSVRDTLYLVKDVFTKNKIDFISLNESIDTSSAMGSLFLTILSAINEFERENIKERMTMGKLGRAKSGKSMMWTKTAFGYYHNRKTGILEIVPLQATIVEQIFTDYLSGISLTKLRDKLNDSGHIGKDIPWSYRTLRQTLDNPVYCGYIKFKGSLFEGMHKPIIPYETYLKVQKELEERQRQTYERNNNPRPFQAKYMLSGMARCGYCGAPLRIVLGHKRKDGSRTMKYHCANRFPRKTKGVTVHNDNRKCDSGTYDLSNLENTVIDNLIGFQENNDSLLKIINGNNQPIPDTSSFKKQISQIDKKIQKNSDLYLNDFITMDELKDRTDSLQAEKKLLKAKISENKFNDSTDVFELVKTQLGSIPISELSYDNKKKIVNNLVSKVDVTADNVDIIFKFQLA

SEQ ID NO: 489 - protein, 452 aa, synthetic construct
MKAAIYIRVSTREQVENYSIQAQTEKLTALCRSKDWGVYDIFIDGGYSGSNMNRPALNEMLSKLHEIDAVVVYRLDRLSRSQRDTITLIEEYFLKNNVEFVSLSETLDTSSPFGRAMIGILSVFAQLERETIRDRMVMGKIKRIEAGLPLTTAKGRTFGYDVVDSKLYINEEEAKQLQLIYDIFEEEQSITFLQKRLKKLGFKVHTYNRYNNWLTNDLYCGYVSYKDKVHVKGIHEPIISEEQFYRVQEIFTRMGKNPNMNRDSASLLNNLVVCSKCGLGFVHRRKDAMSRDKKYHYRYYSCKTYKHIHELEKCGNKIWRADKLEELIINRVNDYSVASRNVDKEDELDSLNEKLKIEHAKKRRLFDLYVNGSYEVSELDSMMNDIDAQINYYESQIEANEELKKNKKIQENLAYLATVDFDSLEFREKQLYLKSLINKIYIDGEQVTIEWL

SEQ ID NO: 490 - protein, 452 aa, synthetic construct
MKAAIYIRVSTREQVENYSIQAQTEKLTALCRSKDWDVYDIFIDGGYSGSNMNRPALNEMLSKLHEIDAVVVYRLDRLSRSQRDTITLIEEYFLKNNVEFVSLSETLDTSSPFGRAMIGILSVFAQLERETIRDRMVMGKIKRIEAGLPLTTAKGRTFGYDVIDTKLYINEEEAKQLQLIYDIFEEEQSITLLQKRLKELGFKVRTYNRYSNWLTNDLYCGYVSYKDKVHVKGIHEPIISEEQFYRVQEIFTRMGKNPNMNRDSASLLNNLVVCSKCGLGFVHRRKDAMSRDKKYHYRYYSCKTYKHIHELEKCGNKIWRADKLEELIINRVNNYSLASRNVDKEDELDSLNEKLKIEHAKKKRLFDLYINGRYEVSELDSMMNDIDAQINCYESQIEANEELKKNKQIQENLADLATVDFDNLGFREKQLYLKSLINKIYIDGEQVTIEWL

SEQ ID NO: 491 - protein, 485 aa, synthetic construct
MTRKVAIYTRVSTTNQAEEGFSIDEQIDRLTKYAEAMGWQVSDTYTDAGLSGAKLERPAMQRLINDIENKAFDTVLVYKLDRLSRSVRDTLYLVKDVFTKNEIDFISLNESIDTSSAMGSLFLTILSAINEFERENIKERMTMGKLGRAKSGKSMMWTRTAFGYYHNRKTGILEIVPLQATIVEQIFTDYLSGISLTKLRDKLNESGHIGKDIPWSYRTLRQTLDNPVYCGYIKFKDSLFEGMHKPIIPYETYLKVQKELEERQQQTYERNNNPRPFQAKYMLSGMARCGYCGAPLRIVLGHKRKDGSRTMKYHCANRFPRKTRGVTVYNDNKKCDSGTYDLSNLENTVIDNLIGLQENNDSLLKIINGNNQPILDTSSFEKQISQIDKKIRKNSDLYLNDFITMDELKDRTDSLQAEKKLLKAKISENKFNNSTDVFELVKTQLGSTPINELSYGDKKKIVNNLVSKVDVTADNVDIIFKFQLA

SEQ ID NO: 492 - protein, 485 aa, synthetic construct
MTRKVAIYTRVSTTNQAEEGFSIDEQIDRLTKYAEAMGWQVSDTYTDAGSSGAKLERPAMQRLINDIENKAFDTVLVYKLDRLSRSVRDTLYLVKDVFTKNKIDFISLNESIDTSSAMGSLFLTILSAINEFERENIKERMTMGKLGRAKSGKSMMWTKTAFGYYHNCKTGILEIVPLQASIVEQIFTDYLSGISLTELRDKLNESGHIGKDIPWSYRTLRQTLDNPVYCGYIKFKDSLFEGMHKPIIPYETYLKVQKELEERQQQTYERNNNPRPFQAKYMLSGMARCGYCGAPLRIVLGHKRKDGSRTMKYHCANRFPRKTKGVTVYNDNKKCDSGSYDLNNLENTVIDSLIGFQENNDSLLKIINGNNQPILDTSSLKEQISQIDKKIQKNSDLYLNDFITMDELKDRTDSLQAEKKLLKAKISENKFNDSADVFELVKTQLGSIPINELSYDNKKKIVNNLVSKVDVTADNVDIIFKFQLA

SEQ ID NO: 493 - protein, 485 aa, synthetic construct
MTKKVAIYTRVSATNQAEEGFSIDEQVDRLTKYAEAMGWQVSDAYTDAGFSGAKLERPAMQRLINDIENKTFDTVLVYKLDRLSRSVRDTLYLVKDMFTKNKIDFISLNESIDTSSVMGSLFLTILSAINEFERENIKERMTMGKLGRAKSGKSMMWSKTAFGYYHNRETGILEIVPLQATIVEQIFTDYLSGISLTKLRGKLNESGHIGKDVPWSYRTLRQTLDNPVYCGYIRFKGNLFEGMHKPIIPYETYLKVQKELEERQQQTYERNNNPRPFQAKYMLSGMARCGYCGAPLEIVLGHKRKDGSRTMKYHCANRFPRKTKGVTVYNDNKKCDSGTYGLSNLENTVIDNLIGFQENNDSLLEIINGNNQPILDTSSLKEQISQIDKKIQKNSDLYLNDLITMDELKDRTDSLRAEKKLLKAKISENKFNGSTGVFELVKTQLGSIPINELSYDNKKKIVNNLVSKVDVTADNVDIIFKFQLA

SEQ ID NO: 494 - protein, 485 aa, synthetic construct
MTKKVAIYTRVSTTNQAEEGFSIDEQIDRLTKYAEAMGWQVSDTYTDAGFSGAKLERPAMQRLINDIENKAFDTVLVYKLDRLSRSVRDTLHLVKDVFTKNKIDFISLNESIDTSSAMGSLFLTILSAINEFERENIKERMTMGKLGRAKSGKSMMWTKTAFGYYHNRKTGILEIVPLQATIVEQIFNDYLSGISLTRLRDKLNESGHIGKDIPWSYRTLRQTLDNPVYCGYIKFKDSLFEGMHKPIIPYETYLKVQKELEERQQQTYERNNNPRPFQAKYMLSGMARCGYCGAPLKIVLGHKRKDGSRTMKYHCANRFPRKTIGVTVYNDNKKCDSGTYDLSNLENTVIDSLIDFQENNDSLLKIINGNNQPILDTSSFKEQISQIDKKIQKNSDLYLNDSITMDELKGRTDSLQAEKKLLRAKISENKFNDSTDVFELVKTQLGNIPINELSYDNKKKIVNNLVSKVDVTADNVDIIFKFQLA

SEQ ID NO: 495 - protein, 452 aa, synthetic construct
MKAAIYIRVSTREQVENYSIQAQTEKLTALCRSKDWDVYDIFIDGGYSGSNMNRPALNEMLSKLHEIDAVVVYRLDRLSRSQRDTITLIEEYFLKNNVEFVSLSETLDTSSPFGRAMIGILSVFAQLERETIRDRMVMGKIKRVEAGLPLTTAKGRTFGYDVIDTRLYINEEEAKQLQLIYDIFEEERSITLLQKRLKELGFKVRSYNRYNNWLTNDLYCGYVSYKDKVHVKGIHEPIISEEQFYRVQEIFTRMGKNPNTNRDSASLLNNLVVCSKCGLGFVHRRKDAMSRDKKYHYRYYSCKTYKHIHELEKCGNKIWRADKLEELVINRVNSYSLASRNVDKEDELDSLNEKLRTEHAKKKRLFELYINGSYEVSELDSMMKDIDAQISYYESQIEANEELRKNKKIQENLADLATVDFDSLEFREKQLYLKSLINKIYIDGEQVTIEWL

SEQ ID NO: 496 - protein, 452 aa, synthetic construct
MKAAIYIRVSTREQVENYSIQAQTEKLTALCRSKDWDVYDIFIDGGYSGSNMNRPALNEMLSKLHEIDAVVVYRLDRLSRSQRDTITLIEEYFLKNNVEFVSLSETLDTSSPFGRAMIGILSVFAQLERETIRDRMVMGKIKRIEAGLPLTTAKGRTFGYDVIDTKLYINEEEAKQLQLIYDIFEEEQSITFLQKRLKKLGFKVRTYNRYNNWLTNDLYCGYVSYKDKVHVKGIHEPIISEEQFYRVQEIFTRMGRNPNMNRDSASLLNNLVVCSKCGLGFVHRRKDAMSRDKKYHYRYYSCKTYKHIHELEKCGNKIWRADKLEELIISRVNNYSLASRNVDKEDELDSLNEKLKIEHAKKKRLFDLYINGRYEVSELDSMMNDIDAQINYYESQIEANEELKKNKKIQENLADLVTVDFDSLEFREKQLYLKSLINKIYIDGEQVTIEWL

SEQ ID NO: 497 - protein, 484 aa, synthetic construct
MTKKVAIYTRVSTTNQAEEGFSIDEIDRLTKYAEAMGWQVSDTYTDAGFSGAKLERPAMQRLINDIEDKAFDTVLVYKLDRLSRSVRDTLHLVKDVFTKNKIDFISLNESIDTSSAMGSLFLTILSAINEFERENIKERMTMGKLGRAKSGKSMMWTKTAFGYYHNRKTGILEIVPLQATIVEQIFTDYLSGISLTKLRDKLNESGHIGKDIPWSYRTLRQTLDNPVYCGYIKFKDSLFEGMHKPIIPYETYLKVQKELEERQQQAYERNNNPRPFQAKYMLSGVARCGYCGAPLRIVLGRKRKDGSRTMKYHCANRFPRKTKGATVYNDNKKCDSGTYNLSNLENTVIDNLIGFQENHDSLLKVINGNNQPILDTSSFKKQISQVDKKIQKNSDLYLNDFITMDELKDRTDSLQAEKKLLKAKISENKFNDSTDVLELVKTQLGSIPINELSYDNKKKIVNNLVSKVDVTADNVDIIFKFQLA

SEQ ID NO: 498 - protein, 452 aa, synthetic construct
MKAAIYIRVSTREQVENYSIQAQTEKLTALCRSKDWDVYDIFIDGGYSGSNMNRPALNEMLSKLHEIDAVVVYRLDRLSRSQRDTITLIEEYFLKNNVEFVSLSETLDTSSPFGRAMIGILSVFAQLERETIRDRMVMGKIKRIEAGLPLTTAKGRTFGYDVIDTKLYINEEEAKQLQLIYDIFEEEQSITFLQKRLKKLGFKVRTYNRYNNWLTNDLYCGYVSYKDKVHVKGIHEPIISEEQFYRVQEIFARMGKNPNMNRDSASLLNNLVVCSKCGLGFVHRRKDAMSRDKKYHYRYYSCKTYKHIHELEKCGNKIWRADKLEELIINRVNNYSLASRNVDKEDELDSLNEKLKIEHAKKRRLFDLYINGSYEVSELDSMMNDIDAQINYYESQIEANEELKKNKKIQENLAYLATVDFDSLEFREKQLYLKSLINKIYIDGEQVTIEWL

SEQ ID NO: 499 - protein, 452 aa, synthetic construct
MKAAIYIRVSTREQVENYSIQAQTEKLTALCRSKDWDVYDIFVDGGYSGSNMNRPALNEMLSKLHEIDAVVVYRLDRLSRSQRDTITLIEEYFLKNNVEFVSLSETLDTSSPFGRAMIGILSVFAQLERETIRDRMVMGKIKRIEAGLPLTTAKGRTFGYDVVDTKLYVNEEEAKQLRLIYDIFEEEQSITFLQKRLKKLGFKVRSYSRYNNWLTNDLYCGYVSYKDKVHVKGIHEPIISEEQFYRVQEIFTRMGKNPNMNRDSASLLNSLVVCGKCGLGFVHRRKDTMSRGKKYRYRYYSCRTYKHTHELEKCGNKIWRADRLEELIINRVSNYSFASRNVDKEDELDSLNEKLKIEHAKKKRLFDLYINGSYEVSELDSMMNDIDAQINYYESRIEANEELKKSKKVQENLANLATVDYDSLEFREKQLYLKSLINKIYIDGEQVTIEWL

SEQ ID NO: 500 - protein, 485 aa, synthetic construct
MTKKVAIYTRVSTTNQAEEGFSIDEQIDRLTKYAEAMGWQVSDTYTDAGFSGAKLERPAMQRLINDIENKAFDTVLVYKLDRLSRSVRDTLYLVKDVFTKNKIDFISLNECIDTSSAMGSLFLTILSAINEFERENIKERMTMGKLGRAKSGKSMMWTKTAFGYYHNRKTGILEIVPLQATIVEQIFTDYLSGISLTKLRDKLNESGHIGKDIPWSYRTLRQTLDNPVYCGYIKFKDSLFEGMHEPIIPYETYLKVQKELEERQQQTYERNNNPRPFQAKYMLSGMARCGYCGAPLRIVLGHKRKDGSRTMKYHCANRFPRKTKGVTVYNDNKKCDSGTYDLSNLENTVIDSLIGFQENNDSLLKIINGNNQPILDTSSFKKQISLIDKKIQKNSDLYLNDFITMDELKDRTDSLQAEKKLLKARISENRFNDSTDVFELVKTQLGSIPINELSYDNKKKIVNNLVSKVDVTADNVDIIFKFQLA

SEQ ID NO: 501 - protein, 452 aa, synthetic construct
MKAAIYIRVSTREQVENYSIQAQTEKLTALCRSKDWDVYDIFIDGGYSGSNMNRPALNEMLSKLHEIDAVVVYRLDRLSRSQRDTITLIEEYFLKNNVEFVSLSETLDTCSPFGRAMIGILSVFAQLERETIRDRMVMGKIKRIEAGLPLTTAKGRTFGYDVIDTKLYINEEEAKQLQLIYDIFEEEQSITSLQKRLKKLGFKVHTYNRYNNWLTNDLYCGYVSYKDKVHVKGIHEPIVSEEQFYRVQEIFTRMGKNPNMNRDSASLLNNLVVCSKCGLGFVHRRKDAMSRDKKYHYRYYSCKTYKHIHELEKCGNKIWRADKLEELIIDRVNNYSLVSRNVGKEDELDSLNEKLKIEHAKKKRLFDLYINGSYEVSELDNMMSDIDAQINYYESQIEANEELKKDRKIQENLAHLATVDFDSLEFREKQLYLKSLINKIYIDGEQVTIEWL

SEQ ID NO: 502 - protein, 469 aa, synthetic construct
MCYTTPVRAAVYLRISEDRSGEQLGVARQREDCLKLCDQRKWEPVEYLDNDVSASTGKRRPAYEQMLTDITAGKIAAVVAWDLDRLHRRPVELEAFMSLADEKRLALATVAGDIDLATPQGRLVARLKGSVAAHETEHKRARQRRAARQKAERGLPNWSKAFGYLPGPGGPEPDPRTAPLVEQAYADILAGASLGDVCRQWNDAGAFTITGRLWTTTTLSKFLRKPRNAGLRAYKGARYGPVDRDAIVGKAQWSPLVDEATFWAAQAVLDAPGRAPGRKSVRRHLLTGLAGCGKCGNHLAGSYRTDGRVVYVCKACHGVAILADNIVPILYHIVAERLAMPDAVDLLRRGIHDAAEAETIRLELETLYDELDRLAVERAEGLLTARQVKISTDIVNAKVTKLQARQLDQERLRVLDGIPLGTPRVASMIAELSPDRFRAVLDVLAEVVVQPVGKSGRISNPERVQVNWR

SEQ ID NO: 503 - protein, 452 aa, synthetic construct
MKAAIYIRVSTREQVENYSIQAQTEKLTALCRSKDWDVYDIFIDGGYSGSNMNRPALNEMLSKLHEIDAVVVYRLDRLSRSQRDTITLIEEYFLKNNVEFVSLSETLDTSSPFGRAMIGILSVFAQLERETIRDRMVMGKIKRIEAGLPLTTAKGRTFGYDVIDTKLYINEEEAKQLQLIYDIFEEEQSITFLQKRLKKLGFKVRTYSRYNNWLTNDLYCGYVSYKDKVHVKGIHEPIISEEQFYRVQEIFARMGKNPNMNRDSASLLNNLVVCSKCGLGFVHRRKDTMSRGKKYHYRYYSCKTYKHTHELEKCGNKIWRADKLEELIIDRVNNYSLASRNVDKEDELDSLNEKLKIEHAKKRRLFDLYINGSYEVSELDSMMNDIDAQINYYESQIEANEELKKDKKIQESLANLATVDYDSLEFREKQLYLKSLINKIYIDGEQVTIEWL

SEQ ID NO: 504 - protein, 469 aa, synthetic construct
MSYTTPVRAAVYLRISEDRSGEQLGVARQREDCLKLCDQRKWVPVEYLDNDVSASTGKRRPAYEQMLADITAGKIAAVVAWDLDRLHRRPVELEAFMSLADERRLALATVAGDVDLATPQGRLVARLKGSVAAHETEHKKARQRRAARQKAERGLPNWSKAFGYLPGPNGPEPDPRTAPLVKQAYADILAGASLGDVCRRWNDAGAFTITGRPWTTTTLSKFLRKPRNAGLRAYKGARYGPVDRDAIVGKAQWSPLVDEATFWAAQAVLDAPGRAPGRKSVRRHLLTGLAGCGKCGNHLAGSYRADGRVVYVCKACHGVAILADNIEPILYHIVAERLAMPDAVDLLRREIHDAAEAETIHLELETLYGELDRLAVERAEGLLTARQVKISTDIVNAKITKLQTRQLDQERLRVFDGIPLGTPQAAGMIAELSPDRFRAVLDVLAEVVVQPVGKSGGTFNPERVQVNWR

SEQ ID NO: 505 - protein, 452 aa, synthetic construct
MKAAIYIRVSTQEQVGNYSIQAQTEKLTALCRSKDWDVYDIFIDGGYSGSNMNRPALTEMLSKLHEIDAVVVYRLDRLSRSQRDTTTLIEEYFLKNNVEFVSLSETLDTSSPFGRAMIGILSVFAQLERETIRDRMVMGKIKRIEAGLPLTTAKGRTFGYDVIDTKLYINEEEAKQLQLIYDIFEEEQSITSLQKRLKKLGFKVRTYNRYNNWLTNDLYCGYVSYKDKVHVKGIHEPIISEEQFYRVQEIFTRMGKNPNMNRDSASLLSNLVVCSKCGLGFVHRSKDTMSRGKKYHYRYYSCKTYKHTHELEKCGNKIWRADKLEELIINRVNNYSFVSRNVDKEDELDSLNEKLKIEHAKKKRLFDLYINGSYEVSELDSMMNDIDAQINYYESQIEANEELKKNKKIQENLADLATVDFDSLEFREKQLYLKSLINKIYIDDEQVTIEWL

SEQ ID NO: 506 - protein, 469 aa, synthetic construct
MSYTTPVRAAVYLRISEDRSGEQLGVARQREDCLKLCDQRKWVPVEYLDNDVSASTGKRRPAYEQMLADITAGKIAAVVAWDLDRLHRRPIELEAFMSLADEKRLALATVAGDVDLATPQGRLVARLKGSVAAHETEHKKARQRRAARQKAERGHPNWSKAFGYLPGPNGPEPDPRTAPLVKQAYADILAGASLGDVCRQWNDAGVFTITGRPWATTTLSKFLRKPRNAGLRAYKGARYGPVDRDAIVGKAQWSPLVDEATFWAAQAVLDAPGRAPGRKSVRRHLLTGLAGCGKCGNHLAGSYRTDGRVVYVCKACHGVAILADNIEPILYRMVAERLAMPDAVDLLRRETHDAAEAETIRLELETLYGELDRLAVERAEGLLTARQVKISTDIVSAKITKLQARQLDQERLRVFDGIPLGTPQVAGMIAELSPNRFRAVLDVLAEVVVRPVGKSGGIFNPERVQVNWR

SEQ ID NO: 507 - protein, 485 aa, synthetic construct
MTKKVAIYTRVSTTNQAEEGFSIDEQIDRLTKYAEAMGWQVSDTYTDAGFSGAKLERPAMQRLINDIENKAFDTVLVYKLDRLSRSVRDTLHLVKDVFTKNKIDFISLNESIDTSSAMGSLFLTILSAINEFERENIKERMTMGKLGRAKSGKSMMWTKTAFGYHHNRKTGILEIVPLQATIVEQIFTDYLSGISLTKLRDKLNESGHIGKEIPWSYRTLRQTLGNPVYCGYIKFKDSLFEGMHEPIIPYETYLKVQKELEERQQQTYERNNNPRPFQAKYMLSGMARCGYCGAPLKIVLGHKRKDGSRTMKYHCANRFPRKTKGITVYNDNKKCDSGAYDLSNLENTVIDNLIGFQENNDSLLKIINGNNQPILDTSSLKKQISQIDKKIQKNSDLYLNDFITMDELKDRTDSLQAEKKLLKAKISKNKFNDSTDVLELVKTQLGSIPINELSYDNKKEIVNSLVSKVDVTADNVDIIFKFQPA

SEQ ID NO: 508 - protein, 469 aa, synthetic construct
MSYTTPVRAAVYLRISEDRSGEQLGVARQREDCLKLCDQRKWVPVEYLDNDVSASTGKRRPAYEQMLADITAGKIAAVVAWDLDRLHRRPIELEAFMSLADERRLALATVAGDVDLATPQGRLVARLKGSVAAHETEHKKARQRRAARQKAERGHPNWSKAFGYLPGPNGPEPDPRTAPLVKQAYADILAGASLGDVCRQWNDAGALTITGRPWTTTTLSKFLRKPRNAGLRTYKGARYGPVDRDAIVGKAQWSPLVDEATFWAAQAVLDAPGRAPGRKSVRRHLLTGLAGCGKCGNYLAGSYRTNGRVVYVCKACHGVAILADNIEPILYHIVAERLAMPDAVDLLRREIHDAAEAETIRLELKTLYGELDRLAVERAEGLLTARQVKISTDIVNAKITKLQARQLDQERLRVFDGIPLGTPQVAGMIAELSPNRFRAVLDVLAEVVVQPVGKSGRILNPERVQVSWR

SEQ ID NO: 509 - protein, 485 aa, synthetic construct
MTKKVAIYTRVSTTNQAEEGFSIDEQIDRLTKYAEAMGWQVCDTYTDAGFSGAKLGRPAMQRLINDIENKAFDTVLVYKLDRLSRSVRDTLYLVKDVFTKNKIDFISLNESIDTSSAMGSLFLTILSAINEFERENIKERMTLGKLGRAKSGKSMMWTKTAFGYYHNRKTGILEIVPLQATIVEQIFTDYLSGISLTKLRDKLNESGHIGKDIPWSYRTLRQTLDNPVYCGYIKFKGSLYEGMHKPIIPYETYLKVQKELEERQQQTYERNNNPRPFQAKYMLSGMARCGYCGAPLRIVLGHKRKDGSRTMKYHCANRFPRKTKGVTVYNDNKKCDSGTYDLSDLENTVIDNLIGFQENNDSLLKIINGNNQPILDTSSFKKQISQIDKKIQKNSDLYLNDFITMDELKDRTDSLQAEKKLLKAKISENKFNDSTDVFGLVKAQLGSIPINELSYDNKKKIVNNLVSKVDVTADDVDIIFKFQPV

SEQ ID NO: 510 - protein, 485 aa, synthetic construct
MTKKVAIYTRVSTTNQAEEGFSIDEQIDRLTKYAEAMGWQVSDTYTDAGFSGAKLERPAMQRLINDIENKAFDTVLVYKLDRLSRSVRDTLYLVKDVFTKSKIDFISLNESIDTSSAMGSLFLTILSAINEFERENIKERMTMGKLGRAKSGKSMMWTKTAFGYYHNRKTGILETVPLQATIVEQIFTDYLSGISLTKLRDKLNESGHIGKDIPWSYRTLRQTLDNPVYCGYIKFKGSLFEGMHKPIIPYETYLKVQKELEERQQQAYERNNNPRPFQAKYMLSGMARCGYCGAPLRIVLGHKRKDGSRTMKYHCANRFPRKTKGVTVYNDNKKCDSGTYDLSNLETTVIDNLIGFQENNDSLLKIINGNNQPILDTSSFKKQISQIDKKIQKNSDLYLNDFITMDELKDRTDSLQAEKKLLEAKISENKFNDSTDVFELVKTQLGSIPINELSYDNKKKIVNNLVSKVDVTADNVDIIFKFQLA

SEQ ID NO: 511 - protein, 485 aa, synthetic construct
MTKKVAIYTRVSTTNQAEEGFSIDEQIDRLTKYAEAMGWQVSDTYTDAGFSGAKLERPAMQRLINDIESKAFDTVLVYKLDRLSRSVRDTLYLVKDVFTKNKIDFISLNESIDTSSAMGSLFLTILSAINEFERENIKERMTMGKLGRAKSGKSMMWTKTAFGYYHNRKTGILEIVPLQAAIVEQIFTDYLSGISLTKLRDKLNESGHIGKDIPWSYRTLRQTLDNPVYCGYIKFKDSLYEGMHKPIIPYETYLKVQKELEERQQQTYERNNNPRPFQAKYMLSGMARCGYCGAPLKIVLGHKRKDGSRTMKYHCANRFPRKTKGVTVYNDNKKCDSGTYNLSNLENTVIDDLVGFQENNDSLLKVINGNNQPILDTSSIEKQIGQIDKKIQKNSDLYLNDFITMDELKDRTDSLQAEKKLLKAKISENKFNDSTGVFELVKTQLGSIPINELSYDDKKKIVNNLVSKVDVTADNVDIIFKFQLA

SEQ ID NO: 512 - protein, 485 aa, synthetic construct
MTKKVAIYTRVSTTNQAEEGFSIDEQIDRLTKYAEAMGWQVSDTYTDAGISGAKLERPAMQRLINDIENKAFDTVLVYKLDRLSRSVRDTLYLVKDVFTKNKIDFISLNESIDTSSAMGSLFLTILSAINEFERENIKERMTMGKLGRAKSGKSMMWTKTAFGYYHNRETGILEIVPLQATIVEQIFTDYLSGISLTKLRDKLNESGHIGKDIPWSYRTLRQTLDNPVYCGYIKFKDSLSEGLHKPIIPYETYLKVQKELEERQQQTYERNNNPRPFQAKYMLSGMARCGYCGAPLRIVLGHKRKDGSRTMKYHCANRFPRKTKGVTVYNDNKKCDSGTYDLSNLENTVIDNLIGFQENNDSLLKIISGNNQPILDTSSFKKQISQIDKKIQKNSDLYLNDFITMDELKDRTDSLQAEKKLLRAKISENKFNDSTDVFELVKTQLGSIPINELSYDNKKKIVNNLVSKVDVTADNVDIIFKFQLA

SEQ ID NO: 513 - protein, 485 aa, synthetic construct
MTRKVAIYTRVSTTNQAEEGFSIDEQIDRLTKYAEAMGWQVSDTYTDAGLSGAKLERPAMQRLINDIEIKAFDTVLVYKLDRLSRSVRDTLYLVKDVFTKNKIDFISLSESIDTSSAMGSLFLTILSAINEFERENIKERMTMGKLGRAKSGKSMMWTKTAFGYYHNRKTGILEIVPLQATIVEQIFTDYLSGISLTKLRDKLNESGHIGKDIPWSYRTLRQTLDNPVYCGYIKFKDSLFEGMHKPIIPYETYLKVQKELEERQQQTYERNNNPRPFQAKYMLSGMARCGYCGAPLKIVLGRKRKDGSRTMKYHCANRFPRKTKGVTVYNDNKKCDSGTYDLSNLENTVIDNLIGFQGNDDSLLKIINGNNQPILDTSSLKKQISQIDKKIQKNSDLYLNDFITMDELKDRTDSLQAEKKLLKAKISENKFDDSTDVFELVKTQLGSIPINELSYDNKKKIVNNLVSKVDVTADNVDIIFKFQLA

SEQ ID NO: 514 - protein, 485 aa, synthetic construct
MTKKVAIYTRVSTTNQAEEGFSIDEQIDRLTKYAEAMGWQVSDTYTDAGFSGAKLGRPAMQRLINDIENKAFDTVLVYKLDRLSRSVRDTLYLVKDVFAKNKIDFVSLNESIDTSSAMGSLFLTILGAINEFERENIKERMAMGKLGRAKSGKSMMWTKTAFGYHHNRKTGILEIVPLQATIVEQIFTDYLSGISLTKLRDKLNESGHIGKDIPWSYRTLRQTLDNPVYCGYIKFKDRLFEGMHKPIIPYETYLKVQKELEERQQQTYERNNNPRPFQAKYMLSGMARCGYCGAPLRIVLGHKRKDGSRTMKYHCANRFPRKTKGVTVYNDDKKCDSGTYDLSNLENTVIDTLIGFQENNDSLLKIIDSNNQPILDTSSFKEQISQIDKKIQKNSDLYLNDFITMDELKDRTDSLQAEKKLLKAKISENKFNDSADVFELVKTQLGSIPINELSYDNKKKIVNNLVSKVDVTADNVDIIFKFQLA

SEQ ID NO: 515 - protein, 452 aa, synthetic construct
MKAAIYIRVSTREQVENYSIQAQTEKLTALCRSKDWDVYDIFIDGGYSGSNMNRPALNEMLSKLHEIDAVVVYRLDRLSRSQRDTITLIEEYFLKNNVEFVSLSETLDTSSPFGRAMIGILSVFAQLERETIRDRMVMGKIKRIEAGLPLTTAKGRTFGYDVIDTKLYVNEEEARQLQLIYDIFEEEQSITFLQKRLKKLGFKVRTYNRYNNWLTNDLYCGYVSYKDKVHVKGIHEPIISEEQFYRVQEIFARMGKNPNMNRDSASLLNNLVVCSKCGLGFVHRRKDIMSHGKKYHYRYYSCKTYKHIHELEKCGNKIWRADKLEELVINRVNNYSFASRNADKEDELDSLNEKLKVEHAKKKRLFDLYINGSYEVSELDSMMNDIDAQINYYESQIVANEELRKNKKIQENLANLATVDFDSLEFREKQLYLKSLINKIYIDGEQVTIEWL

SEQ ID NO: 516 - protein, 469 aa, synthetic construct
MSYTTPVRAAVYLRISEDRSGEQLGVARQREDCLKLCGQRKWVPVEYLDNDVSASTGKRRPAYEQMLADITAGKIAAVVAWDLDRLHRRPVELEAFMSLADAKRLALATVAGDVDLATPQGRLVARLKGCVAAHETEHKKARQRRAARQKAERGHPNWSKAFGYLPGPNGPEPDPRTAPLVKQAYADILAGASLGDVCRRWNGAGAFTITGRPWTTTALSKFLRKPRNAGLRAYKGARYGPVDRDAIVGKAQWSPLVDEATFWAAQAVLDAPGRAPGRKSVRRHLLTGLAGCGKCGNHLAGSYRTDGQVVYVCKACHGVSILAVNVEPILYHIVAERLAMPDAVDLLRRGVHDAAEAETIRLELETLYGELDRLAVERAEGLLTARQVKISTDIVNAKITKLQARQLDRERLRVLDGVPLGTPQVAGMIAELSPDRFRAVLDVLAEVVVQPVGKGGRISNPGRVQVNWR

SEQ ID NO: 517 - protein, 485 aa, synthetic construct
MIKKVAIYTRVSTTNQAEEGFSIDEQIDRLTKYAEAMGWQVSDTYTDAGFSGAKLVRPAMQRLINDIENKAFDTVLVYKLDRLSRSVRDTLYLVKDVFTKNKIDFISLNESIDTSSAMGSLFLTILSAINEFERENIKERMTMGKLGRAKSGKSMMWTKTAFGYYHNRKTGILEIVPLQATIVEQIFTDYLSGISLTRLRDKLNESGHIGKDIPWSYRTLRQTLDNPVYCGYIKFKDSLFEGMHKPIIPYETYLKVQKELGRRQQQTYERNNNPRPFQAKYMLSGMARCGYCGAPLRIVLGHKRKDGSRTMKYHCANRFPRKTKGITVYNDNKKCDSGTYDLSNLENTMIDNLIGLQENDDSLLKIINGNNQPILDTSSLKKQISQIDKKIQKNSDLYLNDFITMDELKDRTDSLQAEKKLLKAKISENKFSDSTDVFELVKAQLGSIPINELSYDNKKKIVNNLVSKVDVTADNVDIIFKFQLA

SEQ ID NO: 518 - protein, 485 aa, synthetic construct
MTKKVAIYTRVSTTNQAEEGFSIDEQIDRLTKYAEAMGWQVSDTYTDAGFSGAKLERPAMQRLINDIENKAFDTVLVYKLDRLSRSVRDTLYLVKDVFTRNKIDFISLNECIDTSSAMGSLFLTILSAINEFERENIKERMTMGKLGRAKSGKSMMWTKTAFGYYHNRKTGILEIVPLQATIVEQIFTDYLSGISLTKLRDKLNKSGHIGKDIPWSYRTLRQTLDNPVYCGYIKFKDSLFEGMHKPIIPYETYLKVQKELEERQQQTYERNNNPRPFQAKYMLSGMARCGYCGAPLRIVLGHKRKDGSRTMKYHCANRSPRKTKGVTVYNDNKKCDSGTYDLSNLENTVIDNLVGFQENNDGLLKIINGDNQPILDTSSFKKQISQIDKKIQKNSDLYLDDFITMDELRDRTDSLQAEKKLLKAKISENKFNDSTDVFELVKTQLGSTPINELSYDDKKKIVNNLVSKVDVTADNVDIIFKFQLA

SEQ ID NO: 519 - protein, 452 aa, synthetic construct
MKAAIYIRVSTREQVENYSIQAQTEKLTALCRSKDWDVYDIFIDGGYSGTNMNRPALNEMLSKLREIDAVVVYRLDRLSRSQRDTITLIEEYFLKNNVEFVSLSETLDTSSPFGRAMIGILSVFAQLERETIRDRMVMGKIKRIEAGLPLTTAKGRTFGYDVIDTKLYINEEEAKQLQLIYDIFEEEQSITFLQKRLKELGFKVRTYNCYNNWLTNDLYCGYVSYKDKVHVKGIHEPIISEEQFYRVQEIFTRMGKNPNMNRDSASLLNNLVVCSKCGLGFVHRRKDTMSRGKKYRYRYYSCKTYKHTHELEKCGNKIWRADRLEELIINRVSNYSFASRNVDKEDELDSLNEKLKIEHAKKKRLFDLYINGSYEVSELNSMMNDIDAQINYYESRIEANEGLKKSKKVQENLANLATVDYDSLEFREKQLYLKSLINKIYIDGEQVTIEWL

SEQ ID NO: 520 - protein, 469 aa, synthetic construct
MSYTTPVRAAVYLRISEDRSGEQLGVARQREDCLNLCDQRKWMPVEYLDNDVSASTGKRRPAYEQMLADITAGKIAAVVAWDLDRLHRRPIELEAFMSLADEKRLALATVAGDVDLATPQGRLVARLKGCVAAHETEHKKARQRRAARQKAERGHPNWSKAFGYLPGPNGPEPDPRTAPLVKQAYADILAGASLGDVCRQWNDAGAFTITGRPWTTTTLSKFLRKPRNAGLRAYKGARYGPVDRDAIVGKAQWSPLVDEATFWAAQAVLDAPGRAPGRKSVRRHLLTGLAGCGKCGNHLAGSYRTDGRVVYVCKACHGVAILADNIEPFLYHIVAERLAMPDAVDLLRREIHDAAEAETIRLELEALYGELDRLAVERAEGLLTARQVKISTDIVNAKIAKLQARQLDQERLRVFDGIPLGTPQVAGMIAELSPDRFRAVLDVLAEVVVQPVGKSGRIFNPERVQVNWR

SEQ ID NO: 521 - protein, 469 aa, synthetic construct
MSYTTPVRAAVYLRISEDRSGEQLGVARQREDCLKLCDQRKWVPVEYLDNDVSASTGKRRPAYEQMLADITAGRVAAVVAWDLDRLHRRPVELEAFMSLADEKRLALATVAGDVDLATPQGRLVARLKGCVAAHETEHKKARQRRAARQKAERGLPNWSKAFGYLPGPNGPGPDPRTAPLVKQAYADILAGASLGDVCRQWNDAGAFTITGRPWTTTTLSKFLRKPRNAGLRAYKGARYGPVDRDAIVGKAQWSPLVDEATFWAAQAVLDAPGRAPGRKSVRRHLLTGLAGCGKCGNHLAGSYRTDGRVVYVCKACHGVAILADNIEPILYHIVAERLAMPDAVGLLRREIHDAAEAETIRLELETLYGELDLLAVERAEGLLTARQVKISTDIVNAKITKLQARQQDQERLRVFDGIPLGTPQVAGMVAKLSPDRFRAVLDVLAEVVVQPVGKSGRIFNPERVQVNWR

SEQ ID NO: 522 - protein, 485 aa, synthetic construct
MTKKVAIYTRVSTTNQAEEGFSIDEQIDRLTKYADAMGWQVSGTYTDAGFSGAKLERPAMQRLISDIENKAFDTVLVYKLDRLSRSVRDTLYLVKDVFTKNKIDFISLSESINTSSAMGSLFLTILSAINEFERENIKERMTMGKLGRAKSGKSMMWTKTAFGYYHNRKTGILEIVPLQATIVEQIFTDYLSGISLTKLRDKLNESGHIGKDIPWSYRTLRQTLDNPVYCGYIKFKDSLFEGMHKPIIPYETYLKVQKELEVRQQQTYERNNNPRPFQAKYMLSGMARCGYCGAPLRIVLGHKRKDGSRTMKYHCANRFPRKTKGVTVYNDNKKCGSGTYDLSNLENTVIDNLIGLQENNDSLLKIINGNNQPIPDTSSFEKQISQIDKKIQKNSDLYLNDFITVDELKERADSLQAEKKLLEAKISENKFNNSTGVFELVKTQLGSIPINELSYDNKKKIVNNLVSKVDVTADNVDIIFKFQLA

SEQ ID NO: 523 - protein, 452 aa, synthetic construct
MKAAIYIRVSTREQVENYSIQAQTERLTALCRSKDWDVYDIFIDGGYSGSNMNRPALNEMLSKLHEIDAVVVYRLDRLSRSQRDTITLIEEYFLKNNVEFVSLSETLDTSSPFGRAMIGILSVFAQLERETIRDRMVMGKIKRIEAGLPLTTAKGRTFGYDVIDTKLYINEEEAKQLRLIYDIFEEEQSITFLQKRLKKLGFKVRTYSRYNNWLTNDLYCGYVSYKDKVHVKGIHEPIISEEQFYRVQEIFTRMGKNPNMNRDSASLLNNLVVCSRCGLGFVHRRKDAMSRNKKYHYRYYSCKTYKHIHELEKCGNKIWRADELEELVINRVNSYSLASRNVDKEDELDSLNEKLRTEHAKKKRLFDLYINGSCEVSELDSMMNDIDAQINYYESQIEANEELRKTKKIQENLADLATVDFDSLEFREKQLYLKSLINKIYIDGEQVTIEWL

SEQ ID NO: 524 - protein, 452 aa, synthetic construct
MKAAIYIRVSTHEQVANYSIQAQTEKLTALCRSKDWDVYDIFIDGGYSGSNMNRPALNEMLSKLHEIDAVVVYRLDRLSRSQRDTITLVEEYFLKNNVEFVSLSETLDTSSPFGRAMIGILSVFAQLERETIRDRTVMGKIKRIEAGLPLTTAKGRTFGYDVIDTKLYINEEEAKQLQLIYDIFEEEQSITLLQKRLKKLGFKVRTYNRYNSWLTNDLYCGYVSYKDKVHVKGIHEPIISEEQFYRVQEIFTRMGKNPNMNRDSASLLSNLVVCSKCGLSFVHRSKDTMSRGKKYHYRYYSCKTYKHTHELEKCGNKTWRADKLEELIISRVNNYSFASRNVDKEDELDSLNEKLKIEHAKKKRLFDLYINGSYEVSELDSMMNDIDAQINYYESQIEASEELKKNKKIQENLADLATVDFDSLGFREKQLYLKSLINKIYIDGEQVTIEWL

SEQ ID NO: 525 - protein, 469 aa, synthetic construct
MSYTTPVRAAVYLRISEDRSGEQLGVARQREDCLKLCDQRKWVPVEYLDNDVSASTGKRRPAYEQMLADITAGKIAAVVAWDLDRLHRRPIELEAFMSLADEKRLALATVAGDVDLATPQGRLVARLKGSVAAHETEHKRARQRRAARQKAERGYPNWSKAFGYLPGPNGPEPDPRTAPLVKQAYADILAGASLGDVCRQWNDAGAFTITGRPWTTTTLSKFLRKPRNAGLRAYKGARYGPVDRDAIVGKAQWSPLVDEATFWAAQAVLDAPGRAPGRKSVRRHLLTGLAGCGKCGNHLAGSYRTDGQVVYVCKACHGVAILADNIESILYHIVAERLAMPDAVDLLRREIHDAAEAETIRLELETLYGELDRLAVERAEGLLTARQVKISTDIVNAKITKLQARQLDQERMRVFDGIPLGTPQVAGMIAELSPDRFRAVLDVLAEVVVQPVGKSGRIFNPERVQVNWR

SEQ ID NO: 526 - protein, 469 aa, synthetic construct
MSYTTPVRAAVYLRISEDRSGEQLGVARQREDCLELCGQRKWEPVEYLDNDVSASTGKRRPAYEQMLADITAGKIAAVVAWDLDRLHRRPIELEAFMSLADEKRLALATVAGDVDLATPQGRLVARLKGSVAAHETEHKKARQRRAARQKAERGLPNWSKAFGYLPGPNGPEPDPRTAPLVKQAYADILAGASLGDVCRQWNAAGAFTITGRPWTTTTLSKFLRKPRNAGLRAYKGARYGPVDRDAIVGKAQWSPLVDEATFWAAQAVLDAPGRAPGRKSVRRHLLTGLAGCGKCGNHLAGSYRTDGRVVYVCKACHGVAILADNIEPILYHIVAERLAMPDAVDLLHREIHDAAEAETIRLELETLYGDLDRLAVERAEGLLTARQVKISTDIVNAKITKLQARQLDQERLRVLDGIPLGTPQVAGMIAGLSPDRFRTVLDVLAEVVVQPVGKSGRVFNPERVQVNWR

SEQ ID NO: 527 - protein, 485 aa, synthetic construct
MTKKVAIYTRVSTTNQAEEGFSIDEQIDRLTKYAEAMGWQVSDTYTDAGSSGAKLERPAMQRLINDIENKAFDTVLVYKLDRLSRSVRDTLYLVKDVFTKNKIDFISLNESIDTSSAMGSLFLTILSAINEFERENIKERMTMGKLGRAKSGKSMMWTKTAFGYYHNRKTGILEIVPLQATIVEQIFTDYLSGISLTKLRDKLNESGHIGKDIPWSYRTLRQTLDNPVYCGYIKFKDSLFEGMHKPIIPYETYLKVQKELEERQQQTYERNNNPRPFQAKYMLSGMARCGYCGAPLRIVLGHKRKDGSRTVKYHCVNRFPRKTRGVTVYNDNKKCDSGTYDLSNLENTVIDNLIGFQENDDSLLRIINGSNQPIPDTSSFEKQISQIDKKIQKNSDLYLNDFITMDELKDRTDSLQAEKKLLKAKISENKFNDSTDVFELVKTQLGSIPINELSYDNKKKIVNNLVSKVDVTADNVDIIFKFQLA

SEQ ID NO: 528 - protein, 469 aa, synthetic construct
MSYTTPVRAAVYLRISEDRSGEQLGVARQREDCLKLCGQRKWEPVEYLDNDVSASTGKRRPAYEQMLADITAGKIAAVVAWDLDRLHRRPIELEAFMSLADEKRLALATVAGDVDLATPQGRLVARLKGSVAAHETEHKKARQRRAARQKAERGYPNWSKAFGYLPGPNGPEPDPRTAPLVKQAYADILAGASLGDVCRQWNDAGAFTITGRPWTTTTLSKFLRKPRNAGLRAYKGARYGPVDRNAIVGKAQWSPLVDEATFWAAQAVLDAPGRAPGRKSVRRHLLTGLAGCGKCGNHLAGSYRTDGKVVYVCKACHGVAILADNIEPILYHIVAERLAKPDAVDLLRREIHDAAEAETIRLELETLYGELDRLAVERAEGLLTAHQVKISTDIVNAKITQLQARQLDQERLRVFDGIPLGTPQVADMIAELSPDRFRAVLDVLAEVVVQPVGKGGRIFNPGRVQVNWR

SEQ ID NO: 529 - protein, 469 aa, synthetic construct
MCYTTPVRAAVYLRISEDRSGEQLGVARQREDCLKLCDQRKWVPVEYLDNDVSASTGKRRPAYEQMLADITAGKIAAVVAWDLDRLHRRPIELEAFMSLADEKRLALATVAGDVDLATPQGRLVARLKGCVAAHETEHKKARQRRAARQKAERGLPNWSKAFGYLPGPNGPEPDPRTAPLVKQAYADILAGASLGDVCRQWNDAGAFTITGRPWTTTTLSKFLRKPRNAGLRAYKGARYGPVDRDAIVGKAQWSPLVDEATFWAAQAVLDAPGRAPGRKSVRRHLLTGLAGCGKCGNHLAGSYRTDGRVVYVCKACHGVAILADNIEPILYHIVAERLAMPDAVDLLRREIRDAAEAETIRLELETLYGELDRLAVERAEGLLSARQVKISTDIVNAKITKLQARQLDQERLRVLDGIPLGTPQVAGMIAELSPDRFRAVLDVLAEVVVRPVGKSGRILNPERVQVNWR

SEQ ID NO: 530 - protein, 452 aa, synthetic construct
MKAAIYIRVSTREQVENYSIQAQTEKLTALCRSKDWDVYDIFIDGGYSGSNMNRPALNEMLSKLHEIDAVVVYRLDRLSRSQRDTITLIEEYFLKNNVEFVSLSETLDTSSPFGRAMIGVLSVFAQLERETIRDRMVMGKIKRIEAGLPLTTAKGRTFGYDVIDTKLYINEEEAKQLRLIYDIFEEEQSITFLQKRLKKLGFKVRTYNRYNNWLTNDLYCGYVSYKDKVHVKGIHEPIISEEQFYRVQEIFTRMGKNPNMNRDSASLLNGLVVCSRCGLGFVHRRKDAMSRDKKYHYRYYSCKTYKHIHELEKCGNKIWRADKLEELIIDRVNNYSLASRNVDKEDELGSLNEKLKAEHAKKKRLFDLYINGSYEVSELDSMMSDIDAQISYYEGQIEANEELKKNKKIQENLAYLATVDFDSLEFREKQRYLKSLINKIYIDGEQVSIEWL

SEQ ID NO: 531 - protein, 452 aa, synthetic construct
MKAAIYIRVSTREQVENYSIQAQTEKLTALCRSKDWDVYDIFIDGGYSGSNMNRPALNEMLSKLHEIDAVVVYRLDRLSRSQRDTITLIEEYFLKNNVEFVSLSETLDTSSPFGRAMIGILSVFAQLERETIRDRMVMGKIKRIEAGLPLTTAKGRTFGYDVIDTKLYINEEEAKQLQLIYDIFEEEQSITFLQKRLKKLGYKVRTYSRYTSWLTNDLYCGYVSYKDKVHVKGIHEPIISEEQFYRVQEIFTRMGKNPNMNRDSASLLNNLVVCSKCGLGFVHRRKDTMSRGKKYHYRYYSCKTYKHTHELEKCGNKIWRADKLEELVINRVNNYSSASRNADKEDELDSLNEKLRIEHAKKKRLFDLYINGSYDVGELDSMMSGIDAQINYYESQIEANEELKKNKKIQENLAQLATVDYDSLEFREKQLYLKSLINKIYIDGEQVTIEWL

SEQ ID NO: 532 - protein, 469 aa, synthetic construct
MSYTTPVRAAVYLRISEDRSGEQLGVARQREDCLELCGQRKWEPVEYLDNDVSASTGNRRPAYEQMLADITAGKIAAVVAWDLDRLHRRPIELEAFMSLADEKRLALATVAGDVDLATPQGRLVARLKGSVAAHETEHKKARQRRAARQKAERGLPNWSKAFGYLPGPNGPEPDPRTAPLVKQAYADILAGASLGDVCRQWNDAGAFTITGRPWTTTTLSKFLRKPRNAGLRAYKGARYGPVDRDAIVGKAQWSPLVDEATFWAAQAVLDAPGRAPGRKSVRRHLLTGLAGCGKCGNHLAGSYRTDGRVVYVCKACHGVAILADNIEPILYHIVAECLAMPDAVGLLRREIHDAAEAETIRLELETLYGELDSLAVERAEGLLTARQVKICTDIVNAKITKLQARQLDQERLRVLDGIPLGTPQVAGMITELSPDRFRAVLDVLAEVVVQPVGKSGRIFNPERVQVNWR

SEQ ID NO: 533 - protein, 469 aa, synthetic construct
MSYTTPVRAAVYLRISEDRSGEQLGVTRQREDCLKLCDQRKWVPVEYLDNDVSASTGKRRPAYEQMLADIAAGKIAAVVAWDLDRLHRRPIELEAFMSLADEKRLALATVAGDVDLATPQGRLVARLKGSVAAHETEHKKARQRRAARQKAERGHPNWSKAFGYLPGPNGPEPDPRTAPLVKQAYADILAGASLGDVCRQWNDAGAFTITGRLWTTTTLSKFLRKPRNAGLRAYKGARYGPVDRDAIVGKAQWSPLVDEATFWAAQAVLDTPGRAPGRKSVRRHLLTGLAGCGKCGNHLAGSYRTDGRVVYVCKACHGVAILADNIEPILYHIVAERLAMPDAVDLLRREIHDAVEAETIRLELETLYGELDRLAVERAEGLLTARQVKISTDIVNAKIAKLQARQLDQERLRVFDGIPLGTPQVAGMIAELSPDRFRAVLDVLAEVVVRPVGKSGRIFNPERVQVNWR

SEQ ID NO: 534 - protein, 452 aa, synthetic construct
MKAAIYIRVSTREQVENYSIQAQTEKLTALCRSKDWDVYDIFIDGGYSGSNMNRPALNEMLSKLHEIDAVVVYRLDRLSRSQRDTITLIEEYFLKNNVEFVSLSETLDTSSPFGRAMIGILSVFAQLERETIRDRMVMGKIKRIEAGLPLTTAKGRTFGYDVIDTKLYINKEEAKQLRLIYDIFEEEQSITFLQKRLKKLGFKVRTYNRYNNWLTNDLYCGYVSYKDKVHVKGIHEPIISEEQFYRVQEIFARMGKNPNMNRDSASLLNNLVVCSKCGLGFVHRRKDAMGRDKKYHYRYYSCKTYKHIHELEKCGNKIWRADKLEELVINRVNSYSPASRNTGKEDELDNLNEKLKIEHAKKKRLFDLYLNGSYEVSELDGMMSDIDAQINYYESQIEASEELKRNKKIQETLADLATVDFDSLEFREKQLYLKSLINKIYIDGEQVTIEWL

SEQ ID NO: 535 - protein, 452 aa, synthetic construct
MKAAIYIRVSTREQVENYSIQAQTEKLTALCRSKDWDVYDIFIDGGYSGSNMNRPALNEMLSKLHEIDAVVVYRLDRLSRSQRDTITLIEEYFLKNNVEFVSLSETLDTSSPFGRAMIGILSVFAQLERETIRDRMVMGKIKRIEAGLPLTTAKGRTFGYDVIDTKLYINEEEAKQLRLIYDIFEEERSITFLQKRLKQLGFKVRTYNCYNNWLTNDLYCGYVSYKDKVHVKGIHEPIISEEQFYRVQEIFTRMCKNPNMNRDSASLLNNLVVCSKCGLGFVHRRKDAMSRDKKYHYRYYSCKTYKHIHELEKCGNKIWRADKLEELIVNRVNNYSFASRNADKEDELDSLSEKLKAEHAKKKRLFDLYINGSFEVSELDSMMNDIDAQINYYESQIDANRELKKNKKIQENLAHLATVDFDSLEFREKQLYLKSLIDKIYIDGEQVTIEWL

SEQ ID NO: 536 - protein, 485 aa, synthetic construct
MTKKVAIYTRVSTTNQAEEGFSIDEQIDRLTKYAEAMGWQVSDTYTDAGFSGAKLERPAMQRLINDIENKAFDTVLVYKLDRLSRSVRDTLYLVKDVFTKNKIDFISLNESIDTSCAMGSLFLAILSAINEFERENIKERMTMGKLGRAKSGKSMMWTKTAFGYHHNRKTGILEVVPLQATIVEQIFTGYLSGISLTKLRDKLNESGHIGKDIPWSYRTLRQTLDNPVYCGYIKFKDSLFEGMHKPIIPYETYLKVQKELEERQQQTYERNNNPRPFQAKYMLSGMARCGYCGAPLRIVLGHKRKDGSRTMKYHCANRFPRKTKGVTVYNDNKKCDSGTYDLSNLENTVIDNLIGFQENNDSLLKIINGNNQPILDTSSFKKQISQIDKKIQKNSDLYLNDFITMDELKDRTDSLQAERKLLKAKISENKFNDSTDVFELVKTQLGSIPINELCYEDKKKIVNNLVSKVDVTADNVDIIFKFQLA

SEQ ID NO: 537 - protein, 485 aa, synthetic construct
MTKKVAIYTRVSTTNQAEEGFSIDEQIDRLTKYAEAMGWQVSDTYTDAGFSGAKLERPAMQRLINDIENKAFDTVLVYKLDRLSRSVRDTLYLVKDVFTKNKIDFISLNESINTSSAMGSLFLTILSAINEFERENIKERMTMGKLGRAKSGKSMMWTKTAFGYYHNRKTGILEIVPLQATIVKQIFTDYLSGISLTKLRDKLNESGHIGKDIPWSYRTLRQTLDNPVYCGYIKFKDSLFEGMHKPIIPYETYLKVQKELEERQQQTYERNNNPRPFQAKYMLSGVARCGYCGAPLRIVLGHKRKDGSRTMKYHCANRFPRKTKGITVYNDNKKCDSGTYDLSNLENTVIDNLIGLQENNDSLLKVINGNNQPILDTSSFKERISQIDKKIQKNSDLYLNDFITMDELKDRTDSLQAEKKLLEAKISENKSNDSTDVFELVKTRLGSIPINELSYDNKKKIVNNLVGKVDVTADNVDIIFKFQLA

SEQ ID NO: 538 - protein, 469 aa, synthetic construct
MSYTTPVRAAVYLRISEDRSGEQLGVARQREDCLKLCDQRKWVPVEYLDNDVSASTGKRRPAYEQMLADITAGKIAAVVAWDLDRLHRRPVELEAFMSLADEKRLALATVAGDVDLATPQGRLVARLKGCVAAHETEHKKARQRRAARQKAERGHPNWSKAFGYLPGPNGPEPDPRTAPLVKQAYADILAGASLGDVCRQWNGAGAFTITGRPWTTTTLSKFLRKPRNAGLRAYKGARYGPVDRDAIVGKAQWSPLVDEATFWAAQAVLDAPGRAPGRKSVRRHLLTGLAGCGKCGNHLAGSYRTDGRVVYVCKACHGVAILADNIEPMLYHTVAVRLAMPDAVDLLRREVHDAAEAETIRLELETLYGELDRLAVERAEGLLTARQVKISTDIVNAKITRLQARQLDQERLRVLDGIPLGTPQVAGMIAELSPDRFRAVLDVLAEVVVQPVGKSGRIFNPERVQVNWR

SEQ ID NO: 539 - protein, 469 aa, synthetic construct
MSYTTPVRAAVYLRISEDRSGEQLGVARQREDCLKLCGQRKWEPVEYLDNDVSASTGKRRPAYEQMLADITAGKIAAVVAWDLDRLHRRPIELEAFMSLADEKRLALATVAGDVDLATPQGRLVARLKGSVAAHETEHKKARQRRAARQKAERGHPNWSKAFGYLPGPNGPEPDPRTAPLVKQAYADILAGASLGDVCRQWNDAGAFTVTGRPWTTTTLSKFLRKPRNAGLRAYKGARYGPVDRDAIVGKAQWSPLVDEATFWAAQAVLDAPGRAPGRKSVRRHLLTGLAGCGKCGNHLAGSYRTDGRVVYVCKACHGVAILADNIEPTLYHIVAERLAMPDAVDLLRRETHDAAEAETIRLELETLYGELDRLAVERAEGLLTARQVKISTDIVNAKITKLQARQLDQERQRVFDGIPLGTPQVAGMIAELSPDRFRAVLDVLAEVVVQPVGKGGRIFNPERVQVNWR

SEQ ID NO: 540 - protein, 485 aa, synthetic construct
MTKKVAIYTRVSTTNQAEEGFSIDEQIDRLTKYAEAMGWQVSDTYTDAGFSGAKLERPAMQRLINDIENKAFDTVLVYKLDRLSRSVRDTLYLVKDVFTKNKIDFISLNESINTSSAMGSLFLTILSAINEFERENIKERMTMGKLGRAKGGKSMMWTKTAFGYYHNRKTGILEIVPLQATIVEQIFTDYLSGISLTKLRDKLNESGHIGKDIPWSYRTLRQTLDNPVYCGYIKFKDSLFEGMHKPIIPYETYLKVQKELEERQQQTYERNNNPRPFQAKYMLSGMARCGYCGAPLKIVLGHKRKDGSRTMKYHCANRFPRETKGVTVYNDNKKCDSGTYDLSNLENTVIDSLIGFQENNDSLLKIINGNDQPILDTSSIKKQISQIDEKIQKNSDLYLNDFITMDELRARTDSLQAEKKLLKAKISENKFNDSTDVFELVRTQLGSIPINELSYDNKKKIVNNLVSKVDVTADNVDIIFKFQLA

SEQ ID NO: 541 - protein, 469 aa, synthetic construct
MSYTTPVRAAVYLRISEDRSGEQLGVARQREDCLKLCDQRRWVPVEYLDNDVSASTGKRRPAYEQMLADITAGKIAAVVAWDLDRLHRRPIELEAFMSLADENRLALATVAGDVDLASPQGRLVARLKGSVAAHETEHKKARQRRAARQKAERGHPNWSKAFGYLPGPNGPEPDPRTAPLVKQAYADILAGASLGDVCRRWNDAGAFTITGRPWTTTTLSKFLRKPRNAGLRAYKGARYGPVDRDAIVGKAQWSPLVDEATFWAAQAVLDAPGRAPGRKSVRRHLLTGLAGCGKCGNHLAGSYRTDGRVVYVCKACHGVAILADNIEPTLYHIVAERLAMPNAVDLLRREIHDAAEAETIRLELETLYGELDRLAVERAEGLLTARQVKISTDIVNAKITKLQARQQDQERLRVLDGIPLGTPQVAGVIAELSPDRFRAVLDVLVEVVVQPVGKSGRIFNPERVRVNWR

SEQ ID NO: 542 - protein, 452 aa, synthetic construct
MKAAIYIRVSTREQVENYSIQAQTEKLTALCRSKDWDVYDIFIDGGYSGSNMNRPALNEMLSKLHEIDAVVVYRLDRLSRSQRDTITLIEEYFLKNNVEFVSLSETLDTSSPFGRAMIGILSVFAQLERETIRDRMVMGKIKRIEAGLPLTTAKGRTFGYDVIDTKLYINKEEARQLQLIYDIFEEEQSITFLQKRLKELGFKVRTYNRYNNWLTNDLYCGYVSYKDKVHVKGIHEPIISEEQFYRVQEIFTRMGKNPNMNRGSASLLNNLVVCGKCGLGFVHRRKDAMSRDKKYHYRYYSCKTYKHIHELEKCGNKIWRADKLEELIINRVNNYSLASRNVDKEDELDSLNEKLKIEHAKKKRLFDLYINGSYEVSELDSMMSDIDAQINYYESQIEANEGLKKNKKTQENLAYLATVDFDSLEFREKQLYLKSLISKIYIDGEQVTIEWL

SEQ ID NO: 543 - protein, 469 aa, synthetic construct
MSYTTPVRAAVYLRISEDRSGEQLGVARQREDCLKLCGQRKWVPVEYLDNDVSASTGKRRPAYEQMLADITAGKIAAVVAWDLDRLHRRPIELEAFMSLADEKRLALATVAGDVDLATPQGRLVARLKGCVAAHETEHKKARQRRAARQKAERGHPNWSKAFGYLPGPNGPEPDPRTAPLVKQAYADILAGASLGDVCRQWNDAGAFTVTGRPWTTTALSKFLRKPRNAGLRAYKGARYGPVDRDAIVGKAQWSPLVDEATFWVAQAVLDAPGRAPGRKSVRRHLLTGLAGCGKCGNHLAGSYRADGQIVYVCKACHGVSILADNIEPILYHIVAERLAMPDAVDLLRREIHDEAEAETIRLELDTLYGELDRLAVERAEGLLTARQVKISTDIVNAKITKLQARQLDQERQRVFDGIPLGTPRVAGVIAELSPDRFRAVLDVLAEVVVQPVGKGGRVFNPERVQVNWR

SEQ ID NO: 544 - protein, 485 aa, synthetic construct
MTKKVAIYTRVSTTNQAEEGFSIDEQIDRLTKYAGAMGWQVSDTYTDAGFSGAKLERPAMQRLINDIENKAFDTVLVYKLDRLSRSVRDTLYLVKDVFTKNKIDFISLNESINTSSAMGSLFLTILSAINEFERENIKERMTMGKLGRARSGKSMMWTKTAFGYYHNRKTGVLEVVPLQATIVEQIFTDYLSGISLTKLRDKLNESGHIGKDIPWSYRTLRQTLDNPVYCGYIKFKDSLFEGMHKPIIPYETYLKVQKELEERQQQTYERNNNPRPFQAKYMLSGMARCGYCGAPLRIVLGHKRKDGSRTMKYHCANRFPRRTKGVTVYNDNKKCDSGTYDLSNLENTVIDNLIGLQENNDSLLKIINGNNQPILDTSSFKKQISQIDKKIQKNSDLYLNDFITMDELKERTDGLQAERKLLKAKISENKFNDSTDVFELVKTQLGSIPINELSYDNKKKIVNSLVSKVDVTADSVNIIFKFQLA

SEQ ID NO: 545 - protein, 485 aa, synthetic construct
MTKKVAIYTRVSTTHQAEEGFSIDEQIDRLTKYAEAMGWQVSDTYTDAGSSGAKLERPAMQRLINDIENKAFDTVLVYKLDRLSRSVRDTLYLVKDVFTKNKIDFISLNESIDTSSAMGNLFLTVLSAINEFERENIKERMTMGKLGRAKSGKSMMWTKTAFGYYHNRKTGILEIVPLQAAIVVQIFTDYLSGISLTKLRDKLNESGHIGKDIPWSYRTLRQTLDNPVYCGYIKFKDSLFEGMHKPIIPHETYLKVQKELEERQRQTYERNNNPRPFQAKYMLSGMARCGYCGAPLRIVLGHKRKDGSRTMKYHCANRFPRKTKGVTAYNDNKKCNSGIYDLSNLENTVIDYLVGFQENNDSLLKIINGNNQPILDTSSFKKQISQIDKKIQKNSDLYLNDFITMDELKDRTDSLQAEKKLLKAKISENKFNDSTDVFELVKTQLGSIPISELSYDNKKKIVNNLVSKVDVTADNVDIIFKFQLA

SEQ ID NO: 546 - protein, 485 aa, synthetic construct
MTKKVAIYTRVSTTNQAEEGFSIDEQVDRLTKYAEAMGWQVSDTYTDAGSSGAKLERPAMQRLINDIENKAFDTVLVYKLDRLSRSVRDTLYLVKDVFTKNKIDFISLNESIDTSSAMGSLFLTILSAINEFERENIKERMTMGKLGRAKSGKSMMWTKTAFGYYHNRKTGILEIVPLQATIVEQIFTDYLSGISLTKLRDKLNESGHIGKDIPWSYRTLRQTLDNPVYCGYIKFKDSLFEGMHKPIIPYETYLKVQKELEERQQQIYERNNNPRPFQAKYMLSGMARCGYCGAPLKIVLGHKRKDGSRTMKYHCANRFPRKTKGVTVYNDNKKCDSGTYDLSNLENTVIDNLIGFQENNDSLLKILNGNNQPILDTSSFKKRISQIDKKIQKNSDLYLNDFITMDELKGRTDSLQAEKKLLEAKIGENKFNDSTDVFELVKTQLGSIPINELSYDDKKKIVNNLVSKVDVTADNVDIIFKFQLG

SEQ ID NO: 547 - protein, 470 aa, synthetic construct
MSYTTPVRAAVYLRISEDRSGEQLGVARQREDCLKLCGQRKWVPVEYLDNDVSASTGKRRPAYEQMLADITADKIAAVVAWDLDRLHRRPIELEAFMSLADEKRLALATVAGDVDLATPQGRLVARLKGCVAAHETEHKKARQRRAARQKAERGHPNWSKAFGYLPGPNGPEPDPRTAPLVKQAYADILAGASLGDVCRQWNDAGAFTITGRPWTTTTLSKFLRKPRNAGLRAYKGARYGPVDRDAIVGKAQWSPLVDEATFWAAQAVLDAPGRAPGRKSVRRHLLTGLAGCGKCGNHLAGSYRTDGRVVYVCKACHGVAILADNIEPILYHIVAERLAMPDAVDLLRREIHDAAEAEAIRLELETLYGELDRLAVERAEGLLTARQVKISTDIVNAKITKLQARQLDQERLRVLDGIPLGTPQAADMIAELSPDRFRAVLDVLAEVVVQPVGKSGRIFNPERVQVNWRQ

SEQ ID NO: 548 - protein, 469 aa, synthetic construct
MSYTTPVRAAVYLRISEDRSGEQQGVARQREDCLKLCDQREWVPVEYLDNDVSASTGKRRPAYEQMLADITAGKIAAVVAWDLDRLHRRPVELEAFMSLADEKRLALATVAGDVDLATPQGRLVARLKGCVAAHETEHKKARQRRAARQKAERGLPNWSKAFGYLPGPNGPEPDPRTAPLVKQAYADILAGASLGDVCRQWNDAGAFTITGRPWTTTTLSKFLRKPRNAGLRAYKGARYGPVDRDAIVGKAQWSPLVDEATFWAAQAVLDAPGRAPGRKSVRRHLLTGLAGCGKCGNHLAGSYRTDGQIVYVCKACHGVSILAVNIEPILYHVVAERLAMPDAADLLRREIHDVAEAETIRLELETLYGELDRLAVERAEGLLTARQVKISTDIVNAKITKLQARQLDQERLRVLDGIPLGTPQVAGMIAELSPDRFRAVLDVLAEVVVQPVSKSGRIFNPERVQVNWR

SEQ ID NO: 549 - protein, 469 aa, synthetic construct
MCYTTPVRAAVYLRISEDRSGEQLGVARQREDCLKLCDQRKWVPVEYLDNDVSASTGKRRPAYEQMLADITAGKIAAVVAWDLDRLHRRPIELEAFMSLADEKRLALATVAGDVDLATPQGRLVARLKGSVAAHETEHKKARQRRAARQKAERGHPNWSKAFGYLPGPNGPEPDPRTAPLVKQAYADILAGASLGDVCRRWNDAGAFTITGRPWTTTTLSKFLRKPRNAGLRAYKGAPYGPVDCNAIVGKAQWSPLVDEATFWAAQAVLDAPGRAPGRKSVRRHLLTGLAGCGKCGNHLSGSYRTDGRVVYVCKACHGVAILADNIEPILYHIVAERLAMPDAVDLLRREIHDAAEAETIRLELETLYGELDRLAVERAEGLLTARQVKISTDIVSAKVTKLQACQLDQERLRVFDDIPLGTPQVAGVIAELSPDRFRAVLDVLAEVVVQPVGKSGRTFNPERVQVNWR

SEQ ID NO: 550 - protein, 485 aa, synthetic construct
MAKKVAIYTRVSTTNQAEEGFSIDEQIDRLTKYAEAMGWQVSGTYTDAGFSGAKLERPAMQRLINDIENKAFDTVLVYKLDRLSRNVRDTLYLVKDVFTKNKIDFISLNESIDTSSAMGSLFLTILSAINEFERENIKERMTMGKLGRAKSGKSMMWTKTAFGYYHNRKTGILEIVPLQATIVEQIFTDYLSGISLTKLRDKLNESGHIGKDIPWSYRTLRQTLVNPVYCGYIKFKGSLFEGMHKPIIPYETYLKVQKELEERQQQTYERNNNPRPFQAKYMLSGMARCGYCGAPLRIVLGHKRKDGSRTMKYHCANRFPRKTKGVTVYNDNKKCDSGTYDLSSLENTVIDNLIGFQENNDSLLKIINGNNQPIPDTSSFKKRISQIDKKIQKVSDLYLNDFITMDELKGRTDSLQAEKKLLKAKISENKFNDSTDVFELVKTQLGSIPINELNYDNKKRIVNNLVSKVDVTAVNVDIIFKFQLA

SEQ ID NO: 551 - protein, 469 aa, synthetic construct
MSYTTPVRAAVYLRISEDRSGEQLGVARQREDCLKLCDQRKWVPVEYLDNDVSASTGKRRPAYEQMLADITAGKIAAVVAWDLDRLHRRPIELEAFMSLADEKRLALATVAGDVDLATPQGRLVARLKGSVAAHETEHKKARQRRAARQKAERGHPNWSKAFGYLPGPNGPEPDPQTAPLVKQAYADILAGASLGDVCRQWNDAGAFTITGRPWTTTTLSKFLRKPRNAGLRAYRGARYGPVDRNAIVGKAQWSPLVDEATFWAAQAVLDAPGRAPGRKSVRRHLLTGLAGCGKCGNHLAGSYRTDGRVVYVCKACHGVAILADNIEPILYHIVAERLAMPDAVDLLRREIHDAAEAETIRLELETLYGELDRLAVERAEGLLTARQVKISTDIVNAKITKLQARQLDQERLRVFDGIPLGTPQVAGMIAELSPNRFRAVLDVLAEVVVQPVGKSSRIFNPERVQVNWR

SEQ ID NO: 552 - protein, 485 aa, synthetic construct
MTKKVAIYTRVSTTNQAEEGFSIDEQIDRLTKYAEAMGWQVSDTYTDAGFSGAKLDRPAMQRLINDIENKAFDTVLVYKLDRLSRSVRDTLYLVKDVFTKNKIDFISLSESIDTSSAMGSLFLTILSAINEFERENIKERMTMGKLGRAKSGKSMMWTKTAFGYYHNRETGILEIVPLQATIVEQIFTDYLSGISLTKLRDKLNESGHIGKDIPWSYRTLRQTLDNPVYCGYIKFKDSLFEGMHKPIIPYETYLKVQKELEERQQQAYERNNNPRPFQAKYMLSGMARCGYCGAPLRIVLGHKRKDGSRTMRYHCANRFPRKTKGVTVYNDNRKCDSGTYDLSNLENTVIDNLIGLQEDNDSLLKIINGNNQPILDTSSFKKQISRIDKKIQKNSDLYLNDFITMDELKDRTYSLQAEKKLLKAKISENKFNDSTDVFELVKTQLGSIPINELSYDNKKKIVNNLVSKVEVTADNVDIIFKFQLA

SEQ ID NO: 553 - protein, 469 aa, synthetic construct
MCYTTPVRAAVYLRISEDRSGEQLGVARQREDCLELCGQRKWEPVEYLDNDVSASTGKRRPAYEQMLADITAGKIAAVVAWDLDRLHRRPVELEAFMCLADEKRLALATVAGDVDLATPQGRLVARLKGSVAAHETEHKKARQRRAARQKAERGLPNWSKAFGYLSGPNGPEPDPRTAPLVEQAYADILAGASLGDVCRRWNGAGAFTITGRPWTTTTLSKFLRKPRNAGLRAYKGARYGPVDRGAIVGKAQWSPLVDEATFWAAQAVLDAPGRAPGRKSVRRHLLTGLAGCGKCGNHLAGSYRTDGKVVYVCKACHGVAILADNIVPILYRIVAERLAMPGAVDLLRCEIHDAAEAETIRLELETLYGELDRLAVERAEGLLTARQVKISTDIVSAKITKLQARQQDQERLRVLDGIPLGTPRVAGMIAELSPDRFRAVLDVLAEVVVQPVGKGGRIFNPERVQVNWR

SEQ ID NO: 554 - protein, 485 aa, synthetic construct
MTKKVAIYTRVSTTNQAEEGFSIDEQIDRLTKYAEAMGWQVSDTYTDAGLSGAKLERPAMQRLINDIENKAFDTVLVYKLDRLSRSVRDTLYLVKDVFTKNKIDFISLNESIDTSSAMGSLFLTILSAINEFERENIKERMTMGKLGRAKSGKSMMWTKTAFGYYHNRKTGILEIVPLQATIVEQIFTDYLSGISLTKLRDKLNESGHIGKDIPWSYRTLRQTLDNPVYCGYIKFRGSLFEGMHKPIIPYETYLRVQKELEERQQQAYERNNNPRPFQAKYMLSGTARCGYCGAPLRIVLGHKRKDGSRAMKYHCANRFPRRTKGVTVYNDNKKCDSGTYDLSDLENTVINSLIGFQENNDSLLKIINGNNQPILDTSRLKKQIGQIDKKIQKNSDLYLNDFITMDELRDRTDSLQAEKKLLKAKISEDKSNDSTDVFELVKTQLGSIPINELSYGNKKKIVNNLVSKVDVTADNVDIIFKFQLA

SEQ ID NO: 555 - protein, 469 aa, synthetic construct
MHYTTPVRAAVYLRISEDRSGEQLGVARQREDCLKLCGQRKWEPVEYLDNDVSASTGKRRPAYEQMLADITAGKIAAVVAWDLDRLHRRPIELEAFMSLADEKRLALATVAGDVDLATPQGRLVARLKGSVAAHETEHKKARQRRAARQKAERGYPNWSKAFGYLPGPNGPEPDPRAAPLVKQAYADILAGASLGDVCRQWNDAGAFTITGRPWTTTTLSKFLRKPRNAGLRAYKGARYGPVDRDAIVGKAQWSPLVDEATFWAAQAVLDAPGRAPGRKSVRRHLLTGLAGCGKCGNHLAGSYRTDGRVVYVCKACHGVAILADNIEPILYHIVTERLAMPGAVDLLRREIHDATEAETIRLELETLYGELDRLAVERAEGLLTARQVKISTDIVNAKIAKLQACQLDQERLRVLDGIPLGTPQVAGMIAELSPDRFRAVLDALAEVVVQPVGKGGRIFNPERVQVNWR

SEQ ID NO: 556 - protein, 452 aa, synthetic construct
MKAAIYIRVSTREQVENYSIQAQTEKLTALCRSKDWDVYDIFIDGGYSGSNMNRPALNEMLSKLHEIDAVVVYRLDRLSRSQRDTITLIEEYFLKNNVEFVSLSETLDTSSPFGRAMIGILSVFAQLERETIRDRMVMGKIKRVEAGLPLTTARGRTFGYDVIDTKLYINEEEAKQLQLIYDIFEEEQSITFLQKRLKELGFKVRTYSRYNNWLTNDLYCGYVSYKDKVHVKGIHEPIISEEQFYRVQEIFTRMGKNPNMNRDSASLLNNLVVCSKCGRGFVHRRKDTMSRGKKYHYRYYSCKTYKHIHELEKCGNKIWRADELEELIINRVNNYSFASRNVDKEDELDSLNEKLRIEHAKRKRLFDLYINGSYEVSELDSMMNDIDAQINYYESQIEANEELKKTKKIQENLANLATVDYDSLEFREKQLYLKSLINKIYIDGEQVTIEWL

SEQ ID NO: 557 - protein, 469 aa, synthetic construct
MSYTTPVRAAVYLRISEDRSGEQLGVARQREDCLKLCDQRRWVPVEYLDNDVSASTGKRRPAYEQMLADITAGKIAAVVAWDLDRLHRRPIELEAFMSLADEKRLALATVAGDVDLATPQGRLVARLKGSVAAHETEHKRARQRRAARQKAERGHPNWSKAFGYLPGPNGPEPDPRTAPLVERAYADILAGASLGDVCRQWNDAGAFTITGRPWTTTTLSKFLRKPRNAGLRAYKGARYGPVDRDAIVGKAQWSPLVDEATFWAAQAVLDAPGRAPGRKSVRRHLLTGLAGCGKCGNHLAGSYRTDGRVVYVCKACHGVAILADNIEPILYHIVAERLAVPDAVDLLRREIHDVAEAETVRLELEALYGELDRLAVERAEGLLTARQVKISTDIVNAKITKLQTRQLDQERLRVFDGIPLGTPQVAGMIAKLSPDRFRAVLDVLAEVVVQPVGKGGRVFNPERVQVNWR

SEQ ID NO: 558 - protein, 485 aa, synthetic construct
MTKKVAIYTRVSTTNQAEEGFSIDEQIDRLTKYAEAMGWQVSDTYTDAGLSGAKLERPAMQRLISDIENKAFDTVLVYKLDRLSRCVRDTLYLVKDVFTKNKIDFISLNESIDTSSAMGSLFLTILSAINEFERENIKERMTMGKLGRAKSGKSMMWTKTAFGYYHNRKTGILEIVPLQATIVEQIFTDYLSGISLTKLRDKLNESGHIGKDIPWSYRTLRQTLGNPVYCGYIKFKDSLFEGMHKPIIPYETYLKVQGELEERQQQTYERNNNPRPFQAKYMLSGMARCGYCGAPLRIVLGRKRKDGSRTMKYHCANRFPRKTKGVTVYNDNEKCDSGTYDLSNLENTVIDSLIGFQENNDSLLKIINGNNQPILDTSSFKKQISQIDKKIQKNSDLYLNDFITMDELKDRTDSLQAEKKLLKAKISENKFNDSTDVFELVKTQLGSIPINELSYDSKKKIVNNLVSKVDVTADNVDIIFKFQLA

SEQ ID NO: 559 - protein, 485 aa, synthetic construct
MTRKVAIYTRVSTTNQAEEGFSIDEQIDRLTKYAEAMGWQVSDTYTDAGFSGAKLERPAMQRLINDIENKAFDTVLVYKLDRLSRSVRDTLYLVKDAFTKNKIDFISLNESIDTSSAMGSLFLTILSAINEFERENIKERMTMGKLGRAKSGKSMMWTKTAFGYYHNRKTGILEIVPLQATIVEQIFTDYLSGISLTKLRDKLNESGHIGKDIPWSYRTLRQTLDNPVYCGYIKFKGSLFEGMHEPIIPYETYLKVQKELEERQQLTYERNNNPRPFQAKYMLSGMARCGYCGAPLRIVLGHKRKDGSRTMKYHCANRLPRKTKGVTVYNDNKKCDSGTYDLSNLENTVIDILIGFQENSDSLLKVINGNNQPILDTSSFKKQISQIDKKIQKNSDLYLNDFITMDELKERTDSLQAEKKLLKAKISEDKFNDSTDVFELVKTQLGSIPINELSYDNKKKIVNNLVSKVDVTADNVDIIFKFQLA

SEQ ID NO: 560 - protein, 469 aa, synthetic construct
MCYTTPVRAAVYLRISEDRSGEQLGVARQREDCLKLCDQRKWVPVEYLDNDVSASTGRRRPAYDQMLADITAGKIAAVVAWDLDRLHRRPIELEAFMSLADEKRLALATVAGDVDLATPQGRLVARLKGSVAAHETEHKKARQRRAARQKAERGYPNWSKAFGYLPGPNGPEPDPRTAPLVKQAYADILAGASLGDVCRRWNDAGAFTITGRPWTTTTLSKFLRKPRNAGLRAYKGARYGPVDRDAIVGKAQWSPLVDEATFWAAQAVLDAPGRAPGRKSVRRHLLTGLAGCGKCGNHLAGSYRTDGRVVYVCKACHGVAILADNIEPILYHIVAERLAMPNAVDLLRREIHDAAEAEAIRMELETLYGELDRLAVERAEGLLTARQVKISTDIVNAKITKLQARQLDQERLRVLDGIPLGTPQVAGMIAELSPDRFRAVLDVLAEVVVQPVGKSGRIFNPERVQVNWR

SEQ ID NO: 561 - protein, 469 aa, synthetic construct
MCYTTPVRAAVYLRISEDRSGEQLGVARQREDCLKLCGQRKWEPVEYLDNDVSASTGKRRPAYEQMLADITAGKIAAVVAWDLDRLHRRPIELEAFMSLADEKRLALATVAGDVDLATPQGRLVARLKGSVAAHETEHKKARQRRAARQKAERGLPNWSRAFGYLPGPNGPEPDPRTAPLVKQAYADILAGASLGDVCRQWNDAGAFTITGRPWTTTALSKFLRKPRNAGLRAYKGARYGPVDRDAIVGKAQWSPLVDEATFWAAQAVLDAPGRAPGRKSVRRHLLTGLAGCGKCGNHLAGSYRTDGRVVYVCRACHGVAILADNIEPILYHIVVERLAMPDAVDLLRRENHDAAEAETIRLELETLYGELDRLAVERAEGLLTARQVKISTDIVNAKITKLQACQLDQERLRVFSGIPLGTPQVAGMIAELSPDRFRAVLDVLAEVVVQPVGKGGRIFNPERVQVNWR

SEQ ID NO: 562 - protein, 486 aa, synthetic construct
MTKKVAIYTRVSTTNQAEEGFSIDEQVDRLTKYAEAMGWQVSDTYTDAGFSGAKLERPAMQRLINDIENKAFDTVLVYKLDRLSRSVRDTLYLVKDVFTKNKIDFISLNESIDTSSAMGSLFLTILSAINEFERENIKERMTMGKLGRAKSGKSMMWTKTAFGYYHNRKTGILEIVPLQATIVEQIFTDYLSGISLTELRDKLNESGHIGKDIPWSYRTLRQTLDNPVYCGYIKFKDSLFEGMHKPIIPYETYLKVQKELEERQQQTYERNNNPRPFQAKYMLSGMARCGYCGAPLRIVLGHKRKDGSRTMKYHCANRFPRKTKGVTVYNDNKKCDSGTYDLSNLENTVIDNLIGFQENNDSLLKIINGNNQPILDTSSLKKRISQIDKKIQKNSDLYLNDFITMDELKDRTGSLQAEKKLLEAKISENKFIDSTDVFELVKIQLGSIPINELSYDNKKKIVNNLVSKVDVTADSVDIIFKFQLAQ

SEQ ID NO: 563 - protein, 469 aa, synthetic construct
MSYTTPVHAAVYLRISEDRSGEQLGVARQREDCLKLCGQRKWVPVEYLDNDVSASTGKRRPAYEQMLADIAAGRIAAVVAWDLDRLHRRPIELEAFMSLADERRLALATVAGDVDLATPQGRLVARLKGCVAAHETEHKKARQRRAARQKAERGYPNWSKAFGYLPGPNGPEPDPRTAPLVKQAYADILAGASLGDVCRQWNGAGALTITGRPWTTTTLSKFLRKPRNAGLRAYKGARYGPVDRDAIVGKAQWSPLVDEAAFWAAQAVLDAPGRAPGRKSVRRHLLTGLAGCGKCGNHLAGSYRTDGRVVYVCKACHGVAILADNIEPFLYHIVAERLTMPDAVDLLRHETHDAAEAETIRLELETLYGELDCLAVERAEGLLTARQVKISTDIVNAKITKLQARQQDQERLRVLDGIPLGTPQVAGMIAELSPDRFRAVLDALAEVVVQPVGKSGRIFNPERVQVNWR

SEQ ID NO: 564 - protein, 469 aa, synthetic construct
MSYTTPVRAAVYLRISEDRSGEQLGVARQREDCLKLCGQRKWVPVEYLDNDVSASTGRRRPAYEQMLADITAGKIAAVVAWDLDRLHRRPIELEAFMCLADEKRLALATVAGDVDLATPQGRLVARLKGSVAAHETEHKKARQRRAARQKAERGHPNWSKAFGYLPGLNGPEPDPRTAPLVKQAYADILAGASLGDVCRRWNDAGAFTITGRPWTTTALSKFLRKPRNAGLRAYKGARYGPVDRDAIVGKAQWRPLVDEATFWAAQAVLDAPGRAPGRKSVRRHLLTGLAGCGKCGNHLAGSYRTDGKVVYVCKACHGVAILADNLEPILYHIVAERLAMPDAVDLLRREIHDVAEAETIHLELEALYGELDRLAVERAEGLLTARQVKISTDIVNAKITKLQTRQLDQERLRVFDGIPLGTPRVVGTIAELSPNRFRAVLDVLAEVVVQPVGKSGRIFNPERVQVNWR

SEQ ID NO: 565 - protein, 485 aa, synthetic construct
MTKKVAIYTRVSTTNQAEEGFSIDEQIDRLTKYAEAMGWQVSDTYTDAGFSGAKLGRPAMQRLINDIENKAFDTVLVYKLDRLSRSVRDTLYLVKDVFTKNKIDFISLNECIDTSSAMGSLFLTILSAINEFERENIKERMTMGKLGRAKSGKSMMWTKTAFGYYHNRKTGILEIVPPQATIVEQIFTDYLSGISLTKLRDKLNESGHIGKDIPWSYRTLRQTLDNPVYCGYIKFKGSLFEGMHKPIIPYETYLKVQRELEERQQQAYERNNNPRPFQAKYMLSGMARCGYCGAPLRIVLGHKRKDGSRTMKYHCANRFPRKTKGVTVYNDNKKCDSGTYDLSNLENTVIDNLIGLQEDNDSLLKIINGNNQPIPDTSSIKKQISQIDKKIQKNSDLYLNDFITMDELKDRTDSLQAEKKLLEAKISENKFNDSTDVFELVKTRLGSIPINELSYDDKKKIVNNLVSKVDVTADSVDIIFKFQLA

SEQ ID NO: 566 - protein, 485 aa, synthetic construct
MTKKVAIYTRVSTTNQAEEGFSIDEQVDRLTKYAEAMGWQVSDTYTDAGFSGAKLERPAMRRLINDIENKAFDTVLVYKLDRLSRSVRDTLYLVKDVFTKNRIDFISLNESIDTSSAMGSLFLTILSAINEFERENIRERMTMGKLGRAKSGKSMMWTKTAFGYYHNRKTGILEIVPLQATIVEQIFTDYLSGISLTKLRDKLNESGHIGKDIPWSYRTLRQTLDNPVYCGYIKFKGSLFEGMHKPIIPYETYLKVQKELEERQQQTYERNNNPRPFQAKYMLSGMARCGYCGAPLRIVLGRRRKDGSRTMKYHCANRFPRKTKGATVYNGNKKCDSGTYDLSNLEDTVIDLLIGFQENNDSLLKIINGNNQPIPDTSSFKKQISQIDKKIQKNSDLYLNDFITMDELKGRTDSLQAERKLLEAKISENKFNGNTDVFELVKTQLGSIPINELSYDNKKKIVNSLVSKVDVTADSVDIIFKFQLA

SEQ ID NO: 567 - protein, 452 aa, synthetic construct
MKAAIYIRVSTQEQVENYSIQAQTEKLTALCRSKDWDVYDIFIDGGYSGSNMNRPALNEMLSKLHEIDAVVVYRLDRLSRSQRDTTTLIEEYFLKNNVEFVSLSETLDTSSPFGRAMIGILSVFAQLERETIRDRMVMGKIKRIEAGLPLTTAKGRTFGYDVIDTKLYINEEEAKQLQLIYDIFEEEQSITSLQKRLKKLGFKVRTYNRYNSWLTNDLYCGYVSYKDKVHVKGIHEPIISEEQFYRVQEIFTRMGKNPNMNRDSASLLSNLVVCSKCGLGFVHRSKDTMSRGKKYHYRYYSCKTYKHTHELEKCGNKTWRADKLEELIINRVNNYSFASRNADKGDELDSLNEKLKIEHARKKRLFDLYINGGYEVSELDSMMNDIDAQINYYESQIEANEGLKKNKKIQENLADLATVDFDSLEFREKQLYLKSLINKIYIDGEQVTIEWL

SEQ ID NO: 568 - protein, 469 aa, synthetic construct
MCYTTPVRAAVYLRISEDRSGEQLGVARQREDCLKLCDQRKWVPVEYLDNDVSASTGKRRPAYEQMLADITAGKIAAVVAWDLDRLHRRPIELEAFMSLADEKRLALATVAGDVDLATPQGRLVARLKGSVAAHETEHKKARQRRAARQKAERGHPNWSKAFGYLPGPNGPEPDPRTAPLVKQAYADILAGASLGDVSRRWNDAGAFTITGRPWTTTTLSKFLRKPRNAGLRAYKGARYGPVDRDAIVGKAQWSPLVDEATFWAAQAVLDAPGRAPGRKSVRRHLLTGLAGCGKCGNHLAGSYRTDGRIVYVCKACHGVAILADNIEPILYHIVAERLAMPDAVDLLRRETHDAAEAETIRLELETLYDELDRLAVERAEGLLTARQVKISTDIVNAKITELQARQLDQERLRVLDGIPLGAPRVAGKIAELSPDRFRAVLDVLAEVVVQPVGKSGRIFNPERVQVNWR

SEQ ID NO: 569 - protein, 485 aa, synthetic construct
MTKKVAIYTRVSTTNQAEEGFSIDEQIDRLTKYAEAMGWQVSDTYTDAGISGAKLERPAMQRLINDIEYKAFDTVLVYKLDRLSRSVRDTLYLVKDVFTKNKIDFISLNESIDTSSAMGSLFLTILSAINEFERENIKERMTMGKLGRAKSGKSMMWTKTAFGYYHNRKTGILEIVPLQATIVEQIFTDYLSGISLTKLRDKLNESGHIGKDIPWSYRTLRQTLDNPVYCGYIKFKDSLFEGMHKPIIPYETYLKVQKELEERQQQTYERNNNPRPFQAKYMLSGMARCGYCGAPLRIVLGHKRKDGSRTMKYHCANRYPRKTKGVTVYNDNKKCDSGTYDLSNLENTVIDSLIGFQVNNDSLLKIINGNNQPILDTSSFKEQISQIDKKIQKNSDLYLNDFITMDELKNRTDSLQAEKKLLKAKISENKFNDSTDVFELVKTQLGSIPINELSYDNKKKIVNNLVSKVDVTADNVDIIFKFQLA

SEQ ID NO: 570 - protein, 485 aa, synthetic construct
MTKKVAIYTRVSTTNQAEEGFSIDEQIDRLTKYAEAMGWQVSDTYTDAGFSGAKLERPAMQRLINDIENKAFDTVLVYKLDRLSRSVRDTLYLVKEVFTKNKIDFISLNESIDTSSAMGSLFLTILSAINEFERENIKERMTMGKLGRAKSGKSMMWTKTAFGYYHNRKTGILEIVPLQAAIVEQIFTDYLSGISLTKLRDKLNESGHIGKDIPWSYRTLRQTLDNPVYCGYIKFKGSLFEGMHKPIIPNETYLKVQKELGERQRQTYERNNNPRPFQAKYMLSGMARCGYCGAPLRIVLGHKRKDGSRTMKYHCANRFPRKTKGVTVYNDNKKCDSGTYDLSNLENTVIDNLIGFQENDGSLLKIINGNNQPILDTSSFKEQISQIDKKIQKNSDLYLNGFITMDELRDRTDSLRAEKKLLKAKISENKLNDSTDVFELVKTQLGSIPINELSYDNKKKIVNNLVSKVDVTADNVDIIFKFQLA

SEQ ID NO: 571 - protein, 485 aa, synthetic construct
MTKKVAIYTRVSTTSQAEEGFSIDEQIDRLTKYAEAMGWQVSDTYTDAGSSGAKLERPAMQRLINDIENKAFDTVLVYKLDRLSRSVRDTLYLVKDVFTKNKIDFISLNESIDTSSAMGSLFLTILSAINEFERENIKERMTVGKLGRAKSGKSMMWTKTAFGYYHNRKTGILEIVPLQATIVEQIFTDYLSGISLTKLRDKLNESGHIGKDIPWSYRTLRQTLDNPVYCGYTKFKDSLFEGMHKPIIPYETYLKVQKELEERQQQTYERNNNPRPFQAKYMLSGMARCGYCGAPLKIVLGHKRKDGSRTMKYHCANRFPRKTKGVTVYNDNKKCDSGTYDLSNLENTVIDNLIGFQDNNDSLLKVINGNNQPILDTSSFEKQINQIDKKIQKNSDLYLNDFITMDELKDRTDSLQAEKKRLKAKISENKFNDSIEVFELVKTQLGSIPINELSYDDKKKIVNNLVSKVDVTADNVDIIFKFQLA

SEQ ID NO: 572 - protein, 452 aa, synthetic construct
MKAAIYIRVSTQEQVGNYSIQAQTEKLTALCRSKDWDVYDIFIDGGYSGSNMNRPALNEMLSKLHEIDAVVVYRLDRLSRSQRDTTTLIEEYFLKNNVEFVSLSETLDTSSPFGRAMIGILSVFAQLERETIRDRMVMGKIKRIEAGLPLTTAKGRTFGYDVIDTKLYINEEEAKQLQLIYDIFEEEQSITFLQKRLKKLGFKVRTYNRYSNWLTNDLYCGYVSYKDKVHVKGIHEPIISEEQFYRVQEIFARMGKNPNMNRDSASLLSNLVVCSKCGLGFVHRSKDTMSRGKKYHYRYYSCKTYKHTHELEKCGNKTWRADELEGLIIDRVNNYSFASRNVDKEDELDSLNEKLKIEHAKKKRLFDLYINGSYEVSELDSMMSDIDAQINYYESQIKANGELKRNKKIQGNLADLATVDFDSLEFREKQLYLKSLISKIYIDGEQVTIEWL

SEQ ID NO: 573 - protein, 469 aa, synthetic construct
MSYTTPVRAAVYLRISEDRSGEQLGVARQREDCLKLCGQRKWVPVEYLDNDVSASTGKRRPAYEQMLADITAGKIAAVVAWDLDRLHRRPIELEAFMSLADEKRLALATVAGDVDLATPQGRLVARLKGCVAAHETEHKKARQRRAARQKAERGLPNWSKAFGYLPGPNGPEPDPRTAPLVKQAYADILAGASLGDVCRQWNDAGALTITGRPWTSTTLSKFLRKPRNAGLRAYKGARYGPVDRDAIVGKAQWSPLVDEATFWAAQAVLDAPGRAPGRKSVRRHLLTGLAGCGKCGNHLAGSYRTDGRVVYVCKTCHGVAILADNIEPILYHIVAERLAMPDAVDLLRREVHDAAEAETIRLELETLYSELDRLAVERAEGLLTARQVKISTDIVNAKITKLQTRQLDQERLRVLDGIPLGTPQVAGMIAELSPDRFRAVLDVLAEVVVQPVGKSGRIFNPERVQVNWR

SEQ ID NO: 574 - protein, 469 aa, synthetic construct
MSYTTPVRAAVYLRISEDRSGEQLGVARQREDCLKLCDQRKWVPVEYLDNDVSASTGKRRPAYEQMLADIAAGKVAAVVAWDLDRLHRRPIELEAFMSLADEKRLALATVAGDVDLATPQGRLVARLKGSVAAHETEHKKARQRRAARQKAELGHPNWSKAFGYLPGPNGPEPDPRTAPLVKQAYADILAGASLGDVCRQWNDAGAFTITGRPWTTTTLSKFLRKPRNAGLRAYKGARYGPVDRDAIVGKAQWSPLVDEATFWAAQAVLDAPGRAPGRKSVRRHLLTGLAGCGKCGNHLAGSYRTDGRVVYVCKACHGVAILADNIEPTLYRIVAERLAMPDAADLLRREIHGAAEAETIRLELETLYGELDRLAVERAEGLLTARQVKISTDIVNAKITKLQARQLDQERLRVFDGIPLGTPQVAGKIAELSPDRFRAVLDVLAEVVVQPVGKSGRIFNPERVQVNWR

SEQ ID NO: 575 - protein, 485 aa, synthetic construct
MTKKVAIYTRVSTTNQAEEGFSIDEQIDRLTKYAEAMGWQVSDTYTDAGSSGAKLERPAMQRLINDIENKAFDTVLVYKLDRLSRSVRDTLYLVKDVFTKNKIDFISLNESIDTSGAMGSLFLTILSAINEFERENIKERMTMGKLGRAKSGKSMMWTKTAFGYYHNRKTGILEIVPLQATIVEQIFTDYLSGISLTKLRDKLNESGHIGKDIPWSYRTLRQTLDNPVYCGYIKFKGSLFEGMHKPIIPYETYLKVQKELEERQQQTFARNNNPRPFQAKYMLSGTARCGYCGAPLRIVLGHKRKDGSRTMKYHCANRFPRKTKGITVYSDNKECDSGTYDLSNLENAVIDNLIGFQENNDSLLKIINGDNQPILDTSSFKRQISQIDKKIQKNSDLYLNDFITMDELRDRTNSLQAEKKLLKARISEDKFNDSTDVFELVKTQLGSIPINELSYDDKKKIVNNLVSKVDVTADNVDIVFKFQLA

SEQ ID NO: 576 - protein, 452 aa, synthetic construct
MKAAIYIRVSTQEQVENYSIQAQTERLTALCRSKDWDVYDIFVDGGYSGSNMNRPALNEMLSKLHEIDAVVVYRLDRLSRSQRDTTTLIEEYFLKNNVEFVSLSETLDTSSPFGRAMIGILSVFAQLERETIRDRMVMGKIKRVEAGLPLTTAKGRTFGYDVIDTKLYINEEEAKQLQLIYDIFEEEQSITFLQKRLKKLGFKVRTYNRYSNWLTNDLYCGYVSYKDKVHVKGIHEPIISEEQFYRVQEIFTRMGKNPNMNRDSASLLSNLVVCSKCGLGFVHRSKDTMSRGKKYHYRYYSCKTYKHTHELEKCGNKTWRADKLEELIINRVNNYSFASRNVGKEDELDSLYEKLKIEHAKKKRLLDLYINGGYEVSELDSMMNDIDAQINYYESQIEANEELKKTKKIQENLADLATVDFDSLEFREKQQYLKSLINKIYIDGEQVTIEWL

SEQ ID NO: 577 - protein, 485 aa, synthetic construct
MTKKVAIYTRVSTTNQAEEGFSIDEQTDRLTKYAEAMGWQVSDTYTDAGFSGAKLDRPAMQRLINDIENKAFDTVLVYKLDRLSRSVRDTLHLVKDVFTKNKIDFISLNESIDTSSAMGSLFLTILSAINEFERENIKERMTMGKLGRAKSGKSMMWTKTAFGYYHNRKTGILEIVPLQATIVEQIFTDYLSGISLTKLRDKLNESGHIGKDIPWSYRTLRQTLDNPVYCGYIKFKDSLFEGMHKPIIPYETYLKVQKELEERQQQTYERNNNPRPFQAKYMLSGMARCGYCGAPLRIVLGHKRKDGSRTMKYHCTNRFPRKTKGVTVYNDNKKCDSGTYDLSDLENTVIGNLIGFQENNDSLLKIVNGNNQPILDTSSFKKQISQIDKKIQKNIDLYLNDFITMDELKDRTDSLQAEKKLLEAKISENRFNDSTDVFELVKTQLGSIPINELGYDNKKKIVNNLVSRVDVTADNVDIIFKFQLA

SEQ ID NO: 578 - protein, 485 aa, synthetic construct
MTKKVAIYTRVSTTNQAEEGFSIDEQIDRLTKYAEAMGWQVSDTYTDAGVSGAKLERPAMQRLINDIESRAFDTVLVYKLDRLSRSVRDTLYLVKDVFTKNKIDFVSLNESIDTSSAMGSLFLTILSAINEFERENIKERMTMGKLGRAKSGKSMMWTKTAFGYYHNRKTGILEIVPLQATIVEQIFTDYLSGISLTKLRDKLNESGHIGKDIPWSYRTLRQTLGNPVYCGYIKFKDSLFEGMHKPIIPYETYLKVQKELEERQQQAYERNNNPRPFRAKYMLSGMARCGYCGAPLRIVLGHKRKDGSRTMKYHCANRFPRKTKGVTVYNDNRKCDSGTYDLSNLEDTVIDNLIGFQVNNDSLLKIINGNNQPNLDTSSLKKQISQIDEKIQKNSDLYLNDFITMDELKDRTDSLRAEKKLLKAKISENKFNDSTNVFELVKTQLGSIPINELSYDNKKKIVNNLVSKVDVTADNVDIIFKFQLA

SEQ ID NO: 579 - protein, 469 aa, synthetic construct
MSYTTPVRAAVYLRISEDRSGEQLGVARQREDCLELCVQRKWEPVEYLDNDVSASTGKRRPAYEQMLADITAGKIAAVVAWDLDRLHRRPIELEAFMSLADEKRLALATVAGDVDLATPQGRLVARLKGSVAAHETEHKKARQRRAARQKAERGHPNWSKAFGYLPGPSGPEPDPRTAPLVKQAYADILAGASLGDVCRQWNDAGAFTITGRPWTTTTLSKFLRKPRNAGLRAYKGARYGPVDRDAIVGKAQWSPLVDEATFWAAQAVLDAPGRAPGRKSVRRHLLTGLAGCGKCGNHLAGSYRTDGRVVYVCKACHGVAILADNIEPILYHIVAERLAMPDAVDLLRREIHDAAEAETIRLELEALYGELDRLAVERAEGLLTARQVKISTDIVNAKIAKLQARQLDQERLRVFDGIPLGTPQVAGMIAELSPNRFRAVLDVLAEVVVQPVGKSGRIFNPERVQVNWR

SEQ ID NO: 580 - protein, 485 aa, synthetic construct
MTKKVAIYTRVSTTNQAEEGFSIDEQTDRLTKYAEAMGWQVSGTYTDAGFSGAKLERPAMQRLINDIENKAFDTVLVYKLDRLSRSVRDTLYLVKDVFTKNKIDFISLSESIDTSSAMGSLFLTILSAINEFERENIKERMTMGKLGRAKSGKSMMWSKTAFGYYHNRKTGILEIVPLQATIVEQIFTDYLSGISLTKLRDKLNESGHIGKDIPWSYRTLRQTLDNPVYCGYIKFKDSLLEGLHKPIIPYETYLKVQKELKERQQQTCERNNNPRPFQAKYMLSGMARCGYCGAPLRIVLGHKRKDGSRTMKYHCANRFPRKTRGVTVYNDNKKCDSGTYDLSNLENTVIDNLIGFQENNDSLLKIINGSDQPVLDTSCFEEQISQIDKKIQKNSDLYLNDFITMDELKDRTESLQAEKKLLKAKISENKFNDSTDVFELVKTQLGSIPINELSYDNKKKIVNNLVSKVDVTADNVDIIFKFQLA

SEQ ID NO: 581 - protein, 469 aa, synthetic construct
MCYTTPVRAAVYLRISEDRSGEQLGVARQREDCLNLCGQRKWVPVEYLDNDVSASTGKRRPAYEQMLADITAGKIAAVVAWDLDRLHRRPIELEAFMSLADEKRLALATVAGDVDLATPQGRLVARLKGSVAAHETEHKKARQRRAARQKAERGYPNWSKAFGYLPGPNGPEPDPRTAPLVKQAYADILAGASLGDVCRRWNDAGAFTITGRPWTTTTLSKFLRKPRNAGLRAYKGARYGPVDRDAIVGKAQWSPLVDETTFWAAQAVLDAPGRAPGRKSVRRHLLTGLAGCGKCGNHLAGSYRADGRVVYVCKACHGVAILADNIEPILYHIVAERLAMPNAVDLLRREIHDAAEAETIRLELETLYGELDRLAVERAEGLLTARQVKISTDIVSAKITKLQARQLDQERLRVFDGIPLGTPQVAGVIAELSPDRFRAVLDVLAEVVVQPVGKSGRTFNPERVQVNWR

SEQ ID NO: 582 - protein, 452 aa, synthetic construct
MKAAIYIRVSTQEQVENYSIQAQTERLTALCRSKDWDVYDIFIDGGYSGSNLNRPALNEMLSKLHEIDAVVVYRLDRLSRSQRDTTTLIEEYFLKNNVEFVSLSETLDTSSPFGRAMIGILSVFAQLERETIRDRMVMGKIKRIEAGLPLTTAKGRTFGYDVIDTKLYVNEEEAKQLQLIYDIFEEEQSITSLQKRLKKLGFKVRTYNRYNSWLTNDLYCGYVSYKDKVHVKGIHEPIISEEQFYRVQEIFTRTGKNPNMNRDSASLLNNLVVCSKCGLSFVHRSKDTTSRGKKYHYRYYSCKTYKHTHELEKCGNKTWRADKLEELIISRVNNYSFASRNVDKEDELDCLNEKLKIEHAKKRRLFDLYVNGSYEVSELDSMMNDVDAQINYYESQIEANEELKKNKKIQENLADLAAVDFDSLEFREKQLYLKSLINKIYIDGEQVTIEWL

SEQ ID NO: 583 - protein, 452 aa, synthetic construct
MRAAIYIRVSTQEQVGNYSIQAQTEKLTALCRSKDWDVYDIFVDGGYSGSNMNRPALNEMLSKLHEIDAVVVYRLDRLSRSQRDTTTLIEEYFLKNNVEFVSLSETLDTGSPFGRAMIGILSVFAQLERETIRDRMVMGKIKRIEAGLPLTTAKGRTFGYDVVDTKLYINEEEAKQLQLIYDIFEEEQSITSLQKRLKKLGFKVRTYNRYNNWLTNDLYCGYVSYKDKVHVKGIHEPIISEEQFYRVQEIFTRTGKNPNMNRDSASLLNNLVVCSKCGLSFVHRSKDTTSRGKKYHYRYYSCKTYKHTHELEKCGNKTWRADKLEELIISRVNNYSFASRDVDKEDELDSLNEKLKIEHAKKRRLFDLYINGSYAVSELDSMMNDIDAQINYYESRIEANEELRKNKKIQENLADLAAVDFDSLEFREKRLYLKSLINKIYIDGEQVTIEWL

SEQ ID NO: 584 - protein, 452 aa, synthetic construct
MKAAIYIRVSTQEQVENYSIQAQTEKLTALCRSKDWDVYDIFIDGGYSGSNMNRPALNEMLSKLHEIDAVVVYRLDRLSRSQRDTTTLIEEYFLKNNVEFVSLSETLDTSSPFGRAMIGILSVFAQLERETIRDRMVMGKIKRIEAGLPLTTAKGRTFGYDVIDTKLYINEEEAKQLQLIYDIFEEEQSITFLQKRLKKLGFKVRSYNRYNNWLTNDLYCGYVSYKDRVHVKGIHEPIISEEQFYRVQEIFTRMGRNPNMNRDSASLLNNLVVCGKCGLGFVHRSKDTMSRGKKYHYRYYSCRTYKHTHELEKCGNKTWRADKLEELIINRVNNYSFASRNVDKEDELDSLSEKLETERAKKKRLFDLYINGSYEVSELDSMMNDIDAQINYYESQIEANEELRKNRKIQENLADLATVDFDGLEFRGKQLYLKSLINKIYVDGEQVTIEWL

SEQ ID NO: 585 - protein, 469 aa, synthetic construct
MSYTTPVRAAVYLRISEDRSGEQLGVTRQREDCLKLCDQRKWVPVEYLDNDVSASTGKRRPAYEQMLADITAGKIAAVVAWDLDRLHRRPVELEAFMSLADEKRLALATVAGDVDLATPQGRLVARLKGCVAAHETEHKRARQRRAARQKAERGHPNWSKAFGYLPGPNGPEPDPRTAPLVKQAYADILAGASLGDVRRQWNDAGAFTITGRPWTTTTLSKFLRKPRNAGLRAYKGARYGPVDRDAIVGKAQWSPLVDEATFWAAQAVLDAPGRAPGRKSVRRHLLTGLAGCGKCGNHLAGSYRTDGRVAYVCKACHGVAILADNIEPFLYRIVAERLAMPDAVGLLRREIHDAAEAETIRLELETLYGELDRLAVERAEGLLTARQVKISTDIVNAKVTELQARQQDQERLRVLDGIPLGTPQVAGMIAGLSPDRFRAVLDVLAEVVVQPVGKGGRIFNPERVQVNWR

SEQ ID NO: 586 - protein, 452 aa, synthetic construct
MKAAIYIRVSTQEQVGNYSIQAQTEKLTALCRSKDWDVYDIFIDGGYSGSNMNRPALNEMLSKLHEIDAVVVYRLDRLSRSQRDTTTLIEEYFLKNNVEFVSLSETLDTSSPFGRAMIGILSVFAQLERETIRDRMVMGKIKRIEAGLPLTTAKGRTFGYDVIDTKLYINEEEAKQLQLIYDIFEEEQSITSLQKRLKKLGFKVRTYNRYNNWLTNDLYCGYVSYKDKVHVKGIHEPIISEEQFYRVQEIFTRMGKNPNMNRDSASLLNNLVVCSKCGLGFVHRSKDTMSRGKKYHYRYYSCKTYKHTHELEKCGNKTWRADKLEELIINRVNNYSFASRNVDKEGELDSLNEKLKIEHAKKRRLFDLYINGSYEVSELDSMMNDIDAQISYYESQIEANEELKKNKKIQENLANLATVDFDSLEFREKQLYLKSLISKIYIDGEQVTIEWL

SEQ ID NO: 587 - protein, 452 aa, synthetic construct
MKAAIYIRVSTREQVENYSIQAQTEKLTALCRSKDWDVYDIFVDGGYSGSNMNRPALNEMLSKLHEIDAVVVYRLDRLSRSQRDTITLIEEHFLKNNVEFVSLSETLDTSSPFGRAMIGILSVFAQLERETIRDRMVMGKIKRIEAGLPLTTAKGRTFGYDVIDTKLYINEEEAKQLRLIYDIFEEEQSITFLQKRLKELGFKVRTYNRYNNWLTNDLYCGYVSYKDKVHVKGIHEPIISEEQFYRVQEIFTRMGKNPNMNRGGASLLNNLVVCGKCGLGFVHRRKDIMSRGKKYHYRYYSCKTYKHIHELEKCGNKIWRADKLEELIINRVNSYSFASRNVDKEDELDSLSEKLRIEHAKKKRLFDLYISGRYEVSELDSMMNDIDAQINYYESQIEANEELKKNKQIQENLADLATVDFDSLEFREKQRYLKSLINKIYIDGEQVTIEWL

SEQ ID NO: 588 - protein, 469 aa, synthetic construct
MSYTTPVRAAVYLRISEDRSGEQLGVARQREDCLKLCGQRKWVPVEYLDNDVSASTGKRRPAYEQMLADITAGKIAAVVAWDLDRLHRRPIELEAFMSLADEKRLALATVAGDVDLATPQGRLVARLKGCVAAHETEHKKARQRRAARQKAERGLPNWSKAFGYLPGPDGPEPDPRTAPLVKQAYADILAGASLGDVCRRWNDAGAFTITGRPWTTTTLSKFLRKPRNAGLRAYKGARYGPVDRDAIVGKAQWSPLVDEATFWAAQAVLDAPGRAPGRKSVRRHLLTGLAGCGKCGNHLAGSHRTDGRVVYVCKACHGVAILADNIEPTLYRVVAERLAMPDAVDLLRREIHDAAEAETIRLELETLYGELDRLAVERAEGLLTARQVRISTDVVNAKITELQARQLSQERLRVLDGIPLGTPQVAGMIAELSPDRFRAVLDVLAEVVVRPVGKSGRIFNPERVQVNWR

SEQ ID NO: 589 - protein, 469 aa, synthetic construct
MSYTTPVRAAVYLRISEDRSGEQLGVARQREDCLKLCDQRKWVPVEYLDNDVSASTGKRRPAYERMLADIAAGKITAVVAWDLDRLHRRPIELEAFMSLADEKRLALATVAGDVDLATPQGRLVARLKGSVAAHETEHKKARQRRAARQKAERGHPNWSKAFGYLPGPNGPEPDPRTAPLVKQAYADILAGASLGDVCRQWNDAGAFTITGRPWTTTTLSKFLRKPRNAGLRAYKGVPYGPVDRDAIVGKALWSPLVDEATFWAAQAVLDAPGRAPGRKSVRRHLLTGLAGCGKCGHHLAGSYRTDGRVVYVCKACYGVAILADNIEPILYHIVAERLAMPNAVDLLRREIHDAAEAETIRLELEALYSELDRLAVERAEGLLTARQVKISTDIVNAKITKLQARQLDQERLRVLDGIPLGTPQVAGMIAELSPDRFRAVLDVLAEVVVQPVGKSGRIFNPERVQVNWR

SEQ ID NO: 590 - protein, 452 aa, synthetic construct
MKAAIYIRVSTREQVENYSIQAQTEKLTALCRSKDWDVYDIFIDGGYSGSNMNRPALNEMLSKLHEIDAVVVYRLDRLSRSQRDTITLIEEYFLKNNVEFVSLSETLDTSSPFGRAMIGILSVFAQLERETIRDRMVMGKIKRIEAGLPLTTAKGRTFGYDVIDTKLYINEEEAKQLQLIYDIFEEEQSITFLQKRLKKLGFKVRTYNRYNSWLTNDLYCGYVSYKDKVHVKGIHEPIISEEQFYRVQEIFTRMGKNPNMNRDSASLLNNLVVCSKCGLSFVHRRKDTMSRGKKYHYRYYSCKTYKHIHELEKCGNKIWRADKLEELIINRVNNYSLASRNVDKEDELDSLNEKLKIEHAKKKRLFDLYINGGYEVSELDSMMSDIDAQINHYESQIEAIEELRVNKKVQGNLADLVAVDFDSLEFREKQLYLKSLINKIYIDGEQVTIEWL

SEQ ID NO: 591 - protein, 452 aa, synthetic construct
MKAAIYIRVSTHEQVANYSIQAQTEKLTALCRSKDWDVYDIFIDGGYSGSNMNRPALNEMLSKLHEIDAVVVYRLDRLSRSQRDTTTLIEEYFLKNNVEFVSLSETLDTSSPFGRAMIGILSVFAQLERETIRDRMVMGKIKRIEAGLPLTTARGRTFGYDVIDTKLYINEEEAKQLQLIYDIFEEEQSITFLQKRLKKLGFKVRTYNRYNSWLTNDLYCGYVSYKDKVHVKGIHEPIISEEQFYRVQEIFTRMGKNPNMNRDSASLLNSLVVCSKCGLSFVHRSKDTMSRGKKYHYRYYSCKTYKHTHELEKCGNKTWRADKLEELIINRVSNYSFASRNVDKEDELDSLNEKLKIERAKRKRLFDLYINGSYEVSELDSMMNDIDAQIDYYESQIEANEELRKNKKIQKNLADLATVDFVSLEFREKQLYLKSLISKIYIDGERVTIEWL

SEQ ID NO: 592 - protein, 485 aa, synthetic construct
MTKKVAIYTRVSTTNQAEEGFSIDEQVDRLTKYAEAMGWQVSNTYTDAGSSGAKLERPAMQRLINDIENEAFDTVLVYKLDRLSRSVRDTLYLVKDVFTKNKIDFISLNESIDTSSAMGSLFLTILSAINEFERENIKERMTMGKLGRAKSGKSMMWTRTAFGYYHNRKTGILEIVPQQATIVEQIFTDYLSGISLTKLRDKLNESGHIGKDIPWSYRTLRQTLDNPVYCGYIKFKDSLFEGMHKPIIPYETYLKVQKELEERQQQTYERNNNPRPFQAKYMLSGMARCGYCGAPLRIVLGHKRKDGSRTMKYHCANRFPRKTKGITVYNDNKKCNSGTYDLSSLENTVIDNLIGFQENNDSLLKVINGNNQTILDTSSFEEQISQIDKKIQKTSDLYLNDFITMDELKDRTDSLQVEKKLLKAKISENKFNDSADVFELVKTQLGSIPINELSYDNKKKIVNNLVSKVDVTADNVDIIFKFQLA

SEQ ID NO: 593 - protein, 469 aa, synthetic construct
MSYTTPVRAAVYLRISEDRSGEQLGVARQREDCLKLCDQRKWVPVEYLDNDVSASTGTRRPAYEQMLADITAGKIAAVVAWDLDRLHRRPIELEAFMSLADEKRLALATVAGDVDLSTPQGRLVARLKGSVAAHETEHKKARQRRAARQKAERGHPNWSKAFGYLPGPNGPEPDPRTAPLVKQAYADILAGASLGDVCRQWNDASAFTITGRPWTTTTLSKFLRKPRNAGLREYKGARYGPVDRDAIVGKAQWSPLVDEATFWAAQAVLDAPGRAPGRKSVRRHLLTGLAGCGKCGNHLAGSYRTDGRVVYVCKACHGVAILADSIEPILYHIVAERLAMPDAVDLLRREIHDAAEAETIRLELETLYGELDRLAVERAEGLLTARQVKISTDIVNAKITKLQARQLDQERLRVLDGIPLGTPQVADMIAELSPDRFRAVLDVLAEVVVQPAGKSGRIFNPERVQVNWR

SEQ ID NO: 594 - protein, 485 aa, synthetic construct
MTNKVAIYTRVSTTNQAEEGFSIDEQIDRLTKYAEAMGWQVIDTYTDAGFSGAKLERPAMQRLIDDIENKAFDTVLVYKLDRLSRSVRDTLYLVKDVFTKNKIDFISLNESIDTSSAMGSLFLTILSAINEFERENIKERMTMGKLGRAKSGKSMMWTKTAFGYYHNRKTGILEIVPLQATIVEQIFTDYLSGISLTKLRDKLNESGHIGKDIPWSYRTLRQTLDNPVYCGYIKFKGSLFEGMHKPIIPYETYLKVQKELEKRQQQTYERNNNPRPFQAKYMLSGMARCGYCGAPLKIVLGHKRKDGSRTMKYHCANRFPRKTRGVTVYNDNKKCDSGTYDLSSLENTVIDNLIGFQENNDSLLKIINGNNQPTLDTSSFKKQISQIDKKIQKISDLYLNDFIAMDELKDRTDSLQAEKKLLKAKISENKFNDSTDVFELVRTQLGSIPINELSYDNKKKIVNNLVSKVDVTADNVDIIFKFQLA

SEQ ID NO: 595 - protein, 469 aa, synthetic construct
MSYTTPVRAAVYLRISEDRSGEQLGVARQREDCLKLCDQRKWVPVEYLDNDVSASTGKRRPAYEQMLADITAGKIAAVVAWDLDRLHRRPIELEAFMSLADEKRLALATVAGDVDLATPQGRLVARLKGCVAAHETEHKKARQRRAARQKAERGHPNWSKAFGYLPGPNGPEPDPRTAPLVRQAYADILAGASLGDVCRQWNDAGAFTITGRPWTTTTLSKFLRKPRNAGLRAYKGARYGPVDRDAIVGKAQWSPLVDEATFWAAQAVLDAPGRAPGRKSVRRHLLTGLAGCGKCGNHLAGSCRTDGRVVYVCKACHGVAILADNIEPILYHIVTERLAMPDAVDLLRRESHDAAEAETIRLELETLYGELDRLAVERAEGLLNARQVKICTGIVNAKITKLQARQLDQERLRVLDGIPLGTPQVAGVIAELSPDRFRAVLDVLAEVVVQPVGKSGGIFNPERVQVNWR

SEQ ID NO: 596 - protein, 469 aa, synthetic construct
MSYTTPVRAAVYLRISEDRSGEQLGVARQREDCLKLCGQRKWVPVEYLDNDVSASTGKRRPAYEQMLADITAGKIAAVVAWDLDRLHRRPIELEAFMNLADEKRLALATVAGDVDLATPQGRLVARLKGCVAAHETEHKKARQRRAARQKAERGLPNWSKAFGYLPGPNGPEPDPRTAPLVRQAYADILAGASLGDVCRQWNDAGAFTITGRPWTTTTLSKFLRKPRNAGLRAYKGARYGPVDRDAIVGKAQWSPLVDEATFWAAQAVLDAPGRAPGRKSVRRHLLTGLAGCGKCGNHLAGSYHTDGRVVYVCKACHGVSILADNIEPILYHIVAERLAMPDAVDLLRREFHDAAEAETIRLELETLHGELDRLAVERAEGLLTARQVKISTDIVNAKITKLQARQLDQERLRVFDGIPLGTPQVAGMIAELSPDRFRAVLDVLAEVVVQPVGKSGRIFNPERVQVNWR

SEQ ID NO: 597 - protein, 452 aa, synthetic construct
MKAAIYIRVSTQEQVENYSIQAQTEKLTALCRSKDWDVYDIFIDGGYSGSNMNRPALNEMLSKLHEIDAVVVYRLDRLSRSQRDTTTLIEEYFLKNNVEFVSLSETLDTSSPFGRAMIGILSVFAQLERETIRDRMVMGKIKRIEAGLPLTTAKGRTFGYDVIDTKLYVNEEEAKQLRLIYDIFEEEQSITSLQKRLKKLGFKVRTYNRYNNWLTNDLYCGYVSYKDKVHVKGIHEPIISEEQFFRVQEIFTRMGKNPNMNRDNASLLSNLVVCSKCGLGFVHRSKDTMSRGKKYHYRYYSCRTYKHAHELEKCGNKTWRADKLEELIINRVNNHSFAGRNVDKEDELDSLNEKLKIEHAKKKRLFDLYINGSYEVSELDSMMNDIDAQINYYEGQIEANEELKKNKKIQENLANLATVDFGSLEFREKQLYLKSLINKIYIDGEQVTIEWL

SEQ ID NO: 598 - protein, 469 aa, synthetic construct
MSYTTPVRAAVYLRISEDRSGEQLGVARQREDCLELCGQRKWVPVEYLDNDVSASTGKRRPAYEQMLADITAGKIAAVVAWDLDRLHRRPIELEAFMCLADEKRLALATVAGDVDLATPQGRLVARLKGSVAAHETEHKKARQRRAARQKAERGLPNWSKAFGYLPGPNGPEPDPRTAPLVKQAYADILAGASLGDVCRQWNGAGALTITGRPWTTTALSKFLRKPRNAGLRTYKGARYGPVDRDAIVGKAQWSPLVDEATFWAAQAVLDAPGRAPGRKSVRRHLLTGLAGCGKCGNRLAGSYRTDGRVVYVCKACHGVAILADNIVPILYHIVAERLAMPGAVDLLRREIHDAAEAETIRLELEALYGELDRLAVERAEGLLTARQVKISTDIVNAKITKLQARQQDQERLRVLDGIPLGTPQVAGVIAELSPDRFRAVLDVLAEVVVQPVGKGGRIFNPERVQVNWR

SEQ ID NO: 599 - protein, 469 aa, synthetic construct
MSYTTPVRAAVYLRISEDRSGEQLGVARQREDCLKLCGQRKWVPVEYLDNDVSASTGKRRPAYEQMLADIAAGKIAAVVAWDLDRLHRRPIELEAFMSLADEKRLALATVAGDVDLATPQGRLVARLKGCVAAHETEHKKARQRRAARQKAERGLPNWSKAFGYLPGPNGPEPDPRTAPLVKQAYADILAGASLGDVCRQWNGAGAFTITGRPWTTTTLSKFLRKPRNAGLRAYRGARCGPVDRDAIVGKAQWSPLVDEATFWAAQAVLDAPGRAPGRKSVRRHLLTGLAGCGKCGYHLAGSYRTDGRVVYVCKACHGVAILADNIEPFLYHIVAGRLAMPDAVDLLRREIHDAAEAETIRLELETLYGELDRLAVERAEGLLTARQVKISTDIVSAKITKLQAHQLDQERLRVLDGIPLGTPQVAGVIAELSPDRFRAVLDVLAEVVVQPVGKSGRIFNPERVQVNWR

SEQ ID NO: 600 - protein, 452 aa, synthetic construct
MKAAIYIRVSTQEQVGNYSIQAQTEKLTALCRSKDWDVYDIFIDGGYSGSNMNRPALNEMLSKLHEIDAVVVYRLDRLSRSQRDTTTLIEEYFLKNNVEFVSLSETLDTSSPFGRAMIGILSVFAQLERETIRDRMVMGKIKRIEAGLPLTTAKGRTFGYDVIDTKLYINEEEAKQLQLIYDIFEEEQSITSLQKRLKKLGLKVRTYNRYNNWLTNDLYCGYVSYKDKVHVKGIHEPIISEEQFYRVQEIFTRMGKNPNMNRDSASLLNNLVVCSKCGLGFVHRSKDTMCRGKKYHYRYYSCKTYKHTHELEKCGNKTWRADKLEELIINRVNNYSFASRGVDKEDELDSLNEKLKIEHAKKQRLFDLYINGSYEVSKLDSMMSDIDAQINYYESQIEANEELKENKKIQENLAELATVDFDSLEFREKQLYLKSLINKIYIDGEQVTIEWL

SEQ ID NO: 601 - protein, 452 aa, synthetic construct
MKAAIYIRVSTQEQVENYSIQAQTEKLTALCRSKDWDVYDIFIDGGYSGSNMNRPALNEMLSKLHEIDAVVVYRLDRLSRSQRDTTTLIEEYFLKNNVEFVSLSETLDTSSPFGRAMIGILSVFAQLERETIRDRMVMGKIKRIEAGLPLTTAKGRTFGYDVIDTKLYINEEEARQLQLIYDIFEEEQSITSLQKRLKKLGFKVRTYNRYNNWLTNDLYCGYVSYKDKVHVKGIHEPIISEEQFYRVQEIFTRMGKNPNMNRDSASLLSNLVVCSKCGLGFVHRSKDTMSRGKKYHYRYYSCRTYKHTHELEKCGNKTWRADKLEELIINRVNNYSFASRNADKEDELDSLNERLKIEHAKKKRLFDLYINGGYEVSELDSMLSDIDAQINHYESQIEANRELKKNKKIQENLADLATVDFDSLEFREKRLYLKSLINKIYIDGEQVTIEWL

SEQ ID NO: 602 - protein, 452 aa, synthetic construct
MKAAIYIRVSTREQVENYSIQAQTEKLTALCRSKDWDVYDIFIDGGYSGSNMNRPALSEMLSKLHEIDAVVVYRLDRLSRSQRDTITLIEEYFLKNNVEFVSLSETLDTSSPFGRAMIGILSVFAQLERETIRDRMVMGKIKRIEAGLPLTTAKGRTFGYDVIDTKLYINEEEAKQLQLIYDIFEEEQSITFLQKRLKKLGFKVRTYNRYNNWLTNDLYCGYVSYKDKVHVKGIHEPIISEDQFYRVQEIFARMGKNPNMNRDSASLLNNLVVCSKCGLGFVHRRKDTMSRDKKYHYRYYSCKTYKHIHELEKCGNKIWRADKLEELIIDRVNNYSLASRNVDKEDELGSLNEKLKAEHAKKKRLFDLYINGSYEVSELDSMMNDIDAQINYYESQIEANEELKKNKKIQENLADLATVDFDSLEFREKQLYLKSLISKIYIDGEQVTIEWL

SEQ ID NO: 603 - protein, 485 aa, synthetic construct
MTKKVAIYTRVSTTNQAEEGFSIDEQIDRLTKYAEAMGWQVSDIYTDAGSSGAKLERPAMQRLINDIENKAFDTVLVYKLDRLSRSVRDTLYLVKDVFTKNKIDFISLNESIDTSSAMGSLFLTILSAINEFERENIKERMTMGKLGRAKSGKSMMWTKTAFGYYHNRKTGILEIVPLQATIVKQIFTDYLSGISLTKLRDKLNESGHIGKDIPWSYRTLRQTLDNPVYCGYIKFKDSLFEGMHKPIIPYETYLKVQKELEERQQQTYERNNNPRPFQAKYMLSGMARCGYCGAPLRIVLGHKRKDGSRTMKYHCANRFPRKTKGVTVYNDNKKCDSGTYDLSNLENTVIDNLIGFQENNDSLLKIINGNNQPILDTSSFKKRISQIDKKIQKNSDLYLNDFITMDELKDRTDSLQAEKKLLEAKIRENKFNDSTDVFELVKTQLGSIPINELSYDNKKKVVNNMVSKVNVTADNVDIIFKFQLA

SEQ ID NO: 604 - protein, 452 aa, synthetic construct
MKAAIYIRVSTREQVENYSIQAQTERLTALCRSKDWDVYDIFIDGGYSGSNMNRPALNEMLSKLHEIDAVVVYRLDRLSRSQRDTITLIEEYFLKNSVEFVSLSETLDTSSPFGRAMIGILSVFAQLERETIRDRMVMGKIKRIEAGLPLTTAKGRTFGYDVIDTKLYINEEEAKQLQLIYDIFEEEQSITFLQRRLKKLGFKVRTYNRYNNWLTNDLYCGYVSYKDKVHVKGIHEPIISEEQFYRVQEIFTRMGKNPNMNRDSASLLNNLVVCSKCGLSFVHRRKGIMSRGKKYHYRYYSCKTYKHIHELEKCGNKIWRADKLEELIISRVNSYSFASRNADKEDELDSLNEKLKAEHAKKRRLFDLYINGSYEVSELDSLMNDIDAQINYYKSQIEANEELRKNKKIQENLADLATVDFDSLEFREKQLYLKSLINKIYIDGEQVTIEWL

SEQ ID NO: 605 - protein, 485 aa, synthetic construct
MTKKVAIYTRVSTTNQAEEGFSIDEQIDRLTKYAEAMGWQVSDTYTDAGLSGAKLERPAMQRLINDIENKAFDTVLVYKLDRLSRSVRDTLYLVKDVFTKNKIDFISLNESIDTSSVMGSLFLTILSAINEFERENIKERMTMGKLGRAKSGKSMMWTKTAFGYYHNRKTGILEIVPLQATIVEQIFTDYLSGISLTKLRDKLNESGHIGKDIPWSYRTLRQTLDNPVYCGYIKFKDSLFEGMHKPIIPYETYLKVQKELEERQQQTYERNNNPRPFQAKYMLSGMARCGYCGAPLRIVLGHKRRDGSRTMKYHCANRFPRKTKGVTVYNDNKKCDSGTYDLSSLEDTVIDSLIGFQENNDSLLKIINGNNQPILDTSSFKKQIRQIDKKIQKNSDLYLNDFITMDELRDRTDSLQAEKKLLKAKISESKFNDGTDVFEQVKTQLGSIPINELSYDNKKKIVNNLVSKVDVTADNVDIIFKFQLA

SEQ ID NO: 606 - protein, 452 aa, synthetic construct
MKAAIYIRVSTQEQVGNYSIQAQTEKLTALCRSKDWDVYDIFIDGGYSGSNMNRPALNEMLSKLHEIDAVVVYRLDRLSRSQRDTTTLIEEYFLKNNVEFVSLSETLDTSSPFGRAMIGILSVFAQLERETIRDRMVMGKIKRIEAGLPLTTAKGRTFGYDVIDTKLYINEEEAKQLQLIYDIFEEVQSITSLQKRLKELGFKVRTYNRYSNWLTNDLYCGYVSYKDKVHVKGIHEPIISEEQFYRVQEIFTRMGKNPNMNRDSASLLNSLVVCSKCGLSFVHRSKDTMSRGKKYHYRYYSCKTYKHTHELEKCGNKTWRADKLEELIINRVNNYSSANRNVDREDELNSLNEKLKIEHAKKKRLFDLYINGSYEVSELDSMMNDIDAQIDYYESQIEANEELKKNKKTQENLADLATVDFDGLEFREKQLYLKSLISKIYIDGEQVTIEWL

SEQ ID NO: 607 - protein, 469 aa, synthetic construct
MSYTTPVRAAVYLRISEDRSGEQLGVARQREDCLKLCDQRKWVPVEYLDNDVSASTGKRRPAYEQMLADITAGKIAAVVAWDLDRLHRRPIELEAFMSLADEKRLALATVAGDVDLATPQGRLVARLKGSVAAHETEHKKARQRRAARQKAERGYPNWSRAFGYLPGPNGPEPDPRTAPLVKQAYADILAGASLGDVCRQWNDAGAFTITGRPWTSTTLSKFLRKPRNAGLRAYKGARHGPVDRDAIVGKAQWSPLVDEATFWAAQAVLDAPGRAPGRKSVRRHLLTGLAGCGKCGNHLAGSYRTDGRVVYVCKACHGVAILADNIEPILYRIVVERLTMPDAVDLLRREIHDAAEAETIRLELGALYGELDRLAVERAEGLLTARQVKISTDIVNAKITKLQARQLDQERLRLLDGIPLGTPQVAGKIAELSPDRFRAVLDVLAEVVVQPVGKSGRIFNPERVQVNWR

SEQ ID NO: 608 - protein, 485 aa, synthetic construct
MTKKVAIYTRVSTTNQAEEGFSIDEQIDRLTKYAEAMGWQVSDTYTDAGFSGAKLERPAMQRLINDIENKAFDTVLVYKLDRLSRSVRDTLYLVKDVFTKSKIDFICLNESIDTSSAMGSLFLTILSAINEFERENIKERMTMGKLGRAKSGKSMMWTKTAFGYYHNRKTGILEIVPLQATIVEQIFTDYLSGISLSKLRDKLNESGHIGKDIPWSYRTLRQTLDNPVYCGYIKFKDSLFEGMHKPIIPYETYLRVQKELEERQQQTYERNNNPRPFQAKYMLSGMARCGYCGAPLRIVLGHKRKDGSRTMKYHCANRFPRKTKGITVYNDNKKCDSGTYDLSDLENTVINILIGFQENNDSLLKIINGINQPILDTSSLKKQISRIDKKIQKNSDLYLNDFITMDELKDRTDSLQAEKKLLKAKISENKFNDSTDVFELVKTQLGSIPINELSYDNKKKIVNNLVSKADVTADNVDIIFKFQLA

SEQ ID NO: 609 - protein, 469 aa, synthetic construct
MCYTTPVRAAVYLRISEDRSGEQLGVARQREDCLKLCGQRKWVPVEYLDNDVSASTGKRRPAYEQMLADITAGKIAAVVAWDLDRLHRRPIELEAFMSLADEKRLALATVAGDIDLATPQGRLVARLKGSVAAHETEHKKARQRRAARQKAERGYPNWSKAFGYLPGPNGPEPDPRTAPLVKQAYADILAGASLGDVCRQWNAAGAFTITGRPWTTTTLSKFLRKPRNAGLRAYKGARYGPVDRDAIVGKAQWSPLVDEATFWAAQAVLGAPGRAPGRKSVRRHLLTGLAGCGKCGNHLAGSYRAGGKVVYVCKACHGVAILADNIEPILYHIVAERLAMPDAVDLLRRETHDTAEAETIRLELETLYGEPDRLAVERAEGLLTARQVKISTDIVNARITKLQARQLDQERLRVFDGIPLGTPQVAGKIAELSPDRFRAVLDVLAEVVVQPVGKGGRIFNPERVQVNWR

SEQ ID NO: 610 - protein, 452 aa, synthetic construct
MKAAIYIRVSTREQVENYSIQAQTEKLTALCRSKDWDVYDIFIDGGYSGSNMNRPALNEMLSRLHEIDAVVVYRLDRLSRSQRDTITLIEEYFLKNNVEFVSLSETLDTSSPFGRAMIGILSVFAQLERETIRDRMVMGKIKRIEAGLPLTTAKGRTFGYDVIDTKLYINEEEAKQLQLIYDIFEEEQSITSLQKRLKELGFKVHTYNRYNNWLTNDLYCGYVSYKDKVHVKGIHEPIISEEQFYRVQEIFARMGKNPNMNRDSASLLNNLVVCGKCGLSFVHRRKDAMSRDKKYHYRYYSCKTYKHIHELEKCGNKIWRADKLEELIIDRVNNHSLASRNVDKEDELDSLNEKLKIEHAKKKRLFDLYINGSYEVSELDSMMSDIDAQISYYESLIEANEGLEKNKKIQENLADLATVDFDSLEFREKQLYLKSLINKIYIDGEQVTIEWL

SEQ ID NO: 611 - protein, 452 aa, synthetic construct
MKAAIYIRVSTREQVENYSIQAQTEKLTALCRSKDWDVYDIFIDGGYSGSNMNRPALNEMLSKLHEIDAVVVYRLDRLSRSQRDTITLIEEHFLKNNVEFVSLSETLDTSSPFGRAMIGILSVFAQLERETIRDRMVMGKIKRIEAGLPLTTAKGRTFGYDVIDTRLYINEEEAKQLRLIYDIFEEEQSITFLQRRLKELGFKVRTYNRYNNWLTNDLYCGYVSYKDKVHVKGIHEPIISEEQFYRVQEIFTRMGKNPNMNRDSASLLNNLVVCSKCGLGFVHRRKDIMSRGKGYHYRYYSCKTYKHIHELEKCGNKIWRADKLEELIINRVNSYSLAGRNVDKEDELDSLNEKLKIEHAKKKRLFELYINGSYEVSELDSVMNDIDAQIGYYESQIEANKGLRKNKKIQENLADLATVDFDSLEFREKQRYLKSLINKIYIDGEQVTIEWL

SEQ ID NO: 612 - protein, 469 aa, synthetic construct
MCYTTPVRAAVYLRISEDRSGEQLGVARQREDCLKLCGQRKWVPVEYLDNDVSASTGKRRPAYEQMLADITAGKITAVVAWDLDRLHRRPIELEAFMSLADEKRLALATVAGDVDLATPQGRLVARLKGSVAAHETEHKKARQRRAARQKAERGYPNWSKAFGYLPGPNGPEPDPRTAPLVKQAYADILAGASLGDVCRQWNDAGAFTITGRPWTTTALSKFLRKPRNAGLRAYKGARYGPVDRDAIVGKAQWSPLVDEATFWAAQAVLDAPGRAPGRKSVRRHLLTGLAGCGKCGDHLAGSYRTDGRVVYVCKACHGVAILADNIEPILYHIVAERLAMLNAVDLLRREIYDAAEAETIRLELETLYGELDRLAVERAEGLLTARQVKISTDIVNAKIAKLRARQLDQERLRVFDGIPLGTPLVAGTIAELSPDRFRAVLDVLAEVVVQPVGKSGRIFNPERVQVNWR

SEQ ID NO: 613 - protein, 469 aa, synthetic construct
MCYTTPVRAAVYLRISEDRSGEQLGVARQREDCLKLCGQRKWVPVEYLDNDVSASTGKRRPAYEQMLADITAGKIAAVVAWDLDRLHRRPIELEAFMSLADEKRLALATVAGDVDLATPQGRLVARLKGSVAAHETEHKKARQRRAARQKAERGYPNWSKAFGYLPGPNGPEPDPRTAPLVKQAYADILAGASLGDVCRQWNDAGAFTITGRPWTTTALSKFLRKPRNAGLRAYKGARYGPVDRDAIVGKAQWSPLVDEATFWAAQAVLDAPGRAPGRKSVRRHLLTGLAGCGKCGNHLAGSYRTDGRVVYVCKACHGVVILADNIEPILYHIVAERLAMPDAVDLLRREIHDAAEAETIRLELETLYGELDRLAVERAEGLLTARQVKISTDIVNAKITKLQACQQDQERLRVLDGIPLGTPQVAGMIAELSPDRFRAVLDVLAKVVVQPVGKGGRIFNPERVQVNWR

SEQ ID NO: 614 - protein, 469 aa, synthetic construct
MSYTTPVRAAVYLRISEDRSGEQLGVARQREDCLKLCGQRKWVPVEYLDNDVSASTGERRPAYEQMLADITAGKIAAVVAWDLDRLHRRPVELEAFMSLADEKRLALATVAGDVDLATPQGRLVARLKGCVAAHETEHKKARQRRAARQKAERGLPNWSKAFGYLPGPNGPEPDPRIAPLVKQAYADILAGASLGDVCRQWNDAGASTITGRPWTTTTLSKFLRKPRNAGLRAYKGARYGPVDRDAIVGKAQWSPLVDEATFWAAQAVLDAPGRAPGRKSVRRHLLTGLAGCGKCGNHLAGSYRTDGRVVYVCKACHGVAILADNIEPILYHIVAERLAMPDAVDLLRREIHDAAEAETIRQELETLYGELDRLAVERAEGLLTARQVKISTDIVNAKITKLQARQLDQERLRVLDGIPLGTPQVAGVIAELSPDRFRAVLDVLAEVVVQPVGKSGRTFNPERVQVNWR

SEQ ID NO: 615 - protein, 452 aa, synthetic construct
MKAAIYIRVSTREQVENYSIQAQTEKLTALCRSKDWDVYDIFIDGGYSGSNMNRPALNEMLSKLHEIDAVVVYRLDRLSRSQRDTITLIEEYFLKNNVEFVSLSETLDTSSPFGRAMIGILSVFAQLERETIRDRMVMGKIKRIEAGLPLTTAKGRTFGYDVIDTKLYINEEEAKQLQLIYDIFEEEQSITSLQKRLKKLGFEVHTYNRYNNWLTNDLYCGYVSYKDKVHVKGIHEPIISEEQFNRVQEIFARMGKNPNMNRDSASLLSNLVVCSKCGLGFVHRRKDTMSRGKKYHYRYYSCKTYKHTHELEKCGNKIWRADKLEGLIINRVNNYSFASRDVDKEDELDSLSEKLKIERAKKRRLFDLYINGSYEVSELDSLMNDIDAQINHYESQIEASEELKKNKKIQENLANLATVDYDSLEFREKQLYLKSLINKIYIDGEQVTIEWL

SEQ ID NO: 616 - protein, 485 aa, synthetic construct
MTKKVAIYTRVSTTNQAEEGYSIDGQIDRLTKYAEAMGWQVSGTYTDAGFSGAKLERPAMQRLINDIEDKAFDTVLVYKLDRLSRSVRDTLYLVKDVFTKNKIDFISLNESINTSSAMGSLFLTILSAINEFERENIKERMTMGKLGRAKSGKSMMWTKTAFGYYHNRKTGILEIVPLQATIVEQIFTDYLSGISLTKLRDKLNGSGHIGKDIPWSYRTLRQTLDNPVYCGYIKFKDSLFEGMHKPIIPYETYLKVQKELEERQQQTYERNNNPRPFQAKYMLSGMARCGYCGAPLRIVLGHKRKDGSRTMKYHCANRFPRKTKGVTVYNDNKKCDSGTYDLSDLENTVIDNLVGFQEYNDSLLKIINGNNQPILDTSSFKKQISQIDKKIQKNSDLYLNDFITMDELKDRTDSLQAEKKLLKAKISENKFNDSTDVFELVKTQLGSIPINELSYDDKKKIVNNLVSKVDVTADNVDIIFKFQLA

SEQ ID NO: 617 - protein, 485 aa, synthetic construct
MTKKVAIYTRVSTTNQAEEGFSIDEQIDRLTKYAEAMGWQVSGTYTDAGLSGAKLERPAMQRLINDIENKAFDTVLVYKLDRLSRSVRDTLYLVKDVFTKNKIDFISLNESIDTSSAMGSLFLTILSAINEFERENIKERMTMGKLGRAKSGKSMMWTKTAFGYHHNRETGILEIVPLQATIVEQIFTDYLSGISLTKLRDKLNESGHIGKDIPWSYRTLRQTLDNPVYCGYIKFKDSLFEGMHKPIIQYETYLKVQKELEERQQQTYERNNNPRPFQAKYMLSGMARCGYCGAPLRIVLGHKRKDGSRTMKYHCANRFPRKTKGITVYNDNKKCDSGTYDLGNLENTVIDNLIGFQEDNDSLLKIINGNNRPILDTCSFKKQISQIDKKIQKNSDLYLNDFITMDELKDRTDSLQAEKKLLKAKISENKFNDSTDVFELVKTQLGSIPINELSYDNKKKIVNNLVSKVDVTADNVDIIFKFQLA

SEQ ID NO: 618 - protein, 485 aa, synthetic construct
MTKKVAIYTRVSTTNQAEEGFSIDEQIDRLTKYAEAMGWQVSDTYTDAGFSGAKLERPAMRRLINDIENKAFDTVLVYKLDRLSRSVRDTLCLVKDVFTKNKIDFISLNESIDTSSAMGSLFLTILSAINEFERENIKERMTMGKLGRAKSGKSMMWTKTAFGYYHNRITGILEIVPQQATIVEQIFTDYLSGISLTKLRDKLNENGHIGKDIPWSYRTLRQTLDNPVYCGYIKFKDSLFEGMHKPIIPYETYLKVQKELEERQQQTYERNNNPRPFQAKYMLSGVARCGYCGAPLRIVLGHKRKDGSRTMKYHCANRFPRKTKGVTVYNGNKKCDSGTYDLSSLENTVIDNLIGFQENNDSLLKIINGNNQPIQDTSGFKKQISQIDKKIQKNSDLYLNDFITMDELKGRTDSLQAEKKQLKAKISENKFNDSADVFELVKTQLGNIPINELSYDNKKKIVNNLVSKVDVTADNVDIIFKFQLA

SEQ ID NO: 619 - protein, 469 aa, synthetic construct
MSYATPVRAAVYLRISEDRSGEQLGVARQREDCLKLCDQRKWEPVEYLDNDVSASTGKRRPAYEQMLADITAGKIAAVVAWDLDRLHRRPIELEAFMSLADEKRLALATVAGDVDLATPQGRLVARLKGSVAAHETEHKKARQRRAARQKAERGHPNWSKAFGYLPGPNGPEPDPRTAPLVKQAYADILAGASLGDVCRQWNDADAFTITGRPWTTTTLSKFLRKPRNAGLRAYKGARYGPVDRDAIVGKAQWGPLVDEATFWAAQAVLDAPGRAPGRKSVRRHLLTGLAGCGKCGNHLAGSYRTDGRVVYVCKACHGVAILADNIEPILYHIVAERLAMPDAVDLLRREIHDAAEAETIRLELETLYGELDRLAVERAEGLLTARQVKISTDIVNTKITELQARQLDQERLRVLDGIPLGTSQVAGTIAELSPDRFRAVLDVLAEVVVQPVGKSGRIFNPERVQVNWR

SEQ ID NO: 620 - protein, 485 aa, synthetic construct
MTKKVAIYTRVSTTNQAEEGFSIDEQIDRLTKYAEAMGWRVSDTYTDAGLSGAKLERPAMQRLINDIENKAFDTVLVYKLDRLSRSVRDTLYLVKEVFTKNKIDFISLNESIDTSSAMGSLFLTILSAINEFERENIKERMTMGKLGRAKSGKSMMWTKTAFGYYHNRKTGILEIVPLQATIVEQIFTDYLSGTSLTKLRDKLNESGHIGKDIPWSYRTLRQTLDNPVYCGYIKFKDSLFEGMHKPIIPYETYLRVQKELEERQQQTYKRNNNPRPFQAKYMLSGMARCGYCGAPLRIVLGHKRKDGSRTMRYHCANRFPRKTKGVTVYNDNKKCDSGTYDLSNLENTVIDNLIGFQENNDSLLKMINGNNQPILDTSSFKEQISQIDKKIQKNSDLYLNDFITMDELKDRTDSLQAEKKLLKAKISENKFNDSADVFELVKTQLGSIPINELSYDNKKKIVNNLVSKVDVTADNVDIIFKFQLA

SEQ ID NO: 621 - protein, 452 aa, synthetic construct
MKAAIYIRVSTQEQVGNYSIQAQTEKLTALCRSKDWDVYDIFIDGGYSGSNMNRPALNEMLSKLHEIDAVVVYRLDRLSRSQRDTTTLIEEYFLKNNVEFVSLSETLDTSSPFGRAMIGILSVFAQLERETIRDRMVMGKIKRIEAGLPLTTAKGRTFGYDVIDTKLYINEEEAKQLQLIYDIFEEEQSITLLQKRLKQLGFKVRTYNRYNNWLTNDLYCGYVSYKDKVHVKGIHEPIISEEQFYRVQEIFTRMGKSPNTNRDSASLLNNLVVCSKCGLGFVHRSKDTMSRGKKYHYRYYSCKTYKHTHELEKCGNKIWRADRLEELIINRVNNYSFASRNVDKEDGLDSLNEKLKIEHAKKKRLFDLYINGSYEVSELDSMMNDIDAQINCYESQIEANKELKKNKKIQENLADLATVDFDSLEFREKQLYLKSLINKIYIDGEQVTIDWL

SEQ ID NO: 622 - protein, 452 aa, synthetic construct
MKAAIYIRVSTREQVENYSIQAQTEKLTALCRSKGWDVYDIFIDGGYSGSNMNRPALNEMLSKLHEIDAVVVYRLDRLSRSQRDTITLIEEYFLKNNVEFVSLSETLDTSSPFGRAMIGILSVFAQLERETIRDRMVMGKIKRIEAGLPLTTAKGRTFGYDVIDTRLYVNEEEAKQLQLIYDIFEEERSITLLQRRLKKLGFKVRTYNCYNNWLTNDLYCGYVSYKDKVHVRGIHEPIISEEQFYRVQEIFTRMGKNPNMNRDSASLLNNLVVCSKCGLGFVHRRKDAMSRDKKYHYRYYSCKTYKYIHELEKCGNKIWRADELEELIINRVNSYSLASRNVDKDDELDSLNEKLKIEHAKKKRLFDLYINGSYEVSELDSMMNDIDAQISYYECQIEANEGLKKNKKIQENLAYLATVDFDSLEFREKQLYLKSLIDKIYIDGEQVTIEWL

SEQ ID NO: 623 - protein, 485 aa, synthetic construct
MTKKVAIYTRVSTANQVEEGFSIDEQVDRLTKYAEAMGWQVSGTYTDAGFSGAKLERPAMQRLINDIENKAFDTVLVYKLDRLSRSVRDTLYLVKEVFTKNKIDFISLNESIDTSSAMGSLFLTILSAINEFERENIKERMTMGKLGRAKSGKSMMWTKTAFGYCHNRKTGILEIVPLQATIVEQIFTDYLSGISLTKLRDKLNESGHIGKDIPWSYRTLRQTLDNPVYCGYIKFKGSLFEGMHKPIISYEAYLKVQKELEERQQQTYERNNNPRPFQAKYMLSGMARCGYCGAPLRIVLGHKRKDGSRTMKYHCANRFPRKTKGVTVYNDNKKCDSGTYDLSNLENTVIDSLIGFQENNDSLLKIINGNNQPILDTSSFKKQISQIDKKIQKNSDLYLNDFITMDELKDRTDSLQAEKKLLKAKISENKFNNSTDVFELVKTQLGSIPINELSYDDKKRIVNNLVSKVDVTADNVDIIFKFQLA

SEQ ID NO: 624 - protein, 485 aa, synthetic construct
MTKKVAIYTRVSTTNQAEEGFSIDEQIDRLTKYAEAMGWQVGDTYTDAGFSGAKLERPAMQRLINDIENRAFDTVLVYKLDRLSRSVRDTLYLVKDVFTKNKIDFISLNESINTSSAMGSLFLTILSAINEFERENIKERMTMGKLGRAKSGKSMMWTKTAFGYYHNRKTGILEIVPLQATIVEQIFTDYLSGISLTKLRDKLNESGHIGKDIPWSYRTLRQTLDNPVYCGYIKFKDSLFEGMHKPIIPYETYLKVQKELEERQQQTYERNNNPRPFQAKYMLSGMARCGYCGAPLRIVLGHKRKDGSRTMKYHCANRFPRKTKGITVYNDNKKCDSGTYDLSNLENTVIDNLIGFQENNDSLLKIINGNNQPILDTSSFKKQISQIDKKIQKNSDLYLNDFITMDELRDRTEGLQAEKKLLIAKISENKFSDRTDVFELVKAQLGSTPINELSYDNKKKIVNNLVSKVDVTADNVVIIFKFQLA

SEQ ID NO: 625 - protein, 469 aa, synthetic construct
MCYTTPVRAAVYLRISEDRSGEQLGVARQREDCLKLCGQRKWVPVEYLDNDVSASTGKRRPAYEQMLVDITAGKITAVVAWDLDRLHRRPIELEAFMSLADEKRLALATVAGDVDLATPQGRLVARLKGSVAAHETEHKKARQRRAARQKAERGHPNWSKAFGYLPGPNGPEPDPRTAPLVKQAYADILAGASLGDVCRRWNDAGAFTITGRPWTTTTLSKFLRKPRNAGLRTYKGARYGPVDRDAIVGKAQWSPLVDEATFWAAQAVLDAPGRAPGRKSVRRHLLTGLAGCGKCGNHLAGSYRTDGRVVYVCKACHGVAILADNIEPILHHVVAERLAMPDAVDLLRREIHDAAEAETTRLELETLYDELDRLAVERAEGLLTARQVKISTDIVNAKITKLQARRLDQERLRVLDGIPLGTPQVAGMIAELSPDRFRAVLDVLAEVVVQPVGKGGRIFNPERVQVNWR

SEQ ID NO: 626 - protein, 452 aa, synthetic construct
MKAAIYIRVSTREQVENYSIQAQTEKLTALCRSKDWDVYDIFIDGGYSGSNMNRPALNEMLSRLHEIDAVVVYRLDRLSRSQRDTITLIEEYFLKNNVEFVSLSETLDTSSPFGRAMIGILSVFAQLERETIRDRMVMGKIKRIEAGLPLTTAKGRTFGYDVIDTKLYINEEEAKQLQLIYDIFEEEQSITSLQKRLKELGFKVRTYNRYNNWLTNDLYCGYVSYKDKVHVKGIHEPIISEEQFYRVQEIFARMGKNPNMNRDSASLLNNLVVCSKCGLGFVHRRKDAMSRDKKYHYRYYSCKTYKHIHELEKCGNKIWRADKLEELIINRVNNYSLASRNVDKEDELDSLNEKLKIEHAKKRRLFDLYTNGSYEVSELDSMMNDIDAQINYYESQIEANEELKKNIKIQENLAYLATVDFDSLEFREKQLYLKSLINKIYIDGEQVTIEWL

SEQ ID NO: 627 - protein, 469 aa, synthetic construct
MSYTTPVRAAVYLRISEDRSGEQLGVARQREDCLKLCDQRKWVPVEYLDNDVSASTGKRRPAYEQMLADITAGKIAAVVAWDLDRLHRRPIELEAFMSLADEKRLALATVAGDVDLATPQGRLIARLKGSVAAHETEHKKARQRRAARQKAERGHPNWSRAFGYLPGPDGPVPDPRTAPLVKQAYADILAGASLGDVCRRWNDAGASTITGRPWTTTTLSKFLRKPRNAGLRAYKGARYGPVDRDAIVGKAQWSPLVDEATFWAAQAVLDAPGRAPGRKSVRRHLLTGLAGCGKCGNHLAGSYRTDGRVVYVCKACHGVTILADNIEPILYHIVAERLAMPDAVDLLRREIHDAAEAEAIRLELETLYGELDRLAVERAEGLLTARQVKISTDIVNAKITKLQARQLDQERLRVLDGIPLGTPQAAGMIAELSPDRFRAVLDVLAEVVVQPVGKSGRIFNPERVQVSWR

SEQ ID NO: 628 - protein, 452 aa, synthetic construct
MKAAIYIRVSTREQVENYSIQAQTEKLTALCRSKDWDVYDIFVDGGYSGSNMNRPALNEMLSKLHEIDAVVVYRLDRLSRSQRDTITLIEEYFLKNNVEFVSLSETLDTSSPFGRAMIGILSVFAQLERETIRDRMVMGKIKRIEAGLPLTTAKGRTFGYDVIDTKLYINEEEAKHLQLIYDIFEEEQSITFLQKRLKKLGFKVRTYNRYNNWLTNDLYCGYVSYKDKVHVKGVHEPIISEEQFYRVQEIFTRMGKNPNMNRDSASLLNNLVVCGKCGLGFVHRRKDAMSRDKKYHYRYYSCKTYKHIHELEKCGNKIWRADELEELIINRVNNYSLASRNVDKEDGLDSLNEKLKIEHAKKKRLFDLYLNGSYEVSELDSMMNDIDAQINYYESQIEANEELKKNKKIQENLADLAAVDFDSLEFREKQLYLKSLINKIYIDGEQVTIEWL

SEQ ID NO: 629 - protein, 485 aa, synthetic construct
MTKKVAIYTRVSTTNQAEEGFSIDEQVDRLTKYAEAMGWQVSDTYTDAGFSGARLERPAMQRLINDIENRAFDTVLVYKLDRLSRSVRDTLYLVKDVFTKNKIDFISLNESIDTSSAMGSLFLTILSAINEFERENIKERMTMGKLGRAKSGKSMMWTKTAFGYYHNRKTGILEIVPLQATIVEQIFTDYLSGISLTKLRDKLNESGHIGKDIPWSYRTLRQTLDNPVYCGYIKFKGSLFEGMHKPIIPYETYLKVQKELEERQQQTYERNNNPRPFQAKYMLSGMARCGYCGAPLRIVLGHKRKDGSRTMKYHCANRFPRKTKGITVYNDNKKCDSGAYDLRYLENTVIDNLIGFQENNDSLLKIINGNNQPILDTSSFEEQISQIDKKIQKNSDLYLNDFITMDELKDRTDSLRAEKKLLKAKISENKFNDSSDVFELVKTQLGSIPINELSYDNKKKIVNNLVSKVDVTADNVDIIFKFQLA

SEQ ID NO: 630 - protein, 452 aa, synthetic construct
MKAAIYIRVSTQEQVGNYSIQAQTEKLTALCRSKDWDVYDIFIDGGYSGSNMNRPALNEMLSKLHEIDAVVVYRLDRLSRSQRDTTTLIEEYFLKNNVEFVSLSETLDTSSPFGRAMIGILSVFAQLERETIRDRMVMGKIKRIEAGLPLTTAKGRTFGYDVIDTKLHINEEEAKQLQLIYDIFEEEQSITLLQKRLKKLGLKVRTYNRYNNWLTNDLYCGYVSYKDKVHVKGIHEPIISEEQFYRVQEIFTRMGKNPNMNRDSASLLSNLVVCSKCGLGFVHRSKDTMSRGKKYHYRYYSCKTYKHTHELEKCGNKTWRADKLEELIISRVNNYSSASRNVDKEDVLDCLNEKLKIGHAKKKRLFDLYINGSYEVSELDSMMNDVDAQINYYESQIEANEELKKNKKIQENLADLATADFDSLEFREKQLYLRSLINKIYIDGEQVTIEWL

SEQ ID NO: 631 - protein, 469 aa, synthetic construct
MCYTTPVRAAVYLRISEDRSGEQLGVARQREDCLKLCGQRKWVPVEYLDNDVSASTGKRRPAYEQMLADITAGKIAAVVAWDLDRLHRRPTELEAFMSLADEKRLALATVAGDVDLATPQGRLVARLKGCVAAHETEHKKARQRRAARQKAERGYPNWSKAFGYLPGPNGPEPDPRTAPLVKQAYADILAGASLGDVCRQWNDAGAFTITGRPWTATTLSKFLRNPRNAGLRAYKGARYGPVDRDAIVGKAQWSPLVDEATFWAAQAVLDAPGRAPGRKSVRRHLLTGLAGCGKCGNHLAGSHRTDGRVVYVCKACHGVAILAENIEPILYHIVAERLAMPDAADLLRREVHDAAEAEAIRLELETLYGELDRLAVERAEGLLTARQVKISTDIVNAKIAKLQARQLDQERLRVFDGIPLGTPQVAGTIAGLSPDRFRAVLDVLAEVVVQPVGKSGRIFNPERVQVNWR

SEQ ID NO: 632 - protein, 469 aa, synthetic construct
MNYTTPVRAAVYLRISEDRSGEQLGVARQREDCLKLCDQRRWVPVEYLDNDVSASTGKRRPAYEQMLADITAGKIAAVVAWDLDRLHRRPIELEAFMSLADEKRLALATVAGDVDLATPQGRLVARLKGCVAAHETEHKKARQRRAARQKAERGHPNWSRAFGYLPGPNGPEPDPRTAPLVKQAYADILAGASLGDVCRRWNDAGAFTITGRPWTTTTLSKFLRKPRNAGLRAYKGVRYGPVDRDAIVGKAQWSPLVDEATFWAAQAVLDAPGRAPGRKSVRRHLLTGLAGCGKCGNHLAGSYRTDGRVVYVCKACHGVAILADNIEPILYHIVTERLAMPDAVDLLHREIHDAAEAETIRLELETLYGELDRLAVERAEGLLTARQVKISTDIVNAKITKLRARQLDQERLRVLDGIPLGTPQVAGMIAELSPDRFRAVLDVLAEVVVQPVGKSSRIFNPERVQVNWR

SEQ ID NO: 633 - protein, 452 aa, synthetic construct
MKAAIYIRVSTREQVENYSIQAQTEKLTALCRSKDWDVYDIFIDGGYSGSNMNRPALNEMLSKLLEIDAVVVYRLDRLSRSQRDTITLIEEYFLKNNVEFVSLSETLDTSSPFGRAMIGILSVFAQLERETIRDRMVMGKIKRIEAGLPLTTAKGRTFGYDVIDTKLYINEEEAKQLQLIYDIFEEEQSITFLQKRLKKLGFKVRTYNCYNNWLTNDLYCGYVSYKDKVHVKGIHEPIISEEQFYRVQEIFTRMGKNPNMNRDSASLLNNLVVCSKCGLGFVHRRKDAMSRDKKYRYRYYSCKTYKHIHELEKCGNKIWRADKLEELVINRVNNYSLASRNVDKEDELDSLNEKLRTEHAKKKRLFDLYINGCYDVSELDSMMCDIDAQINYYESQIEANEELKRNKKIQENLAYLATVDFNSLEFREKQLYLKSLINKIYIDGEQVTIEWL

SEQ ID NO: 634 - protein, 469 aa, synthetic construct
MSYTTPVRAAVYLRISEDRSGEQLGVARQREDCLKLCGQRKWEPVEYLDNDVSASTGKRRPAYEQMLADITAGKIAAVVAWDLDRLHRRPIELEAFMSLADEKRLALATVAGDVDLATPQGRLVARLKGSVAAHETEHKKARQRRAARQKAERGLPNWSKAFGYLPGPNGPEPDPRTAPLVKQAYADILAGASLGDVCRQWNDAGAFTITGRPWATTTLSKFLRKPRNAGLRAYKGARYGPVDRDAIVGKAQWSPLVDEATFWAAQAVLDAPGRAPGRKSVRRHLLTGLAGCGKCGNHLAGSYRTDGRVVYVCKACHGVAILADNIEPILYHIVVERLAMPDAVDLLRREIHDAAEAETTRQELGTLYGELDRLAVERAEGLLTARQVKISTDIVNAKITKLRARQLDQERQRVFDGIPLGTPQVAGMIAELSPNRFRAVLDVLAEVVVQPVGKSGRIFNPERVQVNWR

SEQ ID NO: 635 - protein, 469 aa, synthetic construct
MCYTTPVRAAVYLRISEDRSGEQLGVARQREDCLKLCDQRKWEPVEYLDNDVSASTGKRRPAYEQMLADITAGKIAAVVAWDLDRLHRRPIELEAFMSLADEKRLALATVAGDVDLATPQGRLVARLKGSVAAHETEHKKARQRRAARQKAERGLPNWGKAFGYLPGPNGPEPDPRTAPLVKQAYVDILAGASLGEVCRQWNAAGAFTITGRPWTTTTLSKFLRKPRNAGLRAYKGARYGPVDRDAIVGKAQWSPLVDEATFWATQAMLDAPGRAPGRKSVRRHLLTGLAGCGKCGNHLAGSYRTDGRVVYVCKACHGVAILAENIEPILYHIVAERLAMPDAVDLLRREIHDAAEAETIRLELETLYGELDRLAVERAEGLLTARQVKISTDIVNAKITKLQARQLDQERLRVFDGIPLGTPQVAGKIAELSPDRFRAVLDVLAEVVVQPVGKSGRIFNPERVQVNWR

SEQ ID NO: 636 - protein, 485 aa, synthetic construct
MTKKVAIYTRVSTTNQAEEGFSIDEQTDRLTKYAEAMGWQVSDTYTDAGFSGAKLERPAMQRLINDIENKAFDTVLVYKLDRLSRSARDTLYLVKDVFTRNKIDFISLSESIDTSSAMGSLLLTILSAINEFERENIKERMTMGKLGRAKSGKSMMWTKTAFGYYHNRKTGILEIVPLQATIVEQIFTDYLSGISLTKLRDKLNESGHIGKDIPWSYRTLRQTLDNPVYCGYIKFKDSLFEGMHKPIIPYETYLRVQKELEERQQQTYERNNNPRPFQAKYMLSGMARCGYCGAPLKIVLGHKRKDGSRTTKYHCANRFPRKTKGVTVYNDNKKCDSGTYDLSNLEDTVIDRLIDFQENNDSLLKIINGNNQPILDTSSFKEQISQIDKKIQKNSDLYLNDLITMDELKDRTDSLRAEKKLLKAKISENKFNDSTDVFELVKTQLGSNPINELSYDNKKKIVNNLVSKVDVTADNVDIIFKFQLA

SEQ ID NO: 637 - protein, 469 aa, synthetic construct
MSYTTPVRAAVYLRISEDRSGEQLGVARQREDCLELCGQRKWVPVEYLDNDVSASTGKRRPAYEQMLADITAGKIAAVVAWDLDRLHRRPIELEAFMSLADEKRLALATVAGDVDLATPQGRLVARLKGSVAAHETEHKKARQRRAARQKAERGHPNWSKAFGYLPGPNGPEPDPRTAPLVKQAYADILAGASLGDVCRQWNDAGAFTITGRLWTSTTLSKFLRKPRNAGLRAYKGARYGPVDRDAIVGKAQWSPLVDEATFWAAQAVLDAPGRAPGRKSVRRHLLTGLAGCGKCGYHLAGSYRTDGRVVYVCKACHGVAILADNIEPILYHIVAERLAMPDAVDLLRRETHDAAEAEAIRLELETLYGELDRLAVERAEGLLTARQVKIGTDVVSAKITKLQARQQDQERLRVLDGIPLGTPRVAGKIAELSPDRFRAVLDVLAEVVVQPVGKSGRIFNPERVQVNWR

SEQ ID NO: 638 - protein, 485 aa, synthetic construct
MTKKVAIYTRVSTTNQAEEGFSIDEQIDRLTKYAEAMGWQVSDTYTDAGFSGAKLERPAMRRLINDIENKAFDTVLVYKLDRLSRSVRDTLYLVKDVFTKNKIDFISLNESIDTSSAMGSLFLTILSAINEFERENIKERMTMGKLGRAKSGKSMMWTKTAFGYYHNRETGILEIVPPQATIVEQIFTDYLSGISLTKLRDKLNESGHIGKDIPWSYRTLRQTLDNPVYCGYIKFKDSLFKGMHKPIIPYETYLKVQKELEERQQQTYERNNNPRPFQAKYMLSGMARCGYCGAPLRIVLGHKRKDGSRTMKYHCTNRFPRKTKGITVYNDNKKCDSGTYDLSNLENTVIDNLIGLQESDDSLLKIINGNNQLILDTSSFKKQISQIDKKIQRNSDLYLNGFITMDELKDRTDNLQAEKKLLKAKISENKFNDSTDVFELVKTQLGSIPINELSYDNKKRIVNNLVSKVDVTTDNVDIIFKFQLA

SEQ ID NO: 639 - protein, 469 aa, synthetic construct
MSYTTPVRAAVYLRISEDRSGEQLGVARQREDCLKLCGQRKWVPVEYLDNDVSASTGKRRPAYEQMLADITAGKIAAVVTWDLDRLHRRPVELEAFMSLADEKRLALATVAGDVDLATPQGRLVARLKGCVAAHETEHKKARQRRAARQKAERGYPNWSKAFGYLPGPNGPEPDPRTAPLVKQAYADILAGASLGDVCRQWNDAGAVTITGRPWTTTTLSKFLRKPRNAGLRAYKGARYGPVDRDAIVGKAQWRPLVDEATFWAAQAVLDAPGRAPGRKSVRRHLLTGLAGCGKCGNHLAGSYRTDGRVVYVCKACHGIAILADNIEPTLYHIVAERLAMPDAVDLLRREAHDAAEAETIRLELETLHGELDRLAVERAEGLLTARQVKISTDIVNAKIAKLQARQLDQERLRVLDGIPLGTPQVAGMIAELSPDRFRAVLDVLAEVVVQPVGRSGRTFNPERVQVNWR

SEQ ID NO: 640 - protein, 485 aa, synthetic construct
MTKKVAIYTRVSTTNQAEEGFSIDEQIDRLTKYAEAVGWQVSDTYTDAGFSGAKLERPAMQRLINDIENKAFDTVLVYKLDRLSRSVRDTLHLVKDVFTKNKIDFISLNESIDTSSAMGSLFLTILSAINEFERENIKERMTMGKLGRAKSGKSMMWTKTAFGYYHNRKTGILEIAPLQAAIVEQIFTDYLSGISLTKLRDKLNESGHIGKDIPWSYRTLRQTLDNPVYCGYIKFKDSLFEGMHKPIIPYETYLKVQKELEERQQQTYERNNNPRPFQAKYMLSGMARCGYCGAPLRVVLGHKRKDGSRTMKYHCANRFPRKTSGVTVYNDNKKCDSGTYDLSNLENTVIDNLIGFQENNDSLLKIINGNNQPIPDTSSFKKRISQIDKKIQKNSDLYLNDFITMDELKDRTDSLQAEKKLLKAKISENKFNDSADVFELVKAQLGSIPINELSYDNKKKIVNNLVSKVDVTADNVDIIFKFQLA

SEQ ID NO: 641 - protein, 452 aa, synthetic construct
MKAAIYIRVSTREQVENYSIQAQTEKLTALCRSKDWDVYDIFVDGGYSGSNMNRPALNEMLSKLHEIDAVVVYRLDRLSRSQRDTITLIEEYFLKNNVEFVSLSETLDTSSPFGRAMIGILSVFAQLERETIHDRMVMGKIKRIEAGLPLTTAKGRTFGYDVIDTKLYINEEEAKQLQLIYDIFEEERSITFLQKRLKELGFKVHTYSRYNNWLTNDLYCGYVSYKDKVHVKGIHEPIISEEQFYRVQEIFTRMGKNPNMNRDSASLLNNLVVCSKCGLGFVHRRKDTMSRGKKYHYRYYSCKTYKHTHELEKCGNKIWRADKLEELIINRVNNYSFASRNVDKAEERDSLNEKLKVEHARKKRLFDLYINGSYNVSELDSMMNDIDAQINHYESQIEANEGLKKDRKIQENLADLATVDFDSLEFREKQLYLKSLINKIYIDGEQVTIEWL

SEQ ID NO: 642 - protein, 469 aa, synthetic construct
MCYTTPVRAAVYLRISEDRSGEQLGVARQREDCLKLCDQRKWVPVEYLDNDVSASTGKRRPAYEQMLADITAGKIAAVVAWDLDRLHRRPIELEAFMSLADEKRLALATVAGDVDLATPQGRLVARLKGSVAAHETEHKKARQRRAARQKAERGYPNWSKAFGYLPGPNGPEPDPRTAPLVKQAYADILAGASLGDVCRQWNDAGAFTVTGRPWTTTTLSKFLRKPRNAGLRAYKGARYGPVDRDAIVGKAQWSPLVGEATFWAAQAVLDAPGRAPGRKSVRRHLLTGLAGCGKCGNHLAGSYRTDGRVVYVCKACHGVAILADNIEPILYHIVAERLAMPDAVDLLRREIHDAAEAETIRLELETLYDELDRLAVERAEGLLTARQVKISTDIVNAKITKLQARQQDQERLRVLDGIPLGTPQVAGMIAELSPDRFRAVLDVLAEVVVQPVGKSGRIFNPERVQVNWR

SEQ ID NO: 643 - protein, 452 aa, synthetic construct
MKAAIYIRVSTREQVENYSIQAQTEKLTALCRSKDWDVYDIFIDGGYSGSNMNRPALNEMLSKLHEIDAVVVYRLDRLSRSQRDTITLIEEYFLKNNVEFVSLSETLDTSSPFGRAMIGILSVFAQLERETIRDRMVMGKIKRIEAGLPLTTAKGRTFGYDVIDTKLYINEEEAKQLQLIYDIFEEEQSITFLQKRLKELGFKVRTYNCYNNWLTNDLYCGYVSYKDKVHVKGIHEPIISEEQFYRVQEIFTRMGKNPNMNRDSASLLNNLVVCSKCGLGFVHRRKDAMSRDKKYHYRYYSCKTYKHIHELEKCGNKIWRADKLEELIINRVNNYSIAGRNADKEDELDSLNEKLKIEHAKKKRLFELYINGSYEVSELDSMMNDIDAQINYYESQIEANEELKRDKKIQGNLANLATVDFDSLEFREKQLYLKSLINKIYIDGEQVTIEWL

SEQ ID NO: 644 - protein, 485 aa, synthetic construct
MTKKVAIYTRVSTTNQAEEGFSIDEQIDRLTKYAEAMGWQVSGTYTDAGFSGAKLERPAMRRLFNDIENKAFDTVLVYKLDRLSRSVRDTLYLVKDVFTKNKIDFISLNESIDTSSAMGSLFLTILSAINEFERENIKERMAMGKLGRAKSGKSMMWTKTAFGYYHNRKTGILEIVPLQATIVEQIFTDYLSGISLTKLRDKLNESGHIGKDIPWSYRTLRQTLDNPVYCGYIKFKGSLFEGMHKPIIPYETYLKVQKELEERQQQTYERNNNPRPFQAKYMLSGIARCGYCGAPLKIVLGRKRKDGSRTMKYHCANRFPRKTRGITVYNDNKKCDSGTYDLSNLENTVIDNLIGFQENNDRLLKIINGNNQPILDTSSFKKQISQIDKKIQKNSDLYLSDFITMDELKDRTDSLQAEKKLLEAKISENKFNDSTDVLELVKTQLGSIPINELSYDNKKKIVNNLVSKVDVTADSVDIIFKFQLA

SEQ ID NO: 645 - protein, 469 aa, synthetic construct
MSYTTPVRAAVYLRISEDRSGEQLGVARQREDCLKLCDQRKWVPVEYLDNDVSASTGKRRPAYEQMLADIAAGKIAAVVAWDLDRLHRRPVELEAFMSLADEKRLALATVAGDVDLATPQGRLVARLKGCVAAHETEHKKARQRRAARQKAERGLPNWSKAFGYLPGPNGPEPDPRTAPLVKQAYADVLAGASLGDVCRQWNDAGAFTITGRPWTTTTLSKFLRKPRNAGLRAYKGVPYGPVDRGAIVGKAQWSPLVDEATFWAAQAVLDAPGRAPGRKSVRRHLLTGLAGCGKCGNRLAGSYRTDGQIVYVCKACHGVSILAVNIEPILYRIVAERLAMPDAVDLLRCEIHDAAEAETIRLELETLYGELDRLAVERAEGLLTARQVKISTDIVNAKITKLQARQLDQERLRVLDGIPLGTPQVAGMIAELSPDRFRAVLDVLAEVVVQPVGKSGRIFNPERVQVNWR

SEQ ID NO: 646 - protein, 469 aa, synthetic construct
MSYTTPVRAAVYLRISEDRSGEQLGVARQREDCLKLCSQRKWEPVEYLDNDVSASTGKRRPAYEQMLADITAGKIAAVVAWDLDRLHRRPVELEAFMSLADEKRLALATVAGDVDLATPQGRLVARLKGSVAAHETEHKKARQRRAARQKAERGHPNWSKAFGYLPGPNGPEPDPRTAPLVKQAYADILAGASLGDVCRRWNDAGAFTITGRPWTSTTLSKFLRKPRNAGLRAYKGARYGPVDRDAIVGKARWSPLVDEATFWAAQAVLDAPGRAPGRKSVRRHLLTGLAGCGKCGNHLAGSYRTDGRVVYVCKSCHGVAILADNIEPILYHIVVERLAMPDAVDSLRREIHDAAEAETIRLELETLYGELDRLAVERAEGLLTARQVKISTDIVNAKITKLQARQLDQERLRVFGGIPLGTPQVAGMIAELSPDRFRAVLDVLAEVVVQPVGKSGRIFNPERVQVNWR

SEQ ID NO: 647 - protein, 469 aa, synthetic construct
MSYTTPVRAAVYLRISEDRSGEQLGVARQREDCLELCGQRKWVPVEYLDNDVSASTGKRRPAYEQMLADITAGKIAAVVAWDLDRLHRRPVELEAFMSLADEKRLALATVAGDVDLATPQGRLVARLKGSVAAHETEHKKARQRRAARQKAERGHPNWSKAFGYQPGPNGPEPDPRTAPLVKQAYADILAGASLGDVCRLWNDAGAFTITGRPWTTTTLSKFLRKPRNAGLRAYKGARYGPVDRDAIVGKAQWSPLVDEATFWAAQAVLDAPGRAPGRKSVRRHLLTGLAGCGKCGNHLAGSYRTDGRVVYVCKACHGVAILADNIEPILYHIVAERLAMPDAVNLLRREIHDVAEAETIRLELETLYGELDRLAVERAEGLLTARQVKICTDIVNAKITKLQTRQLDQERLRVLDGIPLGTPQVAGTIAGLSPDRFRAVLDVLVEVVVRPVGKSGRIFSPERVQVSWR

SEQ ID NO: 648 - protein, 485 aa, synthetic construct
MTKKVAIYTRVSTTNQAEEGFSIDEQIDRLTKYAEAMGWQVSDTYTDAGLSGAKLERPAMQRLISDIENKTFDTVLVYKLDRLSRSVRDTLYLVKDVFTKNKIDFISLNESIDTSSAMGSLFLTILSAINEFERENIKERMTMGKLGRAKSGKSMMWTKTAFGYYHNRKTGILEIVPLQATIVEQIFTDYLSGISLTKLRDKLNEGGHIGKDIPWSYRTLRQTLDNPVYCGYIKFKDSLFEGMHKPIIPYETYLRVQKELEERQQQTYERNNNPRPFQAKYMLSGMARCGYCGAPLKIVLGHRRKDGSRTMKYHCANRFPRKTRGVTVYNDNKKCDSGTYDLSNLENIVLDNLIGFQESNDSLLKIINGNNQPILDTSSFREQISQIDKKIQKNSDLYLNDFITMDELKDRTDSLQAEKKLLKAKISENKFNDSTDVFELVKAQLGSIPINELSYDNKKKIVNNLVSKVDVTADNVDIIFKFQLA

SEQ ID NO: 649 - protein, 469 aa, synthetic construct
MCYTTPVRAAVYLRISEDRSGEQLGVARQREDCLKLCAQRKWAPVEYLDNDVSASTGKRRPAYEQMLADITAGKIAAVVAWDLDRLHRRPIELEAFMSLADEKRLALATVAGDVDLATPQGRLVARLKGSVAAHETEHKKARQRRAARQKAERGYPNWSKAFGYLPGPNGPEPDPRTAPLVKQAYADILAGASLGDVCRQWNDAGAFTITGRPWTTTTLSKFLRKPRNAGLRAYKGARYGPVDRDAIVGKAQWSPLVDEATFWAAQAILDAPGRAPGRKGVRRHLLTGLAGCGKCGNHLAGSYRTDGRVVYVCKACHGVAILADNIEPTLYHIVAERLAMPDAVNLLRREIHDAAEAETIRLELETLYGELDRLAVERAEGLLTARQVKISTDIVNAKITKLQARQLDQERLRVLGGIPLGTPQVAGVVAELSPDRFRAVLDVLAEVVVRPVGKGGRIFNPERVQVNWR

SEQ ID NO: 650 - protein, 485 aa, synthetic construct
MTKKVAIYTRVSTTNQAEEGFSIDEQIDRLTKYVEAMGWQVSDTYTDAGFSGAKLERPAMQRLINDIENKAFDTVLVYKLDRLSRSVRDTLYLVKDVFTKNKIDFISLNESIDTSSAMGSLFLTILSAINEFERENIKERMTMGKLGRAKSGKSMMWTKTAFGYYHNRKTGILEIVPLQATIVEQIFTDYLSGISLTKLRDKLNESGHIGKDIPWSYRTLRQTLDNPVYCGYIKFKDSLFEGMHKPIIPYETYLKVQRELEERQQQAYGRNNNPRPFQAKYMLSGMARCGYCGAPLRIVLGHKRKDGSRTMKYHCANRFPRETKGVTVYNDNKKCDSGTYDLSNLENTVIDNLIGFQENNDSLLKIINGNNQPILDTSSFKKQISQIDKKIQKNSDLYLNDFITMDELKDRTDSLQAEKKLLRAQISENKFNDSTDVFELVKTQLGSIPINELSYDNKKKIVNNLVSKVDVTADSVDIIFKFQLA

SEQ ID NO: 651 - protein, 452 aa, synthetic construct
MKAAIYIRVSTREQVENYSIQAQTEKLTALCRSKDWDVYDIFIDGGYSGSNMNRPALNEMLSKLHEIDAVVVYRLDRLSRSQRDTITLIEEYFLKNNVEFVSLSETLDTSSPFGRAMIGILSVFAQLERETIRDRMVMGKIKRIEAGLPLTTAKGRTFGYDVVDTKLYINEEEARQLQLIYDIFEEEQSITFLQKRLKKLGFKVRTYNRYNNWLTNDLYCGYVSYKDKVHVKGIHEPIISEEQFYRVQEIFTRMGKNPNMNRDSASLLNNLVVCGKCGLGFVHRRKDAMSRDKKYHYRYYSCKTYKHIHELEKCGNKIWRADKLEELIINRVNSYSLANRNVDKEDELDSLNEKLKIEHAKKKRLFDLYINGSYEMSELDSMMNDIDAQINYYESQIEANEELKKNKKVQENLAYLATVDFDSLEFREKQLYLKSLINKIYIDGEQVTIEWL

SEQ ID NO: 652 - protein, 469 aa, synthetic construct
MSYTTPVRAAVYLRISEDRSGEQLGVARQREDCLKLCGQRKWVPVEYLDNDVSASTGKRRPAYEQMLSDITAGKIAAVVAWDLDRLHRRPIELEAFMSLADEKRLALATVAGDVDLATPQGRLVARLKGCVAAHETEHKKARQRRAARQKAERGHPNWSKAFGYLPGPNGPEPDPRTAPLVKQAYADILAGASLGDVCRQWNGAGAFTITGRPWTTTTLSKFLRKPRNAGLRAYKGARYGPVDRDAIVGKAQWSPLVDEATFWAAQAVLDAPGRAPGRKSVRRHLLTGLAGCGKCGNHLAGSYRADGQVVYVCKACHGVSILAVNIEPTLYHIVAKRLAMPDAVDLLRRETHDAAEAETIRLELETLYGELDRLAVERAEGLLTARQVKISTDIVSAKITKLQARQLDQERLRVFDGIPLGTPQVAGMIAELSPDRFRAVLDVLAEVVVQPVGKGGRIFSPERVQVNWR

SEQ ID NO: 653 - protein, 485 aa, synthetic construct
MTKKVAIYTRVSTTNQAEEGFSIDEQIDRLTKYAEAMGWQVSDTYTDAGFSGAKLERPAMQRLINDIENDAFDTVLVYKLDRLSRSVRDTLYLVKDVFTKNKIDFISLSESIDTSSAMGSLFLTILSAINEFERENIKERMTMGKLGRARSGKSMMWTKTAFGYHHNRKTGILEIVPLQATIVEQIFTDYLSGISLTKLRDKLNESGHIGKDIPWSYRTLRQTLDNPVYCGYIKFKDSLFEGMHKPIIPYETYLKVQKELEERQQQTYERNNNPRPFQAKYMLSGMARCGYCGAPLRIVLGHKRKDGSRTMKYHCANRFPRKTKGVTVYNDNKKCDGGTYDLSNLENTVIDTLIGFQENNDSLLKIINGNNQPILDTSSFKKQISQIDKKIQKNSDLYLNDFITMDELKDRTDSLQAEKKLLIAKISETKFNDSTDVLELVKTQLGSIPINELSYDNKKKIVNNLVSKVDVTADNVDIIFKFQLA

SEQ ID NO: 654 - protein, 452 aa, synthetic construct
MKAAIYIRVSTREQVENYSIQAQTEKLTALCRSKDWDVYDIFIDGGYSGSDMNRPALNEMLSKLHEIDAVVVYRLDRLSRSQRDTITLIEEYFLKSNVEFVSLSETLDTSSPFGRAMIGILSVFAQLERETIRDRMVMGKIKRIEAGLPLTTAKGRTFGYDVIDTKLYINEEEAKQLQLIYDIFEEERSITFLQKRLKKLGFKVRTYNRYNNWLTNDLYCGYVSYKDKVHVKGIHEPIISEEQFYRVQEIFTRMGKNPNMNRNSASLLNNLVVCSKCGLGFVHRRKVAMSRDKKYHYRYYSCKTYKHIHELEKCGNKIWRADKLEELIINRVNNYSLASRNVDKEDELDSLNEKLKIEHAKKKRLFDLYINGGYEVSELDSMMNDIDAQINYYESQIEANEGLKKNKKIQENLAHLATVDFDSLEFREKQLYLKSLINKIYIDGEQVTIEWL

SEQ ID NO: 655 - protein, 485 aa, synthetic construct
MTKKVAIYTRVSTTNQAEEGFSIDEQIDRLTKYAEAMGWQVSDTYTDAGFSGAKLERPAMQRLINDIENKAFDTVLVYKLDRLSRSVRDTLYLVKDVFTKNKIDFISLNESIDTSSAMGSLFLTILSAINEFERENIKERMAMGKLGRAKSGKSMMWTKTAFGYYHNRKTGILEIVPLQATIVQQIFTDYLSGISLTKLRDKLNESGHIGKDIPWSYRTLRQTLDNPVYCGYIKFKGSLFEGMHKPIIPYETYLKVQKELEERQQQTYERNNNPRPFQAKYMLSGMARCGYCGAPLRIVLGHKRKDGSRTMKYHCANRFPRKTKGVTVYNDNKKCDSGTYDLCSLENTVIGNLIGFQENNDSLLKIINGNNQPILDTSSFEKRISQIDKRIQKNSDLYLNDFITMDELKDRTDSLQAEKKLLKAKISENRLNDSTDVFELVKTQLGSIPINELSYDNKKKIVNNLVSKVDVTADNVDIIFKFQLA

SEQ ID NO: 656 - protein, 469 aa, synthetic construct
MCYTTPVRAAVYLRISEDRSGEQLGVARQREDCLKLCGQRNWVPVEYLDNDVSASTGKRRPAYEQMLADITAGKIAAVVAWDLDRLHRRPIELEAFMSLADEKRLALATVAGDIDLATPQGRLVARLKGSVAAHETEHKKARQRRAARQKAERGYPNWSKAFGYLPGPNGPEPDPRTAPLVKQAYADILAGASLGDVCRQWNDAGAFTITGRPWTTTALSKFLRKPRNAGLRAYKGARYGPVDRDAIVGKAQWGPLVDEATFWAAQAVLDAPGRAPGKKSVRRHLLTGLAGCGKCGNHLAGSYRTDGRVVYVCKACHGVAILADNIEPLLYHIVAERLAMPDAVDLLRREIQDVAEAETIRLELETLYGELDRLAVERAEGLLTARQVKISTDIVNAKIAKLQARQLDQERLRVFDGIPLGTPQVAGMIAELSPNRFRAVLDVLAEVVVQPVGKSGRTFNPERVQVNWR

SEQ ID NO: 657 - protein, 469 aa, synthetic construct
MSYTTPVRAAVYLRISEDRSGEQLGVARQREDCLRLCDQHKWVPVEYLDNDVSASTGKRRPAYEQMLADITAGKIAAVVAWDLDRLHRRPTELEAFMSLADEKRLALATVAGDVDLATPQGRLVARLKGCVAAHETEHKKARQRRAARQKAERGLPNWSKAFGYLPGPSGPEPDPRIAPLVKQAYADILAGASLGDVCRRWNDAGAFTITGRPWTTTTLSKFLRKPRNAGLRAYRGARYGPVDRDAIVGKAQWSPLVDEATFWAAQAVLDAPGRAPGRKSVRRHLLTGLAGCGKCGNHLAGSYRTDGQIVYVCKACHGVSILAVNIEPILYHIVAERLAMPDAVDLLRCEIHDAAEAETIRLELETLYGELDRLAVERAEGLLTARQVKISTDVVNAKIAKLQARQLDQGRLRVLDGIPLGTPQVAGVITGLSPDRFRAVLDVLAEVVVQPAGKGGRIFNPERVQVNWR

SEQ ID NO: 658 - protein, 452 aa, synthetic construct
MKAAIYIRVSTQEQVGNYSIQAQTEKLTALCHSKDWDVYDIFIDGGYSGSNMNRPALNEMLSKLHEIDAVVVYRLDRLSRSQRDTTTLIEEYFLKNNVEFVSLSETLDTSSPFGRAMIGILSVFAQLERETIRDRMVMGKIKRIEAGLPLTTAKGRTFGYDVIDTKLYINEEEAKQLQLIYDIFEEEQSITSLQKRLKKLGFKVRTYNRYSNWLTNDLYCGYVSYKDKVHVKGIHEPIISEEQFYRVQEIFTRMGKNPNMNRDSASLLSNLVVCSKCGLGFVHRSKDTMSRGKKYHYRYYSCKTYKHTHELEKCGNKTWRADKLEELIINRVNNYSFASRNMVKEDELDSLNEKLKIEHAKRKRLFDLYINGSCEMSELDSMMNDIDAQINYYESQIEANEELKKNKKIQENLADLATVDFDSLEFREKRMYLKSLINKIYIDGEQVTIEWL

SEQ ID NO: 659 - protein, 452 aa, synthetic construct
MKAAIYIRVSTREQVENYSIQAQTEKLTALCRSKDWDVYDIFIDGGYSGSNMNRPALNEMLSKLHEIDAVVVYRLDRLSRSQRDTITLIEEYFLKNNVEFVSLSETLDTSSPFGRAMIGILSVFAQLERETIRDRMVMGKIKRIEAGLPLTTAKGRTFGYDVVDTKLYINEEEAKQLRLIYDIFEEEQSITSLQKRLKKLGFKVRTYNRYSNWLTNDLYCGYVSYKDKVHVKGIHEPIISEEQFYRVQEIFTRMGKNPNMNRGSASLLNNLVVCSKCGLGFVHRRKDIMSHGKRYHYRYYSCKTYKHIHELEKCGNKIWRADKLEELVINRVNSYSFASRSADKEDELVSLNEKLKIEHAKKKRLFDLYINGSYEVSELDSMMSDIDAQISHYESRIDANGRLKKNKKIQENLAHLATVDFDSLGFREKQLYLKSLINKIYIDGEQVTIEWL

SEQ ID NO: 660 - protein, 452 aa, synthetic construct
MKAAIYIRVSTREQVENYSIQAQTEKLTALCRSKDWDVYDIFIDGGYSGSNMNRPALNEMLSKLHEIDAVVVYRLDRLSRSQRDTITLIEEYFLKNNVEFVSLSETLDTSSPFGRAMIGILSVFAQLERETIRDRMVMGKIKRVEAGLPLTTAKGRTFGYDVIDTKLYINEEEAKQLQLIYDIFEEEQSITFLQKRLKELGFKVRTYNRYNNWLTNDLYCGYVSYKDKVHVRGIHEPIISEEQFYRVQEIFTRMGKSPNMNRDSASLLSNLVVCSKCGLGFVHRRKDAMSRDKKYHYRYYSCKTYKHIHELEKCGNKIWRADKLEELIINRVNNHSLASRNVDKEDELDSLNEKLKIEHAKKKRLFELYINGSYEVSELDSMMNDIDAQIDYYESQIEANAELKKNKRIQENLAELASVDFDSLEFREKQLYLKSLINKIYIDGEQVTIEWL

SEQ ID NO: 661 - protein, 469 aa, synthetic construct
MSYTTPVRAAVYLRISEDRSGEQLGVARQREDCLKLCGQRKWVPVEYLDNDVSASTGKRRPAYEQMLADITAGKIAAVVAWDLDRLHRRPIELEAFMSLADEKRLALATVAGDVDLATPQGRLVARLKGCVAAHETEHKKARQRRAARQKAERGLPNWSKAFGYLPGPNGPEPDPRTAPLVKQAYADILAGASLGDVCRQWNDAGAFTITGRPWTTTALSKFLRKPRNAGLRAYKGARYGPVDRDAIVGKAQWSPLVDEATFWAAQAVLDAPGRAPGRKSVRRHLLTGLAGCGKCGNHLAGSYRTDGRVVYVCKACHGVTILADNIEPILYHIVAERLAMPDAVDLLCREIHDAAEAETIRLELETLYGELDRLAVERAEGLLTARQVKISTDIVNAKITKLQARQLDQERLRVFDGIPLGTPQVAGMIAELSPNRFRAVLGVLAEVVVQPVGKSGRIFNPERVQVNWR

SEQ ID NO: 662 - protein, 485 aa, synthetic construct
MTKKVAIYTRVSTTNQAEEGFSIDEQIDRLTKYAEAMGWQVSDTYIDAGLSGAKLERPAMQRLINDIENQAFDTVLVYKLDRLSRSVRDTLYLVKDVFTKNKIDFISLNESIDTSSAMGSLFLTILSAINEFERENIKERMTMGKLGRAKSGKSMMWTKTAFGYYHNRKTGILEIVPLQATIVEQIFTDYLSGISLTKLRDKLNESGHIGKDIPWSYRTLRQTLDNPVYCGYIKFKDSLFEGMHKPIIPYETYQKVQKELEERQQQTYERNNNPRPFQAKYMLSGKARCGYCGAPLKIVLGHKRKDGSRTMKYHCANRFPRKTRGITVYNDNKKCDSGTYDLRNLENTVIDNLIGLQENDDSLLKIINGSNQPTLDTSSFKEQISQIDKKIQKNSDLYLNDFITMDELKDRTDSLQAEKKLLEAKISENKFNDSTDVFELVKTQLGSIPINELSYDNKKKIVNNLVSKVDVTADNVDIIFKFQLA

SEQ ID NO: 663 - protein, 485 aa, synthetic construct
MTKKVAIYTRVSTTNQAEEGFSIDEQIDRLTKYAEAMGWQVSDTYTDAGISGAKLERPAMQRLINDIENKAFDTVLVHKLDRLSRSVRDTLYLVKDVFTKNKIDFISLNESIDTSSAMGSLFLTILSAINEFERENIKERMTMGKLGRAKSGKSMMWTRTAFGYYHNRKTGILEIVPLQATIVEQIFTDYLSGISLTKLRDKLNESGHIGKDIPWSYRTLRQTLDNPVYCGYIKFKGSLFEGMHKPIIPYETYLKVQKELGERQQQTYERNNNPRPFQAKYMLSGMARCGYCGAPLRIVLGHKRKDGSRTMKYHCANRFPRKTKGVTVYIDNKKCDSGAYDLSNLENTVIDNLIAFQENSDSLLKIINGNNQPILDTSGLKKQISQIDKEIRKNSDLYLNDFITMDELKDRTDSLQAEKKLLKAKISENKFNDSTGVFELVKTQLGSIPINELSYDNKKKIVNNLVSKVDVTADNVDIIFKFQLA

SEQ ID NO: 664 - protein, 469 aa, synthetic construct
MSYTTPVRAAVYLRISEDRSGEQLGVARQREDCLKLCGQRKWVPVEYLDNDVSASTGKRRPAYEQMLADITAGRIAAVVAWDLDRLHRRPIELEAFMSLADEKRLALATVAGDVDLATPQGRLVARLKGCVAAHETEHKKARQRRAARQKAERGYPNWSKAFGYLPGPNGPEPDPRTAPLVKQAYADILAGASLGDVCRRWNNAGAFTITGRPWTTTTLSKFLRKPRNAGLRAYKGARYGPVDRDAIVGKAQWSPLVDEATFWAAQAVLDAPGRAPGRKSVRRHLLTGLAGCGKCGSHLAGSYRTDGQVVYVCKACHGVAILAGNIEPILRHIVAERLAMPDAVDLLRREIHDAAEAEAIRLELETLYGELDRLAVERAEGLLTARQVKISTDIVSAKITKLQACQLDQERLRVFDGIPLGTPQVAGMIAELSPNRFRAVLGVLAEVVVQPVGKSGRIFNPERVQVNWR

SEQ ID NO: 665 - protein, 485 aa, synthetic construct
MTKKVAIYTRVSTTNQAEEGFSIDEQIDRLTKYAEAMGWQVSDTYTDAGLSGAKLERPAMQRLINDIENKAFDTVLVYKLDRLSRSVRDTLYLVKDVFTKNKIDFISLNESIDTSSAMGSLFLTILSAINEFERENIKERMTMGKLGRAKSGKSMMWTKTAFGYYHNRKTGILEIVPLQATIVEQIFTDYLSGISLTKLRDKLNESGHIGKDIPWSYRTLRQTLDNPVYCGYIKFKDSLFEGMHKPIIPYETYLKVQKELEVRQQQTYERNNNPRPFQAKYMLSGVARCGYCGAPLRILLGHKRKDGSRTMKYHCANRFPRKTKGVTVYNDNKKCDSGTYDLSNLEDTVIDNLIGFQEDNDSLLKIINGNNQPTLDTSSFKKQISQIDKKIQKNSDLYLNDFITMDELKNRTDSLQAERKLLKAKISENKFNDSTDVFELVKTQLGSIPINELSYDNKKKIVNNLVSKVDVTADSVDIIFKFQLA

SEQ ID NO: 666 - protein, 469 aa, synthetic construct
MSYTTPVRAAVYLRISEDRSGEQLGVARQREDCLKLCGQRKWVPVEYLDNDVSASTGKRRPAYEQMLADITAGKIGAVVAWDLDRLHRRPVELEAFMSLADEKRLALATVAGDVDLATPQGRLVARLKGCVAAHETEHKKARQRRAARQKAERGLPNWSKAFGYLPGPNGPEPDPRTAPLVEQAYADILAGASLGDVCRQWNDAGAFTITGRPWTTTTLSKFLRKPRNAGLRAYKGARYGPVDRDAIVGKAQWSPLVDEATFWAAQAVLDAPGRAPGRKSVRRHLLTGLAGCGKCGNHLAGSYRTDGRVVYVCKACHGVSILADIIEPILYRIVAERLAMPDAVDLLRREIRDAAEAETIRLELEILYGELDRLAVERAEGLLTARQVKISTDIVNAKITKLQTRQLDRERLRVFDGIPLGTPQVAGTIAELSPDRFRAVLDVLAEVVVQPVGKGGRISNPERVQVNWR

SEQ ID NO: 667 - protein, 486 aa, synthetic construct
MTKKVAIYTRVSTANQAEEGFSIDEQIDRLTKYAEAMGWQVSDTYTDAGSSGAKLERPAMQRLINDIENKAFDTVLVYKLDRLSRSVRDTLYLVKDVFTKNKIDFISLNESIDTSSAMGSLFLTILSAINEFERENIKERMTMGKLGRAKSGKSMMWTKTAFGYYHNRKTGILEIVPLQATIVEQIFTDYLSGTSLTKLRDKLNESGHIGKDIPWSYRTLRQTLDNPVYCGYIKFKDSLFEGMHKPIIPYETYLKVQKELEKRQRQTYERNNNPRPFQAKYMLSGMARCGYCGAPLRIVLGHERKDGSRAMKYHCANRFPRKTRGVTVYNDNKKCDSGTYDLRNLENTVIDNLLGLQENDDSLLKIINGNNQPILDTSSFEEQISQIDKKIQKNSDLYLNDFISMDELKDRTDSLQAEKKLLKAKISENKFNDSTDVFELVKTQLGSIPINELSYDNKKKIVNNLVSKVDVTADNVDIIFKFQLAK

SEQ ID NO: 668 - protein, 469 aa, synthetic construct
MSYTTPVRAAVYLRISEDRSGEQLGVARQRDDCLKLCDQRKWVPVEYLDNDVSASTGKRRPAYEQMLADITAGKIAAVVAWDLDRLHRRPIELEAFMSLADEKRLALATVAGDIDLATPQGRLVARLKGSVAAHETEHKKARQRRAARQKAERGHPNWSKAFGYLPGPNGPEPDPRTAPLVKQAYADILAGASLGDVCRQWNGAGAFTITGRPWTTTTLSKFLRKPRNAGLRAYKGARYGPVDRDAIVGKARWSPLVDEATFWAAQAVLDAPGRAPGRKSVRRHLLTGLAGCGKCGNHLAGSYRTDGRVVYVCKACHGIAILADNIEPILYHIVAERLAMPDAVDLLRCEIHDAAEAETIRLELETLYGELDRLAVERAEGLLTARQVKISTDIVNAKVTELQARQLDQERLRVLDGIPLGTPQVAGTIAELSPDRFRAVLDVLAEVVVQPVGKSGRIFNPERVQVNWR

SEQ ID NO: 669 - protein, 485 aa, synthetic construct
MTKKVAIYTRVSTTNQAEEGFSIDEQTDRLTKYAEAMGWQVSDTYTDAGFSGAKLERPAMQRLINDIENKAFDTVLVYKLDRLSRSVRDTLYLVKDVFTKNKIDFISLNECIDTSSAMGSLFLTILSAINEFERENIKERMTMGKLGRAKSGKSMMWTKTAFGYYHNRKTGILEIAPLQATIVEQIFTDYLSGISLTKLRDKLNESGHIGKDIPWSYRTLRQTLDNPVYCGYIKFKDSLFEGMHKPIIPYETYLKVQKELEERQQQTYERNNNPRPFQAKYMLSGMARCGYCGAPLRIVLGHKRKDGSRTMKYHCANRFPRKTKGVTVYNDNKKCDSGIYDLSNLENTVIDSLIGFQENNDSLLKIINGNSQPILDTSSFKKRISQIDKKIQKNSDLYLNDFITMDELKDRTDSLQAEKKLLEAKISENKFNDSTDVFELVKTQLGSIPINELSYDNKKRIVNSLVSKVDVTADNVDIIFKFQLA

SEQ ID NO: 670 - protein, 452 aa, synthetic construct
MKAAIYIRVSTQEQVGNYSIQAQTEKLTALCRSKDWDVYDIFIDGGYSGSNMNRPALNEMLSKLHEIDAVVVYRLDRLSRSQRDTTTLIEEYFLKNNVEFVSLSETLDTSSPFGRAMIGILSVFAQLERETIRDRMVMGKIKRIEAGLPLTTAKGRTFGYDVIDTKLYVNEEEAKQLQLIYDIFEEEQSITSLQKRLKKLGFKVRTYNRYNNWLTNDLYCGYVSYKDKVHVKGIHEPIISEEQFYRVQEIFTRMGKNPNMNRESASLLNNLVVCSKCGLGFVHRSKDTMSRGKKYHYRYYSCKTYKHTHELEKCGNKTWRADKLEELIINRVNNYSFASRSADKEDELDSLNEKLKIEHARRKRLFDLYINGSYEVSELDSMMNDIDAQINYYESQIEASEELKKNKKIQESLADLATVDFDSLEFREKQLYLRSLINKIYIDGEQVTIEWL

SEQ ID NO: 671 - protein, 485 aa, synthetic construct
MTKKVAIYTRVSTTNQAEEGFSIDEQVDRLTKYAEAMGWQVSDTYTDAGFSGAKLERPAMQRLISDIENKAFDTVLVYKLDRLSRSVRDTLYLVKDVFTKNKIDFISLNESIDTSSAMGSLFLTILSAINEFERENIKERMTMGKLGRAKSGKSMMWTKTAFGYYHNRKTGILEIVPLQATIVEQIFTDYLSGISLTKLRDKLNESGHIGKDIPWSYRTLRQTLDNPVYCGYIKFKDSLFEGMHKPIIPYETYLKVQKELEERQQQTYERNNNPRPFQAKYMLSGMARCGYCGAPLRIVLGHKRKDGSRTMKYHCTNRFPRKTKGVTVYNDNKKCDSGTYDLSNLENTVIDNLIGFQENNDSLLKIINGNNQPILDTGSLKEQISQIDKKIRKNSDLYLNDFITMDELKDRTNSLQAEKELLKAKISENKFNDSTDVFELVKTQLGSIPINELSYDNKKKIVNNLVSKVDVTADNVDIIFKFQLA

SEQ ID NO: 672 - protein, 485 aa, synthetic construct
MTRKVAIYTRVSTTNQAEEGFSIDEQIDRLTKYAEAMGWQVSDAYTDAGFSGAKLERPAMQRLINDIENKAFDTVLVYKLDRLSRSVRDTLYLVKDVFTKNKIDFISLNESIDTSSAMGSLFLTILSAINEFERENIKERMTMGKLGRAKSGKSMMWTKTAFGYHHNRKTGILEIVPLQATIVEQIFTDYLSGISLTKLRDKLNESGHIGKDIPWSYRTLRQTLDNPVYCGYIRFKDSLFEGMHKPIIPYETYLKVQKELEERQQQTYERNNNPRPFQAKYMLSGMARCGYCGAPLRIVLGHKRKDGSRTMKYHCANRFPRKTKGVTVYNDNRKCDSGTYGLSDLENTVIDHLIGFQENNDSLQKIINGNNQPILDTSSFKKQISQIDKKIQKNSDLYLNDFITMDELKDRTDSLQAEKKLLKAKISENKFNDSTDVFELVKTQLGSIPINELSYDNKKKIVNNLVSKVDVTADNVDIIFKFQLA

SEQ ID NO: 673 - protein, 485 aa, synthetic construct
MTRKVAIYTRVSTTNQAEGGFSIDEQIHRLTKYAEAMGWQVSDTYTDAGFSGAKLERPAMQRLINDIENKAFDTVLVYKLDRLSRSVRDTLYLVKDVFTKNKIDFISLNESIDTSSAMGSLFLTILSAINEFERENIKERMTMGKLGRAKSGKSMMWTKTAFGYYHNRETGILEIVPLQATIVEQIFTDYLSGISLTKLRDKLNGSGHIGKDIPWSHRTLRQTLDNPVYCGYIKFKDRLFEGMHKPIIPYETYLKVQKELEERQQQTYERNNNPRPFQAKYMLSGMARCGYCGAPLKIVLGHKRKDGSRTMKYHCANRFPRKTKGVTVYNDNKKCDSGTYDLSSLENTVIDNLIGFQDDNDSLLKVINGNNQPILDTSCFKKQIGQIDKKIQKNSDLYLNGFITMDELKDRTDSLQAEKKLLKAKISENKFNDRTDVFELVKTQLGSIPINELSYDNKKKIVNNLVSKVDVTADNVDIIFKFQLA

SEQ ID NO: 674 - protein, 469 aa, synthetic construct
MSYTTPVRAAVYLRISEDRSGEQLGVARQREDCLKLCDQRRWVPVEYLDNDVSASTGKRRPAYEQMLADITAGKIAAVVAWDLDRLHRRPIELEAFMSLADEKRLALATVAGDVDLATPQGRLVARLKGSVAAHETEHKRARQRRAARQKAERGHPNWSKAFGYLPGSNGPEPDPRTAPLVKQAYADVLAGASLGDVCRRWNDAGALTITGRPWTTTTLSKFLRKPRNAGLRAYKGARYGPVDRDAIVGKAQWSPLVDEATFWAAQAVLDAPGRAPGRKSVRRHLLTGLAGCGKCGNHLAGSYRTDGRVVYVCKACHGVAILADNIEPILYHIVAERLATSDAVDLLRREVHDAAEAETIRLELETLYGELDRLAVERAEGLLTARQVKISTDIVNAKITKLQARQQDQERLRVLGGIPLGTPQVAGMIAGLSPDRFRAVLGVLAEVVVQPVGKGGRIFNPERVQVNWR

SEQ ID NO: 675 - protein, 469 aa, synthetic construct
MSNTTPVRAAVYLRISEDRSGEQLGVARQREDCLKLCGQRNWVPVEYLDNDVSASTGKRRPAYEQMLADITAGKIAAVVAWDLDRLHRRPVELEAFMSLADEKRLALATVAGDVDLATPQGRLVARLKGCVAAHETEHKKARQRRAARQKAERGLPNWSKAFGYLPGPNGPEPDPRTAPLVKQAYADILAGASLGDVCRQWNDAGAFTITGRLWTTTTLSKFLRKPRNAGLRAYKGTRYGPVDRDAIVGKAQWSPLVDEATFWAAQAVLDAPGRAPGRKSVRRHLLTGLAGCGKCGNHLAGSYRTDGQVVYVCKTCHGVSILAVNIEPILYHIVAERLAMPDAVDLLCREIHDAAGAETIRLELKTLYGELDRLAVERAEGLLTARQVKISTDIVSAKITKLRARQLDQERLRVFDGIPLGTPQVAGMIAELSPDRFRAVLDVLAEVVVQPVGKRGRIFNPERVQVNWR

SEQ ID NO: 676 - protein, 452 aa, synthetic construct
MKAAIYIRVSTREQVENYSIQAQTEKLTALCRSKDWDVYDIFIDGGYSGSNMSRPALNEMLSKLHEIDAVVVYRLDRLSRSQRDTITLIEEYFLKNNVEFVSLSETLDTSSPFGRAMIGILSVFAQLERETIRDRMVMGKIKRIEAGLPLTTAKGRTFGYDVIDAKLYINEEEAKQLQLIYDIFEKEQSITFLQKRLKKLGFKVRTYNRYRNWLTNDLYCGYVSYKDKVHVKGIHKPIISEEQFYRVQEIFTRMGKSPNMNRDSASLLNNLVVCSKCGLGFVHRRKDIMSRGKKYHYRYYSCKTYKHIHELEKCGNKIWRADKLEELIINRVNNYSLAGRNVDKEDELDSLNEKLKIEHAKKKRLFDLYINGSYEVSELDSMMNDIDAQINYYESQIEANEELKKNKKIQENLAHLATVDFDSLEFREKRLYLKSLINKIYIDGEQVTIEWL

SEQ ID NO: 677 - protein, 452 aa, synthetic construct
MKAAIYIRVSTREQVENYSIQAQTEKLTALCRSKDWDVYDIFIDGGYSGSNMNRPALNEMLSKLHEIDAVVVYRLDRLSRSQRDTITLIEEYFLKNNVEFVSLSETLDTSSPFGRAMIGILSVFAQLERETIRDRMVMGKIKRIEAGLPLTTAKGRTFGYDVIDTKLYINEEEAKQLQLIYDIFEEEQSITFLQKRLKKLGFKVHTYNRYNNWLTNDLYCGYVSYKDKVHVKGIHEPIISEEQFYRVQEIFTRMGKNPNMNRDSASLLNNLVVCGKCGLGFVHRRKDAASRDKKYHYRYYSCKTYKHIHELEKCGNKIWRADKLEELIINRVNNYSLAGRNVDKGDELDSLNEKLKIEHAKKKRLFELYINGSYEVSELDSMMNDIDAQINYYESQVGANKELRKNRKIQENLAHLATVDFDSLEFREKQLYLKSLINKIYIDGEQVTIEWL

SEQ ID NO: 678 - protein, 485 aa, synthetic construct
MTKKVAIYTRVSTTNQAEEGFSIDEQIDRLTKYAEAMGWQVSDTYTDAGFSGAKLERPAIQRLINDIENKAFDTVLVYKLDRLSRSVRDTLYLVKDVLTKNKIDFISLNESIDTSSAMGSLFLTILSAINEFERENIKERMTMGKLGRAKSGKSMMWTKTAFGYYHNRKTGILEIVPLQAAIVEQIFTDYLSGISLTKLRDKLNESGHIGKDIPWSYRTLRQTLDNPVYCGYIKFKDSLFEGMHKPIIPYETYLKVQKELEERQQQTYERNNNPRPFQAKYMLSGMARCGYCGAPLRIVLGHKRKDGSRTTKYHCANRFPRKTKGVTVYNDNKKCDSGTYDLSNLENTVIDNLIGFQENNDCLLKIINGNNQPILDTSSIKKQISQIDKKIQKISDLYLNDFITMDELKDRIDSLQAEKKLLKAKISENKFNDSTDVFELVKTQLGSIPINELSYDDKKKIVNNLVSKVDVTADNVDIIFKFQLA

SEQ ID NO: 679 - protein, 469 aa, synthetic construct
MSYTTPVRAAVYLRISEDRSGEQLGVARQREDCLKLCGQRKWVPVEYLDNDVSASTGKRRPAYERMLADITAGKIAAVVAWDLDRLHRRPVELEAFMSLADEKRLALATVAGDVDLATPQGRLVARLKGSVAAHETEHKKARQRRAARQKAERGHPNWSKAFGYLPGPNGPEPDPRTAPLVKQAYADILAGASLGDVCRQWNDAGAFTITGRPWTTTALSKFLRKPRNAGLRAYRGARYGPVDRDAIVGKAQWSPLVDEATFWAAQAVLDAPGRAPGRKSVRRHLLTGLAGCGKCGNHLAGSYRTDGRVVYVCKACHGVSILAANIEPILYRIVAERLAMPDAADLLRREIHDAAEAETIRLELEALYGELDRLAVERAEGLLTARQVKISTDIVNAKITKLQARQQDQERLRVLDGIPLGTPQVAGMIAKLSPDRFRAVLDVLAEVVVQPVGKSGRISNPERVQVNWR

SEQ ID NO: 680 - protein, 469 aa, synthetic construct
MSYTTPVRAAVYLRISEDRSGEQLGVARQREDCLKLCAQRKWVPVEYLDNDVSASTGKRRPAYEQMLADITAGKIAAVVAWDLDRLHRRPIELEAFMCLADEKRLALATVAGDVDLATPQGRLVARLKGSVAAHETEHKKARQRRAARQKAERGLPNWSKAFGYLPGPNGPEPDPRTAPLVKQAYADILAGASLGDVCRQWNAAGAFTITGRPWTTTALSKFLRKPRNAGLRAYKGARYGPVDRDAIVGKAQWSPLVDEATFWAAQAVLDAPGRAPGRKSVRRHLLTGLASCGKCGNHLAGSYRTDGRVVYVCKACHGVAILADNIEPILYHIVAERLAMPDAVDLLRREIHDAAETGTIRLELETLYGELDRLAVERAEGLLTARQVKISTDIVNAKIAKLQACQLDQERLRVLDGIPLGTPQVAGTIAELSPDRFRAVLDVLAKVVVQPVGKSGRNFNPERVQVNWR

SEQ ID NO: 681 - protein, 470 aa, synthetic construct
MSYTTPVRAAVYLRISEDRSGEQLGVARQREDCLKLCGQRKWVPVEYLDNDVSASTGKRRPAYEQMLADITAGKIAAVVAWDLDRLHRRPIELEAFMSLADEKRLALATVAGDVDLATPQGRLVARLKGCVAAHETEHKKARQRRAARQKAERGLPNWSKAFGYLPGPNGPEPDPRTAPLVKQAYADILAGASLGDVCRQWNDAGAFTITGRPWTTTTLSKFLRKPRNAGLRAYKGARYGPVDRDAIVGKAQWSPLVDEATFWAAQAVLDAPGRAPGRKSVRRHLLTGLAGCGKCGNHLAGSYRTDGQIVYVCKACHGVAILADNIEPILYHIVAERLAMPDAVDLLRREIHDAAEAETIRLELETLYGELDRLAVERAEGLLTARQVKISTDIVNAKITKLQARQLDQERLRVFDGIPLGTPQVAGVIAGLSPDRFRAVLDVLAEVVVQPAGKGGRIFNPERVQVNWRQ

SEQ ID NO: 682 - protein, 469 aa, synthetic construct
MSYTTPVRAAVYLRISEDRSGEQLGVARQREDCLKLCGQRKWVPVEYLDNDVSASTGKRRPAYEQMLADITAGKIAAVVAWDLDRLHRRPVELEAFMSLADEKRLALATVAGDVDLATPQGRLVARLKGCVAAHETEHKKARQRRAARQKAERGLPNWSKAFGYLPGPNGPEPDPRTAPLVKQAYADILAGASLGDVCRRWNDAGAFTITGRPWTTTTLSKFLRKPRNAGLRAYKGARYGPVDRDAIVGKAQWSPLVDEATFWAAQAVLDAPGRAPGRKSVRRHLLTGLAGCGKCGNHLAGSHRTDGRVVYVCKACHGVAILADNIEPILYHIVAECLAMPDAVDLLRREIHDAAEAETIRQELETLYGELDRLAAERAEGLLTARQVKISTDIVNAKITKLQARQLDQERLRAFDGIPLGTPQVAGVIAELSPDRFRAVLDVLAEVVVQPVGKSGRISIRERVQVNWR

SEQ ID NO: 683 - protein, 485 aa, synthetic construct
MTKKVAIYTRVSTTNQAEEGFSIDEQIDRLTKYAEAMGWQVSDTYTDAGFSGAKLVRPAMQRLINDIENKAFDTVLVYKLDRLSRSVRDTLYLVKDVFTKNKIDFISLSESIDTSSAMGSLFLTILSAINEFERENIKERMTMGKLGRAKSGKSMMWTKTAFGYYHNRKTGILEIVPLQATIVEQIFTDYLSGISLTKLRDKLNESGHIGKDIPWSYRTLRQTLDNPVYCGYIKFKDSLFEGTHKPIIPYETYLKVQKELEERQQQTYERNNNPRPFQAKYMLSGMARCGYCGAPLRIVLGHKRKDGSRTMKYHCANRFPRKTKGITVYNDNKKCDSGAYDLSNLENTVINNLIGFQENDDSLLKIINGNNQPILDTSSFKKQISQIDKKIQKHSDLYLNDFITMDKLKDRTDRLQAEKKLLKAKISENKLNDSTEVFELVKTQLGSIPINELSYDNKKKIVNNLVSKVDVTADNVDIIFKFQLA

SEQ ID NO: 684 - protein, 485 aa, synthetic construct
MTKKVAIYTRVSTTNQAEEGFSIDEQIDRLTKYAEAMGWQVSDTYTDAGFSGAKLERPAMQRLISDIENKAFDTVLVYKLDRLSRSVRDTLYLVKDVFTQNKIDFISLSESIDTSSAMGSLFLTILSAINEFERENIKERMAMGKLGRAKSGKSMMWTKTAFGYYHNRKTGILEIVPLQATIVEQIFTDYLSGISLTKLRDKLNEGGHIGKDIPWSYRTLRQTLDNPVYCGYIKFKGSLFEGMHKPIIPYETYLKVQKELEERQQQTYERNNNPRPFQAKYMLSGMARCGYCGAPLKVVLGHKRKDGSRTMKYHCANRFPRKTKGITVYNDNKKCDSGAYDLSDLENSVIDDLIGFQENNDSLLKLINGNNQPILDTSSFKKQISQIDKKIQKNSELYLNDFITMDELRDRTDSLQAERKLLKAKISENKFNDSTDVFELVKTQLGSIPINELSYDNKKKIVNSLVSKVDVTADNVDIIFKFQLA

SEQ ID NO: 685 - protein, 469 aa, synthetic construct
MSYTTPVRAAVYLRISEDRSGEQLGVARQREDCLKLCVQRKWVPVEYLDNDVSASTGKRRPAYEQMLADITAGKIAAVVAWDLDRLHRRPVELEAFMSLADEKRLALATVAGDVDLATPQGRLVARLKASVAAHETEHKKARQRRAARQKAERGLPNWSKAFGYLPGPNGPEPDPRTAPLVKQAYADILAGASLGDVCRQWNDAGAFTITGRPWTTATLSKFLRKPRNAGLRAYKGARYGPVDRDAIVGKAHWSPLVDEATFWAAQAVLDAPGRAPGRKSVRRHLLTGLAGCGKCGNRLAGSYRTDGRVVYVCKACHGVAILADNIEPILYHIVAERLAMPDAVDLLRCGIHDAAEAGTIRQELETLYGELDRLAVERAEGLLTARQVKVGTDIVNAKITKLQARQLDQERLRVFDGIPLGTPQVAGMIAELSPDRFRAVLDVLAEVVVQPVGKGGRIFNPERVQVNWR

SEQ ID NO: 686 - protein, 469 aa, synthetic construct
MSYTTPVRAAVYLRISEDRSGEQLGVARQREDCLKLCDQRKWVPVEYLDNDVSASTGKRRPAYEQMLADITAGKIAAVVAWDLDRLHRRPVELEAFMSLADEKRLALATVAGDVDLATPQGRLVARLKGCVAAHETEHKKARQRRAARQKAERGLPNWSKAFGYLPGPNGPEPDPRTAPLVKQAYADILAGASLGDVCRQWNVAGTFTITGRPWTTTTLSKFLRKPRNAGLRTYKGARYGPVDRDAIVGKAQWSPLVDEATFWAAQAVLDAPGRAPGRKSVRRHLLTGLAGCGKCGNHLAGSYRTDGRVVYVCKACHGVAILADNIEPILYHIVAERLAMPDAVDLLHREIHDAAEAETIRLELETLYGELDRLAVERAEGLLTARQVKISTDIVNAKITRLQARQLDQERLRVFDGIPLGTPQVAGMIAELSPDRFRAVLDALAKVVVQPVGKRGRIFNQERVQVNWR

SEQ ID NO: 687 - protein, 485 aa, synthetic construct
MTKKVAIYTRVSTTNQAEGGFSIDEQIDRLTKYVEAMGWQVSDTYTDAGFSGAKLERPAMQRLINDIENKAFDTVLVYKLDRLSRSVRDTLRLVKDVFTKNKIDFISLNESIDTSSAMGSLFLTILSAINEFERENIKERMTMGKLGRAKSGKSMMWTKTAFGYYHNRKTGILEIVPLQATIVEQIFADYLSGISLTKLRDKLNESGHIGKDIPWSYRTLRQTLDNPVYCGYIKFKDSLFEGMHKPIIPYETYLKVQKELEERQQQTYERNNNPRPFQAKYMLSGMARCGYCGAPLKIVLGRKRKDGSRTMKYHCANRFPRKTKGVTVYNDNKKCESGTYDLRSLENTVIDNLIGFQENNDSLLKIINGNNQPILDTSSLKKQISQIDKKIQKNSDLYLNDFITMDELKDRTDSLQAKKKLLKAKISENKFNDSTDVFELVKTQLGSIPINELSYDNKKKIVNNLVSKVDVTADNVDIIFRFQLA

SEQ ID NO: 688 - protein, 452 aa, synthetic construct
MKAAIYIRVSTQEQVGNYSIQAQTEKLTALCRSKDWDVYDIFIDGGYSGSNMNRPALNEMLSKLHEIDAVVVYRLDRLSRSQRDTTTLIEEYFLKNNVEFVSLSETLDTSSPFGRAMIGILSVFAQLERETIRDRMVMGKIKRIEAGLPLTTAKGRTFGYDVIDTRLYINEEEAKQLQLIYDIFEEERSITLLQKRLKKLGFKVRTYNRYNNWLTNDLYCGYVSYKDKVHVKGIHEPIISEEQFYRVQEIFTRMGKNPNMNRDSASLLNNLVVCSKCGLGFVHRSKDTMSRGKKYHYRYYSCKTYKHTHELEKCGNKIWRADKLEELIINRVSNYSFTSRNMDKGDELNSLNEKLKIEHAKKKRLFDLYINGSYEVSELDSMMNDIDAQIDYYEGQIEANEELKKNKKIRENLAGLATVDFDSLEFREKQLYLKSLINKIYIDGEQVTIEWL

SEQ ID NO: 689 - protein, 485 aa, synthetic construct
MTKKVAIYTRVSTTNQAEEGFSIDEQIDRLTKYAEAMGWQVSDTYTDAGSSGAKLERPAMQRLINDIENKVFDTVLVYKLDRLSRSVRDTLYLVKDVFTKNKIDFISLNESIDTSSAMGSLFLTILSAINEFERENIKERMTMGKLGRAKSGKSMMWTRTAFGYYHNRKTGILEIVPLQATIVEQIFTDYLSGISLTKLRDKLNESGHIGKDIPWSYRTLRQTLDNPVYCGYIKFKDSLFKGMHKPIIPYETYLKVQKELEERQQQTYERNNNPRPFQAKYMLSGMARCGYCGAPLKIVLGHKRKDGSRTMKYHCANRFPRKTKGVTVYNDNKKCDSGTYDLSNLENTVIDNLIGFQENNDSLLKIINGNNQPIQDTSSLRKQISQIDIKIQKNSDLYLNDFITMDELKDRTDSLQAEKRLLKAKISENKFNDSTDVFELVKTQLGSIPINELSYDDKKKIVNNLVSKVDVTADSVDIIFKFQLA

SEQ ID NO: 690 - protein, 469 aa, synthetic construct
MSYTTPVRAAVYLRISEDRSGEQLGVARQREDCLKLCGQRKWVPVEYLDNDVSASTGKRRPAYEQMLADITAGKIAAVVAWDLDRLHRRPVELEAFMSLADEKRLALATVAGDVDLATPQGRLVARLKGSVAAHETEHKKARQRRAARQKAERGHPNWSKAFGYLPGPSGPEPDPRTAPLVKQAYADILAGASLGDVCRRWNGAGAFTITGRPWTTTTLSKFLRKPRNAGLRAYKGARHGPVDRDAIVGKAQWSPLVDEATFWAAQAVLDAPGRAPGRKSVRRHLLTGLAGCGKCGNHLAGSYRTDGRVVYVCKACHGVAILADNIVPILYHIVAERLARPDAVDLLRSEFHDAAEAETIRLELETLYGELDHLAVERAEGLLTARQVKISTDIVNAKITKLHARQLDQERLRVLDGIPLGTPQVAGMIAELSPDRFRAVLDVLAEVVVQPVGKCGRIFNPERVQVNWR

SEQ ID NO: 691 - protein, 469 aa, synthetic construct
MCYTTPVRAAVYLRISEDRSGEQLGVARQREDCLELCDQRKWVPVEYLDNDVSASTGKRRPAYEQMLADITAGKIAAVVAWDLDRLHRRPIELEAFMSLADEKRLALATVAGDVDLATPQGRLVARLKGSVAAHETEHKKARQRRAARQKAERGYPNWSKAFGYLPGPNGPEPDPRTAPLVKQAYADILAGASLGDVCRRWNDAGAFTITGRPWTTTALSKFLRKPRNAGLRAYKGARFGPVDRDAIVGKAQWSPLVDEATFWAAQAVLDAPGRAPGRKSVRRHLLTGLAGCGKCGNHLAGSYRTDGRVVYVCKACHGVAILADNIEPILYHIVAERLAMPDAVDLLRREIHDVAEAETIRLELEALYGDLDRLAVERAEGLLTARQVKICTDIVNAKITKLQARQLDQERLRVFDGIPLGTPQVAGMIAELSPDRFRAVLDVLAEVVVQPVGKGGRIFNPERVRVNWR

SEQ ID NO: 692 - protein, 485 aa, synthetic construct
MTKKVAIYTRVSTTNQAEEGFSIDEQVDRLTKYAEAMGWQVSDTYTDAGLSGAKLERPAMQRLINDIGNKAFDAVLVYKLDRLSRSVRDTLYLVKDVFTKNKIDFISLNESIDTSSAMGSLFLTILSAINEFERENIKERMTMGKLGRAKSGKSMMWTKTAFGYYHNRKTGILEIVPLQATIVEQIFTDYLSGISLTKLRDKLNESGHIGKDIPWSYRTLRQTLDNPVYCGYIKFKDSLFEGMHKPIIPYETYLKVQKELVERQRQTYERNNNPRPFQAKYMLSGMARCGYCGAPLRIVLGHKRKDGSRTMKYHCANRFPRKTKGVTVYNDNKKCDSGTYDLSDLENTVIDNLIGFQENNDSLLKVINGNNQPILDTSSFKKQIRQIDKKIQKISDLYLNDFITMDELRDRTDSLQAEKKLLKAKISENKSSDSTDVFELVKTRLGSIPINELSYDNKKKIVNNLVGKVDVTADNVDIIFKFQLA

SEQ ID NO: 693 - protein, 485 aa, synthetic construct
MTRIVAIYTRVSTTNQAEEGFSIDEQIDRLTKYAEAMGWQVSDTYTDAGFSGAKLERPAMQRLINDIENKAFDTVLVYKLDRLSRSVRDTLHLVKDVFTKNKIDFISLNESIDTSSAMGSLFLTILSAINEFERENIKERMTMGKLGRAKSGKSMMWTKTAFGYYHNRKTGILEIVPLQATIVEQIFTDYLSGISLTKLRDKLNESGHIGKDIPWSYRTLRQTLDNPVYCGYIKFKDSLFEGMHKPIIPYETYLKVQKELEERQQQTYERNNNPRPFQAKYMLSGMARCGYCGAPLRIVLGRKRKDGSRTMKYHCANRFPRKTKGVTVYNDNKRCDSGAYDLSNLENTVIDNLIGFQENSDSLLKIINGNNQPILDTSSFKKQISQIDKKIQKNSDLYLNDFITMDELRARTDSLQAEKELLKAKISEDKFNDSTDVFELVKTQLGSIPINELSYDSKKKIVNNLVSKVDVTADNVDIIFKFQLV

SEQ ID NO: 694 - protein, 452 aa, synthetic construct
MKAAIYIRVSTREQVENYSIQAQTEKLTALCRSKDWDVYDVFIDGGYSGSNMNRPALNEMLSKLHEIDAVVVYRLDRLSRSQRDTITLIEEYFLKNNVEFVSLSETLDTSSPFGRAMIGILSVFAQLERETIRDRMVMGKIKRIEAGLPLTTAKGRTFGYDVIDTKLYINEEEAKQLQLIYDIFEEERSITFLQKRLKKLGFKVRTYNRYNNWLTNDLYCGYVSYKDKVHVKGIHEPIISEEQFYRVQEIFTRMGKSPNMNRDSASLLNNLVVCSKCGLGFVHRRKDAMSRDKKYHYRYYSCKTYKHIHELEKCGNKIWRADELEELVINRVNGYSVASRNVDKEDELDSLNEKLKIEHARRKRLFDLYINGSYEVSELDSMMSDIDAQINYYESQIEANEELKKNKKIQENLAYLATVDFDSLEFREKQLYLKSLINKIYIDGEQVTIEWL

SEQ ID NO: 695 - protein, 485 aa, synthetic construct
MAKKVAIYTRVSTTNQAEEGFSIDEQVDRLTKYAEAMGWQVSDTYTDAGFSGAKLERPAMQRLINDIENKAFDTVLVYKLDRLSRSVRDTLYLVKDVFTKNKIDFISLNESIDTSSAMGSLFLTILSAINEFERENIKERMTMGKLGRAKSGKSMMWTKTAFGYYHNRKTGILEIVPLQATIVEQIFTDYLSGISLTKLRDKLNESGHIGKDIPWSYRTLRQTLDNPVYCGYIKFKDSLFEGMHKPIIPYETYQKVQKELEERQQQTYERNNNPRPFQAKYMLSGMARCGYCGAPLRIVLGHKRKDGSRTMKYQCANRFPRKTKGITVYNDNKKCDSGTYDLSNLENTVIDNLIGLQENNDSLLKIINGNNQPILDTSSLKKQISQIDKKIQKNSDLYLNDFITMDELKGRTDGLQAEKKLLKAKISENKFNGSTDVLELVKTQLGSIPINELSYDNKKKIVNNLVSKVDVTANNVDIIFKFQLA

SEQ ID NO: 696 - protein, 452 aa, synthetic construct
MKAAIYIRVSTREQVENYSIQAQTEKLTALCRSKDWDVYDVFIDGGYSGSNMNRPALNEMLSKLHEIDAVVVYRLDRLSRSQRDTITLIEEHFLKNNVEFVSLSETLDTSSPFGRAMIGILSVFAQLERETIRDRMVMGKIKRIEAGLPLTTAKGRTFGYDVIDTRLYVNEEEAKQLRLIYDIFEEEQSITSLQKRLKQLGFKVRTYNRYNNWLTNDLYCGYVSYKDKVHVKGIHEPIISEEQFYRVQEIFTRMGKNPNMNRDSASLLNNLVVCGKCGLGFVHRRKDAMSRSKKYHYRYYSCKTYKHIHELEKCGNKIWRADKLEELIIDRVNNYSLASRNVDKEDELDSLSEKLKIEHAKKKRLFDLYINGSYEVSELDSMMNDIDVQISYYESQIEANEELKKDKKIQENLAYLATVDFDSLEFREKQLYLKSLINKIYIDGEQVTIEWL

SEQ ID NO: 697 - protein, 485 aa, synthetic construct
MTKKVAIYTRVSTTNQAEEGFSIDEQIDRLTKYAEAMGWQVSDTYTDAGLSGAKLERPAMQRLINDIENKAFDTVLVYKLDRLSRSVRDTLYLVKDVFTRNKIDFISLNESIDTSSAMGSLFLTILSAINEFERENIKERMTMGKLGRAKSGKSMMWTKTAFGYYHNRKTGILEIVPLQATIVEQIFTDYLSGISLTKLRDKLNESGHIGKDIPWSYRTLRQTLDNPVYCGYIKFKDSLFEGMHKPIIPYETYLKVQKELEERQQQTYERNNNPRPFQAKYMLSGMARCGYCGAPLRIVLGHKRKDGSRTMKYHCANRFPRKTKGVTTYNDNKRCDSGAYDLSNLENTVIDNLIGLQENNDSLLKIINGNNQPILDTSSFKKQISQIDKKIQKNSDLYLNDFITMDELKDRTDSLQAEKKLLKAKIGENKFNDSADVFELVKTQLGSIPINELSYDNKKKIVNNLVSKVDVTADNVDIIFKFQLA

SEQ ID NO: 698 - protein, 452 aa, synthetic construct
MKAAIYIRVSTREQVENYSIQAQTEKLTALCRSKGWDVYDIFIDGGYSGSNMNRPALNEMLSKLHEIDAVVVYRLDRLSRSQRDTITLIEEYFLKNNVEFVSLSETLDTSSPFGRAMIGILSVFAQLERETIRDRMVMGKIKRIEAGLPLTTAKGRTFGYDVIDTKLYINEEEAKQLQLIYDIFEEEQSITFLQKRLKKLGFKVRTYNRYNNWLTNDLYCGYVSYKDKVHVKGIHEPIISEEQFYRVQEIFTRMGKNPNMNRDSASLLNNLVVCGKCGLSFVHRRKDIMSRGKKYHYRYYSCKTYKHIHELEKCGNKIWRADKLEELIINRVNNYSFASRNEEKEDELDSLNEKLKNEHAKKKRPFDLYINGSYGVSELDSMMNNIDAQISYYESRIEASEELKKNKKIQENLADLATVDFDSLEFREKQLYLKSLINKIYIDGEQVTIEWL

SEQ ID NO: 699 - protein, 452 aa, synthetic construct
MKAAIYIRVSTREQVENYSIQAQTEKLTALCRSKDWDVYDIFVDGGYSGSDMNRPALNEMLSKLHEIDAVVVYRLDRLSRSQRDTITLIEEYFLKNNVEFVSLSETLDTSSPFGRAMIGILSVFAQLERETIRDRMVMGKIKRIEAGLPLTTAKGRTFGYDVIDTKLYINEEEAKQLQLIYDIFEEEQSITFLQKRLKKLGFKVRTYSCYNNWLTNDLYCGYVSYKDKVHVKGIHEPIISEEQFYRVQEIFTRMGKNPNMNRDSASLLNNLVVCSKCGLGFVHRRKDTTSRGKKYHYRYYSCKTYKHIHELDKCGNKIWRADKLEELIINRVNNYSFASRNADKEDELDSLNEKLKIEHAKKKRLFDLYISGSYEVSELDSMMSDIDAQINYYESQIEANEELKKNKKIQESLANLATVDYDSLEFREKQLYLKSLINKIYIDGEQVTIEWL

SEQ ID NO: 700 - protein, 469 aa, synthetic construct
MSYTTPVRAAVYLRISEDRSGEQLGVARQREDCLKLCGQRKWVPVEYLDNDVSASTGKRRPAYEQMLADITAGKIAAVVAWDLDRLHRRPIELEAFMSLADEKRLALATVAGDVDLSTPQGRLVARLKGSVAAHETEHKKARQRRAARQKAERGHPNWSKAFGYLPGPNGPEPDPRTAPLVKQAYADILAGASLGDVCRQWNVAGAFTITGRPWTTTTLSKFLRKPRNAGLRTYKGARYGPVDRDAIVGKAQWSPLVDEATFWAAQAVLDAPGRAPGRKSVRRHLLTGLAGCGKCGNHLAGSYRTDGRVVYVCKACHGVAILADNIEPILYHIVAERLAMPDAVDLLRCEIHDAAEAETTRLELETLYGELDRLAVERAEGLLTARQVKISTDIVNAKITKLQARQLDQERLRVFDGIPLGTPQVAGMIAELSPDRFRAVLDVLAEVVVQPVGKSGRIFNPERVQVNWR

SEQ ID NO: 701 - protein, 469 aa, synthetic construct
MSYTTPVRAAVYLRISEDRSGEQLGVARQREDCLKLCGQRKWVPVEYLDNDVSASTGKRRPAYEQMLADITAGKIAAVVAWDLDRLHRRPIELEAFMSLADEKRLALATVSGDVDLATPQGRLVARLKGCVAAHETEHKKARQRRAARQKAERGHPNWSKAFGYLPGPNGPEPDPRTAPLVKQAYADILAGASLGDVCGQWNDAGAFTITGRPWTTTTLSKFLRKPRNAGLRAYKGARYGPVDRDAIVGRAQWSPLVDEATFWAAQAVLDAPGRAPGRKSVRRHLLTGLAGCGKCGNHLAGSYRTDGRVMYVCKACHGVAILADNIEPFLYRIAAERLAMPDAVDLLRREFHDAAEAETIRLELETLYGELDRLAVERAEGLLTARQVKISTDIVNAKITKLQARQLDQERLRVFDGIPLGTPQVAGMIAGLSPDRFRAVLDVLAEVVVQPVGKSGRIFNPERVQVNWR

SEQ ID NO: 702 - protein, 485 aa, synthetic construct
MTKKVAIYTRVSTTNQAEEGFSIDEQIDRLTKYAEAMGWQVSDTYTDAGFSGAKLGRPAMQRLINDIENKAFDTVLVYKLDRLSRSVRDTLYLVKDVFTKNKIDFISLNESIDTSSAMGSLFLTILSAINEFERENIKERMTMGKLGRAKSGKSMMWTKTAFGYYHNRKTGILEIVPLQATIVEQIFTDYLSGISLTKLRDKLNESGHIGKDIPWSYRTLRQTLDNPVYCGYIKFKGSLFEGMHKPIIPYETYLKVQKELEERQQQTYERNNNPRPFQAKYMLSGMARCGYCGAPLRIVLGHKRKDGSRTMKYHCANRFPRKTKGITVYNDNKKCDSGTYDLSDLENTVIDNLIGLQENNDSLLKIINGNNQPILDTSSFKEQISQIDKKIQKNSDLYLNDFITMDELKDRTDSLQAEKKLLKAKISENKFNDSTDVFELVKTQLGSIPINELSYDNRKKIVNNLVSKVDVTADNVDIIFKFQLA

SEQ ID NO: 703 - protein, 469 aa, synthetic construct
MSYTTPVRAAVYLRISEDRSGEQLGVARQREDCLKLCGQRKWEPVEYLDNDVSASTGKRRPAYEQMLADITAGKIAAVVAWDLDRLHRRPIELEAFMSLADEKRLALATVAGDVDLATPQGRLVARLKGSVAAHETEHKRARQRRAARQKAERGLPNWSKAFGYLPGPNGPEPDPRTAPLVKQAYADILAGASLGDVCRQWNDAGAFTITGRPWTTTTLSKFLRKPRNAGLRAYKGARYGPVDRGAIVGKAQWSPLVDEAAFWAAQAVLDAPGRAPGRKSVRRHLLTGLAGCGKCGNHLAGSYRTDGRVVYVCKACHGVAILADNIVPILYHVVAERLAMPDAVDLLRREIYDAAEAETIRLELETLYGELDRLAVERAEGLLTARQVKISTDIVNAKITKLHARQLDQERLRVLDGIPLGTPRVAGVIAELSPDRFRAVLDVLAEVVVQPVGKSGRVFNPERVQVNWR

SEQ ID NO: 704 - protein, 485 aa, synthetic construct
MTKKVAIYTRVSTTNQAEEGFSIDEQIDRLTKYAEAMGWQVSDTYTDAGSSGAKLERPAMQRLINDIVNKAFDTVLVYKLDRLSRSVRDTLYLVKDVFTKNKIDFISLNESIDTSSAMGSLFLTILSAINEFERENIKERMTMGKLGRAKSGKSMMWTKTAFGYYHNRKTGILEIVPLQATIVEQIFADYLSGVSLTKLRDKLNESGHIGKDIPWSYRTLRQTLDNPVYCGYIKFKDSLFEGMHKPIISYETYLKVQKELEERQQQTYERNNNPRPFQAKYMLSGIARCGYCGAPLKIVLGHKRKDGSRTMKYHCANRFPRKTKGITVCNDNKKCDSGTYDLSNLENTVIDNLIGLQEDNDSLLKIINGNNQPILDTSSLKKQISQIDKKIQKNSDLYLNDFITMDELKARTDSLQAKKKLLEAKISENKFNDSTDVFELVKTQLGSIPINELSYDNKKKIVNNLVSKVDVTADNVDIIFKFQLA

SEQ ID NO: 705 - protein, 469 aa, synthetic construct
MSYTTLVRAAVYLRISEDRSGEQLGVARQREDCLKLCDQRNWVPVEYLDNDVSASSGKRRPAYEQMLADITAGKIAAVVAWDLDRLHRRPIELEAFMSLADEKRLALATVAGDVDLATPQGRLVARLKGSVAAHETEHKKARQRRAARQRAERGHPNWSKAFGYLPGPNGPEPDPRTAPLVKQAYADILAGASLGDVCRQWNDAGAFTITGRPWTTATLSKFLRKPRNAGLRAYKGARYGPVDRDAIVGKAQWSPLVDEATFWAAQAVLDAPGRAPGRKSVRRHLLTGLAGCGKCGHHLAGSYRTDGRVVYVCKACYGVSILADSIEPILYHVVAERLAMPDAVDLLRRETHDAAEAETIRLELETLYGELDRLAVERAEGLLTARQVKISTDIVNAKITKLQACQLDQERLRVFDGIPLGTPQVAGVIAELSPNRFRAVLDVLAEVVVQPVGKSGRIFNPERVQVNWR

SEQ ID NO: 706 - protein, 469 aa, synthetic construct
MCYTTPVRAAVYLRISEDRSGEQLGVARQREDCLKLCDQRKWVPVEYLDNDVSASTGKRRPAYEQMLADITAGRIAAVVAWDLDRLHRRPIELEAFMSLADEKRLALATVAGDVDLATPQGRLVARLKGSVAAHETEHKKARQRRAARQKAERGYPNWSKAFGYLPGPNGPEPDPRTAPLVKQAYADILAGASLGDVCRQWNDAGAFTITGRPWTTTTLSKFLRKPRNAGLRAYKGARYGPVDRDAIVGKAQWSPLVDEATFWAAQAVLDAPGRAPGRKSVRRHLLTGLAGCGKCGNHLAGSYRTDGRVVYVCKACHGVAILAENIEPLLYHIVAERLAMPDAADLLRREIQDVAEAETIRLELETLYGELDRLAVERAEGLLTARQVKISTDIVNAKITKLQARQQDQERLRVLDGIPLGTPQVAGVIAELSPDRFRAVLDVLAEVVVQPVGKGGRIFNPERVQVNWR

SEQ ID NO: 707 - protein, 469 aa, synthetic construct
MSYTTPVRAAVYLRISEDRSGEQLGVARQREDCLELCGQRKWVPVEYLDNDVSASTDKRRPAYEQMLADITAGKIAAVVAWDLDRLHRRPIELEAFMSLADEKRLALATVAGDVDLATPQGRLVARLKGSVAAHETEHKKARQRRAARQKAERGYPNWSKAFGYLPGPNGPEPDPRTAPLVKQAYADVLAGASLGDVCRRWNDAGAFTITGRPWTTTTLSKFLRKPRNAGLRAYKGTRYGPVDRDAIVGKAQWSPLVDEATFWAAQAVLDAPGRAPGRKSVRRHLLTGLAGCGKCGNHLAGSYRTDGRVVYVCKACHGVAILADNIEPILYHIVAERLAMPDAVDLLRREIHDAAEAETIRLELETLYGELDCLAVERAEGLLTARQVKISTDIVNAKITKLQARQQDQERLRVLDGIPLGTPQVAGMIAELSPDRFRAVLDVLAEVVVQPVGKSGRIFNPERVQVNWR

SEQ ID NO: 708 - protein, 469 aa, synthetic construct
MCYTTPVRAAVYLRISEDRSGEQLGVARQREDCLKLCGQRKWEPVEYLDNDVSASTGKRRPAYEQMLADIAAGKIAAVVAWDLDRLHRRPIELEAFMSLADEKRLALATVAGDVDLATPQGRLVARLKGSVAAHETEHKKARQRRAARQKAERGYPNWSKAFGYLPGPNGPEPDPRTAPLVKQAYADILAGASLGDVCRQWNGAGAFTITGRPWATTTLSKFLRNPRNAGLRAYKGARYGPVDRDAIVGKAQWSPLVDEATFWAAQAVLDAPGRAPGRKSVRRHLLTGLAGCGKCGNHLAGSYRTDGQVVYVCKACHGVAILADNIEPILYHIVAERLAMPDAVDLLRRGIHDAAEAETVRLELETLYGELDRLAVERAEGLLTARQVKISTDIVNAKITRLQARQLDQERLRVFDGIPLGTPQVAGVIAELSPDRFRAVLDVLAEVVVQPVGRSGRIFNPERVQVNWR

SEQ ID NO: 709 - protein, 452 aa, synthetic construct
MKAAIYIRVSTREQVENYSIQAQTEKLTALCRSKDWDVYDIFVDGGYSGSNMNRPALNEMLSKLHEIDAVVVYRLDRLSRSQRDTITLIEEYFLKNNVEFVSLSETLDTSSPFGRAMIGILSVFAQLERETIRDRMVMGKVKRIEAGLPLTTAKGRTFGYDVIDTKLYINEEEAKQLQLIYDIFEEEQSITFLQKRLKKLGFKVHTYNRYNNWLTNDLYCGYVSYKDKVHVKGIHEPIISEEQFYRVQEIFTRMGKNPNMNRDSASLLNNLVVCSKCGLGFVHRRKDAMSRDKKYHYRYYSCKTYKHIHELEKCGNKIWRADKLEGLIIDRVNNYSLASRNVDKEDELDSLNEKLKIEHAKKKRLFDLYINGSYEVSELDSMMNDIDARINYYESQIEANEGLEENKKIQENLAELATVDFDSLEFREKQLYLKSLINKIYVDGEQVTIEWL

SEQ ID NO: 710 - protein, 452 aa, synthetic construct
MKAAIYIRVSTREQVENYSIQAQTEKLTALCRSKDWDVYDIFIDGGYSGSNMNRPALNEMLGKLHEIDAVVVYRLDRLSRSQRDTITLIEEYFLKNNVEFVSMSETLDTSSPFGRAMIGILSVFAQLERETIRDRMVMGKIKRIEAGLPLTTAKGRTFGYDVIDTKLYINEEEARQLRLVYDIFEEEQSITFLQKRLKKLGFKVRTYNRYNNWLTNDLYCGYVSYKDKVHVKGIHEPIISEEQFYRVQEIFARMGKNPNMNRDSASLLNNLVVCSKCGLGFVHRRKDIMSHGKKYHYRYYSCKTYKHIHELEKCGNKIWRADKLEELIISRVNNYSLASRNVDKEGELDSLNEKLKIEHAKKKRLFDLYINGSYEVSELDSMMSDIDAQINYYESQIVASEELKKNKKTQENLADLATVDFDSLEFREKQLYLKSLINKIYIDGEQVTIEWL

SEQ ID NO: 711 - protein, 485 aa, synthetic construct
MTKKVAIYTRVSTTNQAEEGFSIDEQIDRLTKYAEAMGWQVSDTYTDAGFSGAKLERPAMQRLINDIENKAFDTVLVYKLDRLSRSVRDTLHLVKGVFTKNKIDFISLSESIDTSSAMGSLFLTILSAINEFERENIKERMTMGKLGRAKSGKSMMWTKTAFGYYHNRKTGILEIVPLQATIVEQIFTDYLSGISLTKLRDKLNESGHIGKDIPWSYRTLRQTLDNPVYCGYIKFKDSLFEGMHKPIIPYETYLKVQKELEERQQQTYERNNNPRPFQAKYMLSGMARCGYCGAPLRIVLGHKRKDGSRTMKYHCANRFPRKTKGVTVYNDNKKCDSGTYDLSNLENTVIDNLIGFQENNDSLLKIINGSNQPILDIGSFKKQISQIDKKIQKNSDLYLNDFITMDELKDRTDSLQAEKKLLKAKISETKLNDSTDVFELVKTQLGSIPINELSYDNKKKIVNNLVSKVDVTADNVDIIFKFQLA

SEQ ID NO: 712 - protein, 469 aa, synthetic construct
MSYTTPVRAAVYLRISEDRSGEQLGVARQREDCLKLCDQRKWVPVEYLDNDVSASTGKRRPAYEQMLADITAGKIAAVVAWDLDRLHRRPIELEAFMSLADEKRLALATVAGDVDLATPQGRLVARLKGSVAAHETEHKKARQRRAARQKAERGHPNWSKAFGYLPGPNGPEPDPRTAPLVRRAYADILAGASLGDVCRQWNDAGAFTITGRPWTTTTLSKFLRKPRNAGLRAYKGARYGPVDRDAIVGKAQWSPLVDEATFWAAQAVLDAPGRAPGRKSVRRHLLTGLAGCGKCGNHLAGSYRTDGRVVYVCKACHGVAILADHIEPILYHIVAERLAMSGAVDLLRREIHDAAEAETIRLELETLYGELDRLAVERAEGLLTARQVKISTDIVNAKITKLQARQLDQERLRVLDGIPLGTPQVAGMIAELSPDRFRAVLDVLAEVVVQPVGKSGRIFNPERVQVNWR

SEQ ID NO: 713 - protein, 452 aa, synthetic construct
MKAAIYIRVSTREQVENYSIQAQTEKLTALCRSRDWDVYDIFIDGGYSGSNMNRPALNEMLSKLHEIDAVVVYRLDRLSRSQRDTITLIEEYFLKNNVEFVSLSETLDTSSPFGRAMIGILSVFAQLERETIRDRMVMGKIKRIEAGLPLTTAKGRTFGYDVIDTKLYINEEEAKQLQLIYDIFEEEQSITLLQKRLKKLGFKVRTYNRYNNWLTNDLYCGYVSYKDKVHVKGIHEPIISEEQFYRVQEIFTRMGKSPNMNRESASLLNNLVVCSKCGQGFVHRRKDAMSRDKKYHYRYYSCKTYKHIHELEKCGNKIWRADKLEELVINRVNNYSFASRNADKEDELDSLNEKLKVEHAKKKRLFDLYISGRYEVSELDSMMNDIDAQINYYEGKIEANEELRKNKKVQENLANLATVDFDSLEFREKQLYLKSLINKIYIDGEQVTIEWL

SEQ ID NO: 714 - protein, 469 aa, synthetic construct
MSYTTPVRAAVYLRISEDRSGEQLGVARQREDCLKLCGQRKWVPVEYLDNDVSASTGKRRPAYEQMLADITAGKIAAVVAWDLDRLHRRPVELEAFMSLADEKRLALATVAGDVDLATPQGRLVARLKGCVAAHETEHKKARQRRAARQKAERGLPNWSKAFGYLPGPNGPEPDPRTAPLVKQAYADILAGASLGDVCRQWNDAGAFTITGRPWTTTALSKFLRKPRNAGLRAYKGARYGPVDRDAIVGKAQWSPLVDEATFWAAQAVLDAPGRAPGRKSVRRHLLTGLAGCGKCGNHLAGSYRTDGQVVYVCKACHGVSILAVNIEPILYHIVAERLAMPDAVDLLRLEIHDAAEAEAIRLELETLYGELDRLAVERAEGLLTARQVKISTDIVTAKITKLLARRLDQERLRVFDGIPLGTPQVAGMIAELSPDRFRAVLDVLAEVVVQPVGKGGRIFNPERVQVNWR

SEQ ID NO: 715 - protein, 485 aa, synthetic construct
MTKKVAIYTRVSTTNQAEEGFSIDEQIDRLTKYAEAMGWQVSGTYTDAGLSGAKLERPAMQRLINDIENRAFDTVLVYKLDRLSRSVRDTLYLVKDVFTKNKIDFISLSESIDTSSAMGSLFLTILSAINEFERENIKERMTMGKLGRAKSGKSMMWTKTAFGYHHNRETGILEIVPLQATIVEQIFTDYLSGISLTKLRDKLNESGHIGKDIPWSYRTLRQTLDNPVYCGYIKFKGSLFEGMHRPIIPYETYLKVQKELEERQQQTYERNNNPRPFQAKYMLSGMARCGYCGAPLRIVLGHKRKDGSRTMKYHCANRYPRKTKGVTVYNDNKKCDSGTYDLSNLENTVIDNLIGFQENNDSLLKIINGNNLPILDTSSFKEQVSQINKKIQKNSDLYLNDFITMDELKDRTDSLQAEKKLLKAKISENKFNDSTDVFELVKTQLGSIPINELSYDNKKKIVNNLVSKVDVTADNVDIIFKFQLA

SEQ ID NO: 716 - protein, 452 aa, synthetic construct
MKAAIYIRVSTREQVENYSIQAQTEKLTALCRSKGWDVYDIFIDGGYSGSNMNRPALNEMLSKLHEIDAVVVYRLDRLSRSQRDTITLIEEYFLKNNVEFVSLSETLDTSSPFGRAMIGILSVFAQLERETIRDRMVMGKIKRIEAGLPLTTAKGRTFGYDVIDTKLYINEEEAKQLQLIYDIFEEEQSITFLQRRLKKLGFRVRSYNRYNNWLTNDLYCGYVSYKDKVHVRGIHEPIISEEQFYRVQEIFTRMGKNPNMNRDSASLLNNLVVCSKCGLGFVHRRKDIVSRGKKYHYRYYSCKTYKHIHELEKCGNKIWRADKLEELIINRVNNYSFASRNEDKEDELDSLNEKLKIEHVKKKRLFDLYINGSYEVSELDSMMNDIDAQINYYESQIEANEELRRNKKIQENLAHLATVDFDSLEFREKQLYLKSLIDKIYIDGEQVTIEWL

SEQ ID NO: 717 - protein, 452 aa, synthetic construct
MKVAIYIRVSTREQVENYSIQAQTEKLTALCRSKDWDVYDIFIDGGYSGSNMNRPALSEMLSKLHEIDAVVVYRLDRLSRSQRDTITLIEEYFLKNNVEFVSLSETLDTSSPFGRAMIGILSVFAQLERETIRDRMVMGKIKRIEAGLPLTTAKGRTFGYDVIDTKLYINEEEAKQLQLIYDIFEEEQSITFLQKRLKKLGFKVHTYSRYNSWLTNDLYCGYVSYKDKVHVKGIHEPIISEEQFYRVQEIFTRMGKNPNMNRDSASLLNNLVVCGKCGLGFVHRRKDTMSRGKKYHYRYYSCKTYKHTHELEKCGNKIWRADKLEELIINRVNNYSLASRNVDKAEELDSLNGKLKVEHAKKKRLFDLYINGSYNVSELDSMMNDIDAQINYYESQIEANEELKKNKKIQENLAGLATVDFDSLEFREKQLYLKSLINKIYIDGEQVTIEWL

SEQ ID NO: 718 - protein, 485 aa, synthetic construct
MTKKVAIYTRVSTTSQAEEGFSIDEQIDRLTKYAEAMGWQVSDTYTDAGCSGAKLERPAMQRLINDIENKAFDAVLVYKLDRLSRSVRDTLYLVKDVFTINKIDFISLNESIDTSSAMGSLFLTILSAINEFERENIKERMTMGKLGRAKSGKSMMWTKTAFGYYHNRKTGILEIVPLQATIVEQIFTDYLSGMSLTKLRDKLNESGHIGKDIPWSYRTLRQTLGNPVYCGYIKFKGSLFEGMHKPIIPYETYLKVQRELKERQQQTYERNNNPRPFQAKYMLSGMARCGYCGAPLRVVLGHKRKDGSRTMKYHCANRFPRKTRGVTVYNDNKKCDSGTYDLSNLENTVIDSLIGFQENNDSLLEIINGNSQPILDTRSFKKQISQIDKKIQKNSDLYLNDFITMDELRDRTNSLQAEKKLLEAKISENKFNDGTDVFELVKTQLGSIPINDLSYDNKKKVVNNLVSKVDVTADNVVIIFKFQLA

SEQ ID NO: 719 - protein, 452 aa, synthetic construct
MKAAIYIRVSTREQVENYSIQAQTEKLTALCRSKDWDVYDIFIDGGYSGSNMNRPALNELLSKLHEIDAVVVYRLDRLSRSQRDTITLIEEYFLKNNVEFVSLSETLDTSSPFGRAMIGILSVFAQLERETIRDRMVMGKIKRIEAGLPLTTAKGRTFGYDVIDTKLYINEEEAKQLQLIYDIFEEEQSITLLQKRLKKLGFKVRTYSRYNNWLTNDLYCGYVSYKDKVHVKGIHEPIISEEQFYRVQEIFTRMGKNLNMNRDSASLLNNLVVCSKCGLGFVHRRKDTVSRGKKYHYRYYSCKTYKHTHELEKCGNKIWRADKLEELIINRVNNYSLASRNVGKEDELDSLNEKLKIEHTKKKRLFDLYINGSYEVSELDSMMNDIDAQINHYESQIRANEELKKNKKIQEDLADLATVDYDSLEFREKQLYLKSLINKIYIDGEQVTIKWL

SEQ ID NO: 720 - protein, 469 aa, synthetic construct
MSYTTPVRAAVYLRISEDRSGEQLGVARQREDCLELCDQRKWVPVEYLDNDVSASTGKRRPAYEQMLADISAGKIAAVVAWDLDRLHRRPIELEAFMSLADEKRLALATVAGDVDLATPQGRLVARLKGSVAAHETEHKKARQRRAARQKAERGHPNWSKAFGYLPGPNGPEPDPRTAPLVKQAYADILAGASLGDVCRRWNDAGASTITGRPWTTTTLSKFLRKPRNAGLRAYKGARYGPVDRDAIVGKARWSPLVDEATFWAAQAVLDAPGRAPGRKSVRRHLLTGLAGCGKCGNHLAGSYRADGRVVYVCKACHGVAILADNIEPILYRIVAERLAMSDAVDLLRREIHDAAEAETIRLELETLYGELDRLAVERAEGLLTARQVKISTDIVNAKITELQARLQDQERLRVLDGIPLGTPQVADMIAELSPDRFRAVLNVLAEVVVQPVGKSGRISNPERVQVNWR

SEQ ID NO: 721 - protein, 485 aa, synthetic construct
MTKKVAIYTRVSTTNQAEEGFSIDEQIDRLTKYAEAMGWQVSDTYTDAGFSGAKLERPAMQRLINDIENKAFDTVLVYKLDRLSRSVRDTLYLVKDVFTKNKIDFISLNESIDTSSAMGSLFLTILSAINEFERENIKERMTMGKLGRAKSGKSMMWTKTAFGYYHNRKTGILEIVPLQATIVEQIFTDYLSGISLTKLRDKLNESGHIGKDIPWSYRTLRQTLDNPVYCGYIKFKDSLFEGMHKPIIPHETYLKVQKELEERQQQTYERNNNPRPFQAKYMLSGMARCGYCGAPLRIVLGHKRKDGSRTMKYHCANRFPRKTKGVTVCNDNKKCDSGTYDLSDLENTVIDNLIGFQESNDSLLKIINGNNQPILDTSSFKKQISQIDKKIQKNSDLYLNDFITMDELKDRTDSLQAEKKLLEAKIGENKFNDSADVFELVKTQLGSIPINELSYDNKKKIVNNLVSKVDVTADNVDIIFKFQLG

SEQ ID NO: 722 - protein, 452 aa, synthetic construct
MKAAIYIRVSTQEQVGNYSIQAQTEKLTALCRSKDWDVYDIFVDGGYSGSNMNRPALNEMLSKLHEIDAVVVYRLDRLSRSQRDTTTLIEEYFLKNNVEFVSLSETLDTSSPFGRAMIGILSVFAQLERETIRDRMVMGKIKRIEAGLPLTTAKGRTFGYDVIDTKLYINEEEAKQLQLIYDIFEEEQSITFLQKRLKKLGFKVRTYNRYNSWLTNDLYCGYVSYKDKVHVKGIHEPIISEEQFYRVQEIFTRMGKNPNMNRDSASLLNNLVVCSKCGLGFVHRSKDTMCRGKKYHYRYYSCKTYKHTHELEKCGNKTWRADKLEELIINRVNSYSFASRNVDREDELDNLNEKLKIEHAKKKRLFDLYINGRYEVSELDSMMNDIDAQINYYESQIEANEELKKNKKIQENLADLATVDFDSLEFREKQLYLRSLINKIYIDGEQVTIEWL

SEQ ID NO: 723 - protein, 485 aa, synthetic construct
MTKKVAIYTRVSTTNQAEEGFSIDEQIDRLTKYAEAMGWQVSDTYTDAGYSGAKLGRPAMQHLINDIENKAFDTVLVYKLDRLSRNVRDTLYLVKDVFTKNKIDFISLNESIDTSSAMGSLFLTILSAINEFERENIKERMTMGKLGRAKSGKSMMWTKTAFGYYHNRKTGILEIVPLQATIVEQIFTDYLSGISLTKLRDKLNESGHIGKDIPWSYRTLRQTLDNPVYCGYIKFKGSLFEGMHKPIIPYETYLKVQKELEKRQQQTYERNNNPRPFQAKYMLSGMARCGYCGAPLKIVLGHKRKDGSRTMKYHCANRFPRKTKGVTVYNDNKKCDSGAYDLSDLENTVIDNLIVFQENNDSLLKIINGNNQPILDTSSIKKQISQIDKKIQKNSDLYLNDFITMDELKDRTDSLQAEKKLLKAKISENKFNDSTDVFELVKTQLGSIPINELSYDNKKKIVNNLVSKVDVTADNVDIIFKFQLA

SEQ ID NO: 724 - protein, 452 aa, synthetic construct
MKAAIYIRVSTREQVENYSIQAQTEKLTALCRSKDWDVYDTFIDGGYSGSNMNRPALNEMLSKLHEIDAVVVYRLDRLSRSQRDTITLIEEYFLKNNVEFVSLSETLDTSSPFGRAMIGILSVFAQLERETIRDRMVMGKIKRIEAGLPLTTAKGRTFGYDVIDTKLYINEEEARQLRLIYDIFEEEQSITFLQKRLKKLGFKVRTYNRYNNWLTNDLYCGYVSYKDKVHVKGIHEPIISEEQFYRVQEIFTRMGKNPNMNRDSASLLNNLVVCSKCGLGFVHRRKDAMSRDKKYHYRYYSCKTYKHIHELEKCGNKIWRADKLEELIINRVNNYSVASRNVDKEDELGSLNEKLKIEHAKKRRLFDLYINGSYEVSELDSMMSDIDAQINYYESQIEANEELKKNEKIQENLANLATVDFDSLEFREKQLYLKSLINRIYIDGEQVTIEWL

SEQ ID NO: 725 - protein, 469 aa, synthetic construct
MSYTTPVRAAVYLRISEDRSGEQLGVARQREDCLKLCDQRKWVPVEYLDNDVSASTGKRRPAYEQMLADITAGKIAAVVAWDLDRLHRRPIELEAFMSLADEKRLALATVAGDVDLATPQGRLVARLKGSVAAHETEHKKARQRRAARHKAERGYPNWSKAFGYLPGPNGPEPDPRTAPLVKQAYADILAGASLGDVCRRWDDAGAFTITGRPWTTTTLSKFLRKPRNAGLRAYKGARYGPVDRDAIVGKAQWSPLVDEATFWAAQAVLDAPGRAPGRKSVRRHLLTGLAGCGKCGNHLAGSYRTDGRVVYVCKTCHGVAILADNIEPILYHIVAERLAMPDAVDLLRREIHDAAEAEAIHLELETLYGELDRLAVERAEGLLTARQVKISTDIVNAKITKLQAHQQDQERLRVLDGIPLGTPQVAGVIAELSPNRFRAVLDVLAEVVVQPVGKSGRIFNPERVQVNWR

SEQ ID NO: 726 - protein, 469 aa, synthetic construct
MSYTIPVRAAVYLRISEDRSGEQLGVARQREDCLKLCGQRKWEPVEYLDNDVSASTGKRRPAYEQMLADITAGKIAAVVAWDLDRLHRRPIELEAFMSLADEKRLALATVAGDVDLATPQGRLVARLKGSVAAHETEHKRARQRRAARQKAERGRPNWSKAFGYLPGPNGPEPDPRTAPLVKQAYADILAGASLGDVCRQWNGAGALTITGRPWTTTTLSKFLRKPRNAGLRAYKGARYGPVDRDAIVGKAQWSPLVDEATFWAAQAVLDAPGRAPGRKSVRRHLLTGLAGCGKCGNHLAGSYRTDGRVVYVCKTCHGVAILADNIEPILYHIVAGHLAMPDAVELLRREIHDAAEAETIRLELETLYGELDRLAVERAEGLLTARQVKISTDIVNAKITKLQARQQDQERLRVLDGIPLGTPQVAGVIAELSPDRFRAVLDVLAEVVVQPVGKGGRIFNPERVQVNWR

SEQ ID NO: 727 - protein, 452 aa, synthetic construct
MKAAIYIRVSTQEQVENYSIQAQTEKLTALCRSKDWDVYDIFIDGGYSGSNMNRPALNEMLSKLHEIDAVVVYRLDRLSRSQRDTTTLIEEYFLKNNVEFVSLSETLDTSSPFGRAMIGILSVFAQLERETIRDRMVMGKIKRIEAGLPLTTAKGRTFGYDVIDTRLYINEEEAKQLRLIYDIFEEEQSITSLQKRLKKLGFKVRTYNRYNNWLTNDLYCGYVSYKDKVHVKGIHEPIISEEQFYRVQEIFTRMGKNPNMNRDCASLLNNLVVCSKCGLGFVHRSKDTMCRGKKYHYRYYSCKTYKHTHELEKCGNKTWRADKLEELIISRVNNYSFASRNVDKEDELDSLNEKLKIEHAKKKRLFDLYINGSYEVSELDSMMNDIDAQIDYYESQIEANEELKKNKKIQENLADLATVDFDSLEFREKQLYLKSLINKIYIDGEQVTIEWL

SEQ ID NO: 728 - protein, 452 aa, synthetic construct
MKAAIYIRVSTREQVENYSIQAQTEKLTALCRSKDWDVYDIFIDGGYSGSNMNRPALNEMLSKLHEIDAVVVYRLDRLSRSQRDTITLIEEYFLKNNVEFVSLSETLDTSSPFGRAMTGILSVFAQLERETIRDRMVMGKIKRVEAGLPLTTAKGRTFGYDVIDTKLYINEEEAKQLQLIYDIFEEEQSITFLQKRLKKLGFKVRTYNCYNNWLTNDLYCGYVSYKDKVHVKGIHEPIISEEQFYRVQEIFARMGKNPNMNRDSASLLNNLVVCSRCGLGFVHRRKDTMSRGKKYHYRYYSCKTYKHTHELEKCGNKIWRADKLEELVISRVNNYSFASRKADKEDELDSLNEKLKIEHAKKRRLFDLYINGSYEVSELDSMMNDIDAQINYYESRIEANEELKKSKKVQENLANLATVDYDSLEFREKQLYLKSLINKIYIDGEQVTIEWL

SEQ ID NO: 729 - protein, 485 aa, synthetic construct
MTKKVAIYTRVSTTNQAEEGFSIDEQIDRLTKYAEAMGWQVSDTYTDAGFSGAKLERPAMQRLINDIENKAFDTVLVYKLDRLSRSVRDTLYLVKDVFTKNKIDFISLNESIDTSSAMGSLFLTILSAINEFERENIKERMTMGKLGRAKSGKSMMWTKTAFGYYHNRKTGILEIVPLQATIVEQIFTDYLSGISLTKLRDKLNESGHIGKDIPWSYRTLRQTLDNPVYCGYIKFKDSLFEGMHKSIIPYETYLKVQKELQERQQQTYERNNNPRPFQAKYMLSGMARCGYCGAPLRIVLGHKRKDGSRTMKYHCANRFPRKTEGVTVYNDNKKCDSGTYDLSNLENAVIDNLIGFQENNDSLLKIINGSNQPILDTSSFKKQITQIDKKIQKNSDLYLNDFITMDELKDRTDALQAEKKLLKAKISENKSNDSTDVFELVKTQLGSIPINELSYDNKKKIVNNLVSKVDVTADNVDVIFKFQLA

SEQ ID NO: 730 - protein, 469 aa, synthetic construct
MSYTTPVRAAVYLRISEDRSGEQLGVARQREDCLKLCGQRKWVPVEYLDNDVSASTGKRRPAYEQMLADITAGKIAAVVAWDLDRLHRRPTELEAFMSLADEKHLALATVAGDVDLATPQGRLVARLKGCVAAHETEHKKARQRRAARQKAERGLPNWSKAFGYLPGPNGPEPDPRTAPLVEQAYADILAGASLGDVCRQWNDAGAFTITGRPWTTTTLSKFLRKPRNAGLRAYKGARYGPVDRDAIVGKAQWSPLVDEATFWAAQAVLDAPGRAPGRKSVRRHLLTGLAGCGKCGNHLAGSYRTGGQVVYVCKACYGVAILADNIVPILYHVVAERLAMPDAVDLLRHEIHDAAEAEAIRLELETLYGELDRLAVERAEGLLTARQVKISTDIVNAKITKLQAHQLDQERLRVFDGIPLGTPQVAGMIAELSPNRFRAVLDVLAEVVVQPVGKRGRVFNPERVQVNWR

SEQ ID NO: 731 - protein, 452 aa, synthetic construct
MKAAIYIRVSTREQVENYSIQAQTERLTALCRSKGWDVYDIFIDGGYSGSNMNRPALNEMLSKLHEIDAVVVYRLDRLSRSQRDTITLIEEYFLKNNVEFVSLSETLDTSSPFGRAMIGILSVFAQLERETIRDRMAMGKIKRIEAGLPLTTAKGRTFGYDVIDTKLYINEEEAKQLRLIYDIFEEEQSITFLQRRLKELGFKVRTYNRYNNWLTNDLYCGYVSYKDKVHVKGIHEPIISEEQFYRVQEIFTRMGKNPNMNRGSASLLNNLVVCSKCGLGFVHRRKDAMSRDKKYHYRYYSCKTYKHIHELEKCGNKIWRADKLEELIINRVNNYSLASRNVDKEDELVSLNEKLKIEHAKKKRLFDLYINGSYEAGELDSMMNDIDAQINYYESQIEANEELKKNKKIQENLAHLATVDFDSLEFREKQLYLKSLINKIYIDGEQVTIEWL

SEQ ID NO: 732 - protein, 452 aa, synthetic construct
MKAAIYIRVSTQEQVENYSIQAQTEKLTALCRSKDWDVYDIFIDGGYSGSNMNRPALNEMLSKLHEIDAVVVYRLDRLSRSQRDTITLIEEYFLKNNVEFVSLSETLDTSSPFGRAMIGILSVFAQLERETIRDRMVMGKIKRIEAGLPLTTAKGCTFGYDVIDTKLYINEEEAKQLQLIYDIFEEEQSITFLQKRLKELGFKVHTYNRYNNWLTNDLYCGYVSYKDKVHVKGIHEPIISEEQFYRVQEIFTRMGKNPNMNRDSASLLNSLVVCSKCGLGFVHRRKDTMSRGKKYQYRYYSCKTYKLTHELEKCGNKIWRADKLEELVINRVNNYSFASRNADKEDELDSLNEKLKIEHAKKRRLFDLYINGSYEVCELDSMMNDIDAQINYYESQIEANEELRKNKKIQENLADLATVDYDSLEFREKQLYLKSLINKIYVDGEQVTIEWL

SEQ ID NO: 733 - protein, 469 aa, synthetic construct
MSYTTPVRAAVYLRISEDRSGEQLGVARQREDCLKLCDQRKWVPVEYLDNDVSASTGKRRPAYEQMLADITAGKIAAVVAWDLDRLHRRPIELEAFMSLADEKRLALATVAGDVDLATPQGRLVARLKGCVAAHETEHKKERQRRAARQKAERGHPNWSKAFGYQPGPNGPEPDPRTAPLVKQAYADILAGASLGDVCRQWNDAGALTITGRPWTTTTLSKFLRKPRNAGLRSYKGARYGPVDRDAIVGKAQWSPLVDEATFWAAQAVLDAPGRAPGRKSVRRHLLTGLAGCGKCGNRLAGSYRTDGRVVYVCKACHGVAILADIIEPILYHIVAERLAMPDAVDLLRREIHDAAEVETIRPELETLYGELDRLAVERAEGLLTARQVKISTDIVNAKITKLQARQLDQERLRVFDGIPLGTPQVAGMIAELSPDRFRAVLDVLAEVVVQPAGKGGRIFNPERVQVNWR

SEQ ID NO: 734 - protein, 452 aa, synthetic construct
MKAAIYIRVSTQEQVENYSIQAQTEKLTALCRSKDWDVYDTFIDGGYSGSNMNRPALNEMLSKLHEIDAVVVYRLDRLSRSQRDTTTLIEEYFLKNNVEFVSLSETLDTSSPFGRAMIGILSVFAQLERETIRDRMMMGKIKRIEAGLPLTTAKGRTFGYDVIDTKLYINEEEAKQLQLIYDIFEEEQSITFLQKRLKKLGFKVRTYNRYNNWLTNDLYCGYVSYKDKVHVKGIHEPIISEEQFYRVQEIFTRMGKNPNMNRDSASLLNNLVVCSKCGLGFVHRSKDTMSRGKKYHYRYYSCKTYKHTHELEKCGNKTWRADKLEELIINRVNNYGFASRNVDKEGEQDGLNEKLKIAHAKKKRLFDLYINGSYEVSELDSMMSDIDAQINYYESQIEANEELKRSKKIQENLVDLATVDFDSLEFREKQMYLKSLINKIYIDGEQVTIEWL

SEQ ID NO: 735 - protein, 485 aa, synthetic construct
MTRKVAIYTRVSTTNQAEEGFSIDEQIDRLTKYAEAMGWQVSDTYTDAGFSGAKLERPAMQRLINDIGNKAFDTVLVYKLDRLSRSVRDTLYLVKDAFTKNKIDFISLNESIDTSSAMGSLFLTILSAINEFERENIKERMTMGKLGRAKSGKSMMWTKTAFGYYHNRKTGILEIVPLQATIVEQIYTDYLSGISLTKLRDKLNESGHIGKDIPWSYRTLRQTLDNPVYCGYIRFKDSLFEGMHKPIIPYETYLKVQKELEERQQQAYERNNNPRPFQAKYMLSGMARCGYCGAPLRIVLGHKRKDGSRTMKYHCANRFPRKTKGVTVYNDNKKCDSGTYDLSHLENTVIDSLIGLQENNDSLPKIINGNNQPILDTSSIKKQISQIDKKIQKNSDLYLNDFITMDELKDRTDSLQAEKKLLEAKIGENKFNNSTDVFELVKTQLGSVPINELSYDNKKKIVNNLVSKVDVTADNVDIIFKFQPA

SEQ ID NO: 736 - protein, 469 aa, synthetic construct
MSYTTPVRAAVYLRISEDRSGEQLGVARQREDCLKLCGQRKWVPVEYLDNDVSASTGKRRPAYEQMLADITAGKIAAVVAWDLDRLHRRPIELEAFMSLADEKRLALATVAGDVDLATPQGRLVARLKGSVAAHETEHKKARQRRAARQKAERGLPNWSKAFGYLPGPNGPEPDPRTAPLVKQAYADILAGASLGDVCRQWNGAGAFTVTGRPWTTAALSKFLRKPRNAGLRAYKGARYGPVDRDAIVGKAQWSPLVDEATFWAAQAVLDAPGRAPGRKSVRRHLLTGLAGCGKCGNHLAGSYRTDGRVVYVCKACHGVAILADNIEPILYHIVAERLAMPDAVNLLRRETHDAAEAETIRLELETLYGELDRLAVERAEGLLTARQVKISTDIVNAKITKLQARRLNQERLRVFDGIPLGTPQVAGMIAELSPDRFRAVLDVLAEVVVQPVGKGGGIFNPERVQVNWR

SEQ ID NO: 737 - protein, 485 aa, synthetic construct
MTKKVAIYTRVSTTNQAEEGFSIDEQVDRLTKYAEAMGWQVSDTYTDAGFSGAKLERPAMQRLINDIENKAFDTVLVYKLDRLSRSVRDTLYLVKEVFTKNKIDFVSLNESIDTSSAMGSLFLTILSAINEFERENIKERMTMGKLGRAKSGKSMMWTKTAFGYYHNRKTGILEIVPLQATIVEQIFTDYLSGISLTKLRDKLNESGHIGKDIPWSYRTLRQTLDNPVYCGYIKFKDSLFEGMHKPIIPHETYLKVQRELEERQQQAYERNNNPRPFQAKYMLSGMARCGYCGAPLKIVLGHKRKDGSRTMKYHCANRFPRKTKGVTVYNDNKKCDSGTYDLSNLEDTVIDNLIGFQENNDSLLKFINGNNQPILDTSSLKKQISQIDKKIQRNSDLYLNDFITMDELKARTDSLQAEKKLLKAKISENKFNNSTDVFELVKTQLGSIPINELSYDNKKKIVNNLVSKVDVTADNVDIIFKFQLA

SEQ ID NO: 738 - protein, 452 aa, synthetic construct
MKAAIYIRVSTQEQVGNYSIQAQTEKLTALCRSKDWDVYDIFVDGGYSGSNMNRPALNEMLSKLHEIDAVVVYRLDRLSRSQRDTTTLIEEYFLKNNVEFVSLSETLDTSSPFGRAMIGILSVFAQLERETIRDRMVMGKIKRVEAGLPLTTAKGRTFGYDVIDTKLYINEEEAKQLQLIYDIFEEVQSITFLQRRLKKLGFKVRTYNRYSNWLTNDLYCGYVSYKDKVHVKGIHEPIISEEQFYRVQEIFTRTGKNPNMNRDSASLLNNLVVCSKCGLGYVHRSKDTMSRGKKYHYRYYSCKTYKHTHELEKCGNKTWRADKLEELIINRVNNYGFASRNVDKEDELDSLNEKLKTEHAKRKRLFDLYINGSYEVSELDSMMNDIDAQINYYEGQIEANEELKKNRKIQENLAGLATVDFDSLEFREKQLYLKSLINKIYIDGEQVTIEWL

SEQ ID NO: 739 - protein, 485 aa, synthetic construct
MTKKVAIYTRVSTTNQAEEGFSIDEQIDRLTKYAEAMGWQVSDTYTDAGFSGAKLERPAMQRLINDIENKAFDTVLVYKLDRLSRSVRDTLYLVKDVFTKNKIDFISLNECIDTSSAMGSLFLTILSAINEFERENIKERMTMGKLGRAKSGKSMMWTKTAFGYYHNRKTGILEIVPLQATIVEQIFTDYLSGISLTKLRDKLNESGHIGKDIPWSYRTLRQTLDNPVYCGYIKFKDSLFEGVHKPIIPYETYLKVQKELEERQQQAYERNNNPRPFQAKYMLSGMARCGYCGAPLKIVLGHKRKDGSRTTKYHCANRFPRKTKGVTVYNDNKKCDSGTYDLSYLENTVIDNLIGFQENNDSLLKIINGNNQPVLDTSSFKKQISQIDKKIQKNSDLYLNDFITMDELKDRTDSLQAEKKLLQAKISENKLNDSTDVFELVKTQLGSIPINELSYDNKKKIVNNLVSKVDVTADSVDIIFKFQLA

SEQ ID NO: 740 - protein, 452 aa, synthetic construct
MKAAIYIRVSTQEQVGNYSIQAQTEKLTALCRSKDWDVYDIFVDGGYSGSNMNRPALNEMLSKLHEIDAVVVYRLDRLSRSQRDTTTLIEEYFLKNNVEFVSLSETLDTSSPFGRAMIGILSVFAQLERETIRDRMVMGKIKRIEAGLPLTTAKGRTFGYDVIDTKLYINEEEAKQLQLIYDIFEEEQSITFLQKRLKKLGFKVRSYNRYNNWLTNDLYCGYVSYKDKVHVKGIHEPIISEEQFYRVQEIFTRMGKNPNMNRDSASLLSNLVVCSKCGLGFVHRSKDTMSRGKKYHYRYYSCKTYKHTHELEKCGNKTWRADKLEELIINRVNNYSFASRNVDKEDELASLNEKLRIEHAKKKRLFDLYINGSCEMSELDSMMNDIDAQINYYESQIEANEELRKNQKIQESLADLATVDFDSLEFRERQLYLKSLINKIYIDGEQVTIEWL

SEQ ID NO: 741 - protein, 469 aa, synthetic construct
MCYTTPVRAAVYLRISEDRSGEQLGVARQREDCLKLCGQRKWVPVEYLDNDVSASTGKRRPAYEQMLADITAGKIAAVVAWDLDRLHRRPIELEAFMSLADEKRLALATVAGDVDLATPQGRLVARLKGCVAAHETEHKKARQRRAARQKAERGHPNWSRAFGYLPGPNGPEPDPRTAPLVRQAYADILAGASLGDVCRQWNDAGAFTITGRPWSTTTLSKFLRKPRNAGLRAYKGARYGPVDRDAIVGKAQWSPLVDEATFWAAQAVLDAPGRAPGRKSVRRHLLTGLAGCGKCGNHLAGSYRTDGRVVYVCKACHGVSILADNIEPILYRIVAERLAMPDAVDLLRREIHDAAEAETIRLELEALYGELDRLAVERAEGLLTARQVKISTDIVNAKITKLQARQLDQERLRVFGGIPLGTPQVAGVIAELSPDRFRAVLDVLAEVVVQPVGKSGRIFNPERVRVNWR

SEQ ID NO: 742 - protein, 469 aa, synthetic construct
MNYTTPVRAAVYLRISEDRSGEQLGVARQREDCLKLCGQRKWVPVEYLDNDVSASTGKRRPAYEQMLADITAGKIGAVVAWDLDRLHRRPIELEAFMSLADEKRLALATVAGDVDLATPQGRLVARLKGCVAAHETEHKKARQRRAARQKAERGHPNWSKAFGYLPGPNGPEPDPRTAPLVKQAYADILAGASLGDVCRQWNNAGASTITGRPWTTTALSKFLRKPRNAGLRAYKGARYGPVDRDAIVGKAQWSPLVDEATFWAAQAVLDAPGRAPGRKSVRRHLLTGLAGCGKCGNHLAGSYRIDGRVVYVCKTCHGVAILADNIEPILYHVVAERLAMPDAVDLLRREIHDAAEAETIRLELETLYGELDRLAVERAEGLLTARQVKISTDIVSAKITKLQARQLDQERLRVFDGIPLGTPQVAGTIAELSPSRFRAVLDVLAEVVVQPVSKSGRISNPERVQVNWR

SEQ ID NO: 743 - protein, 452 aa, synthetic construct
MKAAIYIRVSTREQVENYSIQAQTEKLTALCRSKGWDVYDIFIDGGYSGSNMNRPALNEMLSKLHEIDAVVVYRLDRLSRSQRDTITLIEEYFLKNSVEFVSLSETLDTSSPFGRAMIGILSVFAQLERETIRDRMVMGKIKRIEAGLPLTTAKGRTFGYDVIDTKLYINEEEAKQLQLIYDIFEEEQSITFLQKRLKKLGFKVRTYNRYNNWLTNDLYCGYVSYKDKVHVKGIHEPIISEEQFYRVQEIFTRMGKNPNMNRGSASLLNNLVVCSKCGLGFVHRRKDAMSRDKKYHYRYYSCKTYKHIHELEKCGNKIWRADKLEELIISRVNNYSLASRNVDKEDELDSLNEKLKIEHAKKRRLFDLYINGSYEVSELDSMMNDIDAQINYYESQIEANGELKKNKKIQENLAHLATVDFDSLEFREKQLYLKSLINKIYIDGEQVTIEWL

SEQ ID NO: 744 - protein, 452 aa, synthetic construct
MKAAIYIRVSTREQVENYSIQAQTEKLTALCRSKDWDVYDIFIDGGYSGSNMNRPALNEMLSKLHEIDAVVVYRLDRLSRSQRDTITLIEEYFLKNNVEFVSLSETLDTSSPFGRAMIGILSVFAQLERETIRDRMVMGKIKRIEAGLPLTTAKGRTFGYDVIDTRLYINEEEAKQLRLIYDIFEEEQSITFLQKRLKKLGFKVHTYNRYNNWLTNDLYCGYVSYKDRVHVKGIHEPIISEEQFYRVQEIFTRMGKNPNTNRDSASLLNNLVVCSKCGLGFVHRRKDAMSRDKKYHYRYYSCKTYKHIHELEKCGNKVWRADKLEELIVNRVNNYSLAGRNVDKEDELDSLNEKLKIEHAKKRRLFDLYINGSYKVSELDSMMNDIDAQINYYESQIEANEELKKNKKIQENLAHLATVDFDSLEFREKQLYLKSLINKIYIDGEQVTIEWL

SEQ ID NO: 745 - protein, 485 aa, synthetic construct
MTKKVAIYTRVSTTNQAEEGFSIDEQVDRLTKYAEAMGWQVSDTYTDAGFSGAKLERPAMQRLINDIGNKAFDTVLVYKLDRLSRSVRDTLYLVKDVFTKNKIDFISLSESIDTSSAMGSLFLTILSAINEFERENIKERMTMGKLGRARSGKSMMWTKTAFGYYHNRKTGILEIVPLQATIVEQIFTDYLSGISLTKLRDKLNESGHIGKDIPWSYRTLRQTLDNPVYCGYIKFRGSLFEGMHKPIIPYETYLKVQKELEERQQQAYERNNNPRPFQAKYMLSGMARCGYCGAPLRIVLGHKRKDGSRTMKYHCANRFPRKTEGVTVYNDNKKCGSGTYDLCNLENTVIDILIDFQENNDSLLKIINGNNQPILDTSSFRKQISQIDRKIQKNSDLYLNDFITMDELKERTDSLQAEKKLLKAKISENKFNDSTDVFELVKTQLGSIPINELSYDNKKKIVNNLVSKVDVTADNVDIIFKFQLA

SEQ ID NO: 746 - protein, 469 aa, synthetic construct
MNYTTPVRAAVYLRISEDRSGEQLGVARQREDCLKLCDQRKWVPVEYLDNDVSASTGKRRPAYEQMLADITAGKIAAVVAWDLDRLHRRPIELEAFMSLADEKRLALATVAGDVDLATPQGRLVARLKGSVAAHETEHKKARQRRAARQKAERGHPNWSKAFGYLPGPNGPEPDPRTAPLVKQAYAAILAGASLGDVCRQWNDAGAFTITGRPWTTTTLSKFLRKPRNAGLRAYKGARYGPVDRDAIVGKAQWSPLVDEATFWAAQAVLDAPGRAPGRKSVRRHLLTGLAGCGKCGNHLAGSYRADGRVTYVCKACHGVAILADNIEPILYHIVAERLAMPDAVDLLRRGVHDAAEAETIRLELETLYGELDRLAVERAEGLLTGRQVKISTDIVSAKITKLQACQLDQERLRVFDGIPLGTPQVAGMIAELSPDRFRAVLGVLAEVVVQPVGKSGRMFNPERVQVNWR

SEQ ID NO: 747 - protein, 485 aa, synthetic construct
MTKKVAIYTRVSTTNQAEEGFSIDEQIDRLTKYAEAMGWQVSDTYTDAGLSGAKLERPAMQRLINDIENKAFDTVLVYKLDRLSRSVRDTLYLVKDVFTKNKIDFISLNESIDTSSAMGSLFLTILSAINEFERENIKERMTMGKLGRAKSGKSMMWTKTAFGYYHNHKTGILEIVPLQATIVEQIFADYLSGISLTKLRDKLNENGHIGKDIPWSYRTLRQTLDNPVYCGYIKFKDSLFEGMHKPIIPYETYLRVQKELEERQQQTYERNNNPRPFQAKYMLSGMARCGYCGAPLRIVLGHKRKDGSRTMKYHCANRFPRKTKGVTVYNDNKKCDSGTYDLSNLENTVIDNLVGFQENNDSLLKIINGNSQPILDTSSLKKQISQIDKKIQKNSDLYLNDFITMDELKDRTDSLQAEKKLLRAKISENKLNDSTDVFELVKTQLGSIPINELSYDNKKKIVNNLVSKVDVTADSVDIIFKFQLA

SEQ ID NO: 748 - protein, 452 aa, synthetic construct
MKAAIYIRVSTREQVENYSIQAQTEKLTALCRSKDWDVYDIFIDGGYSGSNMNRPALNEMLNKLHEIDAVVVYRLDRLSRSQRDTITLIEEYFLKNNVEFVSLSETLDTSSPFGRAMIGILSVFAQLERETIRDRMVMGKIKRVEAGLPLTTAKGRTFGYDVIDTKLYINKEEAKQLQLIYDIFEEEQSITFLQKRLKKLGFKVRTYNCYNNWLTNDLYCGYVSYKDKVHVKGIHEPIISEEQFYRVQEIFTRMGKSPNMNRDCASLLNSLVVCGKCGLSFVHRRKDTMSRDKRYHYRYYSCKTYKHIHELEKCGNKIWRADKLEELIINRVNNYSLVSRNVDKEDELDSLNEKLKIEHAKKKRLFDLYINGSYEASELDSMMSDIDAQISYYESQIEANEELKKNKKIQENLAYLATVDFDSLEFREKQLYLKSLINKIYIDGEQVTIEWL

SEQ ID NO: 749 - protein, 469 aa, synthetic construct
MSYTTPVRAAVYLRISEDRSGEQLGVARQREDCLKLCDQRKWVPVEYLDNDVSASTGKRRPAYEQMLADITAGKIAAVVAWDLDRLHRRPIELEAFMSLADEKRLALATVAGDVDLATPQGRLVARLKGSVAAHETEHKKARQRRAARQKAERGHPNWSKAFGYLPGPNGPEPDPRTAPLVKQAYADILAGASLGDVCRRWNDAGAFTITGRPWTTTTLSKFLRKPRNAGLRAYKGARYGPVDRDAIVGKAQWSPLVDEATFWAAQAVLDAPGRAPGRKSVRRHLLTGLAGCGKCGNHLAGSYSTDGRVVYVCKACHGIAILADNIEPILYRIVAERLAMPDAVDLLRRETHDAAEAETIRLELETLYDELDRLAVERAEGLLTARQVKISTDIVNAKITKLQARQLDQERLRVFDGIPLGTPQAAGMIAELSPDRFRAVLDVLAEVVVQPVGKGGRIFNPERVQVNWR

SEQ ID NO: 750 - protein, 469 aa, synthetic construct
MSYTTPVRAAVYLRISEDRSGEQLGVARQREDCLELCDQRKWVPVEYLDNDVSASTGKRRPAYEQMLADITAGRIAAVVAWDLDRLHRRPIELEAFMSLADEKRLALATVAGDVDLATPQGRLVARLKGSVAAHETEHKKARQRRAARQKAERGHPNWSKAFGYLPGPDGPEPDPRTAPLVKRAYADILAGASLGDVCRQWNDAGAFTITGRPWTTTTLSKFLRKPRNAGLRAYKGARYGPVDRGAIVGKAQWSPLVDEATFWAAQAVLDAPGRAPGRKSVRRHLLTGLAGCGKCGNHLSGSYRTDGRVVYVCKACHGVAILADNIEPILYHIVAERLAMPDAVDLLRREIHDAAEAEAIRLELETLHGELDRLAVERAEGLLTARQVKISTDIVGAKITKLQTRQLDQERLRVFDGIPLGTPQVAGMIAELSPDRFRAVLDVLAEVVVRPVGKGGRVFNPERVQVNWR

SEQ ID NO: 751 - protein, 452 aa, synthetic construct
MKAAIYIRVSTREQVENYSIQAQTERLTALCRSKDWDVYDIFIDGGYSGSNMNRPALNEMLSKLHEIDAVVVYRLDRLSRSQRDTITLIEEYFLKNNVEFVSLSETLDTSSPFGRAMIGILSVFAQLERETIRDRMVMGKIKRIEAGLPLTTAKGRTFGYNVIDTKLYVNEEEARQLQLIYDIFEEEQSITLLQKRLKKLGFKVRTYNRYNNWLTNDLYCGYVSYKDKVHVKGIHEPIISEEQFYRVQEIFTRMGKNPNMNRDSASLLNNLVVCSKCGLGFVHRRKDAMSRDKKYHYRYYSCKTYKHIHELEKCGNKIWRADKLEELIINRVNSYSLASRNVDKEDELDSLNEKLKIEHAKKKRLFDLYINGNYEVSELDSMMNDIDAQINYYESQIEANEELKKNKKIQENLAYLATVDFDSLEFREKQLYLKSLINKIYIDGEQVTIEWL

SEQ ID NO: 752 - protein, 469 aa, synthetic construct
MSYTTPVRAAVYLRISEDRSGEQLGVARQREDCLKLCGQRKWVPVEYLDNDVSASTGKRRPAYEQMLADITAGKIAAVVAWDLDRLHRRPIELEAFMSLADEKRLALATVAGDVDLATPQGRLVARLKGSVAAHETEHKKARQRRAARQKAERGHPNWSKAFGYLPGPNGPEPDPRTAPLVKQAYADILAGASLGDVCRQWNDAGAFTITGRPWTTTTLSKFLRKPRNAGLRAYKGARYGPVDRDAIVGKAQWSPLVDEATFWAAQAVLDAPGRAPGRKSVRRHLLTGLAGCGKCGNHLAGSYRTDGRVVYVCKACHGVAILADNVEPILYHIVVERLAMPDAVDLLRREIHDAAEAETIRLGLETLFGELDRLAVERAEGLLTARQVKISTDIVNAKITKLQARQLDQERLRVFDGIPLGTPQVAGVIAELSPDRFRAVLDVLVEVVVQPVGKSSRIFNPERVRVNWR

SEQ ID NO: 753 - protein, 452 aa, synthetic construct
MKAAIYIRVSTQEQVGNYSIQAQTEKLTALCRSKDWDVYDIFIDGGYSGSNMNRPALNEMLSKLHEIDAVVVYRLDRLSRSQRDTTTLIEEYFLKNNVGFVSLSETLDTSSPFGRAMIGILSVFAQLERETIRDRMVMGKIKRIEAGLPLTTAKGRTFGYDVIDTKLYINEEEAKQLRLIYDIFEEVQSITSLQKRLKKLGFKVRTYNRYSNWLTNDLYCGYVSYKDKVHVKGIHEPIISEEQFYRVQEIFTRMGKNPNMNRGSASLLNNLVVCSKCGLGFVHRRKDTMCRGKKYHYRYYSCKTFKHTHELEKCGNKIWRADKLEELVINRVNSYSFASRNVDKEGELGSLNEKLKIEHAKKKRLFDLYINGSHEMSELESMMNDIDAQINHYESQIGANEELKKNKKIQENLADLATVDFDSLEFREKQQYLKSLINKIYIDGEQVTIEWL

SEQ ID NO: 754 - protein, 485 aa, synthetic construct
MTKKVAIYTRVSTANQAEEGFSIDEQIDRLTKYAEAMGWQVSDTYTDAGFSGAKLERPAMQRLINDIENKAFDTVLVYKLDRLSRSVRDTLYLVKDVFTKNKIDFISLSESIDTSSAMGSLFLTILSAINEFERENIKERMTMGKLGRAKSGKSMMWTKTAFGYYHNRKTGILEIVPLQATIVEQIFTDYLSGISLTKLRDKLNESGHIGKDIPWSYRTLRQTLDNPVYCGYIKFKDSLFEGMHKPIIPYETYLKVQKELEERQQQTYERNNNPRPFQAKYMLSGMARCGYCGAPLKIVLGHKRKDGSRTMKYHCANRFPRKTKGVTVYNDNKKCDSGTYDLRNLENTVIDNLIGFQENNDSLLKIISGNNQPTLDTSSLKKRISQIDKKIQKNSDLYLNDLITMDELKDRTDSLQAEKKLLKAKISENKLNDSTDVLELVKTQLGSIPINELSYDNKKKIVNNLVSKVDVTADNVDIIFKFQLA

SEQ ID NO: 755 - protein, 485 aa, synthetic construct
MTKKVAIYTRVSTVNQAEEGFSIDEQIDRLTKYAEAMGWQVSDTYTDAGSSGAQLERPAMQRLINDIENKAFDTVLVHKLDRLSRSVRDTLYLVKDVFTKNKIDFISLSESIDTSSAMGSLFLTILSAINEFERENIKERMTMGKLGRAKSGKSMMWTKTAFGYHHNRKTGVLEIVPLQATIVEQIFTDYLSGISLTKLRDKLNESGHIGKDIPWSYRTLRQTLDNPVYCGYIKFKDSLFEGMHKPIIPYETYLEVQKELEERQQQTYERNNNPRPFQAKYMLSGMARCGYCGAPLRIVLGHKRKDGSRTMKYHCANRFPRKTKGITVYNDNKKCDSGTYDLSNLENTVIDNLIGFQENNDSLLEIINGNNQPIPDTSSLEEQISQIDKKIQKNSDLYLNDFITMDELKDRTASLQAEKKLLKAKLGENKFNDSTDVFELVKTQLGSTPINELSYDNKKKIVNNLVSKVDVTADNVDIIFKFQLA

SEQ ID NO: 756 - protein, 469 aa, synthetic construct
MSYTTPVRAAVYLRISEDRSGEQLGVARQREDCLKLCDQRKWVPVEYLDNDVSASTGKRRPAYEQMLADITAGKIAAVVAWDLDRLHRRPIELEAFMSLADEKRLALATVAGDVDLATPQGRLVARLKGSVAAHETEHKKARQRRAARQKAERGYPNWSKAFGYLPGPNGPEPDPRTAPLVKQAYADILAGASLGDVCRQWNDAGASTITGRPWTTTALSKFLRKPRNAGLRAYKGARYGPVDRDAIVGKAQWSPLVDEATFWAAQAVLDAPGRAPGRKSVRRHLLTGLAGCGKCGNHLAGSYRTDGRVVYVCKACHGVAILADNIEPILYHIVAERLAMPDAVDLLRREIHDAAEAETIRLELETLYGELDRLAVERAEGLLTARQVKISTDIVNAKITKLQARQLDQERLRVFEGIPLGTPQVAGAIAELSPDRFRAVLDVLAEVVVQPVGKGGRISSPERVQVNWR

SEQ ID NO: 757 - protein, 485 aa, synthetic construct
MTRKVAIYTRVSTTNQAEEGFSIDEQIDRLTKYAEAMGWQVSDTYTDAGLSGAKLERPAMQRLINDIENKAFDTVLVYKLDRLSRSVRDTLYLVKDVFTKNKIDFISLNESIDTSSAMGSLFLTILSAINEFERENIKERMTMGKLGRAKSGKSMMWTKTAFGYYHNRKTGILEIVPPQAAIVEQIFTDYLSGISLTKLRDKLNEGGHIGKDIPWSYRTLRQTLDNPVYCGYIKFKGSLFEGMHKPIIPYETYLKVQKELEERQQRAYERNNNPRPFQAKYMLSGMARCGYCGAPLRIVLGHKRKDGSRTMKYHCANRFPRKTKGITVYNDNKKCDSGTYDLSNLENTVIDNLIGFQENNDSLLRIINGNNQPILDTSSFKKQISQIDRKIQKNSDLYLNDFITMDELKDRTDSLQAEKKLLKAKISENKFIDSTDVFELVKTQLGSTPINELSYDNKKKIVNNLVSKVDVTADNVDIIFKFQLA

SEQ ID NO: 758 - protein, 452 aa, synthetic construct
MKAAIYIRVSTREQVENYSIQAQTEKLTALCRSKDWDVYDIFIDGGYSGSNMNRPALNEMLSRLHEIDAVVVYRLDRLSRSQRDTITLIEEYFLKNNVEFVSLSETLDTSSPFGRAMIGILSVFAQLERETIRDRMVMGKIKRIEAGLPLTTAKGRTFGYDVIDTRLYINEEEAKQLQLIYDIFEEEQSITFLQKRLKKLGFKVRTYNRYNNWLTNDLYCGYVRYKDKVHVKGIHEPIISEEQFYRVQEIFTRMGKNPNMNRDSASLLNNLVVCGKCGLGFVHRRKDAMSRDKKYHYRYYSCKTYKHIHELEKCGNKIWRADKLEELIINRVNNYSLASRNADKEDELDSLNEKLKTEHAKKKRLFDLYINGRYEVSELDSMMNDIDAQINYYESQIEANEELKKNKKIQENQADLATVDFNSLEFREKQLYLKSLINKIYIDGEQVAIEWL

SEQ ID NO: 759 - protein, 469 aa, synthetic construct
MSYTTPVRAAVYLRISEDRSGEQLGVARQREDCLKLCDQRKWVPVEYLDNDVSASTGKRRPAYEQMLADITAGKIAAVVAWDLDRLHRRPIELEAFMSLADGKRLALATVAGDVDLATPQGRLVARLKGSVAAHETEHKKARQRRAARQKAERGLPNWSKAFGYLPGPNGPEPDPRTAPLVRQAYADILAGASLGDVCRQWNVAGAFTITGRPWTTTTLSKFLRKPRNAGLRAYKGARYGPVDRDAIVGKAQWSPLVDEATFWAAQAVLDAPGRAPGRKSVRRHLLTGLAGCGKCGNHLAGSYRTDGRVVYVCKACHGVAILADNIEPILYHIVAERLAMPDAVDLLRREIHDAAEAETIRLELETLYGELDCLAVERAEGLLTARQVKISTDIVNAKITKLQACQLDQERLRVLDGIPLGTPQVAGMIAELSPDRFRAVLDVLAEVVVQPVGKGGRIFNAERVQVNWR

SEQ ID NO: 760 - protein, 452 aa, synthetic construct
MKAAIYIRVSTREQVENYSIQAQTEKLTALCRSKDWDVYDIFIDGGYSGSNMNRPALNEMLSKLHEIDAVVVYRLDRLSRSQRDTITLIEEYFLKNNVEFVSLSETLDTSSPFGRAMIGILSVFAQLERETIRDRMVMGKIKRIEAGLPLTTAKGRTFGYDVIDTKLYINEEEAKQLQLIYDIFEEVQSITFLQKRLKKLGFKVRTYNRYNNWLTNDLYCGYVSYKDKVHVKGIHEPIISEEQFHRVQEIFARMGKNPNMNRDSASLLNNLVVCSKCGLGFVHRRKDIMSRGKKYHYRYYSCKTYKHIHELEKCGNKIWRADKLEELIINRVNDYSLASRNVDKEDELDSLNEKLKIEHAKKKRLFDLYINGSYEVSELDSMMNDIDAQINYYESQIEANEGLKKNKKIQENLADLATVDFDSLEFREKQLYLKSLINKIYIDGEQVTIEWL

SEQ ID NO: 761 - protein, 452 aa, synthetic construct
MKAAIYIRVSTREQVENYSIQAQTEKLTALCRSKDWDVYDIFIDGGYSGSNMNRPALNEMLSKLHEIDAVVVYRLDRLSRSQRDTITLIEEYFLKNNVEFVSLSETLDTSSPFGRAMIGILSVFAQLERETIRDRMVMGKIKRIEAGLPLTTAKGRTFGYDVIDTKLYINEEEAKQLQLIYDIFEEEQSITSLQKRLKKLGFKVHTYNRYNNWLTNDLYCGYVSYKDKVHVKGIHEPIISEEQFYRVQEIFARMDKNPNMNRDSASLLNNLVVCSRCGLGFVHRRKDTMSRGKKYHYRYYSCRTYKHTHELEKCGNKIWRADKLEELIINRVNDYSFASRNVDKEDELDSLNEKLKIEHAKKKRLFDLYINGSYEVSELDCMMNDIDAQINYYESQIEANEELKKDKKIQESLANLATVDYDSLEFREKQLYLKSLINKIYIDGERVTIEWL

SEQ ID NO: 762 - protein, 485 aa, synthetic construct
MTRKVAIYTRVSTTNQAEEGFSIDEQIDRLTKYAEAMGWQVSDTYTDAGFSGAKLERPAMQRLINDIENKAFDTVLVYKLDRLSRSVRDTLYLVKDVFTKNKIDFISLNESIDTSSAMGSLFLTILSAINEFERENIKERMTMGKLGRAKSGKSMMWTKTAFGYYHNRKTGILEIVPLQATVVKQIFTDYLSGISLTKLRDKLNESGHTGKDIPWSYRTLRQTLDNPVYCGYIKFKDSLFEGMHKPIIPYETYLRVQKELEERQQQTYERNNNPRPFQAKYMLSGMARCGYCGAPLRIVLGHKRKDGSRTMKYHCANRFPRKTKGVTVYNDNKKCDSGAYDMSNLENTVIDNLIGFQENNDSLLKIINGNNQPILDTSSFKKQISRIDKKIQKNCDLYLNDFITMDELKDRTNRLQAEKKLLKAKISENKFNDSTDVFELVKTQLGSIPINELSYDDKKKIVNNLVSKVDVTADNVDIIFKFQLA

SEQ ID NO: 763 - protein, 485 aa, synthetic construct
MTKKVAIYTRVSTTNQAEEGFSIDEQIDRLTKYAEAMGWQVSGTYTDAGFSGAKLERPAMQRLINDIEYKAFDTVLVYKLDRLSRSVRDTLYLVKDVFTKNKIDFISLNESINTSSAMGSLFLTILSAINEFERENIKERMTMGKLGRAKSGKSMMWTKTAFGYYHNRKTGILEIVPLQATIVEQIFTDYLSGISLAKLRDKLNESGHIGKDTPWSYRTLRQTLDNPVYCGYIRFKGGLFEGMHRPIIPYETYLKVQKELEERQQQTYERNNNPRPFQAKYMLSGMARCGYCGAPLRIVLGHKRKDGSRTMKYHCANRFPRKTKGVTVYNDNKKCDSGTYDLSNLENTVIDNLIDLQENNDSLLRIINGNNQPILDTSSFKKQISQIDKKIQKNSDLYLNDFITMDELKVRTDNLQAEKKLLKAKISENRFNDSTGVFELVKTQLGSIPINELSYDNKKRIVNNLVSKVDVTADNVDIIFKFQLA

SEQ ID NO: 764 - protein, 485 aa, synthetic construct
MTKKVAIYTRVSTTNQAEEGFSIDEQIDRLTKYAEAMGWQVSDTYTDAGLSGAKLERPAMQRLINDIENKAFDTVLVYKLDRLSRSVRDTLYLVKDVFTKNKIDFISLNECIDTSSAMGSLFLTILSAINEFERENIKERMTMGKLGRAKSGKSMMWTKTAFGYYHNRKTGILEIVPLQATIVEQIFTDYLSGISLTKLRDKLNESGHIGKDIPWSYRTLRQTLDNPVYCGYIKFKDSLFEGMHKPIIPYETYLKVQKELEVRQQQTYERNNNPRPFQAKYMLSGMARCGYCGAPLRIVLGHKRKDGSRTMKYHCANRFPRKTKGVTVYNDNKKCDSGTYDLSNLENTVIDNLIGFQENNDSLLKIINGNNQPILDTSSFKEQISQIDKKIQKNSDLYLNDFITMDELKDRTDSLQAEKKLLKAKISENKFSDSTDVFEQVKTQLGSIPINELSYDNKKKIVNNLVGKVDVTADSVDIIFKFQLA

SEQ ID NO: 765 - protein, 485 aa, synthetic construct
MSKKVAIYTRVSTTNQAEEGFSIDEQIDRLTKYAEAMGWQVSDTYTDAGFSGAKLERPAMQRLINDIENKAFDTVLVYKLDRLTRSVRDTLYLVKDVFTKNKIDFISLNESIDTSSAMGSLFLTILSAINEFERENIKERMTMGKLGRAKSGKSMMWTKTAFGYYHNRKTGILEIVPLQATIVEQIFTDYLSGISLTKLRDKLNESGHIGKDIPWSYRTLRQTLDNPVYCGYIKFKDSLFEGMHKPIIPRETYLKVQKELEERQQQTYERNNNPRPFQAKYMLSGTARCGYCGAPLRIVLGRKRKDGSRTMKYHCANRSPRKTKGITVYNDNRKCDSGTYDLSNLENTVIDNLIGFQENNDSLLKIINGNNQPILDTSSLKKQISQIDKKIQKNSDLYLNDFITMDELKDRTDSLQAEKKLLKARISENKFNDSTDVFELVKTQLGSIPINELSYDNKKKIVNNLVSKVDVTADNVDIIFKFQLA

SEQ ID NO: 766 - protein, 485 aa, synthetic construct
MTKKVAIYTRVSTTNQAEEGFSIDEQIDRLTKYAEAMGWQVSDTYTDAGSSGAKLERPAMQRLINDIENKAFDTVLVYKLDRLSRSVRDTLYLVKDVFTKNKIDFISLNESIDTSSAMGSLFLTILSAINEFERENIKERMTMGKLGRAKSGKSMMWTKTAFGYYHNHKTGILEIVPLQATIVEQIFTDYLSGISLTKLRDKLNESGHIGKDIPWSYRTLRQTLDNPVYCGYIKFKDSLFEGMHKPIIPYETYLKVQKELEERQQQAYERNNNPRPFQAKYMLSGMARCGYCGAPLRIVLGHKRKDGSRTMKYHCANRFPRKTKGVTVYNDNKKCDSGAYDLSNLENTVIDNLIGFQENSDSLLKTINGNNQPILDTSSFKKQISQIDKKIQRNSDLYLNDFITMDELKDRTDSLQAEKKLLKAKISENKFGDSTDVFELVKTQLGSIPINELSYDNKKKIVNNLVSKVDVTADSVDIIFKFQLA

SEQ ID NO: 767 - protein, 452 aa, synthetic construct
MKAAIYIRVSTQEQVGNYSIQAQTERLTALCRSKGWDVYDIFIDGGYSGSNMNRPALNEMLSKLHEIDAVVVYRLDRLSRSQRDTTTLIEEYFLKNNVEFVSLSETLDTSSPFGRAMIGILSVFAQLERETIRDRMVMGKIKRIEAGLPLTTAKGRTFGYDVIDTKLYINEEEAKQLQLIYDIFEEEQSITLLQKRLKKLGFKVRTYNRYNNWLTNDLYCGYVSYKDEVHVKGIHEPIISEEQFYRVQEIFTRMGKNPNMNRDSASLLSNLVVCGKCGLGFVHRSKDTMSRGKKYHYRYYSCKTYKHTHELEKCGNKTWRADKLEELIINRVNNYSFASRNADKEDELDSLNEKLKIEHAKKRRLFDLYINGSYEVSELDSMMNDIDAQIDYYESLIEANEELKKNKKIQENLADLATVDFDSLEFREKQLYLKSLISKIYIDGEQVTIEWL

SEQ ID NO: 768 - protein, 469 aa, synthetic construct
MSYTTPVRAAVYLRISEDRSGEQLGVARQREDCLKLCDQRKWVPVEYLDNDVSASTGKRRPAYEQMLADITAGKIAAVVAWDLDRLHRRPIELEAFMSLADEKRLALATVAGDIDLATPQGRLVARLKGSVAAHETEHKKARQRRAARQKAERGLPNWSKAFGYLPGPNGPVPDPRTAPLVKQAYADILAGASLGDVCRQWNDAGAFTITGRPWTTTTLSKFLRKPRNAGLRAYKGARYGPVDRDAIVGKAQWSPLVDEATFWAAQAVLDAPGRAPGRKSVRRHLLTGLAGCGKCGNHLAGSYRTGGQVVYVCKACHGVAILADNIEPILYHVVAERLAMPDAVDLLRREIHDAAEAETIRLELETLYGELDRLAVERAEGLLTARQVKISTDIVNAEITKLQARQQDQERLRVLDGIPLGTPQVAGMIAELSPDRFRAVLDVLAEVVVQPVGKSGRIFNPERVQVNWR

SEQ ID NO: 769 - protein, 485 aa, synthetic construct
MTRKVAIYTRVSTTNQAEEGFSIDEQIDRLTKYAEAMGWQVSDTYTDAGFSGAKLERPAMQRLINDIENKAFDTVLVYKLDRLSRSVRDTLHLVKDVFTKNRIDFISLNESIDTSSAMGSLFLTILSAVNEFERENIKERMTMGKLGRAKSGKSMMWTKTAFGYYHNCKTGILEIVPLQATIVEQIFTDYLSGISLTKLRDKLNESGHIGKDIPWSYRTLRQTLDNPVYCGYIKFKDSLFEGMHKPIIPYETYLKVQKELEERQQQAYERNNNPRPFQAKYMLSGMARCGYCGAPLRIVLGRKRKDGSRTMKYHCANRLPRKTKGITVYNDNKKCDSGTYDLSNLENTVIDNLIGFQENNDNLLKIINGNNQPILDTSSFKEQISQIDKKIQKISDLYLNDFITMDELRDRTDSLQAEKKLLKAKISENKFNDSTDVFELVKTQLGSIPINELSYDNKKKIVNNLVSKVDVTADNVDIIFKFQLA

SEQ ID NO: 770 - protein, 452 aa, synthetic construct
MKAAIYIRVSTREQVENYSIQAQTEKLTALCRSKGWDVYDIFIDGGYSGSNMNRPALNEMLSKLHEIDAVVVYRLDRLSRSQRDTITLIEEYFLKNNVEFVSLSETLDTSSPFGRAMIGILSVFAQLERETIRDRMVMGKIKRIEAGLPLTTAKGRTFGYDVIDTKLYINEEEAKQLQLIYDIFEEEQSITFLQKRLKELGFKVRTYNRYNNWLTNDLYCGYVSYKDKVHVKGIHEPIISEEQFYRVQEIFTRMGRNPNMNRDSASLLNNLVVCGKCGLSFVHRRKDAMSRDKKYHYRYYSCKTYKHIHELEKCGNKIWRADKLEELIINRVNDYSLASRNVDKEDELDSLNEKLKIEHAKKKRLFDLYINGSYEVSELDSMMSGIDAQINYYESQIKANEELEKDKKIQENLANLAAVDFDSLEFREKQLYLKSLINKIYIDGEQVTIEWL

SEQ ID NO: 771 - protein, 485 aa, synthetic construct
MTKKVAIYTRVSTTNQAEEGFSIDEQIDRLTKYAEAMGWQVSDTYTDAGLSGAKLERPAMQRLINDIENKAFDTVLVYKLDRLSRSVRDTLYLVKDVFTKNKIDFISLNESIDTSSAMGSLFLTILSAINEFERENIKERMTMGKLGRAKSGKSMMWTKTAFGYYHNRKTGILEIVPLQATIVEQIFTDYLSGISLTKLRDKLNESGHIGKDIPWSYRTLRQTLDNPVYCGYIKFKDSLFEGMHKPIIPYETYLKVQKELEERQRQAYERNNNPRPFQAKYMLSGIARCGYCGAPLRIVLGRKRKDGSRTMKYHCANRFPCKTKGVTVYNDNKKCNGGTYDLSNLEDTVIDNLIGFQENNDSLLKIINGNNQPIPDTSSFKKQISQIDKKIQKSSDLYLNDFITMDELKERTDSLQAEKKLLKAKISENEFNGSTDVFELVKTQLGSIPINELSYDNKKKIVNNLVSKVDVTADNVDIIFKFQLA

SEQ ID NO: 772 - protein, 452 aa, synthetic construct
MKAAIYIRVSTREQVENYSIQAQTEKLTALCRSKDWDVYDIFIDGGYSGSNMNRPALNEMLSKLHEIDAVVVYRLDRLSRSQRDTITLIEEYFLKNNVEFVSLSETLDTSSPFGRAMIGILSVFAQLERETIRDRMVMGKIKRIEAGLPLTTAKGRTFGYDVIDTKLYINEEEARQLQLIYDIFEEEQSITFLQKRLKKLGFEVRTYNRYHNWLTNDLYCGYVSYKDKVHVKGIHEPIIGEEQFYRVQEIFTRMGKNPNVNRDSASLLNNLVVCSKCGLGFVHRRKDTMSRGKKYHYRYYSCKTYKHTHELEKCGNKIWRADKLEELITNRVNNYSFASRNVDKEDELDSLNEKLKTEHAKKRRLFDLYINGSYGVSELDSMMSDIDAQISYYESQIEANEELKKNKKIQESLANLATVDYDSLEFREKQLYLKSLINKIYIDGEQVTIEWL

SEQ ID NO: 773 - protein, 485 aa, synthetic construct
MTKKVAIYTRVSTTNQAEEGFSIDEQIDRLTKYAEAMGWQVSDTYTDAGFSGAKLERPAMQRLINDIENKAFDTVLVYKLDRLSRSVRDTLYLVKDVFTKNKIDFISLNESINTSSAMGSLFLTILSAINEFERENIKERMTMGKLGRAKSGKSMMWTKTAFGYYHNRKTGILEIVPLQAAIVEQIFTDYLSGISLTKLRDKLNESGHIGKDIPWSYRTLRQTLDNPVYCGHIKFKDNLFEGMHKPIIPYETYLKVQKELKERQQQTYERNNNPRPFQAKYMLSGMARCGYCGAPLRIVLGHKRKDGGRTMKYHCANRFPRKTRGVTVYNDNEKCDSGTYDLRNLENTVIDNLIGLQENDDSLLKIINGNNQPILDTSSFEEQISQIDKKIQKNSDLYLNDFITMDELKDRTDSLQAEKRLLKARISENKFNDSTDVFELVRTQLGSIPINELSYDNKKKIVNNLVSKVDVTADSVDIIFKFQLA

SEQ ID NO: 774 - protein, 452 aa, synthetic construct
MKAAIYIRVSTQEQVGNYSIQAQTEKLAALCRSKDWDVYDIFVDGGYSGSNMNRPALNEMLSKLHEIDAVVVYRLDRLSRSQRDTTTLIEEYFLKNNVEFVSLSETLDTSSPFGRAMIGILSVFAQLERETIRDRMVMGKIKRIEAGLPLTTAKGRTFGYDVIDTKLYINEEEAKQLRLIYDIFEEERSITSLQKRLKKLGFKVRTYNRYSNWLTNDLYCGYVSYKDKVHVKGIHEPIISEEQFYRVQEIFTRMGKNPNMNRDSASLLNSLVVCSKCGLNFVHRRKDTMSRGKKYHYRYYSCKTYKHTHELEKCGNKIWRADKLEELIINRVNNYSFASRNVDKEDELDNLNEKLKIEHAKKKRLFDLYINGSYEVSELDSMMDDIDAQINYYESRIEANEELKGNKKIQENLAGLATVDFDSLEFREKQLYLKSLINKIYIDGDQVTIEWL

SEQ ID NO: 775 - protein, 452 aa, synthetic construct
MKAAIYIRVSTREQVENYSIQAQTEKLTALCRSKDWDVYDVFIDGGYSGSNMNRPALNEMLSKLHEIDAVVVYRLDRLSRSQRDTITLIEEYFLKNNVEFVSLSETLDTSSPFGRAMIGILSVFAQLERETIRDRMVMGKIKRIEAGLPLTTAKGRTFGYDVIDTKLYVNEEEAKQLQLIYDIFEEEQSITFLQKRLKKLGFKVRTYNRYNNWLTNDLYCGYVSYKDKVHVKGIHEPIISEEQFYRVQEIFTRMGKNPNMNRDSASLLNNLVVCSKCGLGFVHRRKDAMSRDKKYHYRYYSCKTYKHIHELEKCGNKIWRADKLEELIINHVNNYSLASRNVDKEDELDSLNERLKIEHARKKRLFDLYINGSYEVSELDSMMNDIDAQINYYESQIEANEELRKNKKIQENLAYLATVDFDSLEFREKQLYLKSLINKIYIDGEQVTIEWL

SEQ ID NO: 776 - protein, 485 aa, synthetic construct
MTKKVAIYTRVSTTNQAEEGFSIDEQIDRLTKYAEAMGWQVSDTYTDAGSSGAKLERPAMQRLISDTENKAFDTVLVYKLDRLSRSVRDTLYLVKDVFTKNKIDFISLNESIDTSSAMGSLFLTILSAINEFERENIKERMTMGKLGRAKSGKSMMWTKTAFGYYHNRKTGILEIVPLQATIVEQIFTDYLSGISLTKLRDKLNESGHIGKDIPWSYRTLRQTLDNPVYCGYIKFKDSLFEGMHKPIIPYETYLKVQKELEERQQQTYERNNNPRPFQAKYMLSGMARCGYCGAPLRIVLGHKRKDGSRTMKYHCANRFPRKTKGVTVYNDNKKCDSGTYDLSNLENTVIDNLIGFQENSDSLLKIINGNNLPILDTSSFKKQISQIDKKIQKNSDLYLNDFITMDELKDRTDSLQAEKKLLRAKISENKFNDSTDVFELVKAQLGSVPISELSYDNKKKIVNNLVSKVDVTADNVDIIFKFQLA

SEQ ID NO: 777 - protein, 485 aa, synthetic construct
MTKKVAIYTRVSTTNQAEEGFSIDEQVDRLTKYAEAMGWQVSDTYTDAGLSGAKLERPAMQRLINDIEHKAFDTVLVYKLDRLSRSVRDTLYLVKDVFTKNKIDFISLSESIDTSSVMGSLFLTILSAINEFERENIKERMTMGKLGRAKSGKSMMWTKTAFGYYHNRKTGILEIVPLQATIVEQIFTDYLSGISLTKLRDKLNESGHIGKDIPWSYRTLRQTLDNPVYCGYIKFKDSLFEGMHKPIIPYETYLKVQKELGERQQQTHERNNNPRPFQAKYMLSGMARCGYCGAPLRIVLGHKRKDGSRTMKYHCANRFPRKTKGVTVYNDNKKCDSGTYDLSDLENTVIDSLIGFQENNGSLLKIINGNSQLILDTSSLKKQISQIDKKIQKNSDLYLNDFITMDELKNRTDSLQAEKKLLKAKISETKFNGSTDVFELVKTQLGSIPINELSYDNKKKIVNNLVSKVDVTADNVDIIFKFQLA

SEQ ID NO: 778 - protein, 469 aa, synthetic construct
MSYTTPVRAAVYLRISEDRSGEQLGVARQREDCLKLCGQRKWVPVEYLDNDVSASTGKRRPAYEQMLADITAGKIAAVVAWDLDRLHRRPVELEAFMSLADEKRLALATVAGDVDLATPQGRLVARLKGCVAAHETEHKKARQRRAARQKAERGLPNWSKAFGYLPGPNGPEPDPRTAPLVKQAYADILAGASLGDVCRQWNGAGAFTVTGRLWTTTALSKFLRKPRNAGLRAYKGARYGPVDRDAIVGKAQWSPLVDEATFWAVQAALDAPGRAPGRKSVRRHLLTGLAGCGKCGNHLAGSYRTDGRVVYVCKACYGVAILADNIEPILYRIVTERLAMPDAVDLLCREIHDAAGAETIRLELETLYGELDRLAVERAEGLLTARQVKICTDIVNAKITKLQARQLDQERLRVFDGIPLGTPQVAGVIAELSPDRFRAVLDVLAEVVVQPVGKGGRIFNSERVQVNWR

SEQ ID NO: 779 - protein, 469 aa, synthetic construct
MCYTTPVRAAVYLRISEDRSGEQLGVARQREDCLELCAQRKWVPVEYLDNDVSASTGKRRPAYEQMLADITAGKIAAVVAWDLDRLHRRPIELEAFMCLADEERLALATVAGDVDLATPQGRLVARLKGSVAAHETEHKKARQRRAARQKAERGLPNWSKAFGYLPGPNGPEPDPRTAPLVRQAYADILAGASLGDVCRQWNDAGAFTVTGRPWTTTTLSKFLRKPRNAGLRAYKGARYGPVDRDAIVGKAQWSPLVDEATFWAAQAVLDAPGRAPGRKSVRRHLLTGLAGCGKCGNHLAGSYRTDGRVVYVCKACHGVAILADNIEPILYHVVAERLAVPDAVDLLRREIHDAAEAETIRLELETLYGELDRLAVERAEGLLTARQVKISTDIVNAKITKLQARQLDQERLRVFDGIPLGTPRVAGMIAELSPDRFRAVLDVLAEVVVQPVGKSGRIFSPERVQVNWR

SEQ ID NO: 780 - protein, 485 aa, synthetic construct
MTKKVAIYTRVSTTNQAEEGFSIDEQIDRLTKYAEAMGWQVSDTYTDAGFSGAKLERPAMQRLINDIENKAFDTVLVYRLDRLSRSVRDTLHLVKDVFTKNKIDFISLNESIDTSSAMGSLFLTILSAINEFERENIKERMTMGKLGRAKSGKSMMWTKTAFGYYHNRKTGILEIVPLQATIVEQIFTDYLSGISLTKLRDKLNESGHIGKDIPWSYRTLRQTLDNPVYCGYIKFKDSLFEGMHKPIIPYETYLKVQKELEERQQQTYERNNNPRPFQAKYLLSGMARCGYCGAPLKIVLGHKRKDGSRTMKYHCANRFPRKTKGVTVYNDNKKCDSGTYDLSNLENTVIDYLIGLQENNNSLLKIINGSNQPILDTSSFKKQISQIDKKIQKNSDLYLNDFITMDELKDRTDSLQAEKKLLKARISENKFNDSTDVSELVKTQLGSIPISELSYDNRKKIVNNLVSKVDVTADNVDIIFKFQLA

SEQ ID NO: 781 - protein, 485 aa, synthetic construct
MTKKVAIYTRVSTTNQAEEGFSIDEQIDRLTKYAEAMGWQVSGTYTDAGFSGAKLERPAMQRLINDIENRAFDTVLVYKLDRLSRSVRDTLYLVKDVFTKNKIDFISLNESIDTSSAMGSLFLTILSAINEFERENIKERMTMGKLGRAKSGKSMMWTKTAFGYYHNRKTGILEIVPLQATIVEQIFTDYLSGISLTKLRDKLNESGHIGKDIPWSYRTLRQTLDNPVYCGYIKFKDRLFEGMHKPIIPYETYLKVQKELEKRQQQTYERNNNPRPFQAKYMLSGMARCGYCGAPLKIVLGHKREDGSRTMKYHCANRFPRKTKGVTVYNDNKKCDSGTYDLSNLENTVIDTLIGFQEHNDSLLKIINGNNQPILDTSSFEKQISQIDKKIQKNSDLYLNDFITMDELKHRTDSLQAEKKLLKAKISENKFNDNTDVFELVKTQLGSTLINELSYDNKKKIVNNLVSKVDVTADNVDIIFKFQLA

SEQ ID NO: 782 - protein, 452 aa, synthetic construct
MKAAIYIRVSTQEQVGNYSIQAQTEKLTALCHSKDWDVYDIFIDGGYSGSNMNRPALNEMLSKLHEIDAVVVYRLDRLSRSQRDTTTLIEEYFLKNNVEFVSLSETLDTSSPFGRAMIGILSVFAQLERETIRDRMVMGKIKRIEAGLPLTTAKGRTFGYDVIDTKLYINEEEAKQLRLIYDIFEEERSITSLQKRLKKLGFKVRTYNRYNNWLTNDLYCGYVSYKDKVHVKGIHEPIISEEQFYRVQEIFARMGKNPNMNRDSASLLSNLVVCSKCGLGFVHRSKDTMSRGKKYHYRYYSCKTYKHTHELEKCGNKTWRADKLEELIINRVNNYSFASRNADKEDELDSLNERLKIEHAKKRRLFDLYINGSYEVSELDSIMNDINAQINYYESQIEANEELKENKKIQENLADLATVDFDSLEFREKQLYLKSLINKIYIDGEQVTIEWL

SEQ ID NO: 783 - protein, 469 aa, synthetic construct
MSYTTPVRAAVYLRISEDRSGEQLGVARQREDCLKLCGQRKWVPVEYLDNDVSASTGKRRPAYEQMLADITAGKIAAVVAWDLDRLHRRPVELEAFMSLADEKRLALATVAGDVDLATPQGRLVARLKGSVAAHETEHKKARQRRAARQKAERGYPNWSKAFGYLPGPNGPEPDPRTAPLVKQAYTDILAGASLGDVCRQWNDAGAFTITGRPWTTTTLSKFLRKPRNAGLRAYKGARYGPVDRDAIVGKAQWSPLVDEATFWAAQAVLDAPGRAPGRKSVRRHLLTGLAGCGKCGYHLAGSYRTDGRVVYVCKACHGVAILADNIEPILYHIVAERLAMPDAVDLLRREIHDAAEAETIRLELETLYGELDRLAVERAEGLLTARQVKISTDIVNAKITKLQARQLDQERLRVFDGIPLGTPQVAGMIAELSPDRFRAVLDVLAEVVVQPVGKSGRIFNPERVQVNWR

SEQ ID NO: 784 - protein, 469 aa, synthetic construct
MSYTTPVRAAVYLRISEDRSGEQLGVARQREDCLKLCDQRKWEPVEYLDNDVSASTGKRRPAYEQMLADITAGKIAAVVAWDLDRLHRRPIELEAFMSLADEKRLALATVAGDVDLATPQGRLVARLKGSVAAHETEHKKARQRRAARQKAERGHPNWSKAFGYLPGPNGPEPDPRTAPLVKQAYADILAGASLGDVCRQWNDAGAFTVTGRPWTTTALSKFLRKPRNAGLRAYKGARYGPVDRDAIVGKAQWSPLVDEATFWAAQAVLDAPGRAPGRKSVRRHLLTGLAGCGKCGNHLAGSYRTDGRVVYVCKACHGVAILADNIEPILYHIVAERLAMPDAVDLLRREIHDAAEAETIRLELETLYGELDRLAVERAEGLLTARQVKISTDIVNAKITKLQAHQQDQERLRVLDGIPLGTPQVAGVIAELSPNRFRAVLDVLAEVVVQPVGKGGRIFNPERVQVNWR

SEQ ID NO: 785 - protein, 469 aa, synthetic construct
MSYTTPVRAAVYLRISEDRSGEQLGVARQREDCLKLCDQRKWVPVEYLDNDVSASTGKRRPAYEQMLADITAGKIAAVVAWDLDRLHRRPIELEAFMSLADERRLALATVAGDVDLATPQGRLVARLKGSVAAHETEHKKARQRRAARQKAERGHPNWSKAFGYLPGPNGPEPDPRTAPLVKQAYADILAGASLGDVCRQWNDAGAFTITGRPWATTTLSKFLRKPRNAGLRAYKGARYGPVDRNAIVGKAQWSPLVDEATFWAAQAVLDAPGRAPGRKSVRRHLLTGLAGCGKCGNHLAGSYRTDGRVVYVCKACHGVAILADNIEQILYHIVAERLAEPDAVDLLRREIHDAAEAETIRLELETLYGELDRLAVERAEGLLTARQVKISTDIVNAKITKLQACQLDQERLRVFDGIPLGTPQVAGVIAELSPDRFRAVLDVLAEVVVQPVGKSGRIFNPERVQVNWR

SEQ ID NO: 786 - protein, 452 aa, synthetic construct
MKAAIYIRVSTREQVENYSIQAQTEKLTALCRSKDWDVYDIFIDGGYSGSNMNRPALNEMLSKLHEIDAVVVYRLDRLSRSQRDTITLIEEYFLKNNVEFVSLSETLDTSSPFGRAMIGILSVFAQLERETIRDRMVMGKIKRIEAGLPLTTAKGRTFGYDVIDTKLYINEEEAKQLQLIYDIFEEEQSITFLQKRLKKLGFKVRTYNRYNNWLTNDLYCGYVSYKDRVHVKGIHEPIISEEQFYRVQEIFTRMGKNPNMNRDSASLLNNLVVCSKCGLSFVHRRKGTMSRDKKYHYRYYSCKTYKHIHELEKCGNKIWRADKLEELIINRVNNYSLASRNVDKEDELDSLNEKLKIEHAKKKRLFDLYINGSYEVSELDSMMSDIDAQINYYESQIEASEELKKNKKIQESLAYLATVDFDRLEFREKQLYLKSLINKIYIDGEQVTIEWL

SEQ ID NO: 787 - protein, 485 aa, synthetic construct
MTKKVAIYTRVSTANQAEEGFSIDEQIDRLTKYAEAMGWQVSDTYTDAGFSGTKLERPAMQRLINDIETKAFDTVLVYKLDRLSRSVRDTLYLVKDVFTKNKIDFISLNESIDTSSAMGSLFLTILSAINEFERENIKERMTMGKLGRAKSGKSMMWTKTAFGYYHNRKTGILEIVPLQATIVEQIFTDYLSGISLTKLRDKLNECGHIGKDIPWSYRTLRQTLDNPVYCGYIKFKDSLFEGMHKPIIPYETYLKVQKELEERQQQTYERNNNPRPFQAKYMLSGMARCGYCGAPLRIVLGHKRKDGSRTMKYHCANRFPRKTKGVTVYNDNKKCDSGTYDLSNLENTVIDNLIGFQENNDSLLKIINGNNQPILDTSSFKKQISQIDKKIQKNSDLYLNDFITMDELKDRTDSLQAEKKLLKAKISENKFNDSTNVFELVKTQLGSIPINELSYDNKKKIVNDLVSKVDVTADNVDIIFKFQLA

SEQ ID NO: 788 - protein, 452 aa, synthetic construct
MKAAIYIRVSTREQVENYSIQAQTERLTALCRSKDWDVYDIFIDGGYSGSNMNRPALNEMLSKLHEIDAVVVYRLDRLSRSQRDTITLIEEYFLKNNVEFVSLSETLDTSSPFGRAMIGILSVFAQLERETIRDRMVMGKIKRVEAGLPLTTAKGRTFGYDVIDTKLYINEEEAKQLQLIYDIFEEEQSITFLQKRLKKLGFKVRTYNSYINWLTNDLYCGYVSYKDKVHVKGIHEPIISEEQFYRVQEIFTRMGKSPNMNRDSASLLNNLVVCSKCGLGFVHRRKDTTSRGKKYHYRYYSCKTYKHTHELEKCGNKIWRADKLEELIINRMNNYSFADRNADKEDELDSLNEKLKIEHAKRKRLFDLYINGSYEVSELDSMMSDIDAQINYYESQIKANEELKKNKKIQENLADLATVDFDSLEFREKQLYLKSLINKIYIDGEQVTIEWL

SEQ ID NO: 789 - protein, 485 aa, synthetic construct
MTKKVAIYTRVSTTNQAEEGFSIDEQIDRLTKYAEAMGWQVSDTYTDAGSSGAKLERPAMQRLINDIENRAFDTVLVYKLDRLSRSVRDTLYLVKDVFTKNKIDFISLNESIDTSSAMGSLFLTILSAINEFERENIKERMTMGKLGRAKSGKSMMWTKTAFGYYHNRETGILEIVPLQATIVEQIFTDYLSGISLTKLRDKLNESGHIGKDIPWSYRTLRQTLDNPVYCGYIKFKDSLFEGMHKPIIPYETYLKVQKELEERQQQTYERNNNPRPFQAKYMLSGMARCGYCGAPLRIVLGHKRKDGSRTMKYHCANRFPRKTKGVTVYNDNKKCDSGTYDLSNLENTVTDNLIGFQENNDSLLKTINGNNQPILDTSSLKKQISQIDRKIQKNRDLYLNDFITMDELKDRTDSLQAEKKQLKAKISENKLNDSTDVFELVKTQLGSIPINELSYENKKKIVNNLVSKVDVTADNVDIIFKFQLA

SEQ ID NO: 790 - protein, 452 aa, synthetic construct
MKAAIYIRVSTREQVENYSIQAQTEKLTALCRSKDWDVYDIFVDGGYSGGNMNRPALNEMLSKLHEIDAVVVYRLDRLSRSQRDTITLIEEYFLKNNVEFVSLSETLDTSSPFGRAMIGILSVFAQLERETIRDRMVMGKIKRIEAGLPLTTAKGRTFGYDVIDTKLYINEEEAKQLRLIYDIFEEEQSITFLQKRLKKLGFKVRTYNRYNNWLTNDLYCGYVSYKDKVHVKGVHEPIISEEQFYRVQEIFTRMGKNPNMNRDSASLLNNLVVCSKCGLGFVHRRKDAMSRDKKYHYRYYSCKTYKHIHELEKCGNKIWRADKLEELIINRVNDYSVASRNVDKEDELDSLNEKLKIEHAKKKRLLDLYINGSYEVSELDSMMDDIDAQINYYESQIEANEELKKNKKIQENLAYLATVDFDCLEFREKQLYLKSLINKIYIDGEQVTIEWL

SEQ ID NO: 791 - protein, 485 aa, synthetic construct
MTKKVAIYTRVSTTNQAEEGFSIDEQIDRLTKYAEAMGWQVSDTYTDAGFSGAKLERPAMQRLINDIENKAFDTVLVYKLDRLSRSVRDTLYLVKDVFTKNKIDFISLNESIDTSSAVGSLFLTILSAINEFERENIKERMTMGKLGRAKSGKSMMWTKTAFGYYHNRKTGILEIVPLQATIVEQIFTDYLSGISLTKLRDKLNESGHIGKDIPWSYRTLRQTLDNPVYCGYIKFKDSLFEGMHKPIIPYETYLKVQKELEERQQQTYERNNNPRPFQTKYMLSGMARCGYCGAPLRIVLGHKRKDGSRTMKYHCTNRFPRKTKGVTVYNDNKKCDSGTYDLCNLENTVIDNLIGFQENNDSLLKIINGNNQPVLDTSSLEKQISQIDKKIRKNSDLYLNDFITMDELKDRTDSLQAEKKLLKAKISENKFNDSTDVFELVKVQLGSIPINELSYDNKKKIVNNLVSKVVVTADNVDIIFKFQLA

SEQ ID NO: 792 - protein, 452 aa, synthetic construct
MKAAIYIRVSTREQVENYSIQAQTEKLTALCRSKGWDVYDIFVDGGYSGSNMNRPALNEMLSKLHEIDAVVVYRLDRLSRSQRDTITLIEEYFLKNNVEFVSLSETLDTSSPFGRAMIGILSVFAQLERETIRDRMVMGKIKRIEAGLPLTTAKGRTFGYDVIDTKLYINEEEAKQLQLIYDIFEEEQSITLLQKRLKKLGFKVRTYSRYNNWLTNDLYCGYVSYKDKVHVKGIHEPIISEEQFYRVQEIFARMGKNPNMNRDSASLLNNLVVCSKCGLGFVHRRKDAMSRDKKYHYRYYSCKTYKHIHELEKCGNKIWRADKLEELIIDRVNNYSLASRNVDKEDELGSLNEKLKAEHAKKERLFDLYINGNYEVGELDSLMNDIDVQINYYESQIEANEELKKNKKIQENLAYLATVDFDSLEFREKQLYLKSLINKIYIDGEQVTIEWL

SEQ ID NO: 793 - protein, 452 aa, synthetic construct
MKAAIYIRVSTREQVENYSIQAQTEKLTALCRSKDWDVYDIFIDGGYSGSNMNRPALNEMLSKLHEIDAVVVYRLDRLSRSQRDTITLIEEYFLKNNVEFVSLSETLDTSSPFGRAMIGILSVFAQLERETIRDRMVMGKIKRVEAGLPLTTAKGRTFGYDVIDTKLYINEEEAKQLQLIYDIFEEEQSITLLQKRLKKLGFKVHTYNRYNNWLTNDLYCGYVSYKDKVHVKGIHEPIISEEQFYRVQEIFTRMGKNPNMNRDSASLLNNLVVCSKCGLGYVHRRKDTMSRGKKYHYRYYSCKTYKHTHELEKCGNKIWRADKLEELIINRVNNYSFASRNVDKAEELDSLNEKLKVEHAKRKRLFDLYINGSYNVSELDSMMDDIDAQINYYESQIEANEELKKDKKIQENLAELATVDFDSLEFREKQLYLKSLINRIYIDGEQVTIEWL

SEQ ID NO: 794 - protein, 485 aa, synthetic construct
MTKKVAIYTRVSTTNQAEEGFSIDEQIDRLTKYAEAMGWQVSDTYTDAGLSGAKLERPAMQRLINDIENKAFDTVLVYKLDRLSRSVRDTLYLVKDVFTKNKIDFISLSESIDTSSAMGSLFLTILSAINEFERENIKERMTMGKLGRAKSGKSMMWTKTAFGYYHNRKTGILEIVPPQATIVEQIFTDYLSGISLTKLRDKLNESGHIGKDIPWSYRTLRQTLDNPVYCGYIKFKDSLFEGMHKPIIPYETYLKVQKELEERQQQTYERNNNPRPFQAKYMLSGMARCGYCGAPLRIVLGHKRKDGSRTMKYHCANRFPRKTKGVTVYNDNKKCDSGTYDLSNLENTVIDNLIGLQENNDSLLKIINGNNQPILDTSSIEKQISQIDEKIQENSDLYLNDFITMDELKDRTDSLQAEKKLLKAKISENKFNDSTDVFELVKTQLGSIPINELSYDNKKKIVNNLVSKVDVTADNVDIIFKFQPT

SEQ ID NO: 795 - protein, 469 aa, synthetic construct
MSYTTPVRAAVYLRISEDRSGEQLGVARQREDCLELCGQRKWVPVEYLDNDVSASTGKRRPAYEQMLADITAGKIGAVVAWDLDRLHRRPVELEAFMCLADEKRLALATVAGDVDLATPQGRLVARLKGSVAAHETEHKKARQRRAARQKAERGHPNWSKAFGYLPGPNGPEPDPRTAPLVKQAYADILAGASLGEVCRQWNAAGAFTITGRPWTTTTLSKFLRKPRNTGLRAYKGARYGPVDRDAIVGKAQWSPLVDEATFWAAQAVLDAPGRAPGRKSVRRHLLTGLAGCGKCGNHLAGSYRTDGKVVYVCKACHGVAILADNIEPILYHIVAERLAMPDAVDLLRREIHDAAEAETIRLELETLYGELDRLATERAEGLLTARQVKISTDIVNAKITKLQARQLDQERLRVFDGIPLGTPQVAGVIAELSPNRFRAVLDVLAEVVVQPVGKSGGIFNPERVQVNWR

SEQ ID NO: 796 - protein, 485 aa, synthetic construct
MTKKVAIYTRVSTTNQAEEGFSIDEQIDRLTKYAEAMGWQVSDTYTDAGFSGAKLVRPAMQRLINDIENKAFDTVLVYKLDRLSRSVRDTLYLVKDVFTKSKIDFISLNESIDTSSAMGSLFLTILSAINEFERENIKERMTMGKLGRAKSGKSMMWTKTAFGYYHNRKTGILEIVPLQATIVEQIFTDYLSGISLTKLRDKLNESGHIGKDIPWSYRTLRQTLDNPVYCGYIKFKDSLFEGMHKPIIPYETYLKVQKELEERQQQTYERNNNPRPFQAKYMLSGMARCGYCGAPLKIVLGHKRKDGSRTMKYHCANRFPRKTKGVTVYNDNKKCDSGAYDLSNLENTVIDILIGFQENNDSLLKIINGNNQPILDTSSFKKQISQIDKKIQKNSDLYLNDFITMDELKDRTDSLQAEKKLLEAKISESKFNDSADVFELVKTQLGSTPINELSYDGKKKIVNNLVSKVDVTADNVDIIFKFQLA

SEQ ID NO: 797 - protein, 452 aa, synthetic construct
MKAAIYIRVSTQEQVGNYSIQAQTEKLTALCRSKDWDVYDIFIDGGYSGSNMNRPALNEMLSKLHEIDAVVVYRLDRLSRSQRDTTTLIEEYFLKNNVEFVSLSETLDTSSPFGRAMIGILSVFAQLERETIRDRMVMGKIKRIEAGLPLTTAKGRTFGYDVIDTKLYINEEEAKQLQLIYDIFEEEQSITSLQKRLKKLGFKVRTYNRYNNWLTNDLYCGYVSYKDKVHVKGIHEPIISEEQFYRVQEIFARMGKNPNMNRDSASLLNSLVVCSKCGLSFVHRSKDTMSRGKKYHYRYYSCKTYKHTHELEKCGNKTWRADKLEELVINRVNNYSLASRNVDKEDELGSLSEKLKIEHAKKRRLFDLYINGSYEVGELDSMMNDIDAQINHYESRIEANEELKKNKKIRENLADLATVDFDSLEFREKQLYLKSLINKIYIDGEQVTIEWL

SEQ ID NO: 798 - protein, 485 aa, synthetic construct
MTKKVAIYTRVSTTNQAEEGFSIDEQIDCLTKYAEAMGWQVSGTYTDAGFSGAKLERPAMQRLINDIENKAFDTVLVYKLDRLSRSVRDTLHLVKDVFTKNKIDFISLNESIDTSSAMGSLFLTILSAINEFERENIKERMTMGKLGRAKSGKSMMWTKTAFGYYHNRKTGILEIVPLQAAIVEQIFTDYLGGISLTKLRDKLNESGHIGKDIPWSYRTLRQTLDNPVYCGYIKFKDSLFEGMHKPIIPYETYLKVQKELEERQQQTYERNNNPRPFQAKYMLSGMARCGYCGAPLRIVLGHKRKDGSRTMKYHCANRFPRKTKGVTVYNDNKKCDSGTYDLSDLENTVIDNLIGFQENNDSLLKIINGNNQPILDTSSFEKQISQIDKKIQKISDLYLNDFITLDELKARTDSLQAEKKLLKAKISEDRFNDSTDVFELVKTQLGSIPINELSYDNKKKIVNDLVSKVDVTADNVNIIFKFQLA

SEQ ID NO: 799 - protein, 452 aa, synthetic construct
MKAAIYIRVSTQEQVENYSIQAQTEKLTALCRSKDWDVYDIFIDGGYSGSNMNRPALNEMLSKLHEIDAVVVYRLDRLSRSQRDTTTLIEEYFLKNNVEFVSLSETLDTSSPFGRAMIGILSVFAQLERETIRDRMVMGKIKRIEAGLPLTTAKGRTFGYDVIDTKLYINEEEAKQLQLIYDIFEEEQSITFLQKRLKKLGFKVRTYNRYNNWLTNDLYCGYVSYKDKVHVKGIHEPIISEEQFYRVQEIFTRMGKKPNMNRDSASLLNNLVVCSKCGLGFVHRSKDTMSRSKKYHYRYYSCKTYKHTHELEKCGNKIWRADKLEELIINRVNNYSFASRNVGKEDELDSLYEKLKIEHAKKKRLLDLYINGSYEVSELDSMMNDIDAQINYYESQIEANEELRKNRKIQENLADPATVDFDGLEFRDKQLYLKSLINKIYIDGEQVTIEWL

SEQ ID NO: 800 - protein, 469 aa, synthetic construct
MNYTTPVRAAVYLRISEDRSGEQLGVARQREDCLRLCDQRKWVPVEYLDNDVSASTGKRRPAYEQMLADITAGKIAAVVAWDLDRLHRRPIELEAFMSLADAKRLALATVAGDVDLATPQGRLVARLKGSVAAHETEHKKARQRRAARQKAERGHPNWSKAFGYLPGPNGPEPDPRTAPLVKQAYADILAGASLGDVCRQWNDAGAFTITGRPWTTTTLSKFLRKPRNAGLRAYKGARYGPVDRDAIVGKAQWSPLVDEATFWAAQAVLDAPGRAPGRKSVRRHLLTGLAGCGKCGNHLAGSYRTDGKVVYVCKACHGVAILADNIEPILYHIVAERLAMPDAVDLLRREIHDVAEAETIRLELETLYGELDRLAVERAEGLLTARQVKISTDIVNAKITKLQARQLDQERLRVLDGIPLGTPQVAGMIAELSPDRFRAVLDVLAEVIVQPVGKSGRIFNPERVQVNWR

SEQ ID NO: 801 - protein, 469 aa, synthetic construct
MCYTTPVRAAVYLRISEDRSGEQLGVARQREDCLKLCDQRKWQPVEYLDNDVSASTGKRRPAYEQMLADITAGKIAAVVAWDLDRLHRRPIELEAFMSLADEKRLALATVAGDVDLATPQGRLVARLKGSVAAHETEHKRARQRRAARQKAERGHPNWSKAFGYLPGPNGPEPDPRTAPLVEQAYADILAGASLGDVCRRWNDVGAFTITGRPWTTTTLSKFLRKPRNAGLRAYKGARYGPVDRDAIVGKAQWSPLVDEATFWAAQAVLDAPGRAPGRKSVRRHLLTGLAGCGKCGNHLAGSYRTDGRVVYVCKACHGVAILADNIEPILYHIVVERLAMPNAVDLLRREIHDAAEAETIRLELETLYGELDRLAVERAEGLLTARQVKISSDIVNTKIAKLQACQRDQERLRVFDGIPLGTPQVAGTIAELSPDRFRAVLDVLAEVVVLPVGKSGRIFNPERVQVNWR

SEQ ID NO: 802 - protein, 452 aa, synthetic construct
MKAAIYIRVSTREQVENYSIQAQTEKLTALCRSKDWDVYDIFVDGGYSGSNMNRPALNEMLSKLHEIDAVVVYRLDRLSRSQRDTITLIEEYFLKNNVEFVSLSETLDTSSPFGRAMIGILSVFAQLERETIRDRMVMGKIKRIEAGLPLTTAKGRTFGYDVIDTKLYINEEEAKQLRLIYDIFEEEQSITSLQKRLKKLGFKVRTYSRYNNWLTNDLYCGYVSYKDKVHVKGIHEPIISEEQFYRVQEIFTRMGKNPNMNRDSASLLNNLVVCSKCGLGFVHRRKDAMSRDKKYHYRYYSCKTYKHIHELEKCGNKIWRADKLEELVISRVNNHSLACRDADKEGELDSLNEKLKIEHAKKKRLFDLYINGRYEVSELDSMMSDIDAQINYYESQIEANEELKRNKKIQENLADLATVDFDSLEFREKQLYLKSLINKIYVDGEQVTIEWL

SEQ ID NO: 803 - protein, 469 aa, synthetic construct
MSYTTPVRAAVYLRISEDRSGEQLGVARQREDCLKLCDQRKWVPVEYLDNDVSASTGKRRPAYEQMLADITAGKIAAVVAWDLDRLHRRPIELEAFMSLADEKRLALATVAGDVDLATPQGRLVARLKGSVAAHETEHKKARQRRAARQKAERGYPNWSKAFGYLPGPNGPEPDPRTAPLVKQAYADILAGASLGDVCRQWNDAGAFTITGRPWTTATLSKFLRKPRNAGLRAYKGARYGPVDRDAIVGKAQWSPLVDEATFWAAQAVLDAPGRAPGRKSVRRHLLTGLTGCGKCGHHLAGSYRTDGRVVYVCKACHGVAILADNIEPILYRIVAERLAMPDAVDLLRQEIHDAAEAETIRLELETLYGELDRLAVERAEGLLTARQVKISTDIVNAKITELQARQLDQERLRVLDSIPLGTPQVAGMIAELSPDRFRAVLHVLAEVVVQPVGKSGGIFNPERVQVNWR

SEQ ID NO: 804 - protein, 452 aa, synthetic construct
MKAAIYIRVSTQEQVENYSIQAQTEKLTALCRSKDWDVYDIFIDGGYSGSNMNRPALNEMLSKLHEIDAVVVYRLDRLSRSQRDTTTLIEEYFLKNNVEFVSLSETLDTSSPFGRAMIGILSVFAQLERETIRDRMVMGKIKRIEAGLPLTTAKGRTFGYDVIDTKLYINEEEAKQLQLIYDIFEEEQSITSLQKRMKKLGFKVRTYNRYSNWLTNDLYCGYVSYKDKVHVKGIHEPIISEEQFYRVQEIFTRMGKNPNMNRDSASLLNNLVVCSKCGLSFVHRSKDTMSRGKKYHYRYYSCKTYKHTHELEKCGNKTWRADKLEELIINRVNNYSFASRNVDKEDELDSLNEKLKIEHAKKKRLFDLYINGSYEVSELDSMMNDIDARINYYESQIEANEELRKNRKIQENLADLATVDFDGLEFRDKQLYLKSLINKIYIDGEQVTIEWL

SEQ ID NO: 805 - protein, 485 aa, synthetic construct
MTKKVAIYTRVSTTNQAEEGFSIDEQIDRLTKYAEAMGWQVSDTYTDAGFSGAKLERPAMQRLINDIENRAFDTVLVYKLDRLSRSVRDTLYLVEDVFTKNKIDFISLSESIDTSSAMGSLFLTILSAINEFERENIKERMTMGKLGRAKSGKSMMWTKTAFGYYHNRKTGILEIVPLQAAIVEQIFTDYLSGISLTKLRDKLNESGHIGKDIPWSYRTLRQTLDNPVYCGYIKFKDSLFEGVHEPIIPYETYLKVQKELEERQQQTYERNNNPRPFQAKYMLSGMARCGYCGAPLRIVLGHKRKDGSRTMKYHCANRFPRRTKGITVYNDNKKCDSGTYDLSNLENTVIDNLIGFQENNDSLLKIINGNNQPIRDTSSFKKQISQIDKKIQKNSDLYLNDFITMDELRDRTDSLQAEKKLLKAKISENKFNDSTDVFELVKTQLGSIPINELSYDNKKKIVNNLVSKVDVTADNVDIVFKFQLA

SEQ ID NO: 806 - protein, 469 aa, synthetic construct
MCYTTPVRAAVYLRISEDRSGEQLGVARQREDCLKLCDQRKWVPVEYLDNDVSASTSKRRPAYEQMLADITAGKIAAVVAWDLDRLHRRPIELEAFMSLADEKRLALATVAGDVDLATPQGRLVARLKGSVAAHETEHKRARQRRAARQKAERGYPNWSKAFGYLPGPNGPEPDPRTAPLVKQAYADILAGASLGDVCRQWNDAGAFTITGRPWTTTTLSKFLRKPRNAGLRAYKGARYGPVDRDAIVGKAQWSPLVDEATFWAAQAVLDAPGRAPGRKSVRRHLLTGLAGCGKCGNHLAGSYRTDGRVVYVCKACHGVAILADNIEPILYHIVAERLAMPDAVDLLRREIQDAAEAETIRLELETLHGELDRLAVERAEGLLTARQVKISTDIVNARITKLQARQLDQERLRVFDGIPLGTPQVAGMIAELSPDRFRAVLDVLAEVVVQPVGKSGRIFNPERVQVNWR

SEQ ID NO: 807 - protein, 452 aa, synthetic construct
MKAAIYIRVSTREQVENYSIQAQTENLTALCRSKDWDVYDIFIDGGYSGSNMNRPALNEMLSRLHEIDAVVVYRLDRLSRSQRDTITLIEEYFLKNNVEFVSLSETLDTSSPFGRAMIGILSVFAQLERETIRDRMVMGKIKRIEAGLPLTTAKGRTFGYDVIDTKLYINEEEAKQLRLIYDIFEEEQSITFLQKRLKKLGFKVRTYNRYSNWLTNDLYCGYVSYKDKVHVKGIHEPIISEEQFYRVQEIFTRMGKNPNMNRDSASLLNNLVVCGKCGLGFVHRRKDTMSRDKKYHYRYYSCKTYKHIHELEKCGNKIWRADKLEELIINRVNNYSFASRNADKEDGLDSLNEKLKIEHAKKKRLFDLYINGRYEVSELDSMMNDIDAQINYYESQIEANEELKKNKKIQENLAHLATMDFDSLEFREKQLYLKSLINKIYIDGEQVTIEWL

SEQ ID NO: 808 - protein, 452 aa, synthetic construct
MKAAIYIRVSTREQVENYSIQAQTEKLTALCRSKDWDVYDIFVDGGYSGSNMNRPALNEMLSKLHEIDAVVVYRLDRLSRSQRDTITLIEEYFLKNNVEFVSLSETLDTSSPFGRAMIGILSVFAQLERETIRDRMVMGKIKRIEAGLPLTTAKGRTFGYDVIDTKLYINEEEAKQLRLIYDIFEEEQSITFLQKRLKKLGFKVRTYNRYNNWLTNDLYCGYVSYKDKVHVKGVHEPIISEEQFYRVQEIFARMGKNPNMNRDSASLLNNLVVCSKCGLGFVHRRKDAMSRDKKYHYRYYSCKTYKHIHELEKCGNKIWRADKLEELIINRVNNYSVAGRNVDKEDELDSLYEKLKIEHAKKKRLFDLYINGSYEVSELDSMMNDIDAQINYYESQIEANEELRKSKKIQENLADLASVDFDSLEFREKQLYLKSLINKIYIDGEQVTIEWL

SEQ ID NO: 809 - protein, 469 aa, synthetic construct
MSYTTPVRAAVYLRISEDRSGEQLGVARQREDCLRLCGQRKWEPVEYLDNDVSASTGRRRPAYEQMLADITAGKITAVVAWDLDRLHRRPIELEAFMSLADEKRLALATVAGDVDLATPQGRLVARLKGSVAAHETEHKKARQRRAARQKAERGYPNWSKAFGYLPGPNGPEPDPRTAPLVKQAYADILAGASLGDVCRRWNNAGAFTITGRPWTTTTLSKFLRKPRNAGLRAYKGARYGPVDRDAIVGKAQWSPLVDEATFWAAQAVLDAPGRAPGRKSVRRHLLTGLAGCGKCGNHLAGSYRTDGRVVYVCKACYGVAILADNIEPILYHIVAERLAMPDAVGLLRREIHDAAEAETIRLELETLYGELDRLAVERAEGLLTARQVKISTDIVNAKITKLQACQQDQERLRVLDGIPLGTPQVAGMIAELSPDRFRAVLDVLARVVVQPVGKCGRIFNPERVQVNWR

SEQ ID NO: 810 - protein, 452 aa, synthetic construct
MKAAIYIRVSTREQVENYSIQAQTEKLTALCRSKDWDVYDIFIDGGYSGSNMNRPALNEMLSKLHEIDAVVVYRLDRLSRSQRDTITLIEEHFLKNNVEFVSLSETLDTSSPFGRAMIGILSVFAQLERETIRDRMVMGKIKRIEAGLPLTTAKGRTFGYDVIDTKLYINEEEAKQLQLIYDIFEEEQSITFLQKRLKKLGLKVRTYSRYNNWLTNDLYCGYVSYKDKVHVKGIHEPIISEEQFYRVQEIFTRMGKNPNLNRDSASLLNNLVVCSKCGLGFVHRRKDTMSRGKKYHYRYYSCKTYKHTHELEKCGNKIWRADKLEELIINRVNNYSFASRSMDKEDELDSLNEKLKTEHAKKKRLFDLYINGSYEVSELDSMMNDIDAQINYYESQIEANEELKKDKKIQESLANLATVDYDSLEFREKQLYLKSLINKIYIDGEQVTIEWL

SEQ ID NO: 811 - protein, 485 aa, synthetic construct
MTKKVAIYTRVSTTNQAEEGFSIDEQIDRLTKYAEAMGWQVSDTYTDAGFSGAKLERPAMQRLINDIENKAFDTVLVYKLDRLSRSVRDTLYLVKDVFTKNKIDFISLNESIDTSSAMGSLFLTILSAINEFERENIKERMTMGKLGRARSGKSMMWTKTAFGYYHNRETGILEIVPLQATIVEQIFTDYLSGISLTKLRDKLNESGHIGKDIPWSYRTLRQTLDNPVYCGYIKFKGSLFEGMHKPIIPYETYLKVQKELEERQQQTYERNNNPRPFQAKYMLSGMARCGYCGAPLRVVLGHKRKDGSRTMKYHCANRFPRKTKGITVYNDNKKCDSGTYDLSDLENTVIDNLIGFQENNDSLLKIINGSNQPIPDTSSFEKQISQIDKKIQKNSDLYLNDFITMDELKDRTDSLQAEKKLLKAKISENKFNDSTDVFELVKTQLGSIPINELSYDNKKKIVNNLVSKVDVTADNVDIIFKFQLA

SEQ ID NO: 812 - protein, 470 aa, synthetic construct
MSYTTPVRAAVYLRISEDRSGEQLGVARQREDCLELCDQRKWEPVEYLDNDVSASTGKRRPAYEQMLADITAGKIAAVVTWDLDRLHRRPIELEAFMSLADEKRLALATVAGDVDLATPQGRLVARLKGSVAAHETEHKKARQRRAARQKAERGLPNWSKAFGYLSGPNGPEPDPRTAPLVKQAYADILAGASLGDVCRRWNDAGAFTITGRPWTTTALSKFLRKPRNAGLRAYKGARYGPVDRDAIVGKAQWSPLVDEATFWAAQAVLDAPGRAPGRKSVRRHLLTGLAGCGKCGNHLAGSYRTDGRVVYVCKACHGVAILADNIEPILYHIVAERLAMPDAVDLLRREIHDAAEAEAIRLELETLYGELDRLAVERAEGLLTARQVKISTDIVNAKITKLQARQLDQERLRVFDGIPLGTPQVAGTIAELSPDRFRAVLDVLAEVVVQPVGGSGRIFNPERVQVNWRK

SEQ ID NO: 813 - protein, 485 aa, synthetic construct
MTKKVAIYTRVSTTNQAEEGFSIDEQTDRLTKYAEAMGWQVSDTYTDAGISGAKLERPALQRLINDIESKALDTVLVYKLDRLSRSVRDTLYLVKDVFTKNKIDFISLNESIDTSSAMGSLFLTILSAINEFERENIKERMTMGKLGRAKSGKSMMWTKTAFGYHHNRKTGILEIVPLQAAIVEQIFTDYLSGISLTKLRDKLNESGHIGKDIPWSYRTLRQTLDNPVYCGYIKFKDSLFEGMHKPIIPYETYLKVQKELEERQQQTYERNNNPRPFQAKYMLSGMARCGYCGAPLKIVLGHKRKDGSRTMKYHCANRFPRKTKGVTVYNDNKKCDSGTYDLCNLENTVIDSLIGFQENNDSLLKVINGNHQPTLDTSSLKKQISQIDKKIQKNSDLYLNDFITMDELRDRTDSLQAEKKLLRAKISESKLNDSTDVFELVKTQLGSIPINELSYDNKKKIVNNLVSKVDVTADNVDIIFKFQLT

SEQ ID NO: 814 - protein, 452 aa, synthetic construct
MKAAIYIRVSTQEQVENYSIQAQTEKLTALCRSKDWDVYDIFIDGGYSGSNMNRPALNEMLSKLHEIDAVVVYRLDRLSRSQRDTTTLIEEYFLKNNVEFVSLSETLDTSSPFGRAMIGILSVFAQLERETIRDRMVMGKIKRIEAGLPLTTAKGRTFGYDVIDTKLYVNEEEAKQLQLIYDIFEEEQSITSLQKRLKKLGFKVRTYNRYNNWLTNDLYCGYVSYKDEVHVKGIHEPIISEEQFYRVQEIFTRMGKNPNMNRDSASLLSNLVVCSKCGLGFVHRSKDTMSRGKKYHYRYYSCKTYKHTHELEKCGNKTWRADKLEELIINRVNNYSFASRNMVKEDELDSLNEKLKIEHAKKKRLFDLYINGSYEVSELDSMMNDIDAQINYYESQIEANEELKRNKKIQENLADLAAVDFDSLEFREKQLYLKSLINKIYIDGEQVTIDWL

SEQ ID NO: 815 - protein, 469 aa, synthetic construct
MSYTTPVRAAVYLRISEDRSGEQLGVARQREDCLKLCDQRKWVPVEYLDNDVSASTGKRRPAYEQMLADITAGKIAAVVAWDLDRLHRRPIELEAFMSLADEKRLALATVAGDVDLATPQGRLVARLKGSVAAHETEHKKARQRRAARQKAERGHPNWSKAFGYLPGPNGPEPDPRTAPLVRQAYADILAGASLGDVCRQWNDAGALTITGRPWTTTTLSKFLRKPRNAGLRAYKGARYGPVDRDAIVGKAQWSPLVDEATFWAAQAVLDAPGRAPGRKSVRRHLLTGLAGCGKCGNHLAGSYRTDGRVVYVCKACHGVAILADNIEPVLYHIVAERLAMPDAVGLLRREVHDAAEAETIRLELETLYGELDRLAVERAEGLLTARQVKISTDIVNAKITKLRARQLDQERLRVFDGIPLGTPQVAGVIAELSPDRFRAVLDVLAEVVVQPVGKSGRIFNPERVQVNWR

SEQ ID NO: 816 - protein, 469 aa, synthetic construct
MSYTTPVRAAVYLRISEDRSGEQLGVARQREDCLKLCDQRKWEPVEYLDNDVSASTGKRRPAYEQMLADITAGKIAAVVAWDLDRLHRRPIELEAFMSLADEKRLALATVAGDVDLATPQGRLVARLKGSVAAHETEHKKARQRRAARQKAERGLPNWSKAFGYLPGPNGPEPDPRTAPLVKQAYADILAGASLGDVCRQWNNAGALTITGRPWTTTTLSKFLRKPRNAGLRAYKGARYGPVDRDAIVGKAQWSPLVDEATFWAAQAVLDAPGRAPGRKSVRRHLLTGLAGCGKCGNHLAGSYRTDGRVVYVCKACHGVAILADNIVPILYHIVAERLAMPDAVDLLRSEIHDVAEAETIRLELETLHDELDRLAVERAEGLLTARQVKISTDIVNAKITKLQARQLDQERLRVFDGIPLGTPQVAGMIAELSPDRFRAVLDVLAEVVVLPVGKGGRIFNPGRVQVNWR

SEQ ID NO: 817 - protein, 485 aa, synthetic construct
MTKKVAIYTRVSTANQAEEGFSIDEQIDRLTKYAEAMGWQVSDTYTDAGFSGAKLERPAMQRLINDIENKVFDTVLVYKLDRLSRSVRDTLYLVKDVFTKNKIDFISLNESIDTGSAMGSLFLTILSAINEFERENIKERMTMGKLGRAKSGKSMMWTKTAFGYYHNRKTGILEIVPLQATIVEQIFTDYLSGISLTKLRDKLNESGHIGKDIPWSYRTLRQTLDNPVYCGYIKFKDSLFEGMHKPIIPYETYLKVQKELEERQQQTYERNNNPRPFQAKYMLSGMARCGYCGAPLRIVLGHKRKDGSRTMKYHCANRFPRKTKGVTVFNDNKKCGSGTYDLSNLENTVIDNLVGFQENNDSLLKVINGNNQPILDTSSFKEQISQIDKKIQKNSDLYLNDFITMDELRDRTDSLQAEKKLLKAKISENKFNDSTDVFELVKAQLGSIPINELSYDDKKKIVNNLVSKVDVTADNVDIIFKFQLA

SEQ ID NO: 818 - protein, 469 aa, synthetic construct
MSYTTPVRAAVYLRISEDRSGEQLGVARQREDCLKLCDQRKWVPVEYLDNDVSASTGKRRPAYEQMLADITAGKIAAVVAWDLDRLHRRPIELEAFMCLADEKRLALATVAGDVDLATPQGRLVARLKGSVAAHETEHKKARQRRAARQKAERGYPNWSKAFGYLPGPNGPEPDPRTAPLVKQAYADILAGASLGDVCRQWNDAGAFTITGRPWTTTTLSKFLRKPRNAGLRAYKGARYGPVDRDAIVGKAQWSPLVDEATFWAAQAVLDAPGRAPGRKSVRRHLLTGLAGCGKCGNHLAGSYRTDGRVVYVCKTCHGVAILADNIEPILYHVVAERLAMADAVDLLRREIHDAAEAETIRLGLETLYGELDRLAVERADGLLTARQVKIGTDIVNAKIAKLQARLQDQERLRVLGGIPLGTPQVADIITELSPDRFRAVLDVLAEVVVQPVGKSGRIFNPERVQVNWR

SEQ ID NO: 819 - protein, 485 aa, synthetic construct
MTKKVAIYTRVSTTNQADEGFSINEQIDRLTKYAEAMGWQVSDTYTDAGFSGAKLERPAMQRLINDIENKAFDTVLVYKLDRLSRSVCDTLYLVKDVFTKNKIDFISLNESIDTSSAMGSLFLTILSAINEFERENIKERMTMGKLGRAKSGKSMMWTKTAFGYYHNRRTGILEVVPLQATIVEQIFTDYLSGISLTKLRDKLNESGHIGKDIPWSYRTLRQTLDNPVYCGYIKFKDSLFEGMHKPIIPYETYLKVQKELEERQQQTYERNNNPRPFQAKYMLSGMARCGYCGAPLRIVLGHKRKDGSRTMKYHCANRFPRKTKGVTVYNDNKKCDSGTYDLSNLENTVIDNLIGLQESNDSLLKIINGNNQPTLDTSSFKKQISQIDKKIQKNSDLYLNDLITMDELKNRTDSLQAEKKLLKAKISENKFNDSTDVFELVKTQLGSIPINELSYDNKKKIVNNLVSKVDVTADNVDIIFKFQLA

SEQ ID NO: 820 - protein, 469 aa, synthetic construct
MSYTTPVRAAVYLRISEDRSGEQLGVARQREDCLKLCDQRKWVPVEYLDNDVSASTGKRRPAYEQMLADITAGKIAAVVAWDLDRLHRRPVELEAFMSLADEKRLALATVAGDVDLATPQGRLVARLKGCVAAHETEHKKARQRRAARQKAERGLPNWSKAFGYLPGPNGPEPDPRTAPLVKQAYADILAGASLGDVCRQWNDAGAFTITGRPWTATTLSKFLRKPRNAGLRAYKGARYGPVDRDAIVGKAQWSPLVDEATFWAAQAVLDAPGRAPGRKSVRRHLLTGLAGCGKCGNHLAGSYRTDGRVVYVCKVCHGVAILADNIEPILYHIVAERLAMPDAVDLLCREVHDVAEAETIRLELETLYGELDRLAVERAEGLLTARQVKISTDIVNAKITRLQAHQLDQERLRVFDGIPLGTPQVAGMIAELSPDRFRAVLDVLAEVVVQPVGKGGGIFNPERVQVNWR

SEQ ID NO: 821 - protein, 485 aa, synthetic construct
MTKKVAIYTRVSTTNQAEEGFSIDEQIDRLTKYAEAMGWQVSDTYTDAGFSGAKLERPAMQRLINDIENKAFDTVLVYKLDRLSRSVRDTLYLVKDVFTKNEIDFISLNESINTSSAMGSLFLTILSAINEFERENIKERMTMGKLGRAKSGKSMMWTKTAFGYYHNRKTGILEIVPLQATIVEQIFTDYLSGISLTKLRDKLNESGHIGKDIPWSYRTLRQTLDNPVYCGYIKFKDSLFVGMHKPIIPYETYLKVQRELEERQQQTYERNNNPRPFQAKYMLSGMARCGYCGAPLKIVLGHKRRDGSRTMKYHCANRFPRKTKGVTVYNDNEKCDSGTYDLSNLENTVIDNLIGFQENNDSLLKIINGNNQPILDTSSFKEQISQIDKKIQKNSDLYLNDFITMDELKDRTDSLQAEKKLLKAKISENKFNDSTDVFELVKTQLGSIPINELSYDDKKKIVNNLVSKVDVTADNVDIIFKFQLA

SEQ ID NO: 822 - protein, 469 aa, synthetic construct
MSYTTPVRAAVYLRISEDRSGEQLGVARQREDCLKLCDQRKWVPVEYLDNDVSASTGKRRPAYEQMLADITAGKIAAVVAWDLDRLHRRPIELEAFMSLADEKRLALATVAGDVDLATPQGRLVARLKGSVAAHETEHKKARQRRAARQKAERGCPNWSKAFGYLPGPNGPEPDPRTAPLVEQAYADILAGASLGDVCRRWNDAGAFTITGRPWTTTTLSKFLRKPRNAGLRAYKGARYGPVDRNAIVGKAQWSPLVDEATFWAAQAVLDAPGRAPGRKSVRRHLLTGLAGCGKCGNRLAGSYRTDGRVVYVCKACHGVAILADNIEPILYHIVAERLAMPDAVDLLRREIHDAAEAETIRLELETLYGELDRLAVERAEGLLTARQVKISTDIVNAKITKLQARQLDQERLRVFDGIPLGTPQVAGVIAELSPDRFRAVLDVLAEVVVQPVGKSGRNFNPERVQVNWR

SEQ ID NO: 823 - protein, 469 aa, synthetic construct
MSYTTPVRAAVYLRISEDRSGEQLGVARQREDCLKLCDQRKWEPVEYLDNDVSASTGKRRPAYEQMLADITAGKIAAVVAWDLDRLHRRPIELEAFMSLADEKRLALATVAGDVDLATPQGRLVARLKGSVAAHETEHKKARQRRAARQKAERGHPNWNKAFGYLPGPNGPEPDPRTAPLVKQAYADILAGASLGDVCRQWNDAGAFTITGRPWTTTTLSKFLRKPRNAGLRTYKGARYGPVDRDAIVGKAQWSPLVDEATFWAAQAVLDAPGRAPGRKSVRRHLLTGLAGCGKCGNHLAGSYRTDGRVVYVCKACHGVAILADNIVPILYHIAAERLAMPDAVDLLRREIHDAAEAETIRLELETLYGELDRLAVERAEGLLTARQVKISTDIVNAKIIKLQARQLDQERLRVFDGIPLGTPQVAGMIAELSPDRFRAVLDVLAEVVVQPVGKSGRIFNPDRVQVNWR

SEQ ID NO: 824 - protein, 485 aa, synthetic construct
MTKKVAIYTRVSTTNQAEEGFSIDEQIDRLTKYAEAMGWQVSDTYTDAGSSGAKLERPAMQRLINDIENKAFDTVLVYKLDRLSRSVRDTLYLVKDVFTKNKIDFISLNESIDTSSAMGSLFLTILSAINEFERENIKERMTMGKLGRAKSGKSMMWTKTAFGYYHNRKTGILEIVPLQASIVEQIFTDYLSGISLTKLRDKLNESGHIGKDIPWSYRALRQTLDNPVYCGYIKFKDSLFEGMHKPIIPYETYLKVQKELEERQQQTYERNNNPRPFQAKYMLSGMARCGYCGAPLRIVLGHKRKDGSRTMKYHCANRFPRKTRGVTVYNDNKKCDSGTYDLSNLENTVIDNLIGFQENNESLLKIINGNNQPILDTSSFKKQISQIDKKIQKNSDLYLNDFITMDELKDRTDSLQAEKELLKAKISENKLNDSTDVFELVKTQLGSIPINELSYDNKKKIVNNLVNKVVVTADDVDIIFKFQLA

SEQ ID NO: 825 - protein, 485 aa, synthetic construct
MTKKVAIYTRVSTTNQAEEGFSIDEQTDRLTKYAEAMGWQVSDTYTDAGFSGAKLERPAMQRLINDIGNKAFDTVLVYKLDRLSRSARDTLYLVKEVFTKNKIDFISLNESIDTSSAMGSLFLTILSAINEFERENIKERMTMGKLGRAKSGKSMMWTKTAFGYYHNRKTGILEIVPLQATIVEQIFTDYLSGISLTKLRDKLNESGHIGKDIPWSYRTLRQTLNNPVYCGYVKFKDSLFEGAHKPIIPYETYLKVQKELEERQQQTYERNNNPRPFQAKYMLSGMARCGYCGAPLRIVLGHKRKDGSRAMKYHCANRFPRKTRGVTVYNDNKKCDSGTYDLSNLENTVIDNLIGFQEDNDSLLKIINGNNQPILDISSFKKQISQIDKKIQKNSDLYLNDFITMDELKDRTDSLQAEKKLLKAKISESKLNDSTDVFELVKTQLGSIPINELSYEDKKKIVNYLVSKVDVTADNVDIIFKFQLA

SEQ ID NO: 826 - protein, 452 aa, synthetic construct
MKAAIYIRVSTQEQVENYSIQAQTEKLTALCRSKDWDVYDIFIDGGYSGSNMNRPALNEMLSKLHEIDAVVVYRLDRLSRSQRDTTTLIEEYFLKNNVEFVSLSETLDTSSPFGRAMIGILSVFAQLERETIRDRMVMGKIKRIEAGLPLTTAKGRTFGYDVIDTKLYINEEEAKQLQLIYDIFEEEQSITFLQKRLKKLGFKVRTYNRYHNWLTNDLYCGYVSYKDKVHVKGIHEPIISEEQFYRVQEIFTRMGKNPNMNRGSASLLSNLVVCSKCGLGFVHRSKDTMSRGKKYHYRYYSCKTYKHTHELEKCGNKTWRADKLEELIINRVSNYSFASRNVDKEDELDSLNEKLKIEHAKKKRLFDLYINGSYEVSELDSMMSDIDAQINYYGSQIEANEELKENKKIQENLAELATVDFDSLEFREKQLYLKSLINKIYIDGEQVTIEWL

SEQ ID NO: 827 - protein, 452 aa, synthetic construct
MKAAIYIRVSTREQVENYSIQAQTEKLTALCRSKDWDVYDIFIDGGYSGSNMNRPALNEMLSKLHEIDAVVVHRLDRLSRSQRDTITLIEEYFLRNNVEFVSLSETLDTSSPFGRAMIGILSVFAQLERETIRDRMVMGKIKRIEAGLPLTTAKGRTFGYDVIDTKLYINEEEAKQLQLIYDIFEEEQSITFLQKRLKELGFKVRTYNRYNNWLTNDLYCGYVSYKDKVHVKGIHEPIISEEQFYRVQEIFTRMGKNPNMNRDSASLLNNLVVCGRCGRGFVHRRKDTMSHGKKYHYRYYSCRTYKHIHELEKCGNKIWRADKLEELIINRVNNYSIATRNVDKEDGLDSLNEKLKIEHAKKKRLFDLYINGSYEVSELDSMMNDIDAQINYYESQIEANEELKKNKKIQENLAELATVDFDSLEFREKQLYLKSLISKIYIDGEQVTIEWL

SEQ ID NO: 828 - protein, 469 aa, synthetic construct
MSYTTPVRAAVYLRISEDRSGEQLGVARQREDCLKLCGQRKWVPVEYLDNDVSASTGKRRPAYEQMLADITAGKIAAVVAWDLDRLHRRPIELEAFMSLADERRLALATVAGDVDLATPQGRLVARLKGSVAAHETEHKKARQRRAARQKAERGLPNWSKAFGYLPGPNGPEPDPRTAPLVKQAYADILAGASLGDVCRQWNDAGAFTITGRPWTTTALSKFLRKPRNAGLRAYKGARYGPVDRDAIVGKAQWSPLVDEATFWAAQAVLDAPGRAPGRKSVRRHLLTGLASCGKCGNHLAGSYRTDGRVVYVCKACYGVAILADNIEPILYRIVTERLAMPDAVDLLRREIHDAAEAEPIRLELETLYGELDRLAVERAEGLLTARQVKISTDIVNAKITKLQARQLDQERLRVFDGIPLGTPQVAGTIAELSPDRFRAVLDVLAEVVVQPVGKGGRIFNSERVQVNWR

SEQ ID NO: 829 - protein, 469 aa, synthetic construct
MSYTTPVRAAVYLRISEDRSGEQLGVARQREDCLKLCDQRKWEPVEYLDNDVSASTGKRRPAYEQMLADITAGKIAAVVAWDLDRLHRRPIELEAFMSLADEKRLALATVAGDVDLATPQGRLVARLKGSVAAHETEHKKARQRRAARQKAERGHPNWSKAFGYLPGPNGPEPDPRTAPLVKQAYADILAGASLGDVCRQWNAAGAFTITGRRWTTTTLSKFLRKPRNAGLRAYKGARYGPVDRDAIVGKAQWSPLVDEATFWAAQAVLDAPGRAPGRKSVRRHLLTGLAGCGKCGNHLAGSYRTDGKVVYVCKACHGIAILADNIEPILYHIVAERLAMPDAVDLLRREIHDVAEAETIRLELETLYGELDRLAVERAEGLLTARQVKISTDIVNAKITKLQARQLDQERLRVLDGIPLGTPQVAGAIAELSPNRFRAVLDVLAEVVVRPVGKSGRIFNPERVQVNWR

SEQ ID NO: 830 - protein, 469 aa, synthetic construct
MSYTTPVCAAVYLRISEDRSGEQLGVARQREDCLKLCGQRNWVPVEYLDNDVSASTGKRRPAYEQMLADITAGKIAAVVAWDLDRLHRRPIELEAFMSLADEKRLALATVAGDVDLATPQGRLVARLKGSVAAHETEHKKARQRRAARQKAERGHPNWSKAFGYLPGPNGPEPDPRTAPLVKQAYADILAGASLGDVCRQWNDAGALTITGRPWTTTTLSKFLRKPRNAGLRAYKGARYGPVDRNAIVGKAQWSPLVDEATFWAAQAVLDAPGRAPGRKSVRRHLLTGLAGCGKCGNHLAGSYRTDGRVVYVCKACHGVAILADNIEPFLYHIVAERLAMPDAGDLLRREIHDTAEAETIRLELETLYGELDRLAVERAEGLLTARQVKISTDTVSAKITKLQACQLDQERLRVLDGIPLGTPQVAGMIAELSPDRFRAVLDVLAEVVVRPVGKGGRIFNPERVQVNWR

SEQ ID NO: 831 - protein, 469 aa, synthetic construct
MSYTTPVRAAVYLRISEDRSGEQLGVARQREDCLKLCDQRKWVPVEYLDNDVSASTGKRRPAYEQMLADITAGKIAAVVAWDLDRLHRRPIELEAFMSLADEKRLALATVAGDVDLATPQGRLVARLKGSVAAHETEHKRARQRRAARQKAERGYPNWSEAFGYLPGPNGPEPDPRTAPLVKQAYADILAGASLGDVCRQWNDAGAFTITGRPWTTTTLSKFLRKPRNAGLRAYKGARYGPVDRDAIVGKAQWSPLVDEATFWAAQAVLDAPGRAPGRKSVRRHLLTGLAGCGKCGNHLAGSYRTDGRVVYVCKACHGVAILADNIEPILYHIVAERLAMPDAVDLLRREIHDAAEAETIRLELETLYGELDRLAVERAEGLLTARQVKISTDIVNAKITKLQAHRQDQERLRVLDGIPLGTPQVAGMIAELSPDRFRAVLDALAEVVVQPVGKSGRIFNPERVQVNWR

SEQ ID NO: 832 - protein, 469 aa, synthetic construct
MSYTTPVRAAVYLRISEDRSGEQLGVARQREDCLRLCDQRKWEPVEYLDNDVSASTGKRRPAYEQMLADITAGKIAAVVAWDLDRLHRRPIELEAFMSLADEKRLALATVAGDVDLATPQGRLVARLKGSVAAHETEHKKARQRRAARQKAERGHPNWSKAFGYLPGPNGPEPDPRTAPLVRQAYADILAGASLGDVCRQWNDAGAFTITGRPWTTTTLSKFLRKPRNAGLRAYKGARYGPVDRDAIVGKAQWSPLVDEATFWAAQAVLDAPGRAPGRKSVRRHLLTGLAGCGKCGNHLAGSYRTDGRVVYVCKACHGVAILADNIEPILYHIVAERLAMPDAVDLLRREVHDVAEAETIRLELETLCDELDRLAVERAEGLLTARQVKISTDIVNAKITKLQARQLDQGRLRVFDGIPLGTPQVAGMIAELSPNRFRAVLDVLAEVVVQPVGKSGRVFNRERVQVNWR

SEQ ID NO: 833 - protein, 469 aa, synthetic construct
MSYTTPVRAAVYLRISEDRSGEQLGVARQREDCLKLCGQRKWVPVEYLDNDVSASTGKRRPAYEQMLADITAGKIAAVVAWDLDRLHRRPIELEAFMSLADEKRLALATVAGDVDLATPQGRLVARLKGSVAAHETEHKKARQRRAARQKAERGYPNWSKAFGYLPGPNGPEPDPRTAPLVEQAYADILAGASLGDVCRQWNDAGAFTITGRPWTTTTLSKFLRKPRNAGLRAYKGARYGPVDRGAIVGKAQWSPLVDEATFWAAQAVLDAPGRAPGRKSVRRHLLTGLAGCGKCGNHLAGSYRTDGKVVYVCKTCHGVTILADNIEPILYHIVAERLAMPNAVDLLRREIYDAAEAETTRLVLETLYGELDRLAVERAEGLLTARQVKISTDIVNAKITKLQARQQDQERLRVLDGIPLGTPQVAGMIAELSPDRFRAVLDVLAEVVVQPVGKGGRIFNPERVQVNWR

SEQ ID NO: 834 - protein, 485 aa, synthetic construct
MTKKVAIYTRVSTTNQAEEGFSIDEQIDRLTRYAEAMGWQVSDTYTDAGFSGAKLERPAMQRLINDIENKAFDTVLVYKLDRLSRSVRDTLYLVKDVFTKNKIDFISLNESINTSSAMGSLFLTILSAINEFERENIKERMTMGKLGRAKSGKSMMWTKTAFGYYHNRKTGILEIVPLQATIVEQIFTDYLSGISLTKLRDKLNESGHIGKDIPWSYRTLRQTLDNPVYCGYIKFKDSLFEGMHKPIIPYETYLKVQKELEERQQQTYERNNNPRPFQAKYMLSGMARCGYCGAPLRIVLGRKRKDGSRTMKYHCANRFPRKTKGVTVYNDNKKCDSGTYDLSNLENAVIDNLIGFQENNDSLLKIVNGNNQPTLDISSFEKQISQIDKKIQRNGDLYLNDFITMDELKDRTDSLQAEKKLLKAKISENKFNDSTDVFELVKTQLGSIPINELSYDDKKKIVNNLVSKVDVTADSVDIIFKFQPA

SEQ ID NO: 835 - protein, 452 aa, synthetic construct
MKAAIYIRVSTQEQVGNYSIQAQTEKLTALCRSKDWDVYDIFIDGGYSGSNMNRPALNEMLSKLHEIDAVVVYRLDRLSRSQRDTTTLIEEYFLKNNVEFVSLSETLDTSSPFGRAMIGILSVFAQLERETIRDRMVMGKIKRIEAGLPLTTAKGRTFGYDVIDTKLYINEEEAKQLQLIYDIFEEEQSITSLQKRLKKLGFKVRSYNRYNSWLTNDLYCGYVSYKDKVHVKGIHEPIISEEQFYRVQEIFARTGKNPNMNRDSASLLNNLVVCSKCGLSFVHRSKDTMSRGKKYHYRYYSCKTYKHTHELEKCGNKTWCADKLEELIINRVNNYSFASRNVDKEDELDSLNGKLRIEHAKKRRLFDLYINGSYEVSELDSMMNDIDAQINHYESQIEANEELKKNKKIQENLAELATVDFDSLEFREKQLYLKSLINKIYIDGEQVTIEWL

SEQ ID NO: 836 - protein, 452 aa, synthetic construct
MKAAIYIRVSTREQVENYSIQAQTEKLTALCRSKDWDVYDIFIDGGYSGSNMNRPALNEMLSKLHEIDAVVVYRLDRLSRSQRDTITLIEEYFLKNNVEFVSLSETLDTSSPFGRAMIGILSVFAQLERETIRDRMVMGKIKRIEAGLPLTTAKGRTFGYDVIDSKLYINEEEAKQLQLIYDIFEEEQSITSLQKRLKRLGFKVRTYNRYNNWLTNDLYCGYVSYKDKVHVKGIHEPIISEEQFYRVQEIFTRMGKNPNMNRDSASLLNNLVVCSKCGLGFVHRRKDTMSRDKKYHYRYYSCKTYKHIHELEKCGNKIWRADKLEELVISRANNYSLASRNVDKEDELDSLNEKLKIEHAKKKRLFDLYISGRYEVSELDNMMNDIDARINYYESQIEANEELRKNKKIQENLAHLATVDFDSLEFREKQLYLKSLINKIYIDGEQVTIEWL

SEQ ID NO: 837 - protein, 452 aa, synthetic construct
MKAAIYIRVSTREQVENYSIQAQTEKLIALCRSKGWDVYDIFIDGGYSGSNMNRPALNEMLSKLHEIDAVVVYRLDRLSRSQRDTITLIEEYFLKNNVEFVSLSETLDTSSPFGRAMIGILSVFAQLERETIRDRMVMGKIKRIEAGLPLTTAKGRTFGYDVIDTKLYINEEEAKQLQLIYDIFEEEQSITLLQKRLKELGFKVRTYNRYNNWLTNDLYCGYVSYKDKVHVKGIHEPIISEEQFYRVQEIFTRMGKNPNMNRGSASLLNNLVVCGKCGLGFVHRRKDAMSRDKKYHYRYYSCKTYKHIHELEKCGNKIWRADKLEELVINRVNNYSLANRNVNKEHELDSLNEKLKIEHAKKRRLFDLYINGSYEVSELDSLMNDIDAQINYYESQIEANKELKKNKKIQENLAGLATVDFDSLEFREKQLYLKSLINKIYIDGEQVTIEWL

SEQ ID NO: 838 - protein, 485 aa, synthetic construct
MTKKVAIYTRVSTTNQAEEGFSIDEQIDRLTKYAEAMGWQVSDTYTDAGFSGAKLERPAMQRLINDIENKAFDTVLVYKLDRLSRSVRDTLYLVKDVFTKNKIDFISLNESINTSSAMGSLFLTILSAINEFERENIKERMTMGKLGRAKSGKSMMWAKTAFGYNHNRKTGILEIVPLQATIVEQIFTDYLSGISLTKLRDKLNENGHIGKDIPWSYRTLRQTLGNPVYCGYIRFKDSLFEGMHKPIIPYETYLKVQKELEERQQQTYERNNNPRPFQAKYMLSGMARCGYCGAPLRIVLGHKRKDGSRTMKYHCANRSLRKTKGVTVYNDNKKCDSGTYDLSNLENTVIDNLIGFQENNDSLLKIINGNNQPILDTSSLKKQISQIDKKIQKNSDLYLNDFITMDELKARTDSLQAEKKLLKAKISENKFNDSTDVFELVKTQLGSIPVNELSYDNKKKIVNNLVSKVDVTADNVDIIFKFQLA

SEQ ID NO: 839 - protein, 452 aa, synthetic construct
MKAAIYIRVSTREQVENYSIQAQTEKLTALCRSKDWDVYDIFIDGGYSGSNMNRPALNEMLSKLHEIDAVVVYRLDRLSRSQRDTITLIEEYFLKNNVEFVSLSETLDTSSPFGRAMTGILSVFAQLERETIRDRMVMGKIKRIEAGLPLTTAKGRTFGYDVIDTKLYINEEEAKQLQLIYDIFEEEQSITFLQKRLKKLGYKVHTYNRYSNWLTNDLYCGYVSYKDKVHVKGIHEPIISEEQFYRVQEIFARMGKNPNMNRDSASLLSSLVVCSKCGLGFVHRRKDTTSRGKKYHYRYYSCKTYKHTHELEKCGNKIWRADKLEELIINRVNHYSFANRNADKEDELDSLNEKLKIEHAKKKRLFDLYINGSYNVSELDSMMSDIDAQINYYESQIEANGELKKNKKIQENLADLATVDFDSLEFREKQLYLKSLINKIYIDGEQVAIEWL

SEQ ID NO: 840 - protein, 485 aa, synthetic construct
MTKKVAIYTRVSTTNQAEEGFSIDEQTDRLTKYAEAMGWQVSDTYTDAGFSGAKLERPAMQRLINDIENKAFDTVLVYKLDRLSRSVRDTLYLVKDVFTKNKIDFISLNERIDTSSAMGSLFLTILSAINEFERENIKERMTMGKLGRAKSGKSMMWTKTAFGYYHNRKTGILEIVPLQATIVEQIFTDYLSGISLTKLRDKLNESGYIGKDIPWSYRTLRQTLDNPVYCGYIKFKDSLFEGMHKPIIPYETYLKVQKELEERQRQTYERNNNPRPFQAKYMLSGMARCGYCGAPLRIVLGRKRKDGSRTMKYHCANRFPRKTKGITVYNDNKKCDSGTYDLSDLENTVIDNLIGFQENNDSLLKIINGNNQPILDTSSLEKQISQIDKKIQKNGDLYLNDFITMDELKDRTDGLQAEKKLLKARISENKFNDSTDVFELVKTQLGSIPINELSYDNKKKIVNNLVSKVDVTADNVDIIFKFQLA

SEQ ID NO: 841 - protein, 485 aa, synthetic construct
MTKKVAIYTRVSTTNQAEEGFSIDEQTDRLTKYAEAMGWQVSDTYTDAGFSGAKLERPAMQRLINDIENKAFDTVLVYKLDRLSRSVRDTLYLVKDVFTKNKIDFISLNESIDTSSAMGSLFLTILSAINEFERENIKERMTMGKLGRAKSGKSMMWTKTAFGYYHNRKTGILDIVPLQATIVEQIFTDYLSGISLTKLRDKLNESGHIGKDIPWSYRTLRQTLDNPVYCGYIKFKGSLFEGMHKPIIPYETYLKVQKELEERQRQTYERNNNPRPFQAKYMLSGMARCGYCGAPLRIVLGHKRKDGGRTMKYHCANRFPRKTKGVTVYNDNKKCDSGTYDLSNLENTVIDNLVGFQENNDSLLKIINGNNLPILDTSSFKKQISQIDKKIQKNSDLYLNDFITMDELKDRTDSLRAEKKLLEAKISESKFNDSTDVFELVKTQLGSIPINELSYDDKKKIVNNLVSKVDVTADNVDIIFKFQLA

SEQ ID NO: 842 - protein, 485 aa, synthetic construct
MTRKVAIYTRVSTTNQAEEGFSIDEQIGRLTKYAEAMGWQVSGTYTDAGFSGAKLERPAMRRLINDIESRAFDTVLVYKLDRLSRSVRDTLHLVKDVFTKNKIDFISLNESIDTSSAMGSLFLTILSAINEFERENIKERMTMGKLGRAKSGKSMMWTRTAFGYYHNRKTGILEIVPLQATIVEQIFTDYLSGISLTKLRDKLNESGHIGKDIPWSYRTLRQTLDNPVYCGYIKFKDSLFEGMHKPIIPYETYLKVQKELEERQQQTYERNNNPRPFQAKYMLSGMARCGYCGAPLKIVLGHKRKDGSRTMKYHCANRFPRKTKGVTVYNDNKKCDSGTYDLSNLENTVIDYLIGLQENDDSLLKIINGNNQPILDTSSFKKRISQIDKKIQKNSDLYLNDFITMDELKDRTDSLQAEKKLLKAKISENKFNDGTDVFELVKAQLGSIPINELSYDDKKKIVNNLVSKVDVTADNVDIIFKFQLA

SEQ ID NO: 843 - protein, 469 aa, synthetic construct
MSYTTPVRAAVYLRISEDRSGEQLGVARQREDCLKLCGQRKWVPVEYLDNDVSASTGKRRPAYEQMLADITAGKIAAVVAWDLDRLHRRPVELEAFMSLADEKRLALATVAGDVDLATPQGRLVARLKGSVAAHETEHKKARQRRAARQKAERGRPNWSKAFGYLPGPNGPEPDPRTAPLVKQAYADILAGASLGDVCRQWNDAGAFTITGRPWSTTALSKFLRKPRNAGLRAYRGARYGPVDRDAIVGKAQWSPLVDEATFWAAQAVLDAPGRAPGRKSVRRHLLTGLAGCGKCGNHLAGSYRTDGRVVYVCKACHGVSILADNIEPILYHIVAERLAMPDAVDLLRREIHDAAEAEAIRLELETLYGELDRLAVERAEGLLTARQVKISTDIVNAKITKLQARQLDQERLRVFDGIPLGTPQVAGMIAELSPDRFRAVLDALAEVVVQPVGKSGRIFNPERVQVNWR

SEQ ID NO: 844 - protein, 485 aa, synthetic construct
MTKKVAIYTRVSTTSQAEEGFSIDEQVDRLTKYAEAMGWQVSDTYTDAGSSGAKLERPAMQRLISDIENKAFDTVLVYKLDRLSRSVRDTLYLVKDVFTKNKIDFISLNESIDTSSAMGSLFLTILSAINEFERENIKERMTMGKLGRAKRGKSMMWTKTAFGYYHNRKTGILEIVPLQATIVEQIFTDYLSGISLTKLRDKLNESGHIGKDIPWSYRTLRQTLDNPVYCGYIKFKDSLFEGMHKPIIPYETYLKVQKELEERQQQTYERNNNPRPFQAKYMLSGMARCGYCGAPLKIVLGHKRKDGSRTMKYHCANRFPRKTKGVTVYNDNKKCDSGTYDLSNLENTVIDNLIGFQENNDSLLKTINGNNQPILDTSSFEEQISQIDKKIQKISNLYLNDFITMDELKGRTDSLQAEKKLLKAKISENRSNDSTDVFELVKTQLGSIPINELSYDNKKKIVNNLVSKVDVTADNVDIIFKFQLA

SEQ ID NO: 845 - protein, 485 aa, synthetic construct
MTKKVAIYTRVSTTNQAEEGFSIDEQIDRLTKYAEAMGWQVSDTYTDAGFSGAKLERPAMQRLINDIEGKAFDTVLVYKLDRLSRSVRDTLHLVKDVFTKNKIDLISLNESIDTSSAMGSLFLTILSAINEFERENIKERMTMGKLGRAKSGKSMMWTKTAFGYYHNRKTGILEIVPLQATIVEQIFTDYLSGISLTRLRDKLNESGHIGKDIPWSYRTLRQTLDNPVYCGYIKFKDSLFEGMHKPIIPYETYLKVQKELEERQQQTYERNNNPRPFQAKYMLSGMARCGYCGAPLKIVLGHKRKDGSRTMKYHCANRFPRKTRGVTVYNDNKKCDSGAYDLSNLENTVIDTLIGFQEDNDSLLKIINGNNQPILDTSSFKKQISQIDKKIQKNSELYLNDFITMDELRDRTDSLQAEKKLLKARISENKFNDSTDAFELVKTQLGSIPINELSYDNKKKIVNNLVSKVDVTADNVDIIFKFQLA

SEQ ID NO: 846 - protein, 485 aa, synthetic construct
MTKKVAIYTRVSTTSQAEEGFSIDEQTDRLTKYAEAMGWQVSDTYTDAGFSGAKLERPAMQRLINDIENKAFDTVLVYKLDRLSRSVRDTLYLVKDVFTKNKIDFISLNESINTSSAMGSLFLTILSAINEFERENIKERMTMGKLGRAKSGKSMMWTKTAFGYYHNRKTGILEIVPLQATIVEQIFTDYLSGISLTKLRDKLNESGHIGKDTPWSYRTLRQTLDNPVYCGYIKFKDSLFEGMHKPIIPYETYLKVQKELEERQQQTYERNNNPRPFQAKYMLSGMARCGYCGAPLRIVLGHKRKDGSRTMKYHCANRFPRKTKGVTVYNDNRKCDSGTYDLSNLENTVIDNLIGFQENNGSLLKIINGNNQPILDTSSFKKQISQIDKKIRKNSDLYLNDFITMDELKERTDSLQAEKKLLKAKISENKFNDGTDVFELVKTQLGSIPINELSYDDKKKIANNLVSKVDVTADNVEIIFKFQLA

SEQ ID NO: 847 - protein, 485 aa, synthetic construct
MTKKVAIYTRVSTINQAEEGFSIDEQIDRLTKYAEAMGWQVSDTYTDAGLSGAKLERPAMQRLINDIENKAFDTVLVYKLDRLSRSVRDTLYLVKDVFTKNKIDFISLNESIDTSSAMGSLFLTILSAINEFERETIKERMTMGKLGRAKSGKSMMWTKTAFGYYHNRKTGILEIVPLQATIVEQIFTDYLSGISLTKLRDKLNESGHIGKDIPWSYRTLRQTLDNPVYCGYIKFKDSLFEGMHKPIIPYETYLKVQKELEERQQQAYERNNNPRPFQAKYMLSGMARCGYCGAPLKIVLGHKRKDGSRTMKYHCANRFPRKTKGVTVYNDNKKCDSGTYDLSNLENTVIDNLIGLQENNDSLLKIINGNNQPILDTSGLKKQISQIDKKIRKNSDLYLNDFITMDELKDRTDSLLAEKKLLEAKISENRFNDSTDVFELVKTQLGSIPINELSYDNKKKIVNNLVSKVDVTAGNVDVIFKFQLA

SEQ ID NO: 848 - protein, 485 aa, synthetic construct
MTKKVAIYTRVSTTNQAEEGFSIDEQIDRLTKYAEAMGWQVSDTYTDAGFSGAKLERPAMQRLINDIEYKAFDTVLVYKLDRLSRSVRDTLYLVKDVFTKNKIDFISLNESIDTSSAMGSLFLTILSAINEFERENIKERMTMGKLGRAKSGKSMMWTKTAFGYYHNRKTGILEIVPLQATIVEQIFTDYLSGISLTKLRDKLNESGHIGKDIPWSYRTLRQTLGNPVYCGYIKFKDSLFEGMHKPIIPYETYLKVQKELEERQQQTYERNNNPRPFQAKYMLSGMARCGYCGAPLKIVLGHKRKDGSRTMKYHCANRFPRKTKGVTVYNDNKKCDSGTYDLSDLENTVIDNLIGFQENNDSLLEIINGNDQPTLDTSSLKKQISQVDRKIQKNSDLYLNDFITMDELKDRTDSLQAEKKLLKAKISENKSNDSTDVFELVKTQLGSIPINELSYDNKKKIVNNLVSKVDVTADNVDIIFKFQLA

SEQ ID NO: 849 - protein, 485 aa, synthetic construct
MTKKVAIYTRVSTTNQAEEGFSIDEQIDRLTKYAEAMGWQVSDTYTDAGFSGAKLERPAMQRLINDIENKAFDTVLVYKLDRLSRSVRDTLYLVKDVFTKNKIDFISLNESINTSSAMGSLFLTILSAINEFERENIKERMTMGKLGRAKSGKSMMWTKTAFGYYHNRKTGILETVPPQATIVEQIFTDYLSGISLTKLRDKLNESGHIGKDIPWSYRTLRQTLDNPVYCGYIKFKGSLFEGMHKPIIPYETYLKVQKELEERQQQAYKRNNNPRPFQAKYMLSGMARCGYCGAPLRIVLGHRRKDGSRTMKYHCANRFPRKTKGVTVYNDNKKCDSGTYDLSNLENTVIDNLIGFQENNDSLLKIINGNNQPILDTSSFKNRISQIDKKIQKNSDLYLNDFITMDELRDRTDSLQAERKLLEAKISENKFNDSTDVFEQVKTQLGSIPINELSYDDKKKIVNNLVSKVDVTADNVDIIFKFQLA

SEQ ID NO: 850 - protein, 485 aa, synthetic construct
MTKKVAIYTRVSTTNQAEEGFSIDEQIDRLTKYAEAMGWQVSDTYTDAGISGAKLERPAMQRLINDIENKAFDTVLVYKLDRLSRSVRDTLYLVKDVFTKNKIDFISLNECIDTSSAMGSLFLTILSAINEFERENIKERMTMGKLGRAKSGKSMMWTKTAFGYYHNYKTGILEIVPLQATIVEQIFTDYLSGISLTKLRDKLNESGHIGKDIPWSYRTLRQTLDNPVYCGYIKFKGSLFEGMHKPIIPYETYLKAQKELEERQQQTYERNNNPRPFQAKYMLSGMARCGYCGAPLRIVLGHKRKDGSRTTKYHCANRFPRKTKGVTVYNDNKKCDSGTYDLSNLENTVIDNLIGFQENNDSLLEIINGNNQPIRDTSSFKEQISQIDKKIQKNSDLYLNDFITMDELKARTDSLQAEKKLLKAKISENKFNDSTDVFELVKTQLGSIPINELSYDNKKKIVNSLVSKVDVTADSVDIIFKFQLA

SEQ ID NO: 851 - protein, 469 aa, synthetic construct
MSYTTPVRAAVYLRISEDRSGEQLGVARQREDCLKLCGQRKWEPVEYLDNDVSASTGKRRPAYEQMLADITAGKIAAVVAWDLDRLHRRPIELEAFMSLADEKRLALATVAGDVDLATPQGRLVARLKGSVAAHETEHKRERQRRAARQKAERGHPNWSKAFGYLPGPNGPEPDPRTAPLVKQAYADILAGASLGDVCRQWNDAGAYTITGRPWTTTALSKFLRKPRNAGLRAYKGARYGPVDRDAIVGKAQWRPLVDEATFWAAQAVLDAPGRAPGRKSVRRHLLTGLAGCGKCGNHLAGSYRTDGRVVYVCKACHGVAILADNIEPILYHIVAERLAMPDAVDLLRREVHDAAEAETIRLELETLYGELDSLAVERAEGLLTARQVKISTDIVNAKITELQVRQQDQERLRVLDGIPLGTPQVAGMIAELSPDRFRAVLDVLAEVVVQPVGKSGRIFNPERVQVNWR

SEQ ID NO: 852 - protein, 485 aa, synthetic construct
MTKKVAIYTRVSTANQAEEGFSIDEQIDRLTKYAEAMGWQVSDTYTDAGLSGAKLERPAMQRLINDIEDKAFDTVLVYKLDRLSRSVRDTLYLVKDVFTKNKIDFISLNESIDTSSAMGSLFLTILSAINEFERENIKERMTMGKLGRAKSGKSMMWTKTAFGYYHNRKTGILEIVPLQATIVEQIFTDYLSGISLTKLRDKLNEGGHIGKDIPWSYRTLRQTLGNPVYCGYIKFKDSLFEGMHRPIIPYETYLKVQKELEERQQQTYERNNNPRPFQAKYMLSGMARCGYCGAPLRIVLGHKRKDGSRTMKYHCANRIPRKTKGVTVYNDNKKCDSGTYDLSNLENTVIDNLIGFQENSDSLLRIINGNNQPVLDTSSLKKQISQIDKKIQKNSDLYLNDFITMDELKDRTDSLQAEKKLLKAKISEDKLNGSTDVFELVKTQLGSIPINELSYDNKKKIVNNLVSKVDVTADNVDIIFKFQLA

SEQ ID NO: 853 - protein, 485 aa, synthetic construct
MTKKVAIYTRVSTTNQAEEGFSIDEQIDRLTKYAEAMGWQVSDTYTDAGFSGAKLERPAMQRLINDIENKAFDTVLVYKLDRLSRSVRDTLYLVKDVFTKNKIDFISLNESIDTSSAMGSLFLTILSAINEFERENIKERMTMGKLGRAKSGKSMMWTKTAFGYYHNRKTGTLEIVPLQATIVEQIFTDYLSGISLTKLRDKLNESGHIGKDIPWSYRTLRQTLDNPVYCGYIKFKDSLFEGMHKPIIPYETYLKVQKELEERQQQTYERNNNPRPFQAKYMLSGMARCGYCGAPLKIVLGRKRKDGSRTMKYHCANRFPRKTKGVTVYNDNKRCDSGTYDLSSLENTVIDSLIGFQESNDSLLKIINGNNQPILDTSSFKKQISQIDKKIQKNSDLYLNDFITMDELKDRTDSLQAEKKLLEAKISENKFNDSTDVFELVKTQLGSIPINELSYDNKKKIVNNLVSKVDVTADNVDIIFKFQLA

SEQ ID NO: 854 - protein, 486 aa, synthetic construct
MTRKVAIYTRVSTINQAEEGFSIDEQIDRLTKYAGAMGWQVSGTYTDAGFSGAKLERPAMQRLINDIENRAFDTVLVYKLDRLSRSVRDTLYLVKDVFTKNKIDFISLSESIDTSSAMGSLFLTILSAINEFERENIKERMTMGKLGRAKSGKSMMWTKTAFGYYHNRKTGILEIVPLQATIVEQIFTDYLSGISLTKLRDKLNESGHIGKDIPWSYRTLRQTLDNPVYCGYIRFKDSLFEGMHKPIIPYETYLKVQKELEVRQQQTYERNNNPRPFQAKYMLSGMARCGYCGAPLKIVLGHKRKDGSRSMKYHCANRLPRKTKGVTVYNGSKKCDSGTYDLSNLENTVIDSLIGFQGNNDSLLEAINGNNQPILDTSSFKEQISQIDKKIQKNSDLYLNDFITMDELKDRTDSLQAEKKLLKAKISENKFNDSTDVFELVKTQLGSIPINELSYDNKKKIVNYLVSKVDVTANNVDIIFKFQLAQ

SEQ ID NO: 855 - protein, 485 aa, synthetic construct
MTKKVAIYTRVSTTNQAEEGFSIDEQVDRLTKYAEAMGWQVSDTYTDAGFSGAKLERPAMQRLINDIENKAFDTVLVYKLDRLSRSVRDTLYLVKEVFTKNKIDFISLNESIDTSSAMGSLFLTILSAINEFERENIKERMTMGKLGRAKSGKSMMWTKTAFGYYHNHKTGILEIVPLQATIVEQIFTDYLSGISLTKLRDKLNESGHIGKDIPWSYRTLRQTLDNPVYCGYIKFKGSLFEGMHKPIIPYETYLKVQKELEERQQQTYERNNNPRPFQAKYMLSGMARCGYCGAPLKIVLGHKRKDGSRTMKYHCANRFPRKTKGVTVYNDNKKCDSGTYNLSNLENTVIDNLIGFQENNDSLLKFINGDNQPILDTGSFEKQISQIDKKIQRNSDLYLNDFITMDELKDRTDSLQAEKRLLKAKISENKFNDSTDVFELVKTQLGSIPINELSYDNKKKIVNNLVSKVDVTADNVDIIFKFQLA

SEQ ID NO: 856 - protein, 485 aa, synthetic construct
MTKKVAIYTRVSTTNQAEEGFSIDEQVDRLTKYAEAMGWQVSDTYTDAGSSGAKLERPAMQRLINDIENKAFDTVLVYKLDRLSRSVRDTLYLVKDVFTKNKIDFISLNESIDTSSAMGSLFLTILSAINEFERENIKERMTMGKLGRAKSGKSMMWTKTAFGYYHNRKTGILEIVPLQATIVEQIFTDYLSGISLTRLRDKLNESGHIGKDIPWSYRTLRQTLDNPVYCGYIKFKDSLFEGMHKPIIPYETYLKVQKELEERQQQTYERNNNPRPFQAKYILSGMARCGYCGAPLRIVLGHKRKDGSRTMKYHCANRFPRKTKGVTVYNDNKRCDSGTYDLSSLENIVIDNLIGFQENNDSLLKIINGNNRPILDTSSFKKQISQIDKKIQKNSDLYLNDFITMDELKDRTDSLQAEKKLLKAKISENKFNDSTDVFELVRTQLGSIPINELSYDSKKKIVNNLVSKVDVTANNVDIIFKFQLA

SEQ ID NO: 857 - protein, 452 aa, synthetic construct
MKAAIYIRVSTREQVENYSIQAQTEKLTALCRSKDWDVYDIFIDGGYSGSNMNRPALNEMLSKLHEIDAVVVYRLDRLSRSQRDTITLIEEYFLKNNVEFVSLSETLDTSSPFGRAMIGILSVFAQLERETIRDRMVMGKIKRIEAGLPLTTARGRTFGYDVIDTKLYVNEEEAKQLQLIYDIFEEEQSITFLQKRLKKLGFKVRAYNRYNNWLTNDLYCGYVSYKDKVHVKGIHEPIISEEQFYRVQEIFTRMGKNPNMNRESASLLNNLVVCSKCGLGFVHRRKDATSRDKKYHYRYYSCKTYKHIHELEKCGNKTWRADKLEELIINRVNDYSLASRNVDKEDELDSLNEKLKIEHAKKKRLFDLYINGSYEVSELDSMMNDIDAQINYYESQIEANKELKKNKKIQENLADLATVDFDSLEFREKQLYLKSLINKIYIDGEQVTIEWL

SEQ ID NO: 858 - protein, 485 aa, synthetic construct
MTKKVAIYTRVSTTNQAEEGFSIDEQTDRLTKYAEAMGWQVSDTYTDAGFSGAKLERPAMRRLINDIENKAFDTVLVYKLDRLSRSVRDTLHLVKDVFTKNKIDFISLNESIDTSSAMGSLFLTILSAINEFERENIKERMTMGKLGRARSGKSMMWTKTAFGYYHNRKTGILEIVPLQATIVEQIFTDYLSGISLTKLRDKLNESGHIGKDIPWSYRTLRQTLDNPVYCGYIKFKGSLFEGMHKPIIPYETYLKVQKELEERQQQTYERNNNPRPFQAKYMLSGMARCGYCGAPLRIVLGHERKDGSRTMKYHCANRFPRKTKGVTVYNDNKKCDSGTYDLRSLENTVIDNLTGFQENNDSLLKIINGNNQPILDTSSLKKQISQIDKKIQKNSDLYLNDFITMDELKDRTDSLQAEKKLLEAKIGENKFNDSIDVFELVKTQLGSIPINELSYDNKKKIVNNLVSKVDVTADNVDIIFKFQLA

SEQ ID NO: 859 - protein, 452 aa, synthetic construct
MKAAIYIRVSTREQVENYSIQAQTEKLTALCRSKGWDVYDIFVDGGYSGSNMNRPALNEMLSKLHEIDAVVVYRLDRLSRSQRDTITLIEEYFLKNNVEFVSLSETLDTSSPFGRAMIGILSVFAQLERETIRDRMVMGKIKRIEAGLPLTTAKGRTFGYDVIDTKLYINEEEAKQLQLIYDIFEEEQSITFLQKRLKELGFKVRTYNRYNNWLTNDLYCGYVSYKDKVRVKGIHEPIISEEQFYRVREIFTRMGKNPNMNRGSASLLNNLVVCSKCGLGFVHRRKDIVSRGKEYHYRYYSCKTYKHIHELEKCGNKIWRADKLEELIINRVNDYSLASRNVDKEDELDSLNEKLKIGHAKKRRLFDLYINGSYEVSELDSMMNDIDAQINYYESQIEANEELRKNKKIQENLAYLATVDFDSLEFREKQLYLKSLINKIYIDGEQVTIEWL

SEQ ID NO: 860 - protein, 485 aa, synthetic construct
MTKKVAIYTRVSTTSQAEEGFSIDEQIDRLTKYAEAMGWQVSDTYTDAGLSGAKLARPAMQRLINDIENKAFDTVLVYKLDRLSRSVRDTLYLVKDVFTKNKIDFISLNESIDTSSAMGSLFLTILSAINEFERENIKERMTMGKLGRAKSGKSMMWTKTAFGYYHNRKTGILEVVPLQATIVEQIFTDYLSGISLTKLRDKLNESGHIGKDIPWSYRTLRQTLDNPVYCGYIKFKGSLFEGMHKPIIPYETYLKVQKELEERQQQAYKRNNNPRPFQAKYMLSGMARCGYCGAPLRIVPGRKRKDGSRTMKYHCANRFPRKTKGVTVYNDNKKCGSGTYDLSDLENTVIDNLIGFQENNDSLLKIINGNNQPILDTSSFKKQICQIDKKIRRNSDLYLNDFITLDELKDRTDSLQAEKKLLKAKISENKFNDSTDVFELVKTQLGSIPINELSYDNKKKIVNNLVSKVDVTADNVEIIFKFQLA

SEQ ID NO: 861 - protein, 452 aa, synthetic construct
MKAAIYIRVSTQEQVGNYSIQAQTEKLTALCRSKDWDVYDVFVDGGYSGSNMNRPALNEMLSKLHEIDAVVVYRLDRLSRSQRDTTTLIEEYFLKNNVEFVSLSETLDTSSPFGRAMIGILSVFAQLERETIRDRMVMGKIKRIEAGLPLTTAKGRTFGYDVIDTKLYINEEEAKQLRLIYDIFEEERSITSLQKRLKRLGFKVRTYNRYSKWLTNDLYCGYVSYKDKVHVKGIHEPIISEEQFYRVQEIFTRMGKNPNMNRDSASLLNNLVVCGKCGLGFVHRRKDTMCRGKKYHYRYYSCKTYKHTHVLEKCGNKTWRADKLEELIINRVNNYSFASRNADKEDELDSLNEKLKIEHARKKRLFDLYINGSYEVSELDSMMSDIDAQINYYESQIEASEELKKNKKIQENLADLATVDFDSLEFRGKQLYLKSLINKIYIDGEQVTIDWL

SEQ ID NO: 862 - protein, 485 aa, synthetic construct
MTRKVAIYTRVSTTNQAEEGFSIDEQIDRLTKYAEAMGWQVSDTYTDAGFSGAKLGRPAMQRLINDIENKAFDTVLVYKLDRLSRSVRDTLYLVKDVFTKNKIDFISLNESIDTSSAMGSLFLTILSAINEFERENIKERMTMGKLGRAKSGKSMMWTKTAFGYYHNRKTGILEVVPLQATIVEQIFTDYLSGISLTKLRDKLNESGHIGKDIPWSYRTLRQTLDNPVYCGYIKFKDSLYEGMHKPIIPYETYLKVQKELEERQQQTYERNNNPRPFQAKYMLSGMARCGYCGAPLKIVLGHKRKDGSRTMKYHCANRFPRKTKGVTVYNDNKKCDSGIYDLCNLENTVIDNLIGFQENDDSLLKIINGNNQPILDTSSLRKQISQIDKKIQKNGDLYLNDFISMDELKDRTDSLQAEKKLLKAKISENKFNDSTDVFELVKAQLGSIPINELSYDNKKRIVNNLVSKVDVTADNVDIIFKFQLA

SEQ ID NO: 863 - protein, 485 aa, synthetic construct
MTKKVAIYTRVSTANQAEEGFSVDEQIDRLTKYAEAMGWQVSDTYTDAGISGAKLERPAMQRLINDIENKAFDTVLVYKLDRLSRSVRDTLYLVKDVFTKNKIDFISLNESIDTSSAMGSLFLTILSAINEFERENIKERMTMGKLGRAKSGKSMMWTKTAFGYYHNRKTGILEIVPLQATIVEQIFTDYLSGISLTRLRDKLNESGHIGKDIPWSYRTLRQTLDNPVYCGYIKFKDSLFEGMHKPIIPYETYLKVQKELEVRQQQTYERNNNPRPFQAKYMLSGMARCGYCGAPLRVVLGHKRKDGSRTMKYHCANRFPRKTKGVTVYNDNKKCGSGTYDLSSLENAVIDNLIGFQENNDSLLKIINGNNQPILDTSSFKEQISQIDKKIQKNSDLYLNDFITMDELKARTDSLQAEKKLLKAKISENKFNDSTHVFELVKTQLGSIPINELSYDNKKKIVNNLVSKVDVTADNVDIIFKFQLA

SEQ ID NO: 864 - protein, 469 aa, synthetic construct
MSYTTPVRAAVYLRISEDRSGEQLGVARQREDCLKLCSQRKWVPVEYLDNDVSASTGKRRPAYEQMLADITAGKIAAVVAWDLDRLHRRPIELEAFMSLADEKRLALATVAGDVDLATPQGRLVARLKGSVAAHETEHKKARQRRAARQKAERGHPNWSKAFGYLPGPNGPEPDPRTAPLVKQAYADILAGASLGDVCRQWNGAGAFTITGRPWTTTTLSKFLRKPRNAGLRAYKGARYGPVDRDAIVGKAQWSPLVDEATFWAAQAVLDAPGRAPGRKSVRRHLLTGLAGCGKCGNHLAGSYRTDGRVVYVCKACHGVAILADNIVPILYHIVAERLATSDAVDLLRREVHDAAEAETIRLELETLYGELDRLAVERAEGLLTARQVKISTDIVNAKITKLQARQQDQERLRVLDGIPLGTPQVAGKIAELSPDRFRAVLDVLAEVVVQPVGKSGRIFNPERVQVNWR

SEQ ID NO: 865 - protein, 485 aa, synthetic construct
MTKKVAIYTRVSTTNQAEEGFSIDEQIDRLTKYAEAMGWQVSGTYTDAGLSGAKLERPAMQRLINDIENKAFDTVLVYKLDRLSRSVRDTLYLVKDVFTKNKIDFISLNESIDTSSAMGGLFLTILSAINEFERENIKERMTMGKLGRAKSGKSMMWTKTAFGYYHNRKTGILEIVPLQATIVKQIFTDYLSGISLTKLRDKLNESGHIGKDIPWSYRTLRQTLDNPVYCGYIKFKDSLFEGMHKPIIPYETYLKVQKELEERQQQTCVRNNNPRPFQAKYMLSGMARCGYCGAPLRIVLGHKRKDGSRTTKYHCANRFPRKTKGVTVYNDNNKCDSGTYDLSNLENTVIDNLIGFQENNDSLLKIINGSNQPILDTSSFKEQISQIDKKIQKNSDLYLNDFITMDELKDRTDSLQAEKKLLKAKISENKFNDSTDVFELVKTQLGSIPINELSYDNKKKIVNNLVSKVDVTADNVDIIFKFQLA

SEQ ID NO: 866 - protein, 452 aa, synthetic construct
MKAAIYIRVSTQEQVENYSIQAQTEKLTALCRSKGWDVYDIFIDGGYSGSNMNRPALNEMLSKLHEIDAVVVYRLDRLSRSQRDTITLVEEYFLKNNVEFVSLSETLDTSSPFGRAMIGILSVFAQLERETIRDRMVMGKIKRIEAGLPLTTAKGRTFGYDVIDTKLYINEEEAKQLQLIYDIFEEEQSITFLQKRLKKLGFKVRTYNRYNSWLTNDLYCGYVSYKDKVHVKGIHEPIISEEQFYRVQEIFTRMGKNPNMNRDSASLLSNLVVCSKCGLGFVHRSKDTMSRGKKYHYRYYSCKTYKHTHELEKCGNKTWRADKLEELIINRVNNYSFASRNVDKEDELDSLNEKLKIEHAKKKRLFDLYINGSCEVSELDSMMNNVDAQINYYEGQIEANEEQKKTKKIQENLADLATVDFDSLEFREKQQYLKSLINKIYIDGEQVTIEWL

SEQ ID NO: 867 - protein, 469 aa, synthetic construct
MSYTTPVRAAVYLRISEDRSGEQLGVARQREDCLKLCDQRKWVPVEYLDNDVSASTGKRRPAYEQMLADITAGKIAAVVAWDLDRLHRRPIELEAFMSLADEKRLALATVAGDVDLATPQGRLVARLKGSVAAHETEHKKARQRRAARQKAERGYPNWSKAFGYLPGPNGPEPDPRTAPLVKQAYADILAGASLGDVCRRWNGAGAFTITGRPWTTTTLSKFLRKPRNAGLRAYKGARYGPVDRDAIVGKAQWSPLVDEATFWAAQAVLDAPGRAPGRKSVRRHLLTGLAGCGKCGNHLAGSYRSDGRVVYVCKACHGVAILADYIEPILYHIVAERLAMPDAVDLLRREIHDAAEAETIRLELETLYGELDRLAVERAEGLLTARQVKISTDIVNAKITKLQARQQDQERLRVLDGIPLGTPQVAGMIAELSPDRFRAVLDVLAEVVVQPVGKSGRIFNPERVQVDWR

SEQ ID NO: 868 - protein, 452 aa, synthetic construct
MKAAIYIRVSTREQVENYSIQAQTEKLTALCRSKDWDVYDIFIDGGYSGSNMNRPALNEMLSKLHEIDAVVVYRLDRLSRSQRDTITLIEEYFLKNNVEFVSLSETLDTSSPFGRAMIGILSVFAQLERETIRDRMVMGKIKRIEAGLPLTTAKGRTFGYDVIDTKLYINEEEARQLRLIYDIFEEEQSITFLQKRLKKLGFKVRTYNRYNNWLTNDLYCGYVSYKDKVRVKGIHEPIISEEQFHRVQEIFTRMGKNPNMNRGSASLLNNLVVCGKCGLGFVHRRKDAMSRDKKYHYRYYSCKTYKHIHELEKCGNKIWRADKLEELIINRVNNYSLASRNVDKEDELDGLNEKLKIEHAKKKRLFDLYISGSYEVSELDSMMNDIDAQINYYESRIEANEELKKNKKIQGNLAHLATVDFDSLEFREKQLYLKSLINKIYIDGEQVTIEWL

SEQ ID NO: 869 - protein, 469 aa, synthetic construct
MSYITPVRAAVYLRISEDRSGEQLGVARQREDCLKLCGQRKWVPVEYLDNDVSASTGKRRPAYEQMLADITAGKIAAVVAWDLDRLHRRPVELEAFMSLADEKRLALATVAGDVDLATPQGRLVARLKASVAAHETEHKKARQRRAARQKAEHGHPNWSKAFGYLPGPNGPEPDPRTAPLVKQAYADILAGASLGDVCRQWNDAGAFTITGRPWTTTTLSKFLRKPRNAGLRAYKGARYGPVDRDAIVGKAQWSPLVDEATFWAAQAVLDAPGRAPGRKSVRRHLLTGLAGCGKCGSHLAGSYRTDGRVVYVCKACHGVVILADNIEPILYHIVAERLAMPDAVDLLRREIHDAAEAETIRLELETLYGELDRLAVERAEGLLTARQVKISTDVVNAKITKLQARQLDQERLRVFDGIPLGTPQVAGVIAELSPDRFRAVLDVLAEVVVQPVGKSGRIFNPERVQVNWR

SEQ ID NO: 870 - protein, 452 aa, synthetic construct
MKAAIYIRVSTQEQVGNYSIQAQTERLTALCRSKGWDVYDIFIDGGYSGSNMNRPALNEMLSKLHEIDAVVVYRLDRLSRSQRDTTTLIEEYFLKNNVEFVSLSETLDTSSPFGRAMIGILSVFAQLERETIRDRMVMGKIKRIEAGLPLTTAKGRTFGYDVIDTKLYINEEEAKQLQLIYDIFEEEQSITFLQKRLKKLGFKVRTYNRYNSWLTNDLYCGYVSYKDKVHVKGIHEPIISEEQFYRVQEIFTRMGKNPNMNRDSASLLNNLVVCSKCGLGFVHRSKDTMCRGKKYHYRYYSCKTYKHTYVLEKCGNKTWRADKLEELIINRVNNYSFASRNVDKEDELDSLNEKLRIEHAKKKRLFDLYINGSYEMSELDSMMNDINAQINYYESQIEANEELKENKKTQENLAELATVDFDSLEFREKQLYLKSLINKIYIDGEQVTIEWL

SEQ ID NO: 871 - protein, 452 aa, synthetic construct
MKAAIYIRVSTREQVENYSIQAQTEKLTALCRSKGWDVYDIFIDGGYSGSNMNRPALNEMLSKLHEIDAVVVYRLDRLSRSQRDTITLIEEYFLKNNVEFVSLSETLDTSSPFGRAMIGILSVFAQLERETIRDRMVMGKIKRIEAGLPLTTAKGRTFGYDVIDTKLYINEEEAKQLQLIYDIFEEEQSITFLQKRLKKLGFKVRTYNRYNNWLTNDLYCGYVSYKDKVHVKGIHEPIISEEQFYRVQEIFTRMGKNPNMNRDSASLLNNLVVCSKCGLGFVHRRKDIMSHGKKYHYRYYSCKTYKHIHELEKCGNKIWRADKLEELIINRVNNYSFASRNADKEDELNSLSEKLKMEHGKKKRLFDLYINGSYEVSELDSMMSDIDAQISYYESQIEANGELKRNKKIQENLAGLATVDFDSLEFREKQLYLKSLINKIYIDGEQVTIEWL

SEQ ID NO: 872 - protein, 485 aa, synthetic construct
MTKKVAIYTRVSTTNQAEEGFSIDEQVDRLTKYAEAMGWQVSDTYTDAGLSGAKLERPAMQRMINDIENKAFDTVLVYKLDRLSRSVRDTLYLVKDVFTKNKIDFISLSESIDTSSAMGSLFLTILSAINEFERENIKERMTMGKLGRAKSGKSMMWTKTAFGYYHNRKTGILEIAPLQATIVEQIFTDYLSGISLTKLRDKLNESGHIGKDIPWSYRALRQTLDNPVYCGYIKFKDSLFEGMHKPIIPYETYLKVQKELEERQQQAYERNNNPRPFQAKYMLSGMARCGYCGAPLKIVLGHKRKDGSRTMKYHCANRFPRKTKGVTVYNDNKKCDSGTYDLSNLENTVIDSLVGFQENNGGLLKIINGNNRPILDTSSFKKQINQIDKKIQKNSDLYLNDFITMDELKDRTDSLQAEKKLLKAKISENKFNDSTDVFELVKTQLGSIPISELSYDDKKKIVNNLVSKVDVTADNVDIIFKFQLP

SEQ ID NO: 873 - protein, 452 aa, synthetic construct
MKAAIYIRVSTREQVENYSIQAQTEKLTALCRSKDWDVYDVFIDGGYSGSNMNRPALNEMLSKLHEIDAVVVYRLDRLSRSQRDTITLVEEYFLKNNVEFVSLSETLDTSSPFGRAMIGILSVFAQLERETIRDRMVMGKIKRIEAGLPLTTAKGRTFGYDVIDAKLYINEEEAKQLQLIYDIFEEEQSITFLQKRLKKLGFKVHTYNRYNNWLTNDLYCGYVSYKDKVRVKGIHEPIISEEQFYRVQEIFARMGKNPDMNRDSASLLSNLVVCSKCGLGFVHRRKDAVSRNKKYHYRYYSCKTYKHIHELEKCGNKIWRADKLEELIINRVNNHSIASRNADKEDELDSLNEKLKIEHAKKKRLFELYINGSYEVSELDSMMNDIDAQINYYESQIEADKELKKNKKIQENLADLATVDFDSLEFREKQLYLKSLISKIYIDGEQVTIEWL

SEQ ID NO: 874 - protein, 452 aa, synthetic construct
MKAAIYIRVSTREQVENYSIQAQTEKLTALCRSKGWDVYDIFIDGGYSGSNMNRPALNEMLSKLHEIDAVVVYRLDRLSRSQRDTITLIEEYFLKNNVEFVSLSETLDTSSPFGRAMIGILSVFAQLERETIRDRMVMGKIKRIEAGLPLTTAKGRTFGYDVIDTKLYINEEEARQLQLIYDIFEEEQSITFLQKRLKKLGFKVRTYNRYNNWLTNDLYCGYVSYKDKVHVKGIHEPIISEEQFYRVQEIFTRMGKNPNMNRDCASLLNNLVVCSKCGLGFVHRRKDAMSRDKKYHYRYYSCKTYKHIHELEKCGNKIWRADKLEELIINRVNNYSIASRNADKEDELDSLNEKLKIEHAKKKRLFELYINGSYEVSELDSMMNDIDARINYYESQIEANKELKKNKKIREDLADLATVDFDSLEFREKQLYLKSLINKIYIDGEQVTIEWL

SEQ ID NO: 875 - protein, 452 aa, synthetic construct
MKAAIYIRVSTREQVENYSIQAQTEKLTALCRSKDWDVYDIFIDGGYSGSNMNRPALNEMLSKLHEIDAVVVYRLDRLSRSQRDTITLIEEYFLKNNVEFVSLSETLDTSSPFGRAMIGILSVFAQLERETIRDRMMMGKIKRIEAGLPLTTAKGRTFGYDVIDTKLHINEEEAKQLRLIYDIFEEEQSITFLQKRLKKLGFKVRTYNRYNNWLTNDLYCGYVSYKDKVHVKGIHEPIISEEQFHRVQEIFTRMGKNPNMNRESASLLNNLVVCGKCGLGFVHRRKDAMSRDKKYHYRYYSCKTYKHIHELEKCGNKIWRADKLEELIINRVNNYSLASRNTDKEDELDSLNEKLKIEHAKKKRLFELYINGSYEVSELDSMMSDIDAQINYYEGQIEANEELKKNKKIQENLAYLATADFDSLEFREKQLYLKSLINKIYIDGEQVTIEWL

SEQ ID NO: 876 - protein, 485 aa, synthetic construct
MTKKVAIYTRVSTTNQAEEGFSIDEQTDRLTKYAEAMGWQVSDTYTDAGISGAKLERPAMQRLINDIENKAFDTVLVYKLDRLSRSVRDTLYLVKDVFTKNKIDFISLNESIDTSSAMGSLFLTILSAINEFERENIKERMTMGKLGRAKSGKSMMWTKTAFGYHHNRETGILEIVPLQATIVEQIFTDYLSGISLTKLRDKLNESGHIGKDIPWSYRTLRQTLDNPVYCGYIKFKDSLFEGMHKPIIPYETYLKVQKELEERQQQTYERNNNPRPFQAKYMLSGMARCGYCGAPLRIVLGHKRKDGSRTMKYHCANRSPRKTKGVTVYNDNKKCDSGTYDLSNLENTVIDNLIGFQKNNDSLLKIINGDDQPILDTSSLKKQISQIDKKIQKNSDLYLNDFITMDELKDRTDSLQAEKKLLKAKISENKFNDSTDVFELVKTQLGSIPINELSYENKKKIVNNLVSKVDVTVDNVDIIFKFQLA

SEQ ID NO: 877 - protein, 469 aa, synthetic construct
MSYTTPVRAAVYLRISEDRSGEQLGVARQREDCLKLCGQRKWVPVEYLDNDVSASTGKRRPAYEQMLADITAGKIAAVVAWDLDRLHRRPIELEAFMSLADEKRLALATVAGDVDLATPQGRLVARLKGSVAAHETEHKKARQRRAARQKAELGHPNWSKAFGYLPGPNGPEPDPRTAPLVKQAYADILAGASLGDVCRRWNDAGAFTITGRPWTTTALSKFLRKPRNAGLRAYKGARYGPVDRDAIVGKAQWSPLVDEATFWATQAVLDAPGRAPGRKSVRRHLLTGLAGCGKCGNHLAGSYRTDGRVVYVCKACHGVAILADNIEPILYHIVAERLAMPDAVDLLRREIHDATEAETIRLELETLCGELDRLAVERAEGLLTARQVKISTDIVNAKITKLQARQLDQERLRVFDGIPLGTPQVVGMIAELSPDRFRAVLDVLAEVVVQPVGKSGGIFSPERVQVNWR

SEQ ID NO: 878 - protein, 485 aa, synthetic construct
MTKKVAIYTRVSTANQAEEGFSIDEQIDRLTKYAEAMGWQVSDTYTDAGLSGAKLERPAMQRLINDIENKAFDTVLVYKLDRLSRSVRDTLYLVKDVFTKNKIDFISLNESIDTSSAMGSLFLTILSAINEFERENIKERMSMGKLGRAKSGKSMMWTKTAFGYYHNRKTGILEIVPLQATIVEQIFTDYLSGISLTKLRDKLNESGHIGKDIPWSYRTLRQTLDNPVYCGYIKFKDSLFEGMHKPIIPYETYLKAQKELEERQQQTYERNNNPRPFQAKYMLSGMARCGYCGAPLRIVLGHKRKDGSRTMKYHCANRFPRKTKGVTVYNDIKKCDSGTYDLSNLENTVIDNLIGFQENNDSLLKIINGNNQPILDTSSFKRRISQIDKKIQKNSELYLNDFITMDELKDRTDSLQAEKRLLKAKISENKFSDSTDVFGLVKTQLGSIPINELSYDDKKKIVNNLVSKVDVTADNVDIIFKFQLA

SEQ ID NO: 879 - protein, 485 aa, synthetic construct
MTKKVAIYTRVSTTNQAEEGFSIDEQIDRLTKYAEAMGWQVSDTYTDAGFSGAKLERPAMQRLINDIENKAFDTVLVYKLDRLSRSVRDTLYLVKDVFTKNKIDFISLNESINTSSAMGSLFLTILSAINEFERENIKERMTMGRLGRAKSGKSMMWTKTAFGYYHNRKTGILEIVPLQATIVEQIFTDYLSGISLTKLRDKLNESGHIGKDIPWSYRTLRQTLDNPVYCGYIKFKGSLFEGMHKPIIPYETYLKVQKELEERQQQTYERNNNPRPFQAKYMLSGMARCGYCGAPLKIVLGHKRKDGSRTMKYHCANRFPRKTKGITVYNDNKKCDSGTYDLSNLENTVIDNLIGFQENNDSLLKIINGNNQPILDTSSFKKQISQIDKKIQKNSDLYLNDLITMDELKGRIDSLQAEKKLLKAKISENKFNDSTDVFELVKTQLGSIPINELSYDNKKKIVNNLVSKVDVTADNVDIIFKFQLA

SEQ ID NO: 880 - protein, 485 aa, synthetic construct
MTKKVAIYTRVSTTNQAEEGFSIDEQIDRLTKYAEAMGWQVSDTYTDAGFSGAKLERPAMQRLINDIVNKAFDTVLVYKLDRLSRSVRDTLYLVKDVFTKNKIDFISLNESIDTSSAMGSLFLTILSAINEFERENIKERMTMGKLGRAKSGKSMMWTKTAFGYYHNRKTGILEIVPLQATIVEQIFTDYLSGISLTKLRDKLNESGHIGKDIPWSYRTLRQTLDNPVYCGYIKFKGSLFEGMHKPIIPYETYLKVQKELEERQQQTYERNNNPRPFQAKYMLSGMARCGYCGAPLRIVLGHKRKNGSRTMKYHCANRFPRKTKGVTVYNDNKRCDSGTYDLSNLENTVTDSLIGFQENNDSLLRIIGGSNQPILDTSSFKKQISQIDKKIQKNSDLYLNDFITMDELKDRTDSLQAEKKLLKAKISENKFNDSTDVFELVKTQLGSIPINELSYDDKKKIVNNLVSKVDVTADNVDIIFKFQLA

SEQ ID NO: 881 - protein, 485 aa, synthetic construct
MTKKVAIYTRVSTTNQAEEGFSIDEQVDRLTKYAEAMGWQVSDTYTDAGLSGAKLERPAMQRLINDIENKAFDTVLVYKLDRLSRSVRDTLYLVKDVFTKNKIDFISLNESIDTSSAMGSLFLTILSAINEFERENIKERMTMGKLGRAKSGKSMMWTKTAFGYYHNRKTGILEIVPLQATIVEQIFTDYLSGMSLTKLRDKLNESGHVGKDIPWSYRTLRQTLDNPVYCGYIKFKDSLFEGMHKPIIPYETYLKVQKELEERQQQTYERNNNPRPFQAKYMLSGVVRCGYCGAPLRIVLGHKRKDGSRTMKYHCANRFPRKTKGVTVYNDNKKCDSGTYDLSNLENTVIDNLSGFQENNDSLLKIINGNNQPILDTSSLKKRISLIDKKIQKNSDLYLNDFITMDELKDRTDSLQAEKKLLKAKISENKFNDNTDVFGLVKAQLGSIPINELSYDNKKKIVNNLVSKVDVTADNVDIIFKFQLA

SEQ ID NO: 882 - protein, 469 aa, synthetic construct
MSNTTPVRAAVYLRISEDRSGEQLGVARQREDCLKLCGQRKWVPVEYLDNDVSASTGKRRPAYEQMLADITAGKIAAVVAWDLDRLHRRPIELEAFMSLADERRLALATVAGDVDLATPQGRLVARLKGSVAAHETEHKRARQCRAARQKAERGHPNWSKAFGYLPGPNGPEPDPRTAPLVKQAYADILAGASLGDVCRQWNDAGAFTITGRPWTTTTLSKFLRKPRNAGLRAYKGARYGPVDRDAIVGKARWSPLVDEATFWAAQAVLDASGRAPGRKSVRRHLLTGLAGCGKCGNHLAGSYRTDGQVVYVCKACHGVSILAVNIVPILYQVVAERLAMPGAVDLLRREIHDAAEAETIRLELETLYGELDRLAVERAEGLLTARQVKISTDIVNAKITKLQARQLDQERLRVLDGIPLGTPQVAGMIAELSPDRFRAVLDVLAKVVVQPVGKRGRIFNPERVQVNWR

SEQ ID NO: 883 - protein, 485 aa, synthetic construct
MTKKVAIYTRVSTTNQAEEGFSIDEQIDRLTKYAEAMGWQVSDTYTDAGFSGAKLERPAMQRLINDIENKAFDTVLVYKLDRLSRSVRDTLYLVKDVFTKNKIDFISLNESIDTSSAMGSLFLTILSAINEFERENIKERMTMGKLGRAKSGKSMMWTKTAFGYYHNRKTGILEIVPRQATIVEQIFTDYLSGISLTKLRDKLNESGHIGKDIPWSYRTLRQTLDNPVYCGCIKFKDSLFEGMHKPIIPYETYLKVQKELEERQQQTYERNNNPRPFQAKYMLSGMARCGYCGAPLRIVLGHKRKDGSRTMKYHCANRFPRKTKGVTVYNDNKKCDSGTYDLSNLENTVIDYLIGFQENNDSLLKIINGNSQPILDTSSFKKQISQIDKKIQKNSDLYLNDFITMDELKVRTDSLQAEKKLLKAKISENKFNDSTDVFELVKTQLGSIPINELSYDNKKKIVNNLVSKVDVTADNVDIIFKFQLA

SEQ ID NO: 884 - protein, 469 aa, synthetic construct
MSYTTPVRAAVYLRISEDRSGEQLGVARQREDCLKLCDQRKWVPVEYLDNDVSASTGKRRPAYEQMLADITAGKIAAVVAWDLDRLHRRPIELEAFMSLADEKRLALATVAGDVDLATPQGRLVARLKGSVAAHETEHKKARQRRAARQKAERGHPNWSKAFGYLPGPNGPEPDPRTAPLVKQAYADILAGASLGDVCRQWNDAGASTITGRPWTTTTLSKFLRKPRNAGLRAYKGARYGPVDRDAIVGKAQWSPLVDEATFWAAQAVLDAPGRAPGRKSVRRHLLTGLAGCGKCGNHLAGTYRADGRVVYVCKACHGVAILADNIEPILYHIVAERLATPDAADLLRREIHDAAEAEAIRLELETLYGELDHLAVERAEGLLTARQVKISTDIVNAKITKLQARQLDQDRLRVFDGIPLGTPQVAGAIAGLSPDRFRAVLDVLAEVVVQPVGKSGRIFNPERVQVNWR

SEQ ID NO: 885 - protein, 452 aa, synthetic construct
MKAAIYIRVSTREQVENYSIQAQTEKLTALCRSKDWDVYDIFVDGGYSGCNMNRPALNEMLSKLHEIDAVVVYRLDRLSRSQRDTITLIEEYFLKNNVEFVSLSETLDTSSPFGRAMIGILSVFAQLERETIRDRMVMGKIKRIEAGLPLTTAKGRTFGYDVIDTKLYINEEEAKQLRLIYDIFEEEQSITFLQKRLKKLGFKVRTYNRYNSWLTNDLYCGYVSYKDKVHVKGIHEPIISEEQFYRVQEIFTRMGKNSNMNRDSASLLNNLVVCSKCGLGFVHRRKDTMSRGKKYHYRYYSCKTYKHIHELEKCGNKIWRADKLEELIINRVNNYSFASRSADKEDELDSLNEKLRIEHAKKKRLFDLYINGSYEVSELDSMMNDVDAQINYYESQIEANEELKKSKKVQENLANLATVDYDSLEFREKQLYLKSLINKIYIDGEQVTIEWL

SEQ ID NO: 886 - protein, 452 aa, synthetic construct
MKAAIYIRVSTREQVENYSIRAQTEKLTALCRSKDWDVYDIFIDGGYSGSNMNRPALNEMLNKLHEIDAVVVYRLDRLSRSQRDTITLIEEYFLKNNVEFVSLSETLDTSSPFGRAMIGILSVFAQLERETIRDRMVMGKIKRIEAGLPLTTAKGRTFGYDVIDTKLYINEEEAKQLQLIYDIFEEEQSITSLQKRLKKLGFKVHTYNRYNNWLTNDLYCGYVSYKDKAHVKGIHEPIISEEQFYRVQEIFTRMGKNPNMNRESASLLNNLVVCSKCGLGFVHRRKDAMSRDKKYHYRYYSCKTYKHIHELEKCGNKIWRADKLEELIINRVNNYSLASRNADKDDELDSLNEKLKIEHAKKRRLFDLYINGSYEVSELDSMMNDIDAQINYYESQIEANEELKKNKKIQENLAYLATVDFDSLEFREKQLYLKSLINKIYIDGEQVTIEWL

SEQ ID NO: 887 - protein, 485 aa, synthetic construct
MTKKVAIYTRVSTTNQAEEGFSIDEQIDRLTKYAEAMGWQVSDTYTDAGFSGAKLERPAMQRLINDIENKAFDTVLVYKLDRLSRSVRDTLYLVKDVFTRNKIDFISLNESIDTSSAMGSLFLTILSAINEFERENIKERMTMGKLGRAKSGKSMMWTKTAFGYYHNRKTGILEIVPLQATIVEQIFTDYLSGISLTKLRDKLNEGGHIGRDIPWSYRTLRQTLDNPVYCGYIKFKDSLFEGMHKPIIPYETYLRVQKELEERQRQTYERNNNPRPFQAKYMLSGMARCGYCGAPLRIVLGHKRKDGSRTMKYHCANRFPRKTRGVTVYNDNKKCDSGTYDLSNLENTVIDNLIGFQENNDSLLKIINGNNQPILDTSSFEKQISRIDKKIQKNSDLYLNDFITMDELKDRTDSLQAEKKLLKAKISENEFNDSTDVFELVKTQLGSIPINELSYDNKKKIVNNLVSRVDVTADNVDIIFKFQLA

SEQ ID NO: 888 - protein, 469 aa, synthetic construct
MSYTTPVRAAVYLRISEDRSGEQLGVARQREDCLKLCSQRKWEPVEYLDNDVSASTGKRRPAYEQMLADITAGKIAAVVAWDLDRLHRRPIELEAFMSLADEKRLALATVAGDVDLATPQGRLVARLKGCVAAHETEHKKARQRRAARQKAERGLPNWSKAFGYLPGPNGPEPDPRTAPLVKQAYADILAGASLGDVCRQWNDAGAFTITGRPWTTTTLSKFLRKPRNAGLRAYKGARYGPVDRDAIVGKAQWSPLVDEATFWAAQAVLDAPGRAPGRKSVRRHLLTGLASCGKCGNHLAGSCRTDGRVVYVCKACHGVAILVDNIEPILYHIVAERLAMPGAVDLLRREIHDAAEAETIRLELETLYGELDRLAVERAEGLLTARQVKISTDIVNAKITELQARQLDQERLRVFDGIPLGTPQVSGMVAELSPDRFRAVLDVLAEVVVQPVGKGGRTFNPERVQVNWR

SEQ ID NO: 889 - protein, 485 aa, synthetic construct
MTKKVAIYTRVSTTNQAEEGFSIDEQIDRLTKYAEAMGWQVSDTYTDAGFSGAKLERPAMQRLINDIENKAFDTVLVYKLDRLSRSVRDTLYLVKEVFTKNKIDFISLNESIDTSSAMGSLFLTILSAINEFERENIKERMTMGKLGRAKSGKSMMWTRTAFGYYHNRKTGILEIVPLQAAIVEQIFTDYLSGISLTKLRDKLNESGHIGKDIPWSYRTLRQTLDNPVYCGYIKFKDSLFEGMHKPIIPYETYLKVQKELEERQQQTYERNNNPRPFQAKYMLSGMARCGYCGAPLRIVLGHKRKDGSRTMKYHCANRFPRKTKGVTVYNDNKKCDSGTYDLSNLENTVIDNLIGFQENNDGLLKIINGNNQPIQDTSSFEKQISQIDKKIQKNSDLYLNDFITMDELKDRTESLQAEKKLLKAKISENKFNDSTDVFELVKTQLGSIPINELSYDNKKKIVNNLVSKVDVTADNVDIIFKFQLA

SEQ ID NO: 890 - protein, 469 aa, synthetic construct
MSYTTPVRAAVYLRISEDRSGEQLGVARQREDCLNLCDQRKWVPVEYLDNDVSASTGKCRPAYEQMLADITAGKIAAVVAWDLDRLHRRPIELEAFMSLADEKRLALATVAGDVDLATPQGRLVARLKGSVAAHETEHKKARQRRAARQKAERGHPNWSKAFGYLPGPNGPEPDPRTAPLVKQAYADILAGASLGDVCRQWNNAGACTITGRPWTTTTLSKFLRKPRNAGLRAYKGARYGPVDRDAIVGKAQWSPLVDEATFWAAQAVLDAPGRAPGRKSVRRHLLTGLAGCGKCGNHLAGSYRTDGRVVYVCKACHGVAILADNIEPILYHIVAERLATPDAVDLLHREIHDAAEAETIRLELETLYGELDRLAVERAEGLLTARQVKISTDIVNAKITKLQARQLDQERLRVLDGIPLGTPQVAGMIAELSPDRFRAVLDVLAEVIVQPVGKGGRIFNPERVQVNWR

SEQ ID NO: 891 - protein, 452 aa, synthetic construct
MKAAIYIRVSTQEQVGNYSIQAQTEKLTALCRSKGWDVYDIFIDGGYSGSNMNRPALNEMLSKLHEIDAVVVYRLDRLSRSQRDTTTLIEEYFLKNNVEFVSLSETLDTSSPFGRAMIGILSVFAQLERETIRDRMVMGKIKRIEAGLPLTTAKGRTFGYDVIDTKLYVNEEEARQLRLIYDIFEEEQSITFLQKRLKKLGFKVRTYSRYNNWLTNDLYCGYVSYKDKVHVRGIHEPIISEEQFYRVQEIFTRMGKNPNMNRDNASLLSNLVVCSKCGLGFVHRSKDTMSRGKKYHYRYYSCKTYKHTHELEKCGNKTWRADKLEELIISRVNNYSFASRGVDKEDELDSLNEKLKIEHAKKKRLFDLYINGSYEVSELDSMMNDIDAQINYYESQIEANEELKENKKIQENLAELATVDFDSLEFREKQLYLKSLINKIYIDGEQVTIEWL

SEQ ID NO: 892 - protein, 485 aa, synthetic construct
MTKKVAIYTRVSTTNQAEEGFSIDEQVDRLTKYAEAMGWQVSDTYTDAGHSGAKLERPAMRRLINDIENKAFDTVLVYKLDRLSRSVRDTLYLVKDVFTKNKIDFTSLNESIDTSSAMGSLFLTILSAINEFERENIKERMTMGKLGRAKSGKSMMWTKTAFGYYHNRKTGILEIVPLQATIVEQIFTDYLSGISLTKLRDKLNESGHIGKDIPWSYRTLRQTLDNPVYCGYIKFKDGLFEGMHKPIIPYETYLKVQKELGERQQQTYERNNNPRPFQAKYMLSGMARCGYCGAPLRIVLGRKRKDGSRTMKYHCANRFPCKTKGVTVYNDNKKCVSGTYDLSNLENTVIDNLIGLQENNDSLLKIIGGNNQPILDTSSFKEQISQIDKKIQKNSDLYLNDFITMDELKDRTDGLQAEKKLLEAKISENKLNDSTDVFELVKTQLGSIPINELSYDDKKKIVNNLVSKVDVTADSVDIIFKFQLA

SEQ ID NO: 893 - protein, 452 aa, synthetic construct
MKAAIYIRVSTQEQVGNYSIQAQTEKLTALCRSKDWDVYDIFVDGGYSGSNMNRPALNEMLSKLHEIDAVVVYRLDRLSRSQRDTTTLIEEYFLKNNVEFVSLSETLDTSSPFGRAMIGILSVFAQLERETIRDRMVMGKIKRIEAGLPLTTAKGRTFGYDVIDTKLYINEEEAKQLRLIYDIFEEEQSITSLQKRLKKLGFKVRTYNRYNNWLTNDLYCGYVSYKDKVHVKGIHEPIISEEQFYRVQEIFTRMGKNPNMNRDSASLLSNLVACSKCGLSFVHRSKDTMSRGKKYHYRYYSCKTYKHTHELEKCGNKTWRADKLEELVINRVNDYSFASRNVDKEDELDSLNEKLKIEHAKKRRLFDLYINGSYEVSELDSMMNDIDAQINYYESQIEANEELKKNKKIQENLANLATVDFDSLEFREKQLYLKSLINKIYIDGEQVTIEWL

SEQ ID NO: 894 - protein, 485 aa, synthetic construct
MTRKVAIYTRVSTTNQAEEGFSIDEQIDRLTKYAEAMGWQVSDTYTDAGCSGAKLERPAMRRLINDIENKAFDTVLVYKLDRLSRSVRDTLYLVKDVFTKNKIDFISLNESIDTSSAMGSLFLTILSAINEFERENIKERMTMGKLGRAKSGKSMMWTKTAFGYYHNRRTGILEIVPLQATIVEQIFTDYLSGISLTKLRDKLNGSGHIGKDIPWSYRTLRQTLDNPVYCGYIKFKDCLFEGMHKPIIPYETYLKVQKELEERQQQTYERNNNPRPFQAKYMLSGMARCGYCGAPLRIVLGHKRKDGSRTMKYHCANRFPRKTKGVTVYNDNKKCDSGTYDLSNLENAVIGNLIGFQENNDSLLKIISGNNQPILDTSSFKKQISQIDKKIQKNSDLYLNDFITMDELKVRTDSLRAEKKLLKAKISENKFNDSTDVFELVKTQLGSIPINELSYDNKKKIVNSLVSKVDVTADNVDIIFKFQLA

SEQ ID NO: 895 - protein, 452 aa, synthetic construct
MKAAIYIRVSTREQVENYSIQAQTEKLTALCRSKDWDVYDIFIDGGYSGSNMNRPALNEMLSKLHEIDAVVVYRLDRLSRSQRDTITLIEEYFLKNNVEFVSLSETLDTSSPFGRAMIGILSVFAQLERETIRDRMVMGKIKRIEAGLPLTTAKGRTFGYDVIDTKLYINEEEAKQLQLIYDIFEEERSITSLQKRLKKLGFKVRTYNRYNSWLTNDLYCGYVSYKDKVHVKGIHEPIISEEQFYRVQEIFTRMGKNPNMNRDSASLLNNLVVCGKCGLGFVHRRKDAMSRDKKYHYRYYSCKTYKHIHELEKCGNKIWRADKLEELIINRVNDYSVASRNVDKEDELDSLNEKLKIEHAKKRRLFDLYINGSYEVSELDSMMNDIDAQINYYESQIEANEELKKNKKIQENLAHLATVDFDSLEFREKQLYLKSLINKIYIDGEQVTIEWL

SEQ ID NO: 896 - protein, 485 aa, synthetic construct
MTKKVAIYTRVSTINQAEEGFSIDEQIDRLTKYAEAMGWQVSDTYTDAGFSGAKLERPAMQRLINDIENEAFDTVLVYKLDRLSRSVRDTLYLVKDVFTKNKIDFISLSESIDTSSAMGSLFLTILSAINEFERENIKERMTMGKLGRAKSGKSMMWAKTAFGYYHNRKTGILEIVPLQATIVEQIFTDYLSGISLTKLRDKLNEGGHIGKDIPWSYRTLRQTLDNPVYCGYIKFKGSLFEGMHKPIIPYETYLKVQKELEERQQQTYERNNNPRPFQAKYMLSGMARCGYCGAPLRIVLGHKRKDGSRTMKYHCANRFPRKTKGVTVCNDNKKCDSGTYDLSNLENTVIDNLIGFQENGDSLRKIINGNNQPILDTSSFKKQISQIDKKIQKNGDLYLNDFITMDELKDRTDSLQAEKKLLKAKISENKFNDSTDVFELVKTQLGSTPINELSYDNKKKIVNNLVSKVDVTADSVDIIFKFQPA

SEQ ID NO: 897 - protein, 469 aa, synthetic construct
MCYTTPVRAAVYLRISEDRSGEQLGVARQREDCLKLCDQRKWVPVEYLDNDVSASTGKRRPAYEQMLADITAGKIAAVVAWDLDRLHRRPIELEAFMCLADEKRLALATVAGDVDLATPQGRLVARLKGSVAAHETEHKKARQRRAARQKAERGHPNWSKAFGYLPGPDGPEPDPRTAPLVKQAYADILAGASLGDVCRQWNDAGAFTITGRPWTTTTLSKFLRKPRNAGLRAYKGARYGPVDRDAIVGRAQWSPLVDEATFWAAQAVLDAPGRAPGRKSVRRHLLTGLAGCGKCGNHLAGSYRTDGRVVYVCKACHGVAILADNIEPILYHIVAERLAMPDAVDLLRREIHDVAEAEIIRLELEALHGELDRLAVERAEGLLTARQVKICTDIVNAKITKLQARQQDQERLRVLGGIPLGTPQVAGTIAELSPDRFRAVLDVLAEVVVQPVGKSGRIFNPERVQVNWR

SEQ ID NO: 898 - protein, 485 aa, synthetic construct
MTKKVAIYTRVSTTNQAEEGFSVDEQIDRLAKYAEAMGWQVSDTYTDAGFSGAKLERPAMQRLINDIENKAFDTVLVYKLDRLSRSVRDTLYLVKDVFTKNKIDFISLNESIDTSSAMGSLFLTILSAINEFERENIRERMTMGKLGRAKSGKSMMWTKTAFGYYHNRKTGILEIVPLQATIVEQIFTDYLSGISLTKLRDKLNESGHIGKDIPWSYRTLRQTLDNPVYCGYIKFKDSLFEGMHKPIIPYETYLKVQKELEERQQQSYERNNNPRPFQAKYMLSGMARCGYCGAPLRIVLGHKRKDGSRTMKYHCANRLPRKTRGVTVYNDNKKCDSGTYDLSNLENTVIDNLIGFQENNDSLLKIINGNNKPILDTSSFKEQISQIDKKIQKNSDLYLNDFITMDELKDRTDSLQAEKKLLKAKISENKFNDSTDVFELVRTQLGSIPINELSYDDKKKIVNNLVSKVDVTADNVDIIFKFQLA

SEQ ID NO: 899 - protein, 469 aa, synthetic construct
MSYTTPVRAAVYLRISEDRSGEQLGVARQREDCLKLCDQRKWVPVEYLDNDASASTGKRRPAYEQMLADITAGKIAAVVAWDLDRLHRRPIELEAFMSLADERRLALATVAGDVDLATPQGRLVARLKGSVAAHETEHKKARQRRAARQKAERGLPNWSKAFGYLPGPNGPEPDPQTAPLVKQAYADILAGASLGDVCRQWNDAGAFTITGRPWTTTTLSKFLRKPRNTGLRAYKGARYGPVDRDAIVGKAQWSPLVDEATFWAAQAVLDAPGRAPGRKSVRRHLLTGLAGCGKCGNHLAGSYRTDGRVVYVCKACHGVAILADNIEPILYHIVAERLAMPDAVDLLRREIHDAAEAETIRLELETLYGELDRLAVERAEGLLTARQVKISTDIVNAEITKLRARQLDQERLRVFDGIPLGTPQVAGVIAELSPDRFRAVLDVLAEVVVRPVGKSGRILNLERVQVNWR

SEQ ID NO: 900 - protein, 469 aa, synthetic construct
MSYTTPVRAAVYLRISEDRSGEQLGVARQREDCLKLCGQRKWVPVEYLDNDVSASTGKRRPAYEQMLADITAGKIAAVVAWDLDRLHRRPIELEAFMSLADEKRLALATVAGDVDLGTPQGRLVARLKGCVAAHETEHKKARQRRAARQKAERGYPNWSKAFGYLPGPNGPGPDPRTAPLVKQAYADILAGASLGDVCRQWNDAGAFTITGRPWTTTTLSKFLRKPRNAGLRAYKGARYGPVDRDAIVGKAQWSPLVDEATFWAAQAVLDAPGRVPGRKSVRRHLLTGLAGCGKCGNHLAGSCRTDGRVVYVCKACHGVSILAVNIEPILYHIVAERLAMPDAVDLLRREIHDAAEAETIRLELETLYGELDRLAVERAEGLLTARQVKISTDIVNAKITKLQACQLDQERLRVLDGIPLGTPQVAGMIAELSPDRFRAVLDVLAEVVVQPVGKSGRIFNPERVQVNWR

SEQ ID NO: 901 - protein, 452 aa, synthetic construct
MKAAIYIRVSTREQVENYSIQAQTEKLTALCRSKDWDVYDIFIDGGYSGSNMNRPALNEMLSKLHEIDAVVVYRLDRLSRSQRDTITLIEGYFLKNNVEFVSLSETLDTSSPFGRAMIGILSVFAQLERETIRDRMVMGKIKRVEAGLPLTTAKGRTFGYDVIDTKLYINEEEAKQLQLIYDIFEEEQSITFLQKRLKKLGFKVRTYNRYNNWLTNDLYCGYVSYKDKVHVKGIHEPIISEEQFCRVQEIFTRMGKNPNMNRDSASLLSSLVVCSKCGLGFVHRRKDTMSRGKKYHYRYYSCKTYKHIHELEKCGNKIWRADKLEELIINRVNNYSLASRVADKEDELHSLNEKLKIEHAKKKRLFALYINGSYEVSVLDSMMNDIDAQISYYESQIEANEELKKNKKIQENLADLATVDFDGLEFREKQLYLKSLINKIYIDGEQVTIEWL

SEQ ID NO: 902 - protein, 452 aa, synthetic construct
MKAAIYIRVSTREQVENYSIQAQTEKLTALCRSKDWDVYDIFIDGGYSGSNMNRPALNEMLSKLHEIDAVVVYRLDRLSRSQRDTITLIEEYFLKNNVEFVSLSETLDTSSPFGRAMIGILSVFAQLERETIRDRMVMGKIKRIEAGLPLTTAKGRTFGYDVIDTKLYINEEEAKQLQLIYDIFEEEQSITLLQKRLKKLGFKVRTYSRYSNWLTNDLYCGYVSYKDKVHVKGIHEPIISEEQFYRVQEIFTRAGKNPNMNRDSASLLNNLVVCSKCGLGFVHRRKDTVSRGKKYHYRYYSCKTYKHTHELEKCGNKIWRADKLEELIINRVNNYSFASRNVDKEDELDSLNEKLKIEHAKKKRLFDLYINGSYEMSELDSMMNDIDAQINYYESQIEANEELKKNKKIQENLADLATVDFDSLEFREKQLYLKSLINKIYIDGEQVTIEWL

SEQ ID NO: 903 - protein, 452 aa, synthetic construct
MKAAIYIRVSTQEQVGNYSIQAQTEKLTALCRSKDWDVYDIFIDGGYSGSNMNRPALNEMLSKLHEIDAVVVYRLDRLSRSQRDTTTLIEEYFLKNNVEFVSLSETLDTSSPFGRAMIGILSVFAQLERETIRDRMVMGKIKRIEAGLPLTTAKGRTFGYDVIDTKLYVNEEEAKQLQLIYDIFEEEQSITSLQKRLKKLGFKVHTYNRYNNWLTNDLYCGYVSYKDKVHVRGIHEPIISEEQFYRVQEIFTRMGRNPNMNRDSASLLNSLVVCSKCGLGFVHRSKDTMSRGKKYHYRYYSCKTYKHTHELEKCGNKTWRADKLEELIINRVNNYSFASRNADKEDELDSLNEKLKIEHARKKRLFDLYINGSYEVSELDSMMNDIDAQINYYESQIEASEELKKNRKIQENLADLATADFDSLEFREKQLYLKSLINKIYIDGEQVTIEWL

SEQ ID NO: 904 - protein, 469 aa, synthetic construct
MCYTTPVRAAVYLRISEDRSGEQLGVARQREDCLKLCDQRKWEPVEYLDNDVSASTGKRRPAYEQMLADITAGKIAAVVAWDLDRLHRRPMELEAFMSLADEKRLALATVAGDVDLATPQGRLVARLKGSVAAHETEHKKARQRRAARQKAERGLPNWSEAFGYLPGPNGPEPDPRTAPLVKQAYADILAGASLGDVCRRWNDAGAFTITGRPWTTTTLSKFLRKPRNAGLRAYKGARYGPVDRDAIVGKAQWSPLVDEATFWAAQAVLDAPGRAPGRKSVRRHLLTGLAGCGKCGNHLAGSYRTGGRVVYVCKACHGVAILADNIEPILYHIVVERLAMPDAVDLLRREIHDAAEAETIRLELETLYGELDRLAVERAEGLLTARQVKISTDIVNAKITKLQARQLDQERLRVFDGIPLGTPQAAGAIAELSPDRFRAVLDVLAEVVVQPVGKSGRIFNPERVQVNWR

SEQ ID NO: 905 - protein, 469 aa, synthetic construct
MSYTIPVRAAVYLRISEDRSGEQLGVARQREDCLKLCGQRKWVPVEYLDNDVSASTGRRRPAYEQMLADITAGKIAAVVAWDLDRLHRRPIELEAFMSLADEKRLALATVAGDVDLATPQGRLVARLKGSVAAHETEHKKARQRRAARQKAERGYPNWSKAFGYLPGPNGPEPDPRTAPLVKQAYADILAGASLGDVCRRWNDAGALTITGRLWTTTTLSKFLRKPRNAGLRTYKGGRYGPVDRDAIVGKAQWSPLVDEVTFWAAQAVLDAPGRAPGRKSVRRHLLTGLAGCGKCGNHLAGSYRTDGRVVYVCKACHGVAILADNVEPILYHTVAERLAMPDAVDLLRREIYDMAEAETIRLELETLYGELDRLAVERAEGLLTARQVKISTDIVNAKITKLQARQLDQERLRVLDGIPLGTPQVAGMIAELSPDRFRAVLDVLMEVVVQPVGKSGRIFNPERVQVNWR

SEQ ID NO: 906 - protein, 469 aa, synthetic construct
MSYTTPVRAAVYLRISEDRSGEQLGVARQREDCLKLCDQRKWVPVEYLDNDVSASTGKRRPAYEQMLADITAGKIAAVVAWDLDRLHRRPVELEAFMSLADEKRLALATVAGDVDLATPQGRLVARLKGCVAAHETEHKKARQRRAARQKAERGLPNWSKAFGYLPAPNGPEPDPRTAPLVKQAYADILAGASLGDVCRRWNDAGAFTITGRPWTTTTLSKFLRKPRNAGLRAYKGARYGPVDRDAIVGKARWSPLVDEATFWAAQAVLDAPGRAPGRKSVRRHLLTGLAGCGKCGNHLAGSYRTDGRVVYVCKACHGVAILADNIEPILYHIVAERLAMPDAVDLLRREIHDAAEAETIRLELETLYGELDRLAVERAEGLLTARQVKIGTDIVNAKITKLQARQLDQERLRVLDGIPLGTPQVAGAIAELSPDRFRAVLDVLAEVVVQPVGKRGRIFNPERVQVNWR

SEQ ID NO: 907 - protein, 469 aa, synthetic construct
MNYTTPVRAAVYLRISEDRSGEQLGVARQREDCLKLCDQRKWVPVEYLDNDVSASTGKRRPAYERMLADITAGKIAAVVAWDLDRLHRRPIELEAFMSLADEKRLALATVAGDVDLATPQGRLVARLKGSVAAHETEHKKARQRRAARQKAERGYPNWSKAFGYLPGPNGPEPDPRTAPLVKQAYADILAGASLGDVCRQWNDAGAFTITGRPWTTTTLSKFLRKPRNAGLRAYKGARYGPVDRDAIVGIAQWSPLVDEATFWAAQAVLDAPGRAPGRKSVRRHLLTGLAGCGKCGNHLAGSYRTDGRVVYVCKACHGVAILADNIEPILYHIVAERLAMPDAVDLLRREIHDAAEAEAIHLELETLYGELDRLAVERAEGLLTARQVKISTDIVNAKITKLQAHQQDQERLRVLDGIPLGTPQVAGVIAELSPNRFRAVLDVLAEVVVQPVGKSGRIFNPERVQVNWR

SEQ ID NO: 908 - protein, 469 aa, synthetic construct
MSYTTPVRAAVYLRISEDRSGEQLGAARQREDCLELCCQRKWVPVEYLDNDVSASTGKRRPAYEQMLADITAGKITAVVAWDLDRLHRRPIELEAFMSLADEKRLALATVAGDVDLATPQGRLVARLKGSVAAHETEHKKARQRRAARQKAERGYPNWSRAFGYLPGPNGPEPDPRTAPLVKQAYADILAGASLGDVCRQWNGAGALTITGRPWTTTTLSKFLRKPRNAGLRAYKGARYGPVDRDAIVGKAQWSPLVDETTFWAAQAVLDAPGRAPGRKSVRRHLLTGLAGCGKCGNHLAGSYRTDGRVVYVCKACHGVAILADNIEPILYHIVAGRLAMPDAVDLLRREIHDAAEAETTRLELETLYGELDRLAVERAEGLLTARQVKISTDIVNAKITELRACQLDQERLRVFDGIPLGTPQVAGMIAELSPDRFRAVLDVLAEVVVQPVGKSGRIFNPERVQVNWR

SEQ ID NO: 909 - protein, 452 aa, synthetic construct
MKAAIYIRVSTQEQVENYSIQAQTEKLTALCRSKDWDVYDIFIDGGYSGSNMNRPALNEMLSKLHEIDAVVVYRLDRLSRSQRDTTTLIEEYFLKNNVEFVSLSETLDTSSPFGRAMIGILSVFAQLERETIRDRMVMGKIKRIEAGLPLTTAKGRTFGYDVIDTKLYINEEEAKQLQLIYDIFEEEQSITLLQKRLKKLGFKVRTYNRYNNWLTNDLYCGYVSYKDKVHVKGIHEPIISEEQFHRVQEIFTRMGKNPNMNRDSASLLSNLVVCSKCGLGFVHRSKDTMSRGKKYHYRYYSCKTYKHTHELEKCGNKTWRADKLEELIINRVNNYSFASRNVGKEDELDSLNEKLKIEHAKKKRLFDLYINGSYEVSELDSMMNDIDAQINYYESQIEANEELEENKKIQENLADLATVDFDSLGFREKRLHLKSLINKIYIDGEQVTIEWL

SEQ ID NO: 910 - protein, 469 aa, synthetic construct
MCYTTPVRAAVYLRISEDRSGEQLGVARQREDCLKLCDQRKWVPVEYLDNDVSASTGKRRPAYEQMLADITAGKIAAVVAWDLDRLHRRPIELETFMSLADEKRLALATVAGDVDLATPQGRLVARLKGSVAAHETEHKRARQRRAARQKAERGHPNWSKAFGYQPGPNGPEPDPRTAPLVKQAYADILAGASLGDVCRQWNGAGAFTITGRPWTTTTLSKFLRKPRNAGLRAYKGARYGPVDRDAIVGKAQWSPLVDEATFWAAQAVLDAPGRAPGRKSVRRHLLTGLAGCGKCGNHLAGSYRTNGRVVYVCKACHGVAILADNIEPILYHIVAERLAMPDAVDLLRREIHDAAEAETIRLELETLYGELDRLAVERAEGLLTARQVKIGTDIVNAKITKLQARQLDQERLRVFDGIPLGTPQVAGMIAELSPDRFRAVLDVLAEVVVQPVGKSGRAFNPERVQVNWR

SEQ ID NO: 911 - protein, 485 aa, synthetic construct
MTKKVAIYTRVSTTSQAEEGFSIDEQIDRLTKYAEAMGWRVSDTYTDAGFSGAKLERPAMQRLINDIENKAFDTVLVYKLDRLSRSVRDTLHLVKDVFTKNKIDFISLNESIDTSSAMGSLFLTILSAINEFERENIKERMTMGKLGRAKSGKSMMWTKTAFGYYHNRETGILEVVPLQATIVERIFTDYLSGISLTKLRDKLNESGHIGKDIPWSYRTLRQTLDNPVYCGYIKFKDSLFEGMHKPIIPYETYLKVQKELEERQQQTYERNNNPRPFQAKYMLSGVARCGYCGAPLRIVLGHKRKDGSRTMKYHCANRFPRKTKGVTVYNDNKKCDSGTYDLSSLENTVIDSLIGFQENSDSLLKIINGNNQPILDTSSFKKQISQIDKEIQKNSDLYLNDFITMDELKDRTDSLRAEKKLLIARISESKFNDSTDVFELVKTQLGSVPINELSYDNKKKIVNNLVSKVDVTADNVDIIFKFQLA

SEQ ID NO: 912 - protein, 452 aa, synthetic construct
MKAAIYIRVSTQEQVENYSIQAQTEKLTALCRSKGWDVYDIFIDGGYSGSNMNRPALNEMLSKLHEIDAVVVYRLDRLSRSQRDTITLIEEYFLKNNVEFVSLSETLDTSSPFGRAMIGILSVFAQLERETIRDRMVMGKIKRVEAGLPLTTAKGRTFGYDVIDTKLYINEEEAKQLQLIYDIFEEEQSITFLQKRLKKLGFKVRTYNRYNNWLTNDLYCGYVSYKDKVHVKGIHEPIISEEQFYRVQEIFTRMGKNPNMNRDSASLLNNLVVCSKCGLGFVHRRKDTTSRGKKYHYRYYSCKTYKHTHELEKCGNKIWRADKLEELIINRVNNYSFASRNVDKEGEPDSLNEKLKVEHAKKKRLFDLYINGSYEVSELDSMMNDIDAQINCYESQIEANEELKKNKKIQENLANLATVDYDSLEFREKQLYLKSLINKIYIDGEQVTIEWL

SEQ ID NO: 913 - protein, 452 aa, synthetic construct
MKAAIYIRVSTREQVENYSIQAQTEKLTALCRSKDWDVYDIFIDGGYSGSNMNRPALNEMLSKLHEIDAVVVYRLDRLSRSQRDTITLIEEYFLKNNVEFVSLSETLDTSSPFGRAMIGILSVFAQLERETIRDRMVMGKIKRIEAGLPLTTAKGRTFGYDVIDTKLYINEEEAKQLQLIYDIFEEEQSITFLQKRLKKLGLKVRTYSCYNNWLTNDLYCGYVSYKDKVHVKGIHEPIISEEQFCRVQEIFARMGKNPNMNRDSASLLNSLVVCSKCGLGFVHRRKDTVSRGKKYHYRYYSCKTYKHIHELEKCGNKIWRADKLEELIINRVNNYSSASRNVDKEGELESLNEKLKIEHAKKKRLFDLYISGSYEVSELDSMMNDIDAQINYYESQIEANEELKKNKKIQENLANLATVDYDSLEFREKQLYLKSLINKIYIDGEQVTIEWL

SEQ ID NO: 914 - protein, 485 aa, synthetic construct
MTKKVAIYTRVSTTNQAEEGFSIDEQIDRLTRYAEAMGWQVSDTYTDAGLSGAKLERPAMQRLINDIENKAFDTVLVYKLDRLSRSVRDTLYLVKDVFTKNKIDFISLSESIDTSSAMGSLFLTILSAINEFERENIKERMTMGKLGRAKSGKSMMWTKTAFGYYHNRKTGILEIVPLQATIVEQIFTDYLSGISLTKLRDKLNESGHIGKDIPWSYRTLRQTLDNPVYCGYIKFRGSLFEGMHKPIIPYETYLKVQKELEERQQQTYERNNNPRPFQAKYMLSGMARCGYCGAPLRIVLGHKRKDGSRTMKYHCANRFPRKTKGVTVYNDNKKCDSGTYDLSNLEDTVIDNLIGFQENNDSLLKIINGNNQPTLDTSSFKKQISQIDKKIQKNSDLYLNDFITMDELKDRTDSLQAEKKLLEAKISENKLNDSTDVFELVKTQLGSIPINELSYDNKKKIVNNLVSKVDVTADNVDIIFKFQLA

SEQ ID NO: 915 - protein, 485 aa, synthetic construct
MTKKVAIYTRVSTTNQAEEGFSIDEQIDRLTKYAEAMGWQVSDTYTDAGSSGARLERPAMQRLINDIENKAFDTVLVYKLDRLSRSVRDTLYLVKDVFTKNKIDFISLNESIDTSSAMGSLFLTILSAINEFERENIKERMTMGKLGRAKSGKSMMWTKTAFGYYHNRKTGILEIVPLQATIVEQIFTDYLSGISLTKLRDKLNESGHIGKDIPWSYRTLRQTLDNPVYCGYIKFKDSLFEGMHKPIIPYETYLKVQKELEERQQQTYERNNNPRPFQAKYMLSGMARCGYCGAPLRIVLGRKRKDGSRTMKYHCANRFPRKTKGITVYNDNKKCDSGTYDLSNLEDTVIGNLIGFQENNDSLLKIINGNNQPILDTSSLEEQISQIDKKIQRNSDLYLNDFITMDELKDRTDSLQAEKKLLEAKISENKFNDGTDVFELVKTQLGSIPISELSYDNKKRIVNNLVSKVDVTADNVDIIFKFQLV

SEQ ID NO: 916 - protein, 485 aa, synthetic construct
MTKKVAIYTRVSTINQAEEGFSIDEQIDRLTKYAEAMGWQVSDTYTDAGLSGAKLERPAMQRLINDIEDKAFDTVLVYKLDRLSRSVRDTLYLVKDVFTKNKIDFISLSESIDTSSAMGSLFLTILSAINEFERENIKERMTMGKLGRAKSGKSMMWTKTAFGYYHNRKTGILEIVPLQATIVERIFTDYLSGISLTKLRDKLNESGHIGKDIPWSYRTLRQTLDNPVYCGYIKFKDSLFEGMHKPIIPYETYLKVQKELEERQQQTYERNNNPRPFQAKYMLSGMARCGYCGAPLKIVLGHKRKDGSRTMKYHCANRFPRKTKGVTVYNDNKKCDSGTYDLSNLENTVIDNLIGFQDNNDSLLKIINGNNQPILDASSFKKQISQIDKKIQKNSDLYLNDFITMDELKDRTDSLQAEKKLLKAKISENKFNDSTDVFELVKTQLGSIPINELSYDDKKKIVNNLVSKVDVTADNVDIIFKFQLA

SEQ ID NO: 917 - protein, 485 aa, synthetic construct
MTKKVAIYTRVSTTNQAEEGFSIDEQIDRLTKYAEAMGWQVSDTYTDAGLSGAKLGRPAMQRLINDIENKAFDTVLVYKLDRLSRSVRDTLYLVKDVFTKNKIDFISLNESIDTSSAMGSLFLTILSAINEFERENIKERMTMGKLGRAKSGKSMMWAKTAFGYYHNRKTGILEIVPLQATIVEQIFTDYLSGISLTKLRDKLNGSGHIGKDIPWSYRTLRQTLDNPVYCGYIKFKGSLFEGMHKPIIPYETYLKVQKELEERQQQTYERNNNPRPFQAKYMLGGMARCGYCGAPLRIVLGHKRKDGSRTMKYHCANRFPRKTKGVTVYNDNKKCDSGTYDLSNLENTVIDYLIGFQENNDSLLKIINGNNQPILDTSSLKKQISQIDKKIQKNSDLYLNDFITMDELKDRTDCLQAEKKLLQAKISENKFNDSTDVFELVRTQLGSIPINELSYDNKKKIVNNLVSKVDVTADNVDIIFKFQLA

SEQ ID NO: 918 - protein, 469 aa, synthetic construct
MSYTTPVRAAVYLRISEDRSGEQLGVARQREDCLELCGQRKWVPVEYLDNDVSASTGKRRPAYEQMLADITAGKIAAVVAWDLDRLHRRPTELEAFMSLADEKRLALATVAGDVDLATPQGRLVARLKGCVAAHETEHKRARQRRAARQKAERGYPNWSKAFGYLPGPNGPEPDPRTAPLVKQAYTDILAGASLGDVCRQWNDAGAFTITGRPWTTTTLSKFLRKPRNAGLRAYKGARYGPVDRDAIVGKAQWSPLVDEATFWAAQAVLDAPGRAPGRKSVRRHLLTGLAGCGKCGNHLAGSHRTDGRVVYVCKACHGVSILADNIEPILYHIVAERLAMPNAVDLLRREIHDAAEAETIRLELETLYGELDRLAVERAEGLLTARQVKISTDIVNAKITKLQARQLDQERLRVFDGVPLGTPQVAGMIAELSPNRFRAVLDVLVEVVVQPVGKSGGIFNPERVQVNWR

SEQ ID NO: 919 - protein, 469 aa, synthetic construct
MSYTTPVRAAVYLRISEDRSGEQLGVARQREDCLKLCGQRKWEPVEYLDNDVSASTGKRRPAYEQMLADITAGKIAAVVAWDLDRLHRRPIELEAFMSLADEKRLALATVAGDVDLATPQGRLVARLKGSVAAHETEHKKARQRRAARQKAERGHPNWSKAFGYLPGPNGPEPDPRTAPLVKQAYADILAGASLGDVCRRWNGMGAFTITGRPWTTTTLSKFLRKPRNAGLRAYKGARYGPVDRGAIVGKAQWSPLVDEAAFWAAQAVLDAPGRAPGRKSVRRHLLTGLAGCGKCGNHLAGSYRTDGRVVYVCKTCHGVAILADNIEPILYHIVAERLAMPDAADLLRREIHDAAEAETIRLELETLYGELDCLAVERAEGLLTARQVKISTDIVNAKITKLQARQLDQERLRVFDGIPLGTPQVAGTIAELSPDRFRAVLDVLAEVVVQPVGKGGRIFNPERVQVNWR

SEQ ID NO: 920 - protein, 452 aa, synthetic construct
MKAAIYIRVSTQEQVGNYSIQAQTEKLTALCRSKGWDVYDIFIDGGYSGSNMNRPALNEMLSKLHVIDAVVVYRLDRLSRSQRDTTTLIEEYFLKNNVEFVSLSETLDTSSPFGRAMIGILSVFAQLERETIRDRMVMGKIKRIEAGLPLTTAKGRTFGYDVIDTKLYINEEEARQLQLIYDIFEEEQSITFLQKRLKKLGFKVRTYNRYSSWLTNDLYCGYVSYKDKVHVKGIHEPIISEEQFCRVQEIFTRMGKNPNMNRDSASLLNNLVVCSKCGLGFVHRSKDTMCRGKKYHYRYYSCKTYKHTHELEKCGNKVWRADKLEELVINRVHNYSFASRNVDKEDELDSLKEKLKIEHAKRKRLFDLYINGSYEVGELDSTMNDIDAQINYYESQIEANKELKKNKKIQENLADLATVDFDSLEFREKQLYLKSLINKIHIDGEQVTIEWL

SEQ ID NO: 921 - protein, 452 aa, synthetic construct
MKAAIYIRVSTREQVENYSIQAQTEKLTALCRSKDWDVYDIFIDGGYSGSNMNRPALNEMLSKLHEIDAVVVYRLDRLSRSQRDTITLIEEYFLKNNVEFVSLSETLDTSSPFGRAMIGILSVFAQLERETIRDRMVMGKIKRIEAGLPLTTAKGRTFGYDVIDTKLYINEEEAKQLQLIYDIFEEEQSITFLQKRLKKLGFKVRTYSRYYNWLTNDLYCGYVSYKDKVHVKGIHEPIISEEQFYRVQEIFARMGKNPNMNRDSASLLSNLVVCSKCGLGFVHRRKDTMSRGKKYHYRYYSCKTYKHTHELEKCGNKIWRADKLEELIINRVNNYSFASRNVDKAEELDSLNEKLKVEHAKKKRLFDLYINGSYNVSELDSMMNDIDAQINYYESQIEANEELKKNKKIQENLAGLATVDFGSLEFREKQLYLKSLIDKIYIDGEQVTIEWL

SEQ ID NO: 922 - protein, 452 aa, synthetic construct
MKAAIYIRVSTREQVENYSIQAQTEKLTALCRSKDWDVYDIFIDGGYSGSNMNRPALIEMLSKLHEIDAVVVYRLDRLSRSQRDTITLIEEYFLKNNVEFVSLSETLDTSSPFGRAMIGILSVFAQLERETIRDRMVMGKIKRIEAGLPLTTAKGRTFGYDVIDAKLYVNEEEAKQLRLIYDIFEEEQSITFLQKRLKELGFKVRTYNCYNNWLTNDLYCGYVSYKDKVHVKGIHEPIISEEQFYRVQEIFTRMGKNPNMNRDSASLLNNLVVCSKCGLGFVHRRKDAKSRDKKYHYRYYSCKTYKHIHELEKCGNKIWRADKLEELIINRVNNYSLASRNVDKEDELDSLYEKLKIEHAKKKRLFDLYINGRYEVSELDSMMNDIDAQINYYEGQIEANEELRKNKKIQENLVYLATVDFDSLEFREKQLYLKSLINKIYIDGEQVTIEWL

SEQ ID NO: 923 - protein, 469 aa, synthetic construct
MCYTTPVRAAVYLRVSEDRSGEQLGVARQREDCLKLCDQRKWVPVEYLDNDVSASTGKRRPAYEQMLADITAGKIAAVVAWDLDRLHRRPIELEAFMCLADEKRLALATVAGDVDLATPQGRLVARLKGSVAAHETEHKKARQRRAARQKAERGHPNWSRAFGYLSGPNGPEPDPRTAPLVKQAYAGILAGASLGDVCRQWNDAGVFTITGRPWTTTALSKFLRKPRNAGLRAYKGARYGPVDRDAIVGKAQWSPLVDEATFWAAQAVLDAPGRAPGRKSVRRHLLTGLAGCGKCGNHLAGSYRTDGRVVYVCKACHGVAILADNIEPILYHIVAERLAMPDAVDLLRREIHDAAEAETIRLKLETLYGELDRLAVERAEGLLTARQVKISTDIVNAKITKLRARQQDQDRLRVLDGIPLGTPQVAGVIAELSPDRFRAVLDVLAEVVVQPVGKSGRIFNPERVQVNWR

SEQ ID NO: 924 - protein, 485 aa, synthetic construct
MTKKVAIYTRVSTTNQAEEGFSIDEQIDRLTKYAEAMGWQVSDTYTDAGLSGAKLERPAMQRLINDIENKVFDTVLVYKLDRLSRSVRDTLYLVKDVFTKNKIDFISLNESIDTSSAMGSLFLTILSAINEFERENIKERMTMGKLGRAKSGKSMMWAKTAFGYYHNRKTGILEIVPLQATIVEQIFTDYLSGISLTKLRDKLNESGHIGKDIPWSYRTLRQTLDNPVYCGYIKFKDNLFEGMHKPIIPYETYLKVQKELEVRQQQTYERNNNPRPFQAKYMLSGMARCGYCGAPLKIVLGHKRKDGSRTMKYHCANRFPRKTKGVTVYNDNKKCDSGTYDLSDLENTVIDNLIGFQENNDNLLKIINSNNQPIQDTSSFKEQISQIDKKIQKNSDLYLNDFITMDELKDRTDSLQAEKRLLKAKISENKFNGSTDVSELVKTQLGSIPISELSYDNKKEIVNNLVSKVVVTADNVDIIFKFQLA

SEQ ID NO: 925 - protein, 452 aa, synthetic construct
MKAAIYIRVSTQEQVGNYSIQAQTEKLTALCRSKDWDVYDIFIDGGYSGSNMNRPALNEMLSKLHEIDAVVVYRLDRLSRSQRDTTTLIEEYFLKNNVEFVSLSETLDTSSPFGRAMIGILSVFAQLERETIRDRMVMGKIKRIEAGLPLTTAKGRTFGYDVIDTKLYINEEEAKQLRLIYDIFEEEQSITSLQKRLKKLGFKVRTYNRYNSWLTNDLYCGYVSYKDKVHVKGIHEPIISEEQFYRVQEIFARMGKNPNVNRDCASLLNNLVVCSKCGLGFVHRSKDTMCRGKKYHYRYYSCKTYKHTHELEKCGNKTWRADKLEELIISRVNNYSFASRNVDKEDELDSLNEKLKIEHAKKKRLFDLYINGSYEVSELDSMMNDIDAQIDYYESQIEANEELKKNKKIQENLADLATVDFDSLEFREKRLYLKSLINKIYIDGEQVTIEWL

SEQ ID NO: 926 - protein, 469 aa, synthetic construct
MSYTTPVRAAVYLRISEDRSGEQLGVARQREDCLKLCDQRKWQPVEYLDNDVSASTGKRRPAYEQMLADITAGKIAAVVAWDLDRLHRRPIELEAFMSLADEKRLALATVAGDVDLATPQGRLVARLKGSVAAHETEHKKARQRRAARQKAERGHPNWSKAFGYLPGPNGPEPDPRTAPLVKQAYADILAGASLGDVCRQWNDAGAFTITGRPWTTTTLSKFLRKPRNAGLRAYKGARYGPVDRGAIVGKAQWSPLVDEATFWAAQAVLDAPGRAPGRKSVRRHLLTGLAGCGKCGNHLAGSYRTDGRVVYVCKACHGVAILADNIEPILYHIVAERLAMPDAVDLLRREIHDTAEAETIRLELETLYGELDHLAVERAEGLLTARQVKISTDIVNAKITKLQACQLDQERLRVLDGIPLGTPQVAAIIAELSPDRFRAVLDVLAEVVVRPVGKSGRIFNPERVQVNWR

SEQ ID NO: 927 - protein, 452 aa, synthetic construct
MKAAIYIRVSTQEQVENYSIQAQTEKLTALCRSKDWDVYDIFIDGGYSGSNMNRPALNEMLSKLHEIDAVVVYRLDRLSRSQRDTTTLIEEYFLKNNVEFVSLSETLDTSSPFGRAMIGILSVFAQLERETIRDRMVMGKIKRIEAGLPLTTAKGRTFGYDVIDTKLYINEEEARQLQLIYDIFEEEQSITSLQKRLKKLGFRVRSYNRYNNWLTNDLYCGYVSYKDEVHVKGIHEPIISEEQFYRVQEIFTRMGKNPNMNRDSASLLNNLVVCGKCGLGFVHRSKDTTSRGKKYHYRYYSCKTYKHTHELEKCGNKTWRADKLEELIVNRVNNYSFASRNVDKEDELGGLNEKLKIEHAKKKRLFDLYINGSYEVNELDSLMNDIDAQINYYESQIEANEELKKNKKVQENLAGLATMDFDSLEFREKQLYLKSLISKIYIDGEQVTIEWL

SEQ ID NO: 928 - protein, 452 aa, synthetic construct
MKAAIYIRVSTREQVENYSIQAQTEKLTALCRSKDWDVYDIFVDGGYSGSNMNRPALNEMLSKLHEIDAVVVYRLDRLSRSQRDTITLIEEYFLKNNVEFVSLSETLDTSSPFGRAMIGILSVFAQLERETIRDRMVMGKIKRIEAGLPLTTAKGRTFGYDVIDTKLYINEEEARQLQLIYDIFEEVQSITFLQKRLKELGFKVRTYNRYNNWLTNDLYCGYVSYKDKVHVKGIHEPIISEEQFYRVQEIFTRMGKNPNMNRDSASLLNNLVVCSKCGLGFVHRRKDAMSRDKKYHYRYYSCKTYKHIHELEKCGNKIWRADKLEELIVNRVNNYSVASRNVDKEDELDSLNEKLKIEHAKKKRLFDLYINGSYEVSELDSMMNDIDAQINYYESQIEANEELKKNKKIQENLADLATVDFDSLEFREKQLYLKSLINKIYIDGEQVTIEWL

SEQ ID NO: 929 - protein, 469 aa, synthetic construct
MSYTTPVRAAVYLRISEDRSGEQLGVARQREDCLKLCDQRKWVPVEYLDNDVSASTGKRRPAYEQMLADITADKIAAVVAWDLDRLHRRPIELEAFMSLADEKRLALATVAGDVDLATPQGRLVARLKGSVAAHETEHKKARQRRAARQKAERGHPNWSKAFGYLPGPNGPEPDPRTAPLVKQAYADILAGASLGDVCRQWNGVGAFTITGRPWTTTALSKFLRKPRNAGLRAYKGARYGPVDRDAIVGKAQWSPLVDEATFWAAQAVLDAPGRAPGRKSVRRHLLTGLAGCGKCGNHLAGSYRTDGRVVYVCKACHGVTILADNIEPILYRIVAERLAMPDAVDLLRSEIHDAAEAETIRLELETLYGELDRLAVERAEGLLTARQVKISTDIVNAKITKLQARQLDQERLRVFDGIPLGTPQVAGTIAELSPDRFRAVLDVLAEVVVQPVGKSGRVFNPERVQVNWR

SEQ ID NO: 930 - protein, 485 aa, synthetic construct
MTKKVAIYTRVSTTSQAEEGFSIDEQIDRLTKYAEAMGWQVSDTYTDAGFSGAKLERPAMQRLINDIENKAFDTVLVYRLDRLSRSVRDTLYLVKDVFTKNKIDFISLNESINTSSAMGSLFLTILSAINEFERENIKERMTMGKLGRAKSGKSMMWTKTAFGYYHNRKTGILEIVPLQATIVEQIFTDYLSGISLTKLRDKLNESGHIGKDIPWSYRTLRQTLDNPVYCGYIKFKDSLFEGMHKPIIPYETYLKVQEELKERQQQAYERNNNPRPFQAKYMLSGMARCGYCGAPLRIVLGHKRKDGSRTMKYHCANRFPRKTKGITVYNDNKKCDSGTYDLSNLENTVIDSLIGFQENNDSQLKIINGNNQPILDTSSLKKQISQIDKKIQKNSDLYLNDFITMDELKARTDSLQAEKKLLKAKISGNKFNDSTDVFELVKAQLGSIPINELSYDNKKKIVNNLVSKVDVTADNVDIIFKFQLA

SEQ ID NO: 931 - protein, 485 aa, synthetic construct
MTKKVAIYTRVSTTSQAEEGFSIDEQIDRLTKYAEAMGWQVSDTYTDAGLSGAKLERPAMQRLINDIENKAFDTVLVYKLDRLSRCVRDTLYLVKDVFTKNKIDFISLNECIDTSSAMGSLFLTILSAINEFERENIKERMTMGKLGRAKSGKSMMWTKTAFGYYHNRKTGILEIVPLQAAIVKQIFTDYLSGISLTKLRDKLNESGHIGKDIPWSYRTLRQTLDNPVYCGYIKFKDSLFEGMHKPIIPYETYLKVQKELEERQQQTYERNNNPRPFQAKYMLSGMARCGYCGAPLKIVLGHKRKDGGRTMKYHCANRFPRKTKGVTVYNDNKKCDSGTYDLSNLENTVIDNLIGFQENNDSLLKIINGNNQPILDTSSFKEQISQIDKKIQKNSDLYLNDFITMDELKVRTDSLQAEKKLLEAKISENKFNDSTDVFELVKTQLGNIPINELSYDNKKKIVNNLVSKVDVTADSVDIIFKFQLA

SEQ ID NO: 932 - protein, 485 aa, synthetic construct
MTKKVAIYTRVSTTNQAEEGFSIDEQIDRLTKYAEAMGWQVSDTYTDAGFSGAKLERPAMQRLINDIENKAFDTVLVYKLDRLSRSVRDTLHLVKDVFTKNKIDFISLNESIDTSSAMGSLFLTILSAINEFERENIKERMTMGKLGRAKSGKSMMWTKTAFGYYHNRKTGILEIVPLQATIVEQIFTDYLSGISLTKLRDKLNESGHIGKDIPWSYRTLRQTLDNPVYCGYIKFKGSLFEGMHKPIIPYETYLKVQKELEERQQQAYERSNNPRPFQAKYMLSGMARCGYCGAPLRIVLGHKRKDGSRTMKYHCANRFPRKTKGVTVYNDNKKCDSGTYDLSNLENTVIDILIGFQEDNGSLLKIINGNNQPILDTSSFKRQISQIDKKIQKNSDLYLNDFITMDELKDRTDSLQAEKKLLEAKISENKFNDSTDVFELVKTQLGSIPINELSYDNKKKIVNNLVSKVDVTADNVDIIFKFQLA

SEQ ID NO: 933 - protein, 452 aa, synthetic construct
MKAAIYIRVSTREQVENYSIQAQTEKLTALCRSKDWDVYDIFIDGGYSGSNMNRPALNEMLSKLHEIDAVVVYRLDRLSRSQRDTITLIEEYFLKNNVEFVSLSETLDTSSPFGRAMIGILSVFAQLERETIRDRMVMGKIKRVEAGLPLTTAKGRTFGYDVIDTKLYINEEEARQLQLIYDIFEEEQSITSLQKRLKKLGFKVRTYNRYNNWLTNDLYCGYVSYKDKVHVKGIHEPIISEEQFYRVQEIFARMGKSPNMNRDSASLLNNLVVCGKCGLGFVHRRKDTMSRGKKYHYRYYSCKTYKHIHELEKCGNKIWRADKLEELIISRVNNYSFAGRNVDKEDELDSLNEKLKVEHAKKKRLFDLYINGSYDVSELDSMMNDIDARINYYESQIEANEELKKNKKIQESLADLATVDYDSLEFREKQLYLKSLINRIYIDGEQVTIEWL

SEQ ID NO: 934 - protein, 452 aa, synthetic construct
MKAAIYIRVSTREQVENYSIQAQTEKLTALCRSKDWDVYDIFVDGGYSGSNMNRPALNEMLSKLHEIDAVVVYRLDRLSRSQRDTITLIEEYFLKNNVEFVSLSETLDTSSPFGRAMIGILSAFAQLERETIRDRMVMGKIKRIEAGLPLTTAKGRTFGYDVIDTKLYINEEEAKQLQLIYDIFEEERSITSLQKRLKKLGFKVRTYNRYNNWLTNDLYCGYVSYKDKVHVKGIHEPIISEEQFYRVQEIFTRMGKNPNMNRDSASLLNNLVVCSKCGLGFVHRRKDTMSRDKKYHYRYYSCKTYKHIHELEKCGNKIWRADKLEELIINRVNNYSLASRNVDKGDELDSLNEKLKIEHAKKKRLFDLYINGSFDVSELDSMMNDIDTQINYYESQIEANEELKKNKKIQENLADLATVDFDSLEFREKQLYLKSLINKIYIDGEQVTIEWL

SEQ ID NO: 935 - protein, 452 aa, synthetic construct
MKAAIYIRVSTREQVENYSIQAQTEKLTALCRSKGWDVYDIFIDGGYSGSNMNRPALNEMLSKLHEIDAVVVYRLDRLSRSQRDTITLIEEYFLKNNVEFVSLSETLDTSSPFGRAMIGILSVFAQLERETIRDRMVMGKIKRIEAGLPLTTAKGRTFGYDVVDTRLYINEEEARQLQLIYDIFEEEQSITLLQKRLKKLGFKVRTYNRYNNWLTNDLYCGYVSYKDKVHVKGIHEPIISEEQFYRVQEIFARMGKNPNMNRESASLLNNLVVCSKCGLGFVHRRKDAMSRDKKYHYRYYSCKTYKHIHELEKCGNKIWRADKLEELIINRVNNYSLASRNADIEDELDSLNEKLKIEHAKKKRLFDLYINGSYEVSELDSMMNDIDAQINYYESQIEANKELKKNKKIQEDLANLATVDFDSLGFREKQLYLKSLINKIYIDGEQVTIEWL

SEQ ID NO: 936 - protein, 452 aa, synthetic construct
MKAAIYIRVSTQEQVGNYSIQAQTEKLTALCRSKDWDVYDIFIDGGYSGSNMNRPALNEMLSKLHEIDAVVVYRLDRLSRSQRDTTTLIEEYFLKNNVEFVSLSETLDTSSPFGRAMIGILSVFAQLERETIRDRMVMGKIKRIEAGLPLTTAKGRTFGYDVIDTKLYINEEEAKQLRLIYDIFEEEQSITLLQKRLKKLGFKVRTYNRYSSWLTNDLYCGYVSYKDKVHVKGIHEPIISEEQFYRVQEIFTRMGKNPNMNRVSASLLNNLVVCSKCGLGFVHRRKDTVSGGKKYHYRYYSCKTYKHTHELEKCGNKTWRADKLEELVINRVNNYSFAGRNVDKEDELDSLNGKLKIEHAKRKRLFDLYINGSYEVSELDSMMNDIDAQINYYESQIEANEKLKKNRKIQENLADLATVDFDSLEFREKQLYLKSLINKIYIDGEQVTIEWL

SEQ ID NO: 937 - protein, 452 aa, synthetic construct
MKAAIYIRVSTREQVENYSIQAQTEKLTALCRSKGWDVYDIFIDGGYSGSNMNRPALNEMLSKLHEIDAVVVYRLDRLSRSQRDTITLIEEYFLKNNVEFVSLSETLDTSSPFGRAMIGILSVFAQLERETIRDRMVMGKIKRIEAGLPLTTAKGRTFGYDVIDTRLYINEEEARQLQLIYDIFEEEQSITFLQKRLKKLGFKVRTYSCYNNWLTNDLYCGYVSYKDKVHVKGIHEPIISEEQFYRVQEIFTRMGKNPNMNRDCASLLNNLVVCGKCGLGFVHRRKDTMSRGKKYHYRYYSCKTYKHIHELEKCGNKIWRADKLEDLIINRVNNYSFASRNVDKEDELDSLNEKLKTEHAKKKRLFDLYINGSYEVSELDSMMNDIDAQINYYESQIEANEELKKNKKIQENLANLATVDYDSLEFREKQLYLKSLINKIYIDGEQVTIEWL

SEQ ID NO: 938 - protein, 485 aa, synthetic construct
MTKKVAIYTRVSTTNQAEEGFSIDEQIDRLTKYAEAMGWQVSDTYTDAGFSGAKLERPAMQRLINDIENKAFDTVLVYKLDRLSRSVRDTLYLVKDVFTKSKIDFISLNESINTSSAMGSLFLTILSAINEFERENIKERMTMGKLGRAKSGKSMMWSKTAFGYYHNRKTGILEIVPLQATIVEQIFTDYLSGISLTKLRDKLNESGHIGKDIPWSYRTLRQTLDNPVYCGYIKFKDSLFEGMHKPIIPYETYLKVQKELEERQQQTYERNNNPRPFQAKYMLSGMARCGYCGAPLKIVLGHKRKDGSRTMKYHCANRFPRKTKGITVYNDNKKCDSGTYDLSNLENTVIDNLIGFQENDDSLLEIINGNNQLILDTSSFEKQISQIDKKIQKNSDLYLNDFITMDELEDRTDSLQAEKKLLKAKISENKFNDNTDVFELVKTQLGSIPINELSYDNKKRIVNNLVSKVDVTADNVDIIFKFQLA

SEQ ID NO: 939 - protein, 452 aa, synthetic construct
MKAAIYIRVSTREQVENYSIQAQTEKLTALCRSKDWDVYDIFIDGGYSGSNMNRPALNEMLSKLHEIDAVVVYRLDRLSRSQRDTITLIEEHFLKNNVEFVSLSETLDTSSPFGRAMIGILSVFAQLERETIRDRMVMGKIKRIEAGLPLTTAKGRTFGYDVIDTKLYINEEEAKQLQLIYDIFEEEQSITFLQKRLKKLGFKVRTYNCYNNWLTNDLYCGYVSYKDKVHVKGVHEPIISEEQFYRVQEIFTRTGKNPNMNRDSASLLNNLVVCSKCGLGFVHRRKDTVSRGKKYHYRYYSCKTYKHIHELEKCGNKIWRADKLEELIISRVNNCSFASRNVDKEDELDSLNEKLKIEHAKKKRLLDLYINGSYEVSELDSMMSDIEAQINYYESLIEANEELKKSKKIQENLANLATVDYDSLEFREKQLYLKSLINKIYIDGEQVTIEWL

SEQ ID NO: 940 - protein, 485 aa, synthetic construct
MTKKVAIYTRVSTTNQAEEGFSIDEQIDRLTKYAEAMGWQVSDTYTDAGVSGARLERPAMQRLINDIENKVFDTVLVYKLDRLSRSVRDTLYLVKDVFTKNKIDFISLNESIDTSSAMGSLFLTILSAINEFERENIKERMTMGKLGRAKSGKSMMWTKTAFGYYHNRKTGILEIVPLQATIVEQIFTDYLSGISLTKLRDKLNESGHIGKDIPWSYRTLRQTLDNPVYCGYIKFKDSLFEGMHKPIIPYETYLKVQKELEERQQQTYERNNNPRPFQAKYMLSGMARCGYCGAPLKIVLGHKRKDGSRTMKYHCANRFLRKTKGVTVYNDSKKCDSGTYDLSNLENTVIDNLIGFQENNDSLLKIINGNNQPILDTSSFKKQISQIDKKIQKNSDLYLNDLITMDELKDRTDSLQAEKKMLKAKISENKFNDSTDVFELVKTQLGSIPINELSYDNKKKIVNNLVSKVDVTADNVDIIFKFQLA

SEQ ID NO: 941 - protein, 485 aa, synthetic construct
MTKKVAIYTRVSTTNQAEEGFSIDEQTDRLTKYAEAMGWQVSDTYTDAGFSGAKLERPAMRRLINDIGNKAFDTVLVYKLDRLSRSVRDTLYLVKDVFTKSKIDFISLSESIDTSSAMGSLFLTILSAINEFERENIKERMTMGKLGRAKSGKSMMWTKTAFGYYHNRKTGILEIVPLQATIVEQIFTDYLSGISLTKLRDKLNESGHIGKDIPWSYRTLRQTLDNPVYCGYIKFKGSLFEGMHKPIIPYETYLKVQKELEERQQQTYERNNNPRPFQAKYMLSGMARCGYCGAPLRIVLGHKRKDGSRTMKYHCANRFPRKTKGVTVYNDNKKCDSGTYDLSNLENTVIDNLIGFQENNDSLLKIINGNNQPIPDTSSLKKRISQIDKKIQRNSDLYLNDFITMDELKDRTDSLQAEKKLLKAKISENKFNDSTDVFELVKTQLGSIPINELSYDNKKKIVNNLVSKVDVTADSVDIIFKFQLA

SEQ ID NO: 942 - protein, 469 aa, synthetic construct
MSYTTPVRAAVYLRISEDRSGEQLGVARQREDCLKLCGQRKWVPVEYLDNDVSASTGKRRPAYEQMLADITAGKIAAVVAWDLDRLHRRPVELEAFMSLADEKRLALATVAGDVDLATPQGRLVARLKGCVAAHETEHKKARQRRAARQKAERGHPNWSKAFGYLPGPNGPEPDPRIAPLVKQAYADILAGASLGDVCRQWNDVGAFTITGRPWTTTALSKFLRKPRNAGLRAYKGARYGPVDRDAIVGKAQWSPLVDEATFWAAQAVLDAPGRAPGRKSVRRHLLTGLAGCGKCGNHLAGSYRTDGRVVYVCKACHGVAILADNIEPILYHIVTERLAMPDAVDLLRREIHDAVEAETIRLELETLYGELDRLAVERAEGLLTARQVKISTDIVNAKITKLQAHRLDQERLRVFDGIPLGTPQVAGMIAELSPDRFRAVLDVLAEVVVQPVGKSGRTSNPERVQVSWR

SEQ ID NO: 943 - protein, 485 aa, synthetic construct
MTKKVAIYTRVSTTNQAEEGFSIDEQIDRLTKYAEAMGWQVSGTYTDAGFSGAKLERPAMRRLINDMENKAFDTVLVYKLDRLSRSVRDTLYLVKDVFTKNKVDFISLNESIDTSSAMGSLFLTILSAINEFERENIKERMTMGKLGRAKSGKSMMWTKTAFGYYHNRKTGILEIVPLQAIIVEQIFTDYLSGISLTKLRDKLNENGHIGKDIPWSYRTLRQTLDNPVYCGYIKFKDSLFEGMHKPIIPYETYLKVQRELEERQRQTYERNNNPRPFQAKYMLSGVARCGYCGAPLRIVLGHKRKDGSRTMKYHCANRFPRKTKGVTVYNDNKKCDSGTYDLSNLEDTVIDNLIGFQENNDSLLKIINGNDQPILDTSSFKKQISQIDKKIQKNSELYLNDFITMDELKDRTDSLQAEKKLLEAKISENKFNDSADVFELVKTQLGNVPINELSYDNKKKIVNNLVSKVDVTADNVDIIFKFQLA

SEQ ID NO: 944 - protein, 452 aa, synthetic construct
MKAAIYIRVSTQEQVENYSIQAQTEKLTALCRSKDWDVYDIFVDGGYSGSNMNRPALNEMLSKLHEIDAVVVYRLDRLSRSQRDTTTLIEEYFLKNNVEFVSLSETLDTSSPFGRAMIGILSVFAQLERETIRDRMVMGKIKRVEAGLPLTTAKGRTFGYDVIDTKLYINEEEAKQLQLIYDIFEEEQSITSLQKRLKKLGFKVRTYNRYNNWLTNDLYCGYVSYKDKVHVKGIHEPIISEEQFYRVQEIFTRMGKNPNMNRDSASLLSNLVVCSKCGLGFVHRSKDTMSRGKKYHYRYYSCKTYKHTHELEKCGNKTWRADKLEELIIDRVNNYSFASRSVDKEDELDSLNEKLEIEHAKKKRLFDLYINGSYEVSELDSLMSDIDAQINYYEGQIKADEGLKKNKKIQENLANLATVDFDSLEFREKQLYLKSLINKIYIDGEQVTIEWL

SEQ ID NO: 945 - protein, 469 aa, synthetic construct
MSYTTPVRAAVYLRISEDRSGEQLGVARQREDCLKLCDQRKWVPVEYLDNDVSASTGRRRPAYEQMLADITAGKIAAVVAWDLDRLHRRPIELEAFMSLADEKRLALATVAGDVDLATPQGRLVARLKGSVAAHETEHKKARQRRAARQKAERGYPNWSRAFGYLPGPNGPEPDPRTAPLVKQAYADILAGASLGDVCRQWNGAGAFTITGRPWTATTLSKFLRKPRNAGLRAYKGARYGPVDRDAIVGKAQWSPLVDEATFWAAQAVLDAPGRAPGRKSVRRHLLTGLAGCGKCGNHLAGSYRTDGRAVYVCKACHGVAILADNIEPILYHIVAERLAMPNAVDLLRREIHDAAEAETIRQELEALYDELDRLAVERAEGLLTARQVKISTDIVNAKITKLQACQQDQERLRVLDGIPLGTPQVAGMITELSPNRFRAVLDVLVEVVVRPVGKSGGAFNPERVQVNWR

SEQ ID NO: 946 - protein, 469 aa, synthetic construct
MSYTTPMRAAVYLRISEDRSGEQLGVARQREDCLKLCDQRKWVPVEYLDNDVSASTGRRRPAYEQMLADITAGKIAAVVAWDLDRLHRRPVELEAFMSLADEKRLALATVAGDVDLATPQGRLVARLKGCVAAHETEHKKARQRRAARQKAERGHPNWSKAFGYLPGPNGPEPDPRTAPLVKQAYADILAGASLGDVCRQWNDAGAFTITGRPWTTTTLSKFLRKPRNAGLRAYKGARYGPVDRDAIVSKAQWSPLVDGATFWAAQAVLDAPGRAPGRKSVRRHLLTGLAGCGKCGNHLAGSYRTDGRVVYVCKACHGVSILAVNIEPILYHIVAERLAMPDAVDLLRREIHDAAEAETIRLELETLYGELDRLAVERAEGLLTARQVKISTDIVNAKITKLQARQLDQERLRVFDGIPLGTPQVAGMIAELSPDRFRAVLDVLAEVVVQPVGKSGRIFNPERVQVNWR

SEQ ID NO: 947 - protein, 469 aa, synthetic construct
MCYTTPVRAAVYLRISEDRSGEQLGVARQREDCLKLCGQRKWVPVEYLDNDVSASTGKRRPAYEQMLADITAGKIAAVVAWDLDRLHRRPIELEAFMSLADEKRLALATVAGDVDLATPQGRLVARLKGSVAAHETEHKKARQRRAARQKAERGHPNWSKAFGYLPGPNGPEPDPRTAPLVKQAYADILAGASLGDVCRRWNDAGAFTITGRPWTTTALSKFLRKPRNAGLRAYKGARYGPVDRDAIVGKAQWSPLVDEATFWAAQAVLDAPGRAPGRKSVRRHLLTGLAGCGKCGNHLAGSYRTDGQVVYVCKACHGVAILADNIEPILYHIVAERLAMPDAVDLLRREIHDATEAETIRLELETLYGELDRLAVERAEGLLTARQVKISTDIVNAKITKLQARQLDQERLRVLDGIPLGTPQVAGTIVELSPDRFRAVLDVLAEVVVQPVGKSGRIFNPERVQVNWR

SEQ ID NO: 948 - protein, 485 aa, synthetic construct
MTKKVAIYTRVSTTNQAEEGFSIDEQIDRLTKYAEAMGWQVSDTYTDAGLSGAKLERPAMQRLINDIENKAFDTVLVYKLDRLSRSVRDTLYLVKDVFTKNKIDFISLNECIDTSSAMGSLFLTILSAINEFERENIKERMTMGKLSRAKSGKSMMWTKTAFGYYHNRKTGILEIVPLQASIVEQIFTDYLSGISLTKLRDKLNESGHIGKDVPWSYRTLRQTLDNPVYCGYIKFKDSLFEGMHKPIIPYETYLKVQKELEERQQQTYERNNNPRPFQAKYMLSGMARCGYCGAPLKIVLGHKRKDGSRTMKYHCTNRFPRKTKGVTVYNDNKKCDSGTYDLSNLENTVIDNLIGFQENSDSLLKIINGNNQPILDTSSFKKQISQINKKIQKNSDLYLNDFITMDELKDRTDRLQAEKRLLKAKISESKFNDSADVFELVKTQLGSIPINELSYDDKKRIVNNLVSKVDVTADNVDIIFKFQLA

SEQ ID NO: 949 - protein, 469 aa, synthetic construct
MSYTTPVRAAVYLRISEDRSGEQLGVARQREDCLKLCSQREWVPVEYLDNDVSASTGKRRPAYEQMLADITAGKIAAVVAWDLDRLHRRPVELEAFMSLADEKRLALATVAGDVDLATPQGRLVARLKGCVAAHETEHKKARQRRAARQKAERGHPNWSKAFGYLPGPNGPEPDPRTAPLVKQAYADILAGASLGDVCRQWNDAGAFTTTGRLWTTTTLSKFLRKPRNAGLRAYKGARYGPVDRDAIVGKAQWSPLVDEATFWAAQAVLDAPGRAPGRKSVRRHLLTGLAGCGKCGNHLAGSYRTDGRVAYVCKACHGVAILADNIEPFLYRIVAERLAMPDAVDLLRREIHDAAEAETIRLELETLYGELDRLAVERAEGLLTARQVKIGTDIVNAKITKLQARQLDQERLRVLDGIPLGTPQVAGMIAELSPDRFRAVLDVLAEVVVQPVGKGGRIFNPERVQVNWR

SEQ ID NO: 950 - protein, 485 aa, synthetic construct
MTKKVAIYTRVSTTNQAEEGFSIDEQVDRLTKYAEAMGWQVSDTYTDAGLSGAKLERPAMQRLINDIENRAFDTVLVYKLDRLSRSVRDTLYLVKDVFTKNKIDFISLNESIDTSSAMGSLFLTILSAINEFERENIKERMTMGKLGRAKSGKSMMWTKTAFGYYHNRKTGILEIVPLQATIVEQIFTDYLSGISLTKLRDKLNESGHIGKDIPWSYRTLRQTLDNPVYCGYIKFKDSLFEGMHKPIIPYETYLKVQKELEERQQQTYARNNNPRPFQAKYMLSGVARCGYCGAPLRIVLGHKRKDGSRTMKYHCANRFPRKTKGVTVYNDNKKCDSGTYDLNNLENTVIDNLIGFQENNDSLLKIINGNNQPILDTGSFEKQISQIDKKIQKNSDLYLNDFITMDELKNRTDSLQAEKKLLKAKISENKFNDSTDVFEQVKTQLGSIPINELSYDNKKKIVNNLVSKVDVTADNVDIIFKFQPA

SEQ ID NO: 951 - protein, 452 aa, synthetic construct
MKAAIYIRVSTREQVENYSIQAQTEKLTALCRSKDWDVYDIFIDGGYSGSNMNRPALNEMLSKLHEIDAVVVYRLDRLSRSQRDTITLIEEYFLKNNVEFVSLSETLDTSSPFGRAMIGILSVFAQLERETIRDRMVMGKIKRIEAGLPLTTAKGRTFGYDVIDTKLYINEEEAKQLRLIYDIFEEEQSITFLQKRLKKLGFKVRTYNRYNNWLTNDLYCGYVSYKDKVHVKGIHEPIISEEQFYRVQEIFTRMGKNPNMNRDSASLLNNLVVCNKCGLGFVHRRKDIMSRGKKYHYRYYSCKTYKHIHELEKCGNKIWRADKLEELIINRVSNYSLASRNVDKEDELDSLNEKLKIEHAKKKRLFDLYINGSYEVSELDSMMNDIDAQINYYESQIETNEELRKNKKIQENLAYLAAVDFDSLEFREKQLYLKSLISKIYIDGEQVTIEWL

SEQ ID NO: 952 - protein, 485 aa, synthetic construct
MTKKVAIYTRVSTTNQAEEGFSIDEQIDRLTKYAEAMGWQVSDTYTDAGLSGAKLERPAMQRLINDIENKAFDTVLVYKLDRLSRSVRDTLYLVKDVFTKNKIDFISLSESIDTSSAMGSLFLTILSAINEFERENIKERMAMGKLGRAKSGKSMMWTKTAFGYYHNRKTGILEIVPLQAAIVEQIFTDYLSGISLTKLRDKLNESGHIGKDIPWGYRTLRQTLGNPVYCGYIKFKDSLFEGMHKPIIPYETYLKVQKELEERQQQAYERNNNPRPFQAKYMLSGMARCGYCGAPLRIVLGHKRKDGSRTMKYHCANRFPRKTKGVTVYNDNKKCDSGTYDLSNLESTVIDNLIGLQENNDSLLKIINGNNQPILDTSSFKEQISQIDRKIQKISDLYLNDFITMDELKDRTDSLQAEKKLLKAKISENKFNDSTDVFELVKTQLGSIPINELSYDNKKKIVNNLVSKVDVTADNVDIIFKFQPA

SEQ ID NO: 953 - protein, 469 aa, synthetic construct
MSYTTPVRAAVYLRISEDRSGEQLGVARQREDCLKLCDQRKWVPVEYLDNDVSASTGKRRPAYEQMLADITAGKIAAVVAWDLDRLHRRPVELEAFMSLADEKRLALATVAGDVDLATPQGRLVARLKGCVAAHETEHKKARQRRAARQKAERGLPNWSKAFGYLPGPNGPEPDPRTAPLVKQAYADILAGASLGDVCRQWNDAGAFTITGRPWTTTTLSKFLRKPRNAGLRAYRGARYGPVDRDAIVGKAQWSPLVDEATFWAAQAVLDAPGRAPGRKSVRRHLLTGLAGCGKCGNHLAGSHRTDGRVVYVCKACHGVVILADNIEPFLYHIVAERLAMPDAVNLLCREIHDAAEAETIRPELETLYGELDRLAVERAEGLLTARQVKISTDVVNAKIAKLQARRLDQERLRVFNGIPLGTPQVAGVIAELSPDRFRAVLDVLAEVVVQPVGKGGRIFNPERVQVNWR

SEQ ID NO: 954 - protein, 485 aa, synthetic construct
MTRKVAIYTRVSTTNQAEEGFSIDEQIDRLTKYAEAMGWQVSDTYTDAGLSGAKLERPAMQRLINDIENKAFDTVLVYKLDRLSRSVRDTLYLVKDVFTKNKIDFISLNESIDTSSAMGSLFLTILSAINEFERENIKERMTMGKLGRAKSGKSMMWTKTAFGYHHNRKTGILEIVPLQATIVEQIFTDYLGGISLTKLRDKLNESGHIGKDIPWSYRTLRQTLDNPVYCGYIKFKDGLFEGMHKPIIPYETYLKVQKELEERQQQTYERNNNPRPFQAKYMLSGMARCGYCGAPLRIVLGHKRKDGSRTMKYHCANRFPRKTKGVTAYNGNKKCDSGTYDLSNLENTVIDNLIGFQENNDSLLKIVNGNNHPILDTSSFKKQISLIDKKIQKNSDLYLNDFITMDELKDRTDSLRAEKKLLKAKISETKFNDSTDVFELVKTQLGSIPLNELSYDNKKKIVNSLVSKVDVTADNVDIIFKFQRA

SEQ ID NO: 955 - protein, 485 aa, synthetic construct
MTKKVAIYTRVSTTNQAEEGFSIDEQIDRLTKYAEAMGWQVSDTYTDAGLSGAKLERPAMQRLINDIENKSFDTVLVYKLDRLSRSVRDTLYLVKDVFTKNKIDFISLNESIDTSSAMGSLFLTILSAINEFERENIKERMTMGKLGRAKSGKSMMWTKTAFGYYHNRKTGILEIVPLQATIVEQIFTDYLSGISLTKLRDKLNESGHVGKDIPWSYRTLRQILDNPVYCGYIKFKDSLFEGMHKPIIPYETYLRVQKELEERQQQTYERNNNPRPFQAKYMLSGMARCGYCGAPLKIVLGHKRKDGSRTMKYHCANRFPRKTKGVTVYNDNKKCDSGTYDLSNLENTVIDNLIGFQENNDSLLKIINGNNQPILDTGSFKKQISQIDKKIRKNNDLYLNDFITMDELKERTDSLRAEKKLLKAKISENKFNDSTDVFKLVKTQLGSIPINELSYDNKKKIVNNLVSKVDVTADNVDIIFKFQLA

SEQ ID NO: 956 - protein, 469 aa, synthetic construct
MSYTTPVRAAVYLRISEDRSGEQLGVARQREDCLKLCGQRKWVPVEYLDNDVSASTGKRRPAYEQMLADITAGKIAAVVAWDLDRLHRRPIELEAFMSLADEKRLALATVAGDVDLATPQGRLVARLKGGVAAHETEHKKARQRRAARQKAERGYPNWSKAFGYLPGPNGPEPDPRTAPLVKQAYADILAGASLGDVCRQWNDAGAFTITGRPWTTTTLSKFLRKPRNAGLRAYKGARYGPVDRDAIVGKAQWSPLVDEATFWAAQAVLDAPGRAPGRKSVRRHLLTGLAGCGKCGNHLAGSYRTDGRVVYVCKACHGVAILADNIEPILYHIVAERLAMPDAVDLLRREIQDGAEAETIRLELETLYGELDRLAVERAEGLLTARQVKISTDIVNAKITKLQACQLDQERLRVFDGIPLGTPQVAGMIAELSPDRFRAVLDVLAEVVVQPVGKSGRTFNPERVQVNWR

SEQ ID NO: 957 - protein, 452 aa, synthetic construct
MKAAIYIRVSTREQVENYSIQAQTEKLTALCRSKEWDVYDIFIDGGYSGGNMNRPALNEMLSKLREIDAVVVYRLDRLSRSQRDTITLIEEYFLKNNVEFVSLSETLDTSSPFGRAMIGILSVFAQLERETIRDRMVMGKIKRIEAGLPLTTAKGRTFGYDVVDTKLYINEEEAKQLRLIYDIFEEEQSITFLQKRLKKLGFKVHTYSRYNSWLTNDLYCGYVSYKDKVHVKGIHEPIISEEQFYRVQEIFTRMGKNPNMNRDSASLLNNLVVCGRCGLGFVHRRKDTMSRGKKYHYRYYSCKTYKHIHELEKCGNKIWRADKLEELVINCVNDYSFASRNADKEDELDSLNEKLKVEHAKKKRLFDLYISGSYEVSELDSVMNDIDAQINYYESQIEANEELKKNKKIQENLADLATVDYDSLEFREKQLYLKSLINKIYIDGEQVTIEWL

SEQ ID NO: 958 - protein, 452 aa, synthetic construct
MKAAIYIRVSTQEQVGNYSIQAQTEKLTALCRSKDWDVYDIFIDGGYSGSNMNRPALNEMLSRLHEIDAVVVYRLDRLSRSQRDTTTLIEEYFLKNNVEFVSLSETLDTSSPFGRAMIGILSVFAQLERETIRDRMVMGKIKRIEAGLPLTTAKGRTFGYDVIDTKLYINEEEAKQLQLIYDIFEEEQSITSLQKRLKELGFKVRTYNRYNNWLTNDLYCGYVSYKDKVHVKGIHEPIISEEQFYRVQEIFARMGRNPNMNRDSASLLSNLVVCSKCGLGFVHRSKDTMCRGKKYHYRYYSCKTYKHTHELEKCGNKTWRADKLEELIINRVNNYSFASRNVDKEDELDSLNEKLKIEHGKKKRLFDLYINGSYEVSELDSMMNDIDAQINYYESQIEANEELKKNKKIQENLADLATVDFDSLEFREKQLYLKSLINKIYVDGEQVTIDWL

SEQ ID NO: 959 - protein, 469 aa, synthetic construct
MCYTTPVRAAVYLRISEDRSGEQLGVARQREDCLKLCDQRKWEPVEYLDNDVSASTGKRRPAYEQMLADIAAGRIAAVVAWDLDRLHRRPIELEAFMCLADEKRLALATVAGDVDLATPQGRLVARLKGSVAAHETEHKKARQRRAARQKAELGHPNWNKAFGYLPGPSGPEPDPRTAPLVKQAYADVLAGASLGDVCRRWNDAGALTITGRPWTTTTLSKFLRKPRNAGLRAYKGARYGPVDRDAIVGKAQWSPLVDEATFWAAQAVLDAPGRAPGRKSVRRHLLTGLVGCGKCGNHLAGSYRTDGRVVYVCKTCHGVTILADNIEPILYHIVAERLATPNAVDLLRCEIYDAAEAETTRLELETLYGELDRLAVERAEGLLTARQVKISTDIVNAKITKLQARQLDQERLRVFDGIPLGTPQVAGIIAELSPDRFRAVLDVLAVVVVQPVGKSGRIFNPERVQVNWR

SEQ ID NO: 960 - protein, 485 aa, synthetic construct
MTKKVAIYTRVSTTNQAEEGFSIDEQIDRLTKYAEAMGWQVSGTYTDAGLSGAKLERPAMQRLINDIENKAFDTVLVYKLDRLSRSVRDTLYLVKDVFTKNKIDFISLNESIDTSSAMGSLFLTILSAINEFERENIKERMTMGKLGRAKSGKSMMWTKTAFGYYHNRETGTLEIVPLQATIVEQIFTDYLSGISLTKLRDKLNEGGHIGKDIPWSYRTLRQTLDNPVYCGYIRFKDSLFEGMHEPIIPYETYLKVQKELEERQQQTYERNNNPRPFQAKYMLSGMARCGYCGAPLKIVLGHKRKDGSRTMKYHCANRFPRKTKGVTVYNDNTKCDSGAYDLSNLENTVIDNLIGLQEDNDSLLEIINGNNQPILDTSSFKKQISRIDKKIQKNSDLYLNDFITMDELKDRTDSLLAEKKLLEAKISENKFNDSTDVFERVKTQLGSIPINELSYDNKKKIVNNLVSKVDVTADSVDIIFKFQLA

SEQ ID NO: 961 - protein, 469 aa, synthetic construct
MSYTTPVRAAVYLRISEDRSGEQLGVARQREDCLKLCDQRKWVPVEYLDNDVSASTSKRRPAYEQMLADITAGKIAAVVAWDLDRLHRRPIELEAFMSLADEKRLALATVAGDVDLATPQGRLVARLKGCVAAHETEHKKARQRRAARQKAERGHPNWSKAFGYLPGPNGPEPDPRTAPLVKQAYADILAGASLGDVCRQWNDAGALTITDRPWTTTTLSKFLRKPRNAGLRAYKGARYGPVDRDAIVGRAQWSPLVDEATFWAAQAVLDAPGRAPGRKSVRRHLLTGLAGCGKCGNHLAGSCRTDGRVVYVCKACHGVAILADNIVPILYHIVAERLAMPDAVDLLRREIHDAAEAETIRLELETLYGELDRLAVERAEGLLTARQVKISTDIVNAKITKLQARQLDQERLRVLDGIPLGTPQVAGMIAELSPDRFRAVLDVLAEVVVQPAGKSGRIFNPERVQVNWR

SEQ ID NO: 962 - protein, 469 aa, synthetic construct
MSYTTPVRAAVYLRISEDRSGEQLGVARQREDCLKLCGQRKWVPVEYLDNDVSASTGKRRPAYEQMLADITAGKIAAVVAWDLDRLHRRPVELEAFMSLADEKRLALATVAGDVDLATPQGRLVARLKGCVAAHETEHKKARQRRAARQKAERGHPNWSKAFGYLPGPDGPEPDPRTAPLVKQAYADILAGASLGDVCRQWNDAGAFTITGRPWTTTALSKFLRKPRNAGLRAYKGARYGPVDRDAIVGKAQWSPLVDEAAFWAAQAVLDAPGRAPGRKSVRRHLLTGLAGCGKCGNHLAGSYRTDGRVVYVCKACHGVSILADNIEPILYRIVAERLAMPDAVDLLRREIHDAAEAETTRLELETLYGELDRLAVERAEGLLTARQVKISTDIVNAKITKLQARQQDQERLRVLDGIPLGTPQVAGVIAELSPDRFRAVLDVLAEVVVQPVGKSSRIFNPERVQVNWR

SEQ ID NO: 963 - protein, 452 aa, synthetic construct
MKAAIYIRVSTREQVENYSIQAQTEKLTALCRSKDWDVYDIFIDGGYSGSNMNRPALNEMLSKLHEIDAVVVYRLDRLSRSQRDTITLIEEYFLKNNVEFVSLSETLDTSSPFGRAMIGILSVFAQLERETIRDRMVMGKIKRIEAGLPLTTAKGRTFGYDVIDTKLYVNEEEAKQLQLIYDIFEEEQSITFLQKRLKKLGFKVRTYSCYNNWLTNDLYCGYVSYKDKVHVRGIHEPIVSEEQFYRVQEIFARMGKNPNMNRDSASLLNNLVVCSKCGLGFVHRRKDAMSRDKKYHYRYYSCKTYKHIHELEKCGNKIWRADKLEELIIDRVNNYSLASRNVDKEDELDCLNEKLKIEHAKKKRLFDLYINGSFEVSELDGMTNDIDAQINYYESQIEANEELKKNKKIQESLANLATVDFDSLEFREKQLYLKSLINKIYVDGEQVTIEWL

SEQ ID NO: 964 - protein, 485 aa, synthetic construct
MTKKVAIYTRVSTTNQAEEGFSIDEQIDRLTKYAEAMGWQVSDTYTDAGFSGAKLERPAMQRLINDIENKAFDTVLVYKLDRLSRSVRDTLYLVKEVFTKNKIDFISLNESIDTSSAMGSLFLTILSAINEFERENIKERMTMGKLGRAKSGKSMMWTKTAFGYYHNRRTGILEIAPLQATIVEQIFTDYLSGISLTKLRDKLNESGHIGKDIPWSYRTLRQTLDNPVYCGHIKFKGSLFEGMHKPIIPYETYLKVQKELEERQQQTYERNNNPRPFQAKYMLSGVARCGYCGAPLRIVLGHKRKDGSRTMKYHCANRFPRKTKGSTVYNDNKKCDSGTYDLSYLENTVIDNLIGLQENNDSLLKIISGNNQPILDTSSFKKQISQIDKKIQKNSDLYLNDFITMDELKDRTDSLQAEKKLLKAKISENSFNDSTDVFELVRAQLGSVPINELSYDNKKEIVNNLVSKVDVTADNVDIIFKFQLA

SEQ ID NO: 965 - protein, 469 aa, synthetic construct
MSYTTPVRAAVYLRISEDRSGEQLGVARQREDCLKLCGQRKWEPVEYLDNDVSASTGKRRPAYEQMLADITAGKIAAVVAWDLDRLHRRPVELEAFMSLADEKRLALATVAGDVDLATPQGRLVARLKGSVAAHETEHKKARQRRAARQKAERGHPNWSKAFGYLPGPNGPEPDPRTAPLVKQAYTDILAGASLGDVCRRWNGAGAFTITGRPWTTTTLSKFLRKPRNAGLRAYKGARYGPVDRDAIVGKAQWSPLVDEATFWAAQAVLDAPGRAPGRKSVRRHLLTGLAGCGKCGNHLAGSYRTDGKVVYVCKACHGVAILADNIEPILYHIVAERLAMPDAVDLLRREIHDAAEAETIRLELETLYGELDRLAVERAEGLLTARQVKISTDIVNAKITELRARQLDQERLRVFDGIPLGTPQVAGMIAELSPNRFRAVLDVLAEVVVQPVGKSGRIFNPERVLVNWR

SEQ ID NO: 966 - protein, 485 aa, synthetic construct
MTKKVAIYTRVSTTNQAEEGFSIDEQIDRLTKYAEAMGWQVSDTYTDAGSSGAKLERPAMQRLINDIENKAFDTVLVYKLDRLSRSVRDTLYLVKEVFTKNKIDFISLNESIDTSSAMGSLFLTILSAINEFERENIKERMTMGKLGRAKSGKSMMWTKTAFGYYHNRKTGILEIVPLQATIVEQIFTDYLSGISLTKLRDKLNESGHIGKDIPWSYRTLRQTLGNPVYCGYIKFKDSLFEGMHKPIIPYETYLKVQKELEERQQQTYERNNNPRPFQAKYMLSGMARCGYCGAPLKIVLGHKRKDGSRTMKYHCANRFPRKTKGVTVYNDNKKCDSGTYDLSNLENAVIDNLIGFQENSDSLLKIINGNNQPILDTSSFEKQISQIDKKIQKNSDLYLNDFITMDELKDRTDSLQAEKKLLEAKISENKFNDSTDVFERVKTQLGSIPINELSYDNRKKIVNNLVSKVDVTADNVDIIFKFQLA

SEQ ID NO: 967 - protein, 452 aa, synthetic construct
MKAAIYIRVSTQEQVGNYSIQAQTEKLTALCRSKDWDVYDIFIDGGYSGSNMNRPALNEMLSKLHEIDAVVVYRLDRLSRSQRDTTTLIEEYFLKNNVEFVSLSETLDTSSPFGRAMIGILSVFAQLERETIRDRMVMGKIKRIEAGLPLTTAKGRTFGYDVIDTKLYVNEEEAKQLRLIYDIFEEEQSITSLQKRLKKLGFKVRTYNRYSSWLTNDLYCGYVSYKDQVHVKGIHEPIISEEQFYRVQEIFTRTGKNPNMNRDSASLLNNLVVCSKCGLGFVHRSKDTVGRGKKYHYRYYSCKTYKHTHELEKCGNKTWRADKLEELIINRVNNYSFASRNVDKEDELNSLNERLKIEHAKKKRLFDLYINGSYEVSELDSMMNDIDAQINYYESQIEANGELKKNKKIQENLADLATVDFDSLEFREKQLYLKSLINKIYIDGEQVTIEWL

SEQ ID NO: 968 - protein, 485 aa, synthetic construct
MTKKVAIYTRVSTTNQAEEGFSIDEQVDRLTKYAEAMGWQVSDTYTDAGFSGAKLERPAMQRLINDIENKAFDTVLVYKLDRLSRSVRDTLYLVKDVFTKNKVDFISLNESINTSSAMGSLFLTILSAINEFERENIKERMTMGKLGRAKSGKSMMWTKTAFGYYHNRKTGILEVVPLQATIVEQIFTDYLSGVSLTKLRDKLNESGHIGKDIPWSYRTLRQTLDNPVYCGYIKFKDSLFEGMHKPIIPYETYLKVQKELEERQQQAHERNNNPRPFQAKYMLSGMARCGYCGAPLRIVLGRKRKDGSRTMKYHCANRFPRKTKGVTVYNDNKKCDSGTYDLSNLENTVIDNLIGLQENNDSLLRIINGNNQPIPDTSSFKRQISQIDKKIQKNSDLYLNDFITMDELKDRTDSLQAEKKLLKAKISENKFNDSADVFELVKTQLGSIPINELSYDNKKKIVNNLVSKVDVTADSVDIIFKFQLA

SEQ ID NO: 969 - protein, 469 aa, synthetic construct
MSYTTPVRAAVYLRISEDRSGEQLGVARQREDCLKLCDQRKWVPVEYLDNDVSASTGKRRPAYEQMLADIIAGKIAAVVAWDLDRLHRRPIELEAFMSLADEKRLALATVAGDVDLATPQGRLVARLKGCVAAHETEHKKARQRRAARQKAERGYPNWSKAFGYLPGPNGPEPDPRTAPLVKQAYADILAGASLGDVCRQWNDAGAYTITGRPWATTTLSKFLRKPRNAGLRAYKGARYGPVDRDAIVGKAQWSPLVDEATFWAAQAVLDAPGRAPGRKSVRRHLLTGLAGCGKCGNRLAGSYRTDGQVVYVCKACHGVSILADNIEPILYHIVAERLAMPDAVDLLRREVHDAAVAETIRLELETLYGELDRLAVERAEGLLTARQVKISTDIVSAKITKLQARQLDQERLRVLDGIPLGTPQVAGMIAELSPDRFRAVLDVLAEVVVQPVGKSGRIFNPERVQVNWR

SEQ ID NO: 970 - protein, 452 aa, synthetic construct
MKAAIYIRVSTREQVDNYSIQAQTEKLTALCRGKDWDVYDIFIDGGYSGSNMNRPALNEMLSKLHEIDAVVVYRLDRLSRSQRDTITLIEEYFLKNNVEFVSLSETLDTSSPFGRAMIGILSVFAQLERETIRDRMVMGKIKRIEAGLPLTTAKGRTFGYDVIDTKLYINEEEAKQLRLIYDIFEEEQSITFLQKRLKKLGFKVRTYNRYNNWLTNDLYCGYVSYKDKVHVKGIHEPIISEEQFYRVQEIFTRMGKNPNMNRDSASLLNNLVVCSKCGLGFVHRRKDATSRDKKYHYRYYSCKTYKHIHELEKCGNKIWRADKLEELIISRVNNYSLASRDTDKEDELNSLNEKLKIEHAKKKRLFDLYINGSYEVSELDSMMNDIDAQINYYESQIEANEELKKNKKIQENLAYLATVDFDSLEFREKQLYLKSLINKIYIDGEQVTIEWL

SEQ ID NO: 971 - protein, 452 aa, synthetic construct
MKAAIYIRVSTREQVENYSIQAQTEKLTALCRSKDWDVYDIFIDGGYSGSNMNRPALNEMLSKLHEIDAVVVYRLDRLSRSQRDTITLIEEYFLKNNVEFVSLSETLDTSSPFGRAMIGILSVFAQLERETIRDRMVMGKIKRIEAGLPLTTAKGRTFGYDVIDTRLYINEEEAKQLQLIYDIFEEERSITSLQKRLKKLGFKVRTYNRYNNWLTNDLYCGYVSYKDKVHVKGIHEPIISEEQFYRVQEIFTRMGKNPNMNRDSASLLNNLVVCSKCGLGFVHRRKDTTSRGKKYHYRYYSCKTYKHTHELEKCGNKIWRADKLEELIISRVNDYSFASRNVDKEDELDSLNEKLKIEHAKRKRLFDLYINGSYEVSELDSMMNDIDAQINYYESQIEANVELKKNKKIQENLANLATVDYDSLEFREKQLYLKSLINKIYIDGEQVTIEWL

SEQ ID NO: 972 - protein, 452 aa, synthetic construct
MKAAIYIRVSTQEQVGNYSIQAQTEKLTALCRSKGWDVYDIFIDGGYSGSNMNRPALNEMLSKLHEIDAVVVYRLDRLSRSQRDTTTLIEEYFLKNNVEFVSLSETLDTSSPFGRAMIGILSVFAQLERETIRDRMVMGKIKRIEAGLPLTTAKGRTFGYDVIDTKLYINEEEAKQLQLIYDIFEEEQSITSLQKRLKKLGFKVRAYNRYNNWLTNDLYCGYVSYKDKVRVKGIHEPIISEEQFYRVQEIFTRMGKNPIMNRDSASLLNSLVVCSKCGLGFVHRSKDTMSRGKKYHYRYYSCKTYKHTHELEKCGNKTWRADKLEELIINRVNNYSFASRDVDKEDELDSLNEKLKTERAKKKRLFDLYINGSYEVSELDSMMNDIDAQINYYESQIEANEELRRNKKIRENLADLATVDFDSLEFREKQLYLKSLISKIYIDGEQVTIEWL

SEQ ID NO: 973 - protein, 485 aa, synthetic construct
MTKKVAIYTRVSTTNQAEEGFSIDEQTDRLTKYAEAMGWQVSGTYTDAGFSGAKLERPAMQRLINDIENKAFDTVLVYKLDRLSRSVRDTLYLVKDVFTKNKIDFISLNESIDTSSAMGSLFLTILSAINEFERENIKERMTMGKLGRAKSGKSMMWTKTAFGYYHNRKTGILEIVPLQATIVEQIFTDYLNGISLTKLRDKLNESGHIGKDIPWSYRTLRQTLDNPVYCGYIKFKDSLFEGMHKPIIPYETYLKVQKELEERQQQAYERNNNPRPFQAKYMLSGMARCGYCGAPLRVVLGHKRKDGSRTMKYHCANRFPRKTKGVTVYNDNKKCDSGTYDLSSLENTVIDILIGFQENNDSLLKIINGSNQPILDTSTFKEQISQIDKKIRKNSDLYLNDFITMDELKDRTDSLQAEKKLLKAKISENKFNDSTDVFELVKTQLGSIPINELSHDNKKKIVNNLVSKVDVTADNVDIIFKFQLA

SEQ ID NO: 974 - protein, 452 aa, synthetic construct
MKAAIYIRVSTREQVENYSIQAQIEKLTALCRSKDWDVYDVFIDGGYSGSNMNRPALNEMLSKLHEIDAVVVYRLDRLSRSQRDTITLIEEYFLKNNVEFVSLSETLDTSSPFGRAMIGILSVFAQLERETIRDRMVMGKIKRIEAGLPLTTAKGRTFGYDVIDTKLYINEEEAKQLQLIYDIFEEEQSITFLQKRLKELGFKVRAYNCYNNWLTNDLYCGYVSYKDKVHVKGIHEPIISEEQFYRVQEIFARMGKNPNMNRDSASLLNNLVVCSKCGLGFVHRRKDIMSHGKKYHYRYYSCKTYKHIHELEKCGNKIWRADKLEELIINRANDYSLASRNVDKEDELDSLNEKLNIEHAKKKRLFDLYINGNYEVSELDSMMNDIDAQINYYESQIEANEELKKNKKIQENLAYLATVDFDSLEFREKQLYLKSLINKIYIDGEQVTIEWL

SEQ ID NO: 975 - protein, 452 aa, synthetic construct
MKAAIYIRVSTREQVENYSIQAQTEKLTALCRSKDWDVYDIFIDGGYSGSNINRPALNEMLSKLHEIDAVVVYRLDRLSRSQRDTITLIEEYFLRNNVEFVSLSETLDTSSPFGRAMIGILSVFAQLERETIRDRMVMGKIKRTEAGLPLTTAKGRTFGYDVIDTKLYINEEEAKQLQLIYDIFEEEQSITSLQKRLKKLGFKVHTYNRYNNWLTNDLYCGYVSYKDKVHVKGIHEPIISEEQFYRVQEIFTRTGKNPNMNRDSASLLNNLVVCSKCGLGFVHRRKDTMSRGKKYHYRYYSCKTYKHPHELEKCGNKIWRADKLEELIINRVSNYSFAGRNADKEDELDRLNEKLKIEHAKKKRLFDLYINGSYEVSELDSMMNGIDAQINYYESQIKANEGLKKDKKIQENLANLATMDYDSLEFREKQLYLKSLINKIYIDGEQVTIEWL

SEQ ID NO: 976 - protein, 469 aa, synthetic construct
MSYTTPVRAAVYLRISEDRSGEQLGVARQREDCLKLCDQRKWVPVEYLDNDVSASTGKRRPAYEQMLADITAGKIAAVVAWDLDRLHRRPIELEAFMSLADEKRLALATVAGDVDLATPQGRLVARLKGCVAAHETEHKKARQRRAARQKAERGLPNWSKAFGYLPGPNGPEPDPRTAPLVKQAYADILAGASLGDVCRQWNDAGAFTITGRPWTTTTLSKFLRKPRNAGLRAYKGARYGPVDRDAIVGKAQWSPLVDEATFWAAQAVLDAPGRAPGRKSVRRHLLTGLAGCGKCGNHLAGSYRTDGRVVYVCKACHGIAILADSIEPILYRIVAERLATPDAVDLLHREVHDAAEAETTRLELDTLYGELDRLAVERAEGLLTARQVKISTDIVSAKIAKLQARQLDQERLRVLDGIPLGTPQVAGMIAELSPDRFRAVLDALAEVVVQPVGKSGRIFNPERVQVNWR

SEQ ID NO: 977 - protein, 452 aa, synthetic construct
MKAAIYVRVSTREQVENYSIQAQTEKLTALCRSKDWDVYDIFIDGGYSGSNMSRPALNEMLGRLHEIDAVVVYRLDRLSRSQRDTITLIEEYFLKNNVEFVSLSETLDTSSPFGRAMIGILSVFAQLERETIRDRMVMGKIKRIEAGLPLTTAKGRTFGYDVIDTKLYINEEEAKQLRLIYDIFEEEQSITFLQKRLKKLGFKVRTYSRYNSWLTNDLYCGYVSYKDKVHVKGIHEPIISEEQFYRVQEIFTRMGKNPNMNRDSASLLNNLVVCSKCGLGFVHRRKDTMSRGKKYHYRYYSCKTYKHTHELEKCGNKIWRADKLEELIINRVNNYSFASRNVGKEDELDGLNEKLKIEHAKRKRLFDLYINGSYEVRELDSMMSDIDVQINYYESQIEANEELRKSKKIREYLANLATVDYDSLEFREKQLYLKSLINKIYIDGEQVTIEWL

SEQ ID NO: 978 - protein, 485 aa, synthetic construct
MTKKVAIYTRVSTTNQAEEGFSIDEQIDRLTKYAEAMGWQVSDTYTDAGLSGAKLERPAMQRLINDIEYKAFDTVLVYKLDRLSRSVRDTLYLVKDVFTKNKIDFISLNESIDTSSAMGSLFLTILSAINEFERENIKERMTMGKLGRAKSGKSMMWTRTAFGYYHNRTTGILEIVPLQATIVEQIFTDYLSGISLTRLRDKLNESGHIGKDIPWSYRTLRQTLDNPVYCGYIKFKGSLFEGMHKPIIPYETYLKVQKELEERQQQTYERNNNPRPFQAKYMLSGMARCGYCGAPLKIVLGHKRKDGSRTMKYHCANRYPRKTKGTTVYNDNKKCDSGTYDLSNLENTVIDNLVGFQGNNDSLLKVINGNNQPILDTSSFKKQISQIDKKIQKNSDLYLNDFITMDELKDRTDSLQAEKKLLEAKISENKFNDSTDVFELVKTQLGSIPINELSYEDKKKIVNNLVSKVDVTADNVDIIFKFQLA

SEQ ID NO: 979 - protein, 469 aa, synthetic construct
MSYTTPVRAAVYLRISEDRSGEQLGVARQREDCLKLCDQRKWVPVEYLDNDVSASTGKRRPAYEQMLTDITAGKIAAVVAWDLDRLHRRPIELEAFMSLADEKRLALATVAGDVDLATPQGRLVARLKGSVAAHETEHKRARQRRAARQKAERGHPNWSKAFGYLPGPNGPEPDPRTAPLVKQAYADILAGASLGDVCRQWNGAGAFTITGRPWTTTTLSKFLRKPRNAGLRAYKGARYGPVDRDAIVGKAQWSPLVDEATFWAAQAVLDAPSRAPGRKSVRRHLLTGLAGCGKCGNHLAGSYRTDGRVVYVCKACHGVAILADNIVPILYHIVAERLAMPDAVDLLRREIHDAAEAEAIHLELETLYGELDRLAVERAEGLLTARQVKISTDIVNAEITKLQAHQQDQERLRVLDGIPLGTPQVAGVIAELSPNRFRAVLDVLAEVVVQPVGKSGRIFNPERVQVNWR

SEQ ID NO: 980 - protein, 485 aa, synthetic construct
MTKKVAIYTRVSTTNQAEEGFSIDEQIDRLTKYAEAMGWQVSDTYTDAGISGAKLERPAMQRLINDIENKAFDAVLVYKLDRLSRSVRDTLYLVKDVFTKNKIDFISLNESIDTSSAMGSLFLTILSAINEFERENIKERMTMGKLGRAKSGKSMMWTKTAFGYYHNRKTGILEIVPPQATIVKQIFTDYLSGISLTKLRDKLNESGHIGKDIPWSYRTLRQTLDNPVYCGYIKFKDSLFEGMHKPIIPYETYLKVQKELEERQQQTYERNNNPRPFQAKYMLSGMARCGYCGAPLRIVLGHKRKDGSRTRKYHCANRFPRKTKGVTVYNDNKKCDSGTYDLSNLENTVIDNLIGLQENNGSLLKIINGNNQPILDSSSLKKQISQIDKRIQKNSDLYLNDFITMDELKDRTDSLQAEKRLLRAKISENKFNDSTDVFELVKTQLGSIPINELSYDNKKKIVNNLVSKVDVTADNVDIIFKFQLA

SEQ ID NO: 981 - protein, 485 aa, synthetic construct
MTKKVAIYTRVSTTNQAEEGFSIDEQIDRLTKYAEAMGWQVCDTYTDAGLSGAKLERPAMQRLINDIENKAFDTVLVYKLDRLSRSVRDTLYLVKDVFTKNKIDFISLNESIDTSSAMGSLFLTILSAINEFERENIKERMTMGKLGRAKSGKSMMWTKTAFGYYHNRKTGILEIVPLQATIVKQIFTDYLSGISLAKLRDKLNGSGHIGKDIPWSYRTLRQTLDNPVYCGYIKFKDSLFEGMHEPIIPYETYLKVQKELEERQQQTYERNNNPRPFQAKYMLSGMARCGYCGAPLRIVLGHKRKDGSRTMKYHCTNRFPRKTKGITVYNDNKKCDSGTYDLSDLENTVIDNLIGLQENNDSLLKIINGNNQPTLDTSNFKKQISQIDEKIQKNSDLYLNDFITMDELKDRTDSLLAEKKLLKAKISENKFNDSTDVFELVKTQLGSIPINELSYDNKKKIVNNLVSKVDVTADNVDIIFKFQLA

SEQ ID NO: 982 - protein, 452 aa, synthetic construct
MKAAIYIRVSTREQVENYSIQAQTEKLTALCRSKDWDVYDIFIDGGYSGSNMNRPALNEMLSKLHEIDAVVVYRLDRLSRSQRDTITLIEEYFLRNNVEFVSLSETLDTSSPFGRAMIGILSVFAQLERETIRDRMVMGKIKRIEAGLPLTTAKGRTFGYDVIDTKLYINEEEAKQLRLIYDIFEEEQSITFLQKRLKKLGFKVRTYNRYNNWLTNDLYCGYVSYKDKVHVKGIHEPIISEEQFYRVQEIFTRMGKNPNMNRGSASLLNNLVVCGKCGLGFVHRRKDAMSRDKKYHYRYYSCKTYKHIHELEKCGNKIWRADKLEELIINRVNNYSFAGRNADKEDELDSLNEKLKIEHAKKKRLFDLYINGSYEVSELDSMMKDIDAQINYYESRIEANEELRKNKKIQESLAYLTTVDFDSLEFREKQLYLKSLINKIYIDGEQVTIEWL

SEQ ID NO: 983 - protein, 452 aa, synthetic construct
MKAAIYIRVSTREQVENYSIQAQTEKLTALCRSKDWDVYDIFIDGGYSGSNMNRPALNEMLSKLHEIDAVVVYRLDRLSRSQRDTITLIEEYFLKNNVEFVSLSETLDTSSPFGRAMIGILSVFAQLERETIRDRMVMGKIKRIEAGLPLTTAKGRTFGYDVIDTKLYINEEEAKQLQLIYDIFEEEQSITSLQKRLKKLGFKVRTYNRYNNWLTNDLYCGYVSYKDKVHVKGIHEPIISEEQFYRVQEIFTRMGKNPNMNRDSASLLNNLVVCSKCGLGFVHRRKDAMSRDKKYHYRYYSCKTYKHIHELEKCGNKVWRADKLEELIINRVNNYSIATRNVDKEDELDSLNEKLKIEHAKKRRLFDLYINGSYEVSELDSMMNDIDAQINYYESQIEANEELKKNKKIQENLAYLATVDFDSLEFREKQLYLKSLINKIYIDGEQVTIEWL

SEQ ID NO: 984 - protein, 469 aa, synthetic construct
MSYTTPVRAAVYLRISEDRSGEQLGVARQREDCLKLCDQRNWVPVEYLDNDVSASTGKRRPAYEQMLADIATGKVAAVVAWDLDRLHRRPIELETFMSLADEKRLALATVAGDVDLATPQGRLVARLKGSVAAHETEHKKARQRRAARQKAERGYPNWSKAFGYLPGPNGPEPDPRTAPLVKQAYADILAGASLGDVCRQWNGAGAFTITGRPWTTATLSKFLRKPRNAGLRAYKGARYGPVDHDAIVGKAQWSPLVDEATFWAAQAVLDAPGRAPGRKSVRRHLLTGLAGCGKCGNHLAGSYRTDGRVVYVCKACHGVAILADNIEPILYHIVAERLAMPDAVDLLRREIHDAAEAETIRLELGTLYSELDRLAVERAEGLLTARQVKISTDIVNAKITKLQARQLDQERLRVLDGIPLGTPQVAGMIAELSPDRFRAVLDVLAEVVVQPVGKSGRIFNPERVQVNWR

SEQ ID NO: 985 - protein, 485 aa, synthetic construct
MTKKVAIYTRVSTTNQAEEGFSIDEQVDRLTKYAEAMGWQVSDTYTDAGISGAKLERPAMQRLINDIENKAFDTVLVYKLDRLSRSVRDTLYLVKDVFTKNKIDFISLSESIDTSSAMGSLFLTILSAINEFERENIKERMTMGKLGRAKSGKSMMWTKTAFGYYHNRKTGILEIVPLQATIVEQIFTDYLSGISLTKLRDKLNESGHIGKDIPWSYRTLRQTLDNPVYCGYIKFKGSLFGGMHKPIIPYETYLKVQRELEERQQQTYERNNNPRPFQAKYMLSGMARCGYCGAPLRVVLGHKRKDGSRAMKYHCANRFPRKTKGVTVYNDNKKCDSGTYDLSDLENTVIDNLIGFQENNDSLLKIINGNNQPILDTSSFEKQISQIDKKIQKNSDLYLNDFITMDELKDRTDSLQAEKELLKAKISENKFDDGTDVFELVKTQLGSIPINELSYDNKKKIVNNLVSKVDVTADNVDIIFKFQLA

SEQ ID NO: 986 - protein, 469 aa, synthetic construct
MSYTTPVRAAVYLRISEDRSGEQLGVARQREDCLKLCGQRKWVPVEYLDNDVSASTGKRRPAYEQMLADITAGKIAAVVAWDLDRLHRRPIELEAFMSLADEKRLALATVAGDVDLATPQGRLVARLKGSVAAHETEHKKARQRRAARQKAERGHPNWSKAFGYLPGPNGPEPDPRTAPLVKQAYADILAGASLGDVCRQWNDAGAFTITGRPWTTTTLSKFLRKPRNAGLRAYKGARYGPVDRDAIVGKAQWSPLVDEATFWAAQAVLDAPGRAPGRKSVRRHLLTGLAGCGKCGNHLAGSYRTDGRVVYVCKTCHGVAILADNIEPILYHIVAERLAMPDAMDLLRREIHDVAEAETIRLELESLYGELDRLAVERAEGLLTARQVKISTDIVNAKITKLQARQLDQERLRVLDGIPLGTPQVAGMIAELSPDRFRAVLDVLAEVVVQPVGKSGRIFNAERVQVNWR

SEQ ID NO: 987 - protein, 452 aa, synthetic construct
MKAAIYIRVSTREQVENYSIQAQTEKLTALCRSKDWDVYDIFIDGGYSGSNMNRPALNEMLSKLHEIDAVVVYRLDRLSRSQRDTVTLIEEYFLKNNVEFVSLSETLDTSSPFGRAMIGILSAFAQLERETIRDRMVMGKIKRIEAGLPLTTAKGRTFGYDVIDTKLHINEEEAKQLQLIYDIFEEEQSITFLQKRLKKLGFRVRTYNCYNNWLTNDLYCGYVSYKDKVHVKGIHEPIISEEQFYRVQEIFARMGKNPNMNRDSASLLNNLVVCSKCGLGFVHRRKDTMSRGKKYHYRYYSCKTYKHTHELEKCGNKIWRADKLEELIINRVNNYSFASRNVDKEDELDSLNEKLKIEHAKKKRLFDLYINGSYEVSELDCMMNDIDARINYYESQIEANVELKRDEKIQENLAGLAAVDFDSLEFREKQLYLKSLINKIYIDGEQVTIEWL

SEQ ID NO: 988 - protein, 485 aa, synthetic construct
MTKKVAIYTRVSTTYQAEEGFSIDEQVDRLTKYAEAMGWQVSDTYTDAGFSGAKLERPAMQRLINDIENKTFDTVLVYKLDRLSRSVRDTLYLVKDVFTKNKIDFISLNESINTSSAMGSLFLTILSAINEFERENIKERMTMGKLGRAKSGKSMMWTKTAFGYYHNRKTGILEIVPLQATIVEQIFTDYLSGISLTKLRDKLNESGHIGKDIPWSYRTLRQTLDNPVYCGYIKFKDSLFEGMHKPIIPYETYLKVQKELEERQQQTYERNNNPRPFQAKYMLSGMARCGYCGAPLRIVLGHKRKDGSRTMKYHCANRFPRKTKGVTVYNDNKKCDSGAYDLSNLENTVIDNLIGFQEDNDSLLKIINGNNQPILDTSSFERRISQIDKKIQKNSDLYLNDLITMDELKDRADSLQAEKQLLKAKISENKFNDSTDVFELVKTQLGSIPINELSYDDKKKIVNSLVSKVDVTADNVDIIFKFQLA

SEQ ID NO: 989 - protein, 485 aa, synthetic construct
MTKKVAIYTRVSTTNQAEEGFSIDEQIDRLTKYAEAMGWQVSDTYTDAGLSGAKLERPAMQRLINDIKNKAFDTVLVYKLDRLSRSVRDTLYLVKDVFTKNNIDFISLNECIDTSSAMGSLFLTILSAINEFERENIKERMTMGKLGRAKSGKSMMWTKTAFGYYHNRKTGILEIVPLQATIVEQIFTDYLSGISLTKLRDKLNESGHIGKDIPWSYRTLRQTLDNPVYCGYIKFKDNLFEGMHKPIIPYETYLKVQKELEERQQQAFERNNNPRPFQAKYMLSGTARCGYCGAPLRIVLGHKRKDGSRTMKYHCANRFPRKTKGVTVYNDNRKCDSGTYDLSNLENAVIDNLIGFQENNDSLLKIINGNNWPILDTSSFKEQISQIDKKIQKNSDLYLNDFITMDELKDRTESLQAEKKLLEAKISKNKFDDSTDVFELVKTQLGSIPINELSYDNKKKIVNSLVSKVDVTADNVDIIFKFQLA

SEQ ID NO: 990 - protein, 485 aa, synthetic construct
MTKKVAIYTRVSTTNQAEEGFSIDEQIDRLTKYAEAMGWQVSDTYTDAGFSGAKLERPAMQRLINDIENRTFDTVLVYKLDRLSRSVRDTLYLVKDVFTKNKIDFISLNESIDTSSAMGSLFLTILSAINEFERENIKERMTMGKLGRAKSGKSMMWTKTAFGYYHNRKTGILEIVPLQATIVEQIFTDYLSGISLTKLRDKLNESGHIGKDIPWSYRTLRQTLDNPVYCGYIKFKDSLFEGMHKPIIPYETYLKVQKELGERQQQTYERNNNPRPFQAKYMLSGMARCGYCGAPLRIVLGHKRKDGSRTMKYHCANRFPRKTKGVTVYNDNKKCDSGTYDLSNLENTVIDILIGFQENNDSLLKIINGNNQPVLDTSSFKKQISQIDKKIQKNSDLYLNDFITMDELKGRTDSLRAEKKLLKAKISENKLNDSTDVFELVKTQLGSIPINELSYDDKKRIVNNLVSKVDVTADNVDIIFKFQLA

SEQ ID NO: 991 - protein, 469 aa, synthetic construct
MSYTTPVRAAVYLRISEDRSGEQLGVARQREDCLKLCGQRKWVPVEYLDNDVSASTGKRRPAYEQMLADITAGKIAAVVAWDLDRLHRRPVELEAFMSLADEKRLALATVAGDVDLATPQGRLVARLKGCVAAHETEHKKARQRRAARQKAERGLPNWSKAFGYLPGPNGPEPDPRTAPLVKQAYADILAGASLGDVCRQWNDAGAFTITGRPWTTTTLSKFLRKPRNAGLRAYKGARYGPVDRDAIVGKAQWSPLVDEATFWAAQAVLDAPGRAPGRKSVRRHLLTGLAGCGKCGNHLAGSYRTDGRVVYVCKVCHGVAILADNIEPILYHIVAERLAMPDAVDLLRREIHDAAEAETIRLKLETLYGELDRLAVERAEGLLTARQVKISTDIVNAKITKLQARQLDQERLRVFDGIPLGTPQVAGMIAELSPDRFRAVLDVLAEVVVQPVGKSGRIFNPERVQVNWR

SEQ ID NO: 992 - protein, 470 aa, synthetic construct
MSYTTPVRAAVYLRISEDRSGEQLGVARQREDCLKLCVQRKWVPVEYLDNDVSASTGKRRPAYEQMLADITAGKIAAVVAWDLDRLHRRPVELEAFMSLADEKRLALATVAGDVDLATPQGRLVARLKGSVAAHETEHKKARQRRAARQKAERGYPNWSKAFGYLPGPNGPEPDPRTAPLVKQAYADILAGASLGDVCRRWNDVGAFTITGRPWTTTTLSKFLRKPRNAGLRAYKGARYGPVDRDAIVGKAQWSPLVDEATFWAAQAVLDAPGRAPGRKSVRRHLLTGLAGCGKCGNHLAGSYRTGGRVVYVCKACHGVSILADNIEPILYHVVAERLAMPDAVDLLRREIHDAAEAEAIRLELETLYGELDRLAVERAEGLLTARQVKISTDIVNAKITKLQARQQDQERLRVLDGIPLGTPQVAGMIAELSPDRFRAVLDVLADVVVQPVGKSGRIFNPERVQVNWRK

SEQ ID NO: 993 - protein, 485 aa, synthetic construct
MTKKVAIYTRVSTTNQAEEGFSIDEQVDRLTKYAEAMGWQVSDTYTDAGFSGAKLERPAMQRLINDIENKAFDTVLVYKLDRLSRSVRDTLYLVKDVFTKNKIDFISLNESINTSSAMGSLFLTILSAINEFERENIKERMTMGKLGRAKSGKSMMWTKTAFGYHHNRKTGILEIVPLQAAIVEQIFTDYLSGISLTKLRDKLNESGHIGKDIPWSYRTLRQTLDNPVYCGYIKFKDSLFEGMHKPIIPYETYLKVQKELEERQQQTYERNNNPRPFQAKYMLSGMARCGYCGAPLKIVLGHKRKDGSRTMKYHCANRFPRKTKGVTVYNDNKKCDSGTYDLSSLENTVIDNLIGFQENNDSLLKIINGNDQPILDTSNLKKQISQIDKRIQRNSDLYLNDFITMDELKDRTDSLQAEKKLLKAKISENKFNDSTDVFELVKTQLGSIPINELSYDGKKKIVNNLVSKVDVTADSVDIIFKFQLA

SEQ ID NO: 994 - protein, 452 aa, synthetic construct
MKAAIYIRVSTREQVENYSIQAQTEKLTALCRSKDWDVYDTFIDGGYSGSNMNRPALNEMLSKLHEIDAVVVYRLDRLSRSQRDTITLIEEYFLKNNVEFVSLSETLDTSSPFGRAMIGILSVFAQLERETIRDRMVMGKIKRIEAGLPLTTAKGRTFGYNVIDTKLYINEEEAKQLQLIYDIFEEEQSITFLQKRLKKLGFKVRTYNRYNNWLTNDLYCGYVSYKDKVHVKGIHEPIISEEQFYRVQEIFARMGKNPNMNRDSASLLNSLVVCSKCGLGFVHRRKDAMSRDKKYHYRYYSCKTYKHIHELEKCGNKIWRADELEELVINRVNSYSVASRNVDKEDELGSLNEKLKIEHAKKKRLFDLYINGSYEVSELDSMMNDIDAQINYYESQIEANEELKKNKKIQESLAHLATVDFDSLEFREKQLYLKSLINKIYIDGEQVTIEWL

SEQ ID NO: 995 - protein, 485 aa, synthetic construct
MTKKVAIYTRVSTTNQAEEGFSIDEQIDRLTKYAEAMGWQVSDTYTDAGCSGAKLERPAMQRLINDIENKAFDTVLVYKLDRLSRSVRDTLYLVKDVFTKNKIDFISLSESIDTSSAMGSLFLTILSAINEFERENIKERMTMGKLGRAKSGKSMMWTKTAFGYYHNRKTGILEIVPLQATIVEQIFTDYLSGISLTKLRDKLNESGHIGKDIPWSYRTLRQTLDNPVYCGYIKFKDSLFEGMHKPIIPYETYLRVQKELEERQQQTYERSNNPRPFQAKYMLSGMARCGYCGAPLRIVLGHKRKDGSRTMKYHCANRFPRKTKGVTVYNDNKKCDSGTYDLSSLENTVIDNLIGFQENNDSLLKIINGNNQPILDTSSFKKQISQIDKKIQKNSDLYLNDFITMDELKDRTDSLQAEKKLLKAKISENKFNDSTDVFELVKTQLGSIPINELSYDNKRKIVNNLVSKVDVTADNVNIIFKFQLA

SEQ ID NO: 996 - protein, 485 aa, synthetic construct
MTKKVAIYTRVSTTNQAEEGFSIDEQIDRLTKYAEAMGWQVSDTYTDAGFSGAKLERPAMKRLINDIENKAFDTVLVYKLDRLSRSVRDTLYLVKDVFTKNKIDFISLNESINTSSAMGSLFLTILSAINEFERENIKERMTMGKLGRAKSGKSMMWTKTAFGYYHNRKTGILEIVPLQATVVEQIFTDYLSGISLTKLRDKLNESGHIGKDIPWSYRTLRQTLDNPVYCGYIKFKDSLFEGMHKPIIPYETYLKVQKELEERQQQTYERNNNPRPFQAKYMLSGMARCGYCGAPLKIVLGHKRKDGSRTMKYHCANRFPRKTKGITVYNDNKKCDSDTYDLSNLENTVIDILIGFQENNDSLLKIINGNNQPILDTSSFKKRISQIDKKIQKNGDLYLYDFITMDELKDRTDSLQAEKKLLKAKINENKFNDSTDVFKLVKTQLGSIPINELSYDNKKKIVNNLVSKVDVTADNVDIIFKFQLA

SEQ ID NO: 997 - protein, 452 aa, synthetic construct
MKAAIYIRVSTREQVENYSIQAQTEKLTALCRSKDWDVYDVFIDGGYSGSNMNRPALNEMLSKLHEIDAVVVYRLDRLSRSQRDTITLIEEYFLKNNVEFVSLSETLDTSSPFGRAMIGILSVFAQLERETIRDRMVMGKIKRIEAGLPLTTAKGRTFGYDVIDTKLYINEEEAKQLQLIYDIFEEEQSITFLQKRLKKLGLKVRSYNRYNNWLTNDLYCGYVSYKDKVHVKGIHEPIISEEQFYRVQEIFARMGKNPNMNRDSASLLNNLVVCSKCGLGFVHRRKDIMSRGKKYHYRYYSCKTYKHIHELEKCGNKIWRADKLEELIINRVNNYSLAGRNVDKGDELDSLNEKLKIEHAKKKRLFELYINGSYEVSELDSMMNDIDAQINYYESQIEANKELRKNRKIQENLAHLATVDFDSLEFREKQLYLKSLINKIYIDGEQVTIEWL

SEQ ID NO: 998 - protein, 469 aa, synthetic construct
MCYTTSVRAAVYLRISEDRSGEQLGVARQREDCLELCGQRKWEPVEYLDNDVSASTGKRRPAYEQMLADITAGKIAAVVAWDLDRLHRRPIELEAFMSLADEKRLALATVAGDVDLATPQGRLVARLKGSVAAHETEHKKARQRRAARQKAERGLPNWSKAFGYLPGPNGPEPDPRTAPLVKQAYADILAGASLGDVCRQWNDAGAFTITGRPWTTTTLSKFLRKPRNAGLRAYKGARYGPVDRDAIVGKAQWSPLVDEATFWAVQAVLDAPGRAPGRKSVRRHLLTGLAGCGKCGNHLAGSYRTDGQVVYVCKACHGVAILADTIEPILYHIVAERLAMPDAVDLLRREVHDAAEAETIRLELETLYGELDRLAVERAEGLLTARQVKISTDIVNAKITKLQARQLDQERLRVFAGIPLGTPQVAGVIAELSPDRFRAVLDVLAEVVVQPVGKGSRIFNPERVQVSWR

SEQ ID NO: 999 - protein, 452 aa, synthetic construct
MKAAIYIRVSTQEQVGNYSIQAQAEKLTALCRSKGWDVYDIFIDGGYSGSNMNRPALNEMLSKLHEIDAVVVYRLDRLSRSQRDTTTLIEEYFLKNNVEFVSLSETLDTSSPFGRAMIGILSVFAQLERETIRDRMVMGKIKRIESGLPLTTAKGRTFGYDVIDSKLYINEEEAKQLQLIYDIFEEEQSITFLQKRLKKLGFKVRTYNRYNNWLTNDLYCGYVSYKDKVHVRGIHEPIISEEQFYRVQEIFARMGKNPNMNRDSASLLSSLVVCSKCGLGFVHRSKDTMSRGKKYHYRYYSCKTYKHTHELEKCGNKTWRADKLEELIINRVNNYSFASRIVDKEDELDSLNEKLKIEHAKKRRLFDLYINGSYEVSELDSMMNEIDAQINYYESQIEASEELKRNKKIQENLADLATVDFDSLEFREKQLYLKSLINKIYIDGEQVTIEWL

SEQ ID NO: 1000 - protein, 469 aa, synthetic construct
MSYTTPVRAAVYLRISEDRSGEQLGVARQREDCLELCGQRKWVPVEYLDNDVSASTGKRRPAYERMLADITAGKIAAVVAWDLDRLHRRPIELEAFMSLADEKRLALATVAGDVDLATPQGRLVARLKGSVAAHETEHKKARQRRAARQKAERGLPNWSKAFGYLPGPNGPEPDPRTAPLVKQAYADILAGASLGDVCRRWNDAGALTITGRPWTTTTLSKFLRKPRNAGLRAYKGARYGPVDRDAIVGKAQWSPLVDEATFWAAQAVLDAPGRAPGRKSVRRHLLTGLAGCGKCGNHLAGSYRTDGRVVYVCKACHGVAILADNIEPILYHIVAERLAMPDAVDLLRREIHDAAEAETIRLELETLYGELDHLAVERAEGLLTARQVKISTDIVNAKITKLQARQLDQERLRVLDGIPLGTPQVAGMIAELSPDRFRAVLDVLAEVVVQPVGKRGGIFNPERVQVNWR

SEQ ID NO: 1001 - protein, 469 aa, synthetic construct
MSYTTPVRAAVYLRISEDRSGEQLGVARQREDCLKLCGQRKWVPVEYLDNDVSASTGKRRPAYEQMLADITAGKIAAVVAWDLDRLHRRPIELEAFMSLADEKRLALATVAGDVDLATPQGRLVARLKGSVAAHETEHKKARQRRAARQKAERGLPNWSKAFGYLPGPNGPEPDPQTAPLVKQAYADILAGASLGDVCRQWNDAGAFTITGRPWTSTTLSKFLRRPRNAGLRAYRGARYGPVDRDAIVGKAQWSPLVDEATFWAAQAVLDAPGRAPGRKSVRRHLLTGLAGCGKCGDHLAGSYRTDGQVVYVCKACYGVAILADNIVPILYHIVAERLAMPDAVDLLRREIHDAAEAETIRLELETLYGELDRLAVERAEGLLTARQVKISTDIVNAKITKLQARQQDQERLRVLDGIPLGTPQVADTIAELSPDRFRAVLDVLAEVVVQPVGKSGRISNPERVQVNWR

SEQ ID NO: 1002 - protein, 452 aa, synthetic construct
MKAAIYIRVSTREQVENYSIQAQTEKLTALCRSKDWDVYDIFIDGGYSGSNMNRPALNEMLSKLQEIDAVVVYRLDRLSRSQRDTITLIEEYFLKNNVEFVSLSETLDTSSPFGRAMIGILSVFAQLERETIRDRMVMGKIKRIEAGLPLTTAKGRTFGYDVIDTKLYINEEEAKQLQLIYDIFEEEQSITFLQKRLKKLGFKVRTYNRYNNWLTNDLYCGYVSYKDKVHVKGVHEPIISEEQFYRVQEIFARMGKNPNMNRDSASLLNNLVVCGKCGLGFMHRRKDIMSRGKKYHYRYYSCKTYKHIHELEKCGNKIWRADKLEELIVNRVNNYSLASRNADKEDELDSLNEKLKVEHAKKKRLFDLYISGRYEVSELDSMMNDIDAQINCYESRIEANEELKKNKKIQESLAYLATVDFDSLESREKQLYLKSLINKIYIDGEQVTIEWL

SEQ ID NO: 1003 - protein, 452 aa, synthetic construct
MKAAIYIRVSTHEQVANYSIQAQTERLTALCRSKGWDVYDIFIDGGYSGSNMNRPALNEMLNKLHEIDAVVVYRLDRLSRSQRDTTTLIEEYFLKNNVEFVSLSETLDTSSPFGRAMIGILSVFAQLERETIRDRMVMGKIKRIEAGLPLTTAKGRTFGYDVIDTKLYINEEEAKQLQLIYDIFEEEQSITSLQKRLKKLGLKVRTYNRYNNWLTNDLYCGYVSYKDKVHVKGIHEPIISEEQFYRVQEIFTRMGKNPNMNRESASLLSNLVVCSKCGLGFVHRSKDTMSRGKKYHYRYYSCKTYKHTHELEKCGNKTWRADALEELVINRVNNYSFASCDVDKEDELDSLNEKLKIERAKKKRLFDLYINGNYGVSELDSMMSDIDAQINYYESRIEASEGLRRNKKIQENLADLATVDFDSLEFREKQLYLKSLINKIYIDGEQVTIEWL

SEQ ID NO: 1004 - protein, 485 aa, synthetic construct
MTKKVAIYTRVSTTNQAEEGFSIDEQIDRLTKYAEAMGWQVSDTYTDAGFSGAKLDRPAMQRLINDIESKAFDTVLVYKLDRLSRSVRDTLYLVKEVFTKNKIDFISLNESIDTSSAMGSLFLTILSAINEFERENIKERMTMGKLGRAKSGKSMMWTKTAFGYYHNRKTGILEIVPPQASIVEQIFTDYLSGISLTKLRDKLNEGGHIGKDIPWSYRTLRQTLDNPVYCGYIKFKDSLFEGMHKPIIPYETYLKVQKELEERQQQTYERNNNPRPFQAKYMLSGMARCGYCGAPLKIVLGHKRKDGSRTMKYHCANRFPRKTKGVTVYNDNKKCDSGTYDLSNLENTVIDNLIGFQENNDGLLKIINGNNQPILDTSSFKKQISQIDKKIQKNSDLYLNDFITMDELKDRTDSLQAEKKLLKAKISENKFNDRTDVFELVKTQLGSIPINELSYDNKRKIVHNLVSKVDVTADNVDIVFKFQLA

SEQ ID NO: 1005 - protein, 452 aa, synthetic construct
MKAAIYIRVSTQEQVGNYSIQAQTEKLTALCRSKDWDVYDIFIDGGYSGSNMNRPALNEMLSKLHEIDAVVVYRLDRLSRSQRDTTTLIEEYFLKNNVEFVSLSETLDTSSPFGRAMIGILSVFAQLERETIRDRMVMGKIKRIEAGLPLTTAKGRTFGYDVVDTKLYINEEEAKQLQLIYDIFEEEQSITFLQKRLKKLGFKVRTYNRYSNWLTNDLYCGYVSYKDKVHVKGIHEPIISEEQFYRVQEIFTRMGKNPNMNRDSASLLNNLVVCSKCGLGFVHRSKDTMCRGKKYHYRYYSCKTYKHTHELEKCGNKTWRADKLEELIINRVSNYSFASRNVDKEDELDSLNEKLKIEHAKKKRLFDLYINGSYEVSELDSMMNDIDAQIDYYESQIEANEELRKNRKIQENLADLATVDFDSLEFREKQLYLKGLISKIYIDGEQVTIEWL

SEQ ID NO: 1006 - protein, 452 aa, synthetic construct
MKAAIYIRVSTQEQVGNYSIQAQTEKLTALCRSKDWDVYDIFIDGGYSGSNMNRPALNEMLSKLHEIDAVVVYRLDRLSRSQRDTTTLIEEYFLKNNVEFVSLSETLDTSSPFGRAMIGILSVFAQLERETIRDRMMMGKIKRIEAGLPLTTAKGRTFGYDVIDTKLYINEEEAKQLQLIYDIFEEEQSITSLQKRLKKLGFKVRTYNRYNNWLTNDLYCGYVSYKDKVHVKGIHEPIISEEQFYRVQEIFTRMGKNPNMNRDSASLLNSLVVCSKCGLSFVHRSKDTMSRGKKYHYRYYSCKTYKHTHELEKCGNKTWRADKLEELVINRVNSYSLASRDVDKEDELDSLNEKLKIEHAKKKRLFDLYINGSYEVSELDSMMNDIDAQINYYESQIEANEELKKDKKIQENLANLATVDFDSLEFREKQLYLKSLINKIYIDGEQVTIEWL

SEQ ID NO: 1007 - protein, 469 aa, synthetic construct
MSYTTPVRAAVYLRISEDRSGEQLGVARQREDCLKLCGQRKWVPVEYLDNDVSASTGKRRPAYEQMLADITAGKIAAVVAWDLDRLHRRPIELEAFMSLADEKRLALATVAGDVDLATPQGRLVARLKGSVAAHETEHKKARQRRAARQKAERGLPNWSKAFGYLPGPSGPEPDPRTAPLVKQAYADILAGASLGDVCRQWNDAGAFTITGRPWTTTTLSKFLRKPRNAGLRAYKGARYGPVDRDAIVGKAQWSPLVDEGTFWAAQAVLDAPGRAPGRKSVRRHLLTGLAGCGKCGNHLAGSCRTDGRVVYVCKACHGVSILAVNIEPILYHIVAGRLAMPDAVDLLRREIHDAAEAETIRLELETLYGELDRLAVERAEGLLTARQVKISTDIVNAKITKLQARQLDQERLRVFDGIPLGTPQVAGMIAELSPDRFRAVLDVLAEVVVQPVGKSGRILNPERVQVNWR

SEQ ID NO: 1008 - protein, 485 aa, synthetic construct
MTKKVAIYTRVSTTNQAEEGFSIDEQVDRLTKYAEAMGWQVSDTYTDAGLSGARLERPAMQRLINDIENKAFDTVLVYKLDRLSRSVRDTLYLVKDVFTKNKIDFISLNESIDTSSAMGSLFLTILSAINEFERENIKERMTMGKLGRAKSGKSMMWSKTAFGYYHNRKTGILEIVPLQATIVEQIFTDYLSGISLTKLRDKLNESGHIGKDIPWSYRTLRQTLDNPVYCGYIKFKGSLFEGMHKPIIPYETYLKVQKELEERQQQTYERNNNPRPFQAKYMLSGMARCGYCGAPLRIVLGHKRKDGSRTMKYHCANRFPRKTKGVTAYNDNKKCDSGTYDLRNLENTVIDNLIGLQENNDSLLKIINGNNQPILDTSSFKKQISQIDKKIQKNSDLYLNDFITMDELKDRTDSLQAEKKLLKAKISENKFNDSTDVFELVKTQLGSIPINELSYDNKKKIVNSLVSKVDVTADNVDIIFKFQLA

SEQ ID NO: 1009 - protein, 452 aa, synthetic construct
MKAAIYIRVSTREQVENYSIQAQTEKLTALCRSKGWDVYDIFIDGGYSGSNMNRPALNEMLSKLHEIDAVVVYRLDRLSRSQRDTITLIEEYFLKNNVEFVSLSETLDTSSPFGRAMIGILSVFAQLERETIRDRMVMGKIKRIEAGLPLTTAKGRTFGYDVIDTKLYINEEEARQLRLIYDIFEEEQSITFLQKRLKKLGFKVHTYNRYNNWLTNDLYCGYVSYKDKVHVKGIHEPIISEEQFYRVQEIFARMGKNPNMNRDSASLLNNLVVCGKCGLGFVHRRKDAMSRDKKYHYRYYSCKTYKHIHELEKCGNKIWRADKLEELIINRVSNYSFASRNADKENELDSLNEKLKIEHAKKKRLFDLYINGSYEVSELDSMLNDIDAQINYYESQIEANEELKKNEKIQENLAHLATVDFDSLEFREKQLYLKSLINKIYIDGEQVTIEWL

SEQ ID NO: 1010 - protein, 469 aa, synthetic construct
MSYTTPVRAAVYLRISEDRSGEQLGAARQREDCLKLCDQRKWVPVEYLDNDVSASTGKRRPAYEQMLADITAGKIAAVVAWDLDRLHRRPIELEAFMSLADEKRLALATVAGDVDLATPQGRLVARLKGCVAAHETEHKKARQRRAARQKAERGHPNWSKAFGYLPGPNGPEPDPRTAPLVKQAYADILAGASLGDVCRQWNDAGAFTITGRPWTTTTLSKFLRKPRNAGLRAYKGARYGPVDRDAIVGKAQWSPLVDEATFWAAQAVLDAPGRAPGRKSVRRHLLTGLAGCGKCGNHLAGSYRTDSRVVYVCKACYGVAILAGDIEPILYHIVAERLAMPDAVDLLRREIHDAAEAETIRLELETLYGELDRLAVERAEGLLTARQVKICTDIVNAKITKLQARQLDQERLRVLDGIPLGTPQVAGMIAELSPDRFRAVLDVLAEVVVQPVGKGGRTFNPERVQVNWR

SEQ ID NO: 1011 - protein, 485 aa, synthetic construct
MTKKVAIYIRVSTTNQAEEGFSIDEQIDRLTKYAEAMGWQVCDTYTDAGSSGAKLERPAMQRLINDIENKAFDTVLVYKLDRLSRSVRDTLYLVKDVFTKNKIDFISLNESIDTSSAMGSLFLTILSAINEFERENIKERMTMGKLGRAKSGKSMMWTKTAFGYYHNRKTGILEIVPLQATIVEQIFTDYLSGISLTKLRDKLNESGHIGKDIPWSYRTLRQTLDNPVYCGYIKFKDSLFKGMHKPIIPYETYLKVQKELEERQQQAYERNNNPRPFQARYMLSGIARCGYCGAPLRIVLGHKRKDGSRTMKYHCVNRFPRKTKGVTVYNDNKKCDSGTYDLSNLENTVIDNLVGFQENNDSLLKIINGNNQPILDTSSLKQQISRIDKKIQKNSDLYLNNFITMDELKDRTDSLQAEKKLLKAKISKNKFNNNTDVFELVKTQLGSIPINELSYDDKKKIVNNLVSKVDVTADNVDIIFKFQLA

SEQ ID NO: 1012 - protein, 469 aa, synthetic construct
MSYTTPVRAAVYLRISEDRSGEQLGVARQREDCLKLCDQRKWVPVEYLDNDVSASTGKRRPAYEQMLADITAGKIAAVVAWDLDRLHRRPIELEAFMSLADEKRLALATVAGDVDLATPQGRLVARLKGSVAAHETEHKKARQRRAARQKAERGYPNWSKAFGYLPGPNGPEPDPQTAPLVKRAYADILAGASLGDVCRQWNDAGAYTVTGRPWTTTTLSKFLRKPRNAGLRAYKGARYGPVDRDAIVGKAQWSPLVDEATFWAAQAVLDAPGRAPGRKSVRRHLLTGLAGCGKCGNHLAGSYRTDGRVVYVCKACHGVAILADNIEPILYHIVAERLAMPDAVDLLRREIHDTAEAETIRLELETLYGELDRLAVERAEGLLTARQVKISTDIVNAKITKLQACQLDQERLRVFEGIPLGTPQVAGTIAELSPDRFRAVLDVLAEVVVQPVGKGGRIFSPERVQVNWR

SEQ ID NO: 1013 - protein, 469 aa, synthetic construct
MSYTTPMRAAVYLRISEDRSGEQLGVARQREDCLKLCDQRKWVPVEYLDNDVSASTGKRRPAYEQMLADITAGKIAAVVAWDLDRLHRRPIELEAFMSLADEKRLALATVAGDVDLATPQGRLIARLKGSVAAHETEHKKARQRRAARQKAERGYPNWSKAFGYLPGPNGPEPDPRTALLVKQAYADILAGASLGDVCRQWNAAGAFTITGRPWTTTTLSKFLRKPRNAGLRAYKGARYGPVDRDAIVGKAQWSPLVDEATFWAAQAVLDAPGRAPGRKSVRRHLLTGLAGCGKCGNHLAGSHRTDGRVVYVCKACHGIAILAENIEPILYHIVAERLAMPDAVDLLRREIHDTVEAETIRLELETLYGELDRLAVERAEGLLTARQVKISTDIVNAKITKLQARQLDQERLRVLDGIPLGTPQVAGMIAELSPNRFRAVLDVLAEVVVQPVGKGVRISNPERVQVNWR

SEQ ID NO: 1014 - protein, 452 aa, synthetic construct
MKAAIYIRVSTQEQVGNYSIQAQTEKLTALCRSKGWDVYDIFIDGGYSGSNMNRPALNEMLSKLHEIDAVVVYRLDRLSRSQRDTTTLIEEYFLKNNVEFVSLSETLDTSSPFGRAMIGILSVFAQLERETIRDRMVMGKIKRIEAGLPLTTAKGRTFGYDVIDTKLYINEEEAKQLQLIYDIFEEEQSITFLQKRLKKLGFKVHTYNRYNNWLTNDLYCGYVSYKDKVHVKGIHEPIISEEQFYRVQEIFTRMGKNPNMNRDSASLLSNLVVCSKCGLGFVHRSKDTMSRGKKYHYRYYSCKTYKHTHELDKCGNKIWRADKLEELIINRVNNYNSASRNVGREDELDSLNEKLKIEHAKKRRLFGLYINGSYEVSELDSMMNDIDAQINYYESQVEANEELRKNRKIQENLADLATVDFDGLEFRDKQLYLKSLINKIYIDGEQVTIEWL

SEQ ID NO: 1015 - protein, 485 aa, synthetic construct
MTKKVAIYTRVSTTNQAEEGFSIDEQIDRLTKYAEAMGWQVSDIYTDAGLSGAKLERPAMQRLINDIENKAFDTVLVYKLDRLSRSVRDTLYLVKDVFTKNKIDFISLNESIDTSSAMGSLFLTILSAINEFERENIKERMTMGKLGRARSGKSMMWTKTAFGYYHNRKTGILEIVPLQATIVEQIFTDYLSGISLTKLRDKLNEGGHIGKDTPWSYRTLRQTLDNPVYCGYIKFKDSLFEGMHKPIIPYETYLKVQKELEERQQQTYERNNNPRPFQAKYMLSGMARCGYCGAPLRIVLGHKRKDGSRTMKYHCANRFPRKTKGVTVYNDNKKCDSGTYDLNNLENTVIDNLIGFQENNDSLLKIINGNSQPILDTSSFKRQISQIDKKIQKNSDLYLNDFITMDELKDRTDSLQAEKKLLKAKISEDKLNDSTDVFELVKTQLGSIPINELSYDNKKKIVNNLVSKVDVTADNVDIIFKFQLA

SEQ ID NO: 1016 - protein, 485 aa, synthetic construct
MTKKVAIYTRVSTTNQAEEGFSIDEQIDRLTKYAEAMGWQVSDTYTDAGFSGAKLERPAMQRLINDIENKAFDTVLVYKLDRLSRSVRDTLYLVKDVFTKNKIDFISLNESIDTSSAMGSLFLTILSAINEFERENIKERMTMGKLGRAKSGKSMMWTKTAFGYYHNRKTGVLEIVPLQAAIVEQIFTDYLSGISLTKLRDKLNESGHIGKDIPWSYRTLRQTLDNPVYCGYIKFKDSLFEGMHKPIIPYETYLKVQKELEERQRQTYERNNNPRPFQAKYMLSGMARCGYCGAPLRIVLGHKRKDGSRTMKYHCANRFPRKTKGITVYNDNKKCDSGTYDLSNLEDTVIDTLIGFQENNDSLLKIINGNNQPILDTSSFKRQISQIDKKIQKNSDLYLNDFITMDELRDRTDSLQAEKKLLKAKISENKFNDSTDVFELVKTQLGSIPINELSYDNRKKIVNNLVSKVDVTADNVDIIFKFQLA

SEQ ID NO: 1017 - protein, 469 aa, synthetic construct
MSYTTPVRAAVYLRISEDRSGEQLGVARQREDCLKLCDQRKWVPVEYLDNDVSASTGKRRPAYEQMLADITAGKIAAVVAWDLDRLHRRPIELEAFMSLADEKRLALATVAGDVDLATPQGRLVARLKGCVAAHETEHKKARQRRAARQKAERGHPNWSKAFGYLPGPNGPEPDPRTAPLVKQAYADTLAGASLGDVCRQWNDAGALTITGRPWTTTTLSKFLRKPRNAGLRAYKGARYGPVDRDAIVGKALWSPLVDEATFWATQAVLDAPGRAPGRKSVRRHLLTGLAGCGKCGNHLAGSYRTDGRVVYVCKTCHGVAILADNIEPILYHIVAERLAMPDAVDLLRREIHDAAEAETIRLELESLYGELDRLAVERAEGLLTARQVKISTDIVNAKITKLQARQLDQERLRVFDGIPLGTPQVAGMIAELSPDRFRAVLDVLAEVVVQPVGKSGRIFNPERVQVSWR

SEQ ID NO: 1018 - protein, 485 aa, synthetic construct
MTRKVAIYTRVSTTNQAEEGFSIDEQVDRLTKYAEAMGWQVSDTYTDAGLSGAKLERPAMQRLINDIENRAFDTVLVYKLDRLSRSVRDTLYLVKDVFTKNKIDFISLNESIDTSSAMGSLFLTILSAINEFERENIKERMTMGKLGRAKSGKSMMWTKTAFGYYHNRKTGILEIVPLQAAIVEQIFTDYLSGISLTKLRDKLNESGHIGKDIPWSYRTLRQTLDNPVYCGYIKFKDSLFEGMHKPIIPYETYLKVQRELEERQQQTYERNNNPRPFQAKYMLSGMARCGYCGAPLRIVLGHKRKDGSRTMKYHCANRFPRKTKGVTVYNGNKKCDSGTYDLSNLENTVIDNLIGFQENNDSLLKIINGNNQQILDTSSFKEQISQIDKKIQKNSDLYLNDFITMDELKDRTDSLLAEKKLLKAKISENELNDSTDVFELVKTQLGSIPINELSYDNKKKIVNNLVSKVDVTADNVDIIFKFQLA

SEQ ID NO: 1019 - protein, 469 aa, synthetic construct
MSYTTPVRAAVYLRISEDRSGEQLGVARQREDCLKLCGQRKWVPVEYLDNDVSASTGKRRPAYEQMLADITAGKIAAVVAWDLDRLHRRPIELEAFMSLADEKRLALATVAGDVDLATPQGRLVARLKGSVAAHETEHKKARQRRAARQKAEHGHPNWSKAFGYLPGPNGPEPDPRTAPLVKQAYADILAGASLGDVCRRWNNAGAFTITGRPWTTTTLSKFLRKPRNAGLRAYKGARYGPVDRDAIVGRAQWSPLVDEATFWAAQAVLDAPGRAPGRKSVRRHLLTGLAGCGKCGNHLAGSYRTDGRAVYVCKACHGVAILADNIEPILYHIVAERLAMPDAVDLLRREIHDAAEAETIRLELETLYGELDRLAVERAEGLLTARQVKISTDIVNAKITKLQARRLDQERLRVFDGIPLGTPQVAGMIAELSPDRFRAVLDVLAEVVVQPVGKGSKIFNPERVQVNWR

SEQ ID NO: 1020 - protein, 470 aa, synthetic construct; identical to SEQ ID NO: 89

SEQ ID NO: 1021 - protein, 469 aa, synthetic construct; identical to SEQ ID NO: 90

SEQ ID NO: 1022 - protein, 469 aa, synthetic construct; identical to SEQ ID NO: 91

SEQ ID NO: 1023 - protein, 485 aa, synthetic construct; identical to SEQ ID NO: 92

SEQ ID NO: 1024 - protein, 452 aa, synthetic construct; identical to SEQ ID NO: 93

SEQ ID NO: 1025 - protein, 469 aa, synthetic construct; identical to SEQ ID NO: 94

SEQ ID NO: 1026 - protein, 469 aa, synthetic construct; identical to SEQ ID NO: 95

SEQ ID NO: 1027 - protein, 485 aa, synthetic construct; identical to SEQ ID NO: 96

SEQ ID NO: 1028 - protein, 469 aa, synthetic construct; identical to SEQ ID NO: 97

SEQ ID NO: 1029 - protein, 469 aa, synthetic construct; identical to SEQ ID NO: 98

SEQ ID NO: 1030 - protein, 452 aa, synthetic construct; identical to SEQ ID NO: 99

SEQ ID NO: 1031 - protein, 469 aa, synthetic construct; identical to SEQ ID NO: 100

SEQ ID NO: 1032 - protein, 469 aa, synthetic construct; identical to SEQ ID NO: 101

SEQ ID NO: 1033 - protein, 485 aa, synthetic construct; identical to SEQ ID NO: 102

SEQ ID NO: 1034 - protein, 484 aa, synthetic construct; identical to SEQ ID NO: 103

SEQ ID NO: 1035 - protein, 485 aa, synthetic construct; identical to SEQ ID NO: 104

SEQ ID NO: 1036 - protein, 452 aa, synthetic construct; identical to SEQ ID NO: 105

SEQ ID NO: 1037 - protein, 485 aa, synthetic construct; identical to SEQ ID NO: 106

SEQ ID NO: 1038 - protein, 469 aa, synthetic construct; identical to SEQ ID NO: 107

SEQ ID NO: 1039 - protein, 452 aa, synthetic construct
MKAAIYIRVSTREQVENYSIQAQTEKLTALCRSKDWDVYDIFIDGGYSGSNMNRPALNKMLSKLHEIDAVVVYRLDRLSRSQRDTITLIEEYFLKNNVEFVSLSETLDTSSPFGRAMIGILSVFAQLERETIRDRMVMGKIKRIEAGLPLTTAKGRTFGYDVIDTKLYINEEEARQLQLIYDIFEEEQSITFLQRRLKKLGFKVRTYNRYNDWLTNDLYCGYVSYKDKVHVKGIHEPIISEEQFYRVQEIFARMGKNPNMNRDSASLLNNLVVCSKCGLGFVHRRKDTMSRGKKYHYRYYSCKTYKHTHELEKCGNKIWRADKLEELIINRVNNYSLASRNVDKEDELDSLNEKLKIEHAKKKRLFDLYINGSYEVSELDGMMSDIDAQINYYESKIEANEELKKDKKIQESLADLATVDFDSLGFREKQLYLKSLINKIYIDGEQVTIEWL

SEQ ID NO: 1040 - protein, 485 aa, synthetic construct
MTKKVAIYTRVSTTNQAEEGFSIDEQIDRLTKYAEAMGWQVSDTYTDAGFSGAELERPAMQRLINDIETKAFDTVLVYKLDRLSRSVRDTLYLVKDVFTKNKIDFVSLSESIDTSSAMGSLFLTILSAINEFERENIKERMTMGKLGRAKSGKSMMWTKTAFGYYHNRKTGILEIVPLQATIVEQIFTDYLSGISLTKLRDKLNESGHIGKDIPWSYRTLRQTLDNPVYCGYIKFKGSLFEGMHKPIIPYETYLKVQKELEERQQQTCERNNNPRPFQAKYMLSGMARCGYCGAPLRIVLGHKRKDGSRTMKYHCANRFPRKTKGVTVYNDNKKCDSGAYDLRNLENTVIDNLIGFQENNDSLLKIINGNNQPFLDTSSIKKQISQIDRKIQKNSDLYLNDFITMDELKDRTDSLQAEKKLLEAKISESKFNDSTDVFELVKTQLGSIPINELSYDNKKKIVNNLVRKVDVTADNVDIIFKFQLA

SEQ ID NO: 1041 - protein, 469 aa, synthetic construct
MSYTTPVRAAVYLRISEDRSGEQLGVARQREDCLKLCDQRKWVPVEYLDNDVSASTGKRRPAYEQMLADITAGKIAAVVAWDLDRLHRRPIELEAFMSLADEKRLALATVAGDIDLATPQGRLVARLKGSVAAHETEHKKARQRRAARQKAERGHPNWSKAFGYLPGPNGPEPDPRTAPLVKQAYADILAGASLGDVCRQWNDAGAFTITGRPWTTTTLSKFLRKPRNAGLRAYKGARYGPVDRDAIVGKAQWSPLVDEATFWAAQAVLDAPGRAPGRKSVRRHLLTGLAGCGKCGNHLAGSYRTDGRVVYVCKACHGVAILADNIEPILYHIVAERLAMPDAVDLLRREIHDAAEAETIRLELETLYGELDRLAVERAEGLLTARQVKISTDIVSAKITELQARQQDQERLRVLDGIPLGTPRVAGMIAELSPDRFRAVLDVLAEVVVQPVGKSGRIFNPERVQVNWR

SEQ ID NO: 1042 - protein, 485 aa, synthetic construct
MTKKVAIYTRVSTTNQAEEGFSIDEQIDRLTKYAEAMGWQVSDTYTDAGSSGAKLERPAMQRLINDIENKAFDTVLVYKLDRLSRSVRDTLYLVKDVFTKNKIDFISLNESIDTSSAMGSLFLTILSAINEFERENIKERMTMGKLGRAKSGKSMMWTKTAFGYYHNRKTGILEIVPLQATIVEQIFTDYLSDISLTKLRDKLNESGHIGKDIPWSYRTLRQTLDNPVYCGYIKFKDSLFEGMHKPIIPYETYLKVQKELEVRQQQTYERNNNPRPFQAKYMLSGMARCGYCGAPLRVVLGHKRKDGSRTMKYHCANRSPRKTKGVTVYNDNKKCDSGTYDLSNLENAVIDNLIGFQENNDSLLRIINGDNQPILDTSSLKKQISQIDKKIQKNGDLYLNDFITMDELKVRTDSLQAEKKLLKAKISENKFNDSTDVFELVKTQLGSIPINELSYDNKKKIVNNLVSKVDVTADNVDIIFKFQLA

SEQ ID NO: 1043 - protein, 452 aa, synthetic construct
MKAAIYIRVSTREQVENYSIQAQTEKLTALCRSKDWDVYDIFVDGGYSGSNMNRPALNEMLSKLHEIDAVVVYRLDRLSRSQRDTITLIEEHFLKNNVEFVSLSETLDTSSPFGRAMIGILSVFAQLERETIRDRMVMGKIKRIEAGLPLTTAKGRTFGYDVIDTRLYINEEEAKQLQLVYDIFEEEQSITFLQKRLKKLGFKVHTYSRYNNWLTNDLYCGYVSYKDKVHVKGIHEPIISEEQFYRVQEIFTRMGKNPNMNRDSASLLNNLVVCSKCGLGFVHRRKDAMSRDKKYHYRYYSCKTYKHIHELEKCGNKIWRADELEELVINRVNSYSVASRNADKEDELDSLNEKLKIEHAKKKRLFDLYVNGSYEVCELDSMMNDIDAQINYYESQIEANEELRKNKKIREDLAVLATVDFDSLEFREKQLYLKSLINKIYIDGEQVTIEWL

SEQ ID NO: 1044 - protein, 452 aa, synthetic construct
MKAAIYIRVSTREQVENYSIQAQTEKLTALCRSKDWDVYDIFIDGGYSGSNMNRPALNEMLSKLHEIDAVVVYRLDRLSRSQRDTITLIEEYFLKNNVEFVSLSETLDTSSPFGRAMIGILSVFAQLERETIRDRMVMGKIKRIEAGLPLTTAKGRTFGYDVIDTKLYINEEEAKQLQLIYDIFEEEQSITFLQKRLKELGFKVRTYNRYNNWLTNDLYCGYVSYKDKVHVKGIHEPIISEEQFYRVQEIFTRMGKNPNMNRDSASLLNNLVVCGKCGLGFVHRRKDAMSRDKKYHYRYYSCKTYKHIHELEKCGNKIWRADKLEELIINRVNDYSVASRNVDKEDELDSLNEKLKIEHAKKRRLFELYINGRYEVSELDSMMSDIDAQISYYESQIKANEELKKNKKIQENLADLATVDFDSLEFREKQLYLKSLINKIYIDGEQVTIEWL

SEQ ID NO: 1045 - protein, 485 aa, synthetic construct
MTKKVAIYTRVSTTNQAEEGFSIDEQIDRLTKYAEAMGWQVSDTYTDAGFSGAKLERPAMQRLINDIENKAFDTVLVYKLDRLSRSVRDTLHLVKDVFTKNGIDFISLSESIDTSSAMGSLFLTILSAINEFERENIKERMTMGKLGRAKSGKSMMWTKTAFGYYHNRKTGILEIVPLQATIVEQIFTDYLSGISLTKLRDKLNESGHIGKDIPWSYRTLRQTLDNPVYCGYIKFKDSLFEGMHKPIIPYETYLKVQKELEERQQQTYERNNNPRPFQAKYMLSGMARCGYCGAPLKVVLGHKRKDGSRTMKYHCANRFPRKTKGVTVYNDNKKCDSGTYDLSNLENTVIDILIGFQENNDSLLKIINGNNQPILDTSSFKKQISRIDKKIQKNTDLYLNDFITMDELKARTDSLQAEKKLLEAKISENKSNDSTDVFELVKTQLGSIPINELSYDNKKKIVNNLVCKVDVTADNVDIIFKFQLA

SEQ ID NO: 1046 - protein, 485 aa, synthetic construct
MTKKVAIYTRVSTTNQAEEGFSIDEQVDRLTKYAEAMGWQVSDAYTDAGFSGAKLERPAMQRLINDIENKTFDTVLVYKLDRLSRSVRDTLYLVKDVFTKNKIDFISLNESIDTSSAMGSLFLTILSAINEFERENIKERMTMGKLGRAKSGKSMMWTKTAFGYHHNRKTGILEIVPLQATIVEQIFTDYLSGISLTKLRDKLNESGHIGKDIPWSYRTLRQTLDNPVYCGYIKFKDSLFEGMHRPIIPYETYLKVQKELEERQQQTYERNNNPRPFQAKYMLSGMARCGYCGAPLRIVLGHKRKDGSRTMKYHCANRFPRKTKGITVYNDSKKCDSGTYDLSNLENTVIDNLIGFQEDDDSLLKIVNGNNQPILDTSSFKKQISQIDKKIQKNSDLYLNDFITMAELKDRTDSLQAEKKLLKAKISENKFNDSTDVFELVKAQLGSIPINELSYDNKKKIVNNLVSKVDVTADNVDIIFKFQLA

SEQ ID NO: 1047 - protein, 452 aa, synthetic construct
MKAAIYIRVSTREQVENYSIQAQTEKLTALCRSKDWDVYDIFVDGGYSGSNMNRPALNEMLSKLHEIDAVVVYRLDRLSRSQRDTITLIEEYFLKNNVEFVSLSETLDTSSPFGRAMIGILSVFAQLERETIRDRMVMGKIKRIEAGLPLTTAKGRTFGYDVIDTKLYINEEEAKQLQLIYDIFEEEQSITFLQKRLKKLGFKVRTYNRYNNWLTNDLYCGYVSYKDKVHVKGIHEPIISEEQFYRVQEIFARMGKNPNMNRDSASLLNNLVVCSKCGLGFVHRRKDAVSRDKKYHYRYYSCKTYKHIHELEKCGNKIWRADKLEELIINRVNNYSLASRNVDKEDELDSLNEKLKIEHAKKKRLFDLYINGSYEVGELDSMMNDIDAQINYYESQIEANEELKKNKKIQENLAHLATVDFDSLEFREKQLYLKSLINKIYIDGEQVTIEWL

SEQ ID NO: 1048 - protein, 469 aa, synthetic construct
MSYTTPVRAAVYLRISEDRSGEQLGVARQREDCLKLCGQRRWVPVEYLDNDVSASTGKRRPAYEQMLADITAGKIAAVVAWDLDRLHRRPIELEAFMSLADEKRLALATVAGDVDLATPQGRLVARLKGCVAAHETEHKKARQRRAARQKAERGLPNWSKAFGYLPGPNGPEPDPRTAPLVKQAYADILAGASLGDVCRRWNDAGAFTITGRPWTTTTLSKFLRKPRNAGLRAYKGARYGPVDRDAIVGKAQWSPLVDEATFWAAQAVLDAPGRAPGRKSVRRHLLTGLAGCGKCGNHLAGSYRTDGRVVYVCKACHGVAILADNIEPILYHIVTERLAMPDAVDLLRREIHVAAEAETIHLELETLYGELDRLAVERAEGLLTARQVKISTDIANAKITKLQARQLDQERLRVFDGIPLGTPQVAGMIAELSPDRFRAVLDVLAEVVVQPVGKSGRISNPERVQVNWR

SEQ ID NO: 1049 - protein, 469 aa, synthetic construct
MCYTTPVRAAVYLRISEDRSGEQLGVARQREDCLKLCGQRNWVPVEYLDNDVSASTGKRRPAYERMLADITAGKIAAVVAWDLDRLHRRPIELEAFMSLADEKRLALATVAGDVDLATPQGRLVARLKGSVAAHETEHKKARQRRAARQKAERGYPNWSKAFGYLPGPNGPEPDPRTAPLVKQAYADILAGASLGDVRRQWNDAGAFTITGRPWTTTTLSKFLRKPRNAGLRAYKGARYGPVDRDAIVGRAQWSPLVDEATFWAAQAVLDAPGRAPGRKSVRRHLLTGLAGCGKCGNHLSGSYRTDGRVVYVCKACHGIAILADNIEPILYHIVAERLAMPDAVDLLRREIHDAAEAEAIRLELETLYGELDRLAVERAEGLLTARQVKISTDIVNAKITKLQARQLDQERLRVFDGIPLGTPQVAGMIAELSPDRFRAVLDVLAEVVVQPVGKSGRIFNPERVQVNWR

SEQ ID NO: 1050 - protein, 485 aa, synthetic construct
MTKKVAIYTRVSTTNQAEEGFSIDEQIDHLTKYAEAMGWQVSDTYTDAGLSGAKLERPAMQRLISDIENKAFDTVLVYKLDRLSRSVRDTLYLVKEVFTKNKIDFISLNESIDTSSAMGSLFLTILSAINEFERENIKERMTMGKLGRAKSGKSMMWTKTAFGYYHNRKTGILEIVPLQATIVEQIFTDYLSGISLTKLRDKLNESGHIGKDIPWSYRTLRQTLDNPVYCGYIKFKGSLFEGMHKPIIPYETYLKVQKELEERQQQTYERNNNPRPFQAKYMLSGMARCGYCGAPLRIVLGHKRKDGSRTMKYHCANRFPRKTKGVTVYNGNKRCDSGTYDLSNLENAVIDSLIGFQENNDSLLKIINGDNQPILDTSSFKKQISQIDKKIQKNSDLYLNDFITMDELKDRTDSLQAEKKLLKAKISENKFNDSTDVFELVKTRLGSIPISELSYDNKKRIVNSLVSKVDVTADNVDIIFKFQLA

SEQ ID NO: 1051 - protein, 469 aa, synthetic construct
MSYTTPVRAAVYLRISEDRSGEQLGVARQREDCLKLCGQRKWVPVEYLDNDVSASTGKRRPAYEQMLADITAGKIAAVVAWDLDRLHRRPIELEAFMSLADEKRLALATVAGDVDLATPQGRLVARLKGSVAAHETEHKKARQRRAARQKAERGYPNWSKAFGYLPGPNGPEPDPRTAPLVKQAYADILAGASLGDVCRQWNDGGAFTITGRPWTTTTLSKFLRKPRNAGLRAYKGARYGPVDRDAIVGKAQWSPLVDEATFWAAQAVLDAPGRAPGRKSVRRHLLTGLAGCGKCGNHLAGSYRTDGRVVYVCKACHGVAILADNIEPILYHIVAERLAMPDAVDLLRREIHDAAEAETIRLELETLYGELDRLAVERAEGLLTARQVKISTDIVNAKITKLQARQLDQARLRVLDGIPLGTPQVAGMVAELSPDRFRAVLDVLAEVVVQPVGKSGRIFNPERVQVNWR

SEQ ID NO: 1052 - protein, 452 aa, synthetic construct
MKAAIYIRVSTREQVENYSIQAQTEKLTALCRSKDWDVYDTFIDGGYSGSNMNRPALNEMLSKLHEIDAVVVYRLDRLSRSQRDTITLIEEYFLKNNVEFVSLSETLDTSSPFGRAMIGILSVFAQLERETIRDRMVMGKIKRVEAGLPLTTAKGRTFGYDVVDTKLYINEEEAKQLQLIYDIFEEEQSITFLQKRLKKLGFKVRTYNRYNNWLTNDLYCGYVSYKDRVHVKGIHEPIISEEQFYRVQEIFARMGKNPNMNRDSASLLNNLVVCGKCGLGFVHRRKDAMSRDKKYHYRYYSCKTYKHIHELEKCGNKIWRADKLEELIINRVNNYSLASRNVDKEDELDSLNEKLKIEHVKKKRLFDLYINGSYEVSELDSMMKDIDAQINYYESQIEANEGLKRNKKIQENLAGLATVDFDGLEFREKQLYLKSLINKIYIDGEQVTIEWL

SEQ ID NO: 1053 - protein, 469 aa, synthetic construct
MSYTTPVRAAVYLRISEDRSGEQLGVARQREDCLKLCDQRKWVPVEYLDNDVSASTGIRRPAYEQMLADITAGKIAAVVAWDLDRLHRRPIELEAFMSLADEKRLALATVAGDVDLATPQGRLVARLKGSVAAHETEHKKARQRRAARQKAERGLPNWSKAFGYLSGPNGPEPDPRTAPLVKQAYADILAGASLGDVCRQWNDAGAFTITGRPWTTTTLSKFLRKPRNAGLRAYKGARYGPVDRDAIVGKAQWSPLVDEATFWAAQAVLDAPGRAPGRKSVRRHLLTGLAGCGKCGNHLAGSYRTDGRVVYVCKACHGVAILADNIEPILYHIVAERLAMPDAVDLLRRETHDAAEAETIRLELEALYGELDRLAVERAEGLLTARQVKISTDIVNAKITKLQARQLDQERLRVFNGIPLGTPQVAGMIAELSPDRFRAVLDVLAEVVVQPVGKSGRIFNPERVQVNWR

SEQ ID NO: 1054 - protein, 469 aa, synthetic construct
MSYTTPVRAAVYLRISEDRSGEQLGVARQREDCLKLCGQRNWVPVEYLDNDVSASTGKRRPAYEQMLADITAGKIAAVVAWDLDRLHRRPIELEAFMSLADEKRLALATVAGDVDLATPQGRLVARLKGCVAAHETEHKKARQRRAARQKAERGLPNWSKAFGYLPGPNGPEPDPRTAPLVKQAYADILAGASLGDVCRQWNDAGALTITGRPWTTTTLSKFLRKPRNAGLRAYKGARYGPVDRDAIVGRAQWSPLVDEATFWAAQAVLDAPGRAPGRKSVRRHLLTGLAGCGKCGSHLAGSYRTDGRVVYVCKACYGVAILADNIEPILYRIVTERLAMPDAVDLLCREIHDAAEAEPIRLELETLYGELDRLAVERAEGLLTARQVKISTDIVNAKITKLQARQLDQERLRVFDGIPLGTPQVAGMIAGLSPGRFRAVLDVLAEVVVQPVGKSGRISNPERVQVNWR

SEQ ID NO: 1055 - protein, 469 aa, synthetic construct
MCYTTPVRAAVYLRISEDRSGEQLGVARQREDCLKLCDQRKWEPVEYLDNDVSASTGKRRPAYEQMLADITAGKIAAVVAWDLDRLHRRPIELEAFMSLADEKRLALATVAGDIDLATPQGRLIARLKGSVAAHETEHKKARQRRAARQKAERGHPNWSKAFGYLPGPNGPEPDPRTAPLVKQAYADILAGASLGDVCRQWNDAGAFTITGRPWTTTTLSKFLRKPRNAGLRTYKGARYGPVDRDAIVGKAQWSPLVDEATFWAAQAVLDAPGRAPGRKSVRRHLLTGLAGCGKCGNRLAGSYRTDGRVVYVCKACHGVAILADNIEPILYHIVAERLAMPGAVDLLRREIHDAAEAETIRLELETLHGELDRLAVERAEGLLTARQVKISTDIVNAKITKLQARQLDQERLRVFDGIPLGTPQVAGVIAKLSPNRFRAVLDVLAEVVVRPVGKSGRIFNPGRVQVNWR

SEQ ID NO: 1056 - protein, 452 aa, synthetic construct
MKAAIYIRVSTREQVENYSIQAQTEKLTALCRSKDWDVYDIFIDGGYSGSNMNRPALNEMLSKLHEIDAVVVYRLDRLSRSQRDTITLIEEYFLKNDVEFVSLSETLDTSSPFGRAMIGILSVFAQLERETIRDRMVMGKIKRIEAGLPLTTAKGRTFGYDVIDTKLYINEEEAKQLQLIYDIFEEEQSITFLQRRLKELGFKVRTYNRYNNWLTNDLYCGYVSYKDKVHVKGIHEPIISEEQFYRVQEIFARMGKNPNMNRVSASLLNNLVVCSKCGLGFVHRRKDIMSRGKKYHYRYYSCKTYKHIHELEKCGNKIWRADKLEELIINRVNNYSLASRNVDKEDELDGLNEKLKIEHAKKKRLFDLYVNGSYEVSELDSMMSDIDAQINYYESRIEANEELKKNKKIQESLAVLAAVDFDSLEFREKQLYLKSLINKIYIDGEQVTIEWL

SEQ ID NO: 1057 - protein, 469 aa, synthetic construct
MSYTTPVRAAVYLRISEDRSGEQLGVARQREDCLKLCGQRKWEPVEYLDNDVSASTGKRRPAYEQMLADITAGKIAAVVAWDLDRLHRRPIELEAFMSLADEKRLALATVAGDVDLATPQGRLVARLKGSVAAHETEHKKARQRRAARQKAERGLPNWSKAFGYLPGPGGPEPDPRTAPLVEQAYADILAGASLGDVCRQWNDAGAFTITGRPWTTTTLSKFLRKPRNAGLRAYKGARYGPVDRDAIVGKAQWSPLVDEATFWAVQAVLDAPGRAPGRKSVRRHLLTGLAGCGKCGNHLAGSYRTDGRVVYVCKSCHGVAILADNIEPILYHIVAERLAMPDAVDLLRREIHDVAEAEAIRLELEALSGELDRLAVERAEGLLTARQVKISTDIVNAKITELQARQLDQERLRVLDGIPLGTPQVVGMIAELSPDRFRAVLDVLAEVVVQPMGKSGRNFNPERVQVNWR

SEQ ID NO: 1058 - protein, 485 aa, synthetic construct
MTKKVAIYTRVSTTNQAEEGFSIDEQIDRLTKYAEVMGWQVSDTYTDAGFSGAKLERPAMQRLINDIENKAFDTVLVYKLDRLSRSVRDTLYLVKDVFTKNKIDFISLNESINTSSAMGSLFLTILSAINEFERENIKERMTMGKLGRAKSGKSMMWTKTAFGYYHNRKTGILEIVPLQATIVEQIFTDYLSGISLTKLRDKLNESGHIGKDIPWSYRTLRQTLDNPVYCGYIKFKDSLFEGMHRPIIPYETYLKVQKELEERQQQTYERNNNPRPFQAKYMLSGMARCGYCGAPLKVVLGRKRKDGSRTMKYHCANRFPRKTKGATVYNDNKKCDSGTYDLSNLENTVIDNLVGFQENNDSLLKIINGNNQPILDTSSLKKQISQIDKKIQKNSDLYLNDLITMDELKDRTDCLQAEKKLLKAKISENKFSDSTDVSELVKTQLGSIPINELSYDDKKKIVNNLVSKVDVTADNVDIIFKFQLA

SEQ ID NO: 1059 - protein, 452 aa, synthetic construct
MKAAIYIRVSTREQVENYSIQAQTEKLTALCRSKDWDVYDIFIDGGYSGSNMNRPALNEMLSKLHEIDAVVVYRLDRLSRSQRDTITLIEEYFLKNNVEFVSLSETLDTSSPFGRAMIGILSVFAQLERETIRDRMVMGKIKRIEAGLPLTTAKGRTFGYDVIDTKLYINEEEAKQLQLIYDIFEEEQSITFLQKRLKKLGFKVRTYNRYNNWLTNDLYCGYVSYKDKVRVKGIHEPIISEEQFYRVQEIFTRMGKNPNMNRDSASLLSNLVVCSKCGLGFVHRRKDAMSRDKKYHYRYYSCKTYKHIHELEKCGNKTWRADKLEELIINRVNNYSVASRNVDKEDELDSLNEKLKIEHAKKKRLFDLYINGSYEVSELDSMMSDIDAQINYYESRIEANEGLKKNKKIQENLADLATVDYDSLEFREKQLYLRSLINKIYIDGEQVTIEWL

SEQ ID NO: 1060 - protein, 485 aa, synthetic construct
MIKKVAIYTRVSTTNQAEEGFSIDEQIDRLTKYAEAMGWQVSDTYADAGFSGAKLERPAMQRLINDIENKAFDTVLVYKLDRLSRSVRDTLYLVKDVFTKNKIDFISLSESIDTSSAMGSLFLTILSAINEFERENIKERMTMGKLGRAKSGKSMMWTKTAFGYYHNRKTGILEIVPLQATIVEQIFTDYLSGISLTKLRDKLNESGHIGKDIPWSYRTLRQTLDNPVYCGYIKFKDSLFEGMHKPIIPYETYLKVQKELEERQQQTYERNNNPRPFQAKYMLSGMARCGYCGAPLRIVLGHKRKDGSRTMKYHCANRFPRKTEGITVYNDNKKCDSGTYDLSNLENTVIDSLIGFQENSDSLLKVINGNNQPILDTSSFKEQISQIDKKIQKNSDLYLSDFITMDELKDRTDSLQAEKKLLKAKISENRFNDSADVFELVKTQLGSIPINELSYDNKKRIVNYLVSKVDVTADNVDIIFKFQLA

SEQ ID NO: 1061 - protein, 484 aa, synthetic construct
MTRKVAIYTRVSTTNQAEEGFSIDEQIDRLTKYAEAMGWQVSGTYTDAGFSGAKLERPAMQRLINDIENKAFDTVLVYKLDRLSRSVRDTLYLVKDVFTKNKIDFISLNESIDTSSAMGSLFLTILSAINEFERENIKERMTMGKLGRAKSGKSMMWTKTAFGYYHNRKTGILEIVPQQATIVEQIFTDYLSGISLTKLRDKLNEGGHIGKDIPWSYRTLRQTLDNPVYCGYIKFKDSLFEGMHKPIIPYETYLKVQKELEERQQTYERNNNPRPFQAKYMLSGMARCGYCGAPLRIVLGHKRKDGSRTMKYHCANRFPRKTKGITVYNDNKKCDSGTYDLSDLENTVIDNLIGFQENNDSLLKIINCNNQPILDTSSFEKQISQIDKKIQKNSDLYLNDFITMDELRDRTDSLQAEKKLLKAKISENRFNDSTDVSELVKTQLGSIPINELSYDDKKKIVNNLVSKVDVTADNVVIIFKLQLA

SEQ ID NO: 1062 - protein, 485 aa, synthetic construct
MTKKVAIYTRVSTTNQAEEGFSIDEQIDRLTKYAEAMGWQVSDTYTDAGSSGAKLERPAMQRLINDIENKAFDTVLVHKLDRLSRSVRDTLYLVKDVFTKNKIDFISLNESIDTSSAMGSLFLTILSAINEFERENIKERMTMGKLGRAKSGKSMMWTKTAFGYYHNRKTGILEIVPLQATIVEQIFTDYLSGISLTKLRDKLNESGHIGKDIPWSHRTLRQTLDNPVYCGYIKFKGSLFEGMHKPIIPYETYLKVQKELEERQQQTYERNNNPRPFQAKYMLSGMARCGYCGAPLRIVLGRKRKDGSRTMKYHCANRFPRKTKGVTVYNDNKKCDSGTYDLSNLESTVIDNLIGFQENNDSLLKIINSDNQPILDTSSFKEQISQIDKKIQKNSDLYLNDFITMDELKDRTDSLQAEKKLLEAKISENKSNDGTDVFEQVKTQLGNIPINELSYDNKKKIVNNLVSKVDVTADNVDIIFKFQLA

SEQ ID NO: 1063 - protein, 469 aa, synthetic construct
MCYTTPVRAAVYLRISEDRSGEQLGVARQREDCLKLCDQRKWVPVEYLDNDVSASTGKRRPAYEQMLADITAGKIAAVVAWDLDRLHRRPIELEAFMCLADEKRLALATVAGDVDLATPQGRLVARLKGSVAAHETEHKKARQRRAARQKAERGLPNWSKAFGYLPGPNGPEPDPRTAPLVKQAYADILAGASLGDVCRRWNDAGAFTITGRPWTTTTLSKYLRKPRNAGLRTYKGARYGPVDRDAIVGKAQWGPLVDEATFWAAQAVLDAPGRAPGRKSVRRHLLTGLAGCGKCGNHLAGSYRTDGRVVYVCKMCHGVAILADNIVPILYHIVAERLAMPDAVDLLRREIHDAAEAETIRLELETLYGELDRLAVERAEGLLTARQVKICTDIVNAKITKLQAHRLDQERLRVLGGIPLGTPQVAGTIAELSPDRFRAVLDVLAEVVVQPVGKSGRIFNPERVQVNWR

SEQ ID NO: 1064 - protein, 485 aa, synthetic construct
MTKKVAIYTRVSTANQAEEGFSIDEQIDRLTKYAEAMGWQVSDTYTDAGFSGAKLERPAMQRLISDIENKAFDTVLVHKLDRLSRSVRDTLYLVKDVFTKNKIDFISLNESINTSSAMGSLFLTILSAINEFERENIKERMTMGKLGRAKSGKSMMWTKTAFGYYHNRNTGILEIVPLQATIVEQIFTDYLSGISLTKLRDKLNESGHIGKDIPWSYRTLRQTLGNPVYCGYIKFKDSLFEGMHKPIIPYETYLKVQKELEERQQQTYERNNNPRPFQAKYMLSGMARCGYCGAPLRIVLGHKRKDGSRTMKYHCANRFPRKTKGVTVYNDNKKCDSGTYDMSNLENTVIDNLIGFQENNDSLLRIINGNNQPILDTSSFKKQISQIDKKIQKNTDLYLNDFITMDVLKDRTDSLQAEKKLLKAKISENKFNDSTDVFELVKTQLGSIPINELSYDDKKKIVNNLVSKVDVTADNVDIIFKFQLA

SEQ ID NO: 1065 - protein, 485 aa, synthetic construct
MTKKVAIYTRVSTTNQAEEGFSIDEQTDRLTKYAEAMGWQVSDTYTDAGFSGAKLERPAMQRLINDIETKAFDTVLVYKLDRLSRSVRDTLYLVKDVFTKNKIDFVSLNESIDTSSAMGSLFLTILSAINEFERENIKERMTMGKLGRAKSGKSMMWTKTAFGYYHNRKTGILEIVPLQATIVEQIFTDYLSGISLTKLRDKLNEGGHTGKDIPWSYRTLRQTLDNPVYCGYIKFKGSLFEGMHKPIIPYETYLKVQKELEERQQQTYERNNNPRPFQAKYMLSGMARCGYCGAPLRIVLGHKRKDGSRTMKYHCANRFPRKTKGVTVYNDNKKCDSGTYDLSNLENTVIDNLIGFQENNDSLLKIINGNNQPILDTSSFKNQISQIDRKIQKNSDLYLNDFITMDELKARTDSLQAEKKLLKAKVSETKFNDSTDVFELVKTQLGSIPINELSYDNKKKIVDNLVSKVDVTADNVDIIFKFQLA

SEQ ID NO: 1066 - protein, 469 aa, synthetic construct
MSYTTPVRAAVYLRISEDRSGEQLGVARQREDCLKLCDQRKWVPVEYLDNDVSASTGKRRPAYEQMLADITAGKIAAVVAWDLDRLHRRPIELEAFMSLADEKRLALATVAGDVDLATPQGRLVARLKGSVAAHETEHKRARQRRAARQKAERGYPNWSKAFGYLPGPNGPEPDPRTAPLVEQAYADILAGASLGDVCRQWNDAGAFTITGGPWTTTTLSKFLRKPRNAGLRAYKGARYGPVDRDAIVGKAQWSPLVDEATFWAAQAVLDAPGRAPGRKSVRRHLLTGLAGCGKCGNHLAGSHRTDGRVVYVCKACHGVSILADNIEPILYRIVAERLAMPDAVDLLRREVHDAAEAGTIRLELETLYGELDRLAVERAEGLLTARQVKISTDIVNAKITKLQARLLDQERLRVFDGIPLGTPQVAGMIAALSPDRFRAVLDVLAEVVVQPVGKSGRIFNPERVQVNWR

SEQ ID NO: 1067 - protein, 452 aa, synthetic construct
MKAAIYIRVSTQEQVGNYSIQAQTEKLTALCRSKGWDVYDIFIDGGYSGSNMNRPALNEMLSKLHEIDAVVVYRLDRLSRSQRDTIILVEEYFLKNNVEFVSLSETLDTSSPFGRAMIGILSVFAQLERETIRDRMVMGKIKRVEAGLPLTTAKGRTFGYDVIDTKLYINEEEARQLQLIYDIFEEEQSITSLQKRLKKLGFKVRTYNRYSNWLTNDLYCGYVSYKDKVHVKGIHEPIISEEQFYRVQEIFTRMGKNPNMNRDSASLLNSLVVCSKCGLSFVHRSKDTMSRGKKYHYRYYSCKTYKHTHELEKCGNKTWRADKLEELIINRVNNYSFASRNADKEDELDGLNEKLKIEHARKKRLFDLYINGSYEVSELDSMMNDIDAQINYYESQIEASEELRKNKKIQENLADLAAVDFDSLELREKRLYLKSLINKIYIDGEQVTIEWL

SEQ ID NO: 1068 - protein, 469 aa, synthetic construct
MSYTTPVRAAVYLRISEDRSGEQLGVARQREDCLKLCGQRKWVPVEYLDNDVSASTGKRRPAYEQMLADITAGKIAAVVAWDLDRLHRRPVELEAFMSLADEKRLALATVAGDVDLATPQGRLVARLKGVVAAHETEHKKARQRRAARQKAERGHPNWSKAFGYLPGPNGPEPDPRTAPLVKQAYADILAGASLGDVCRQWNDAGAFTITGRPWTTTALSKFLRKPRNAGLRAYKGARYGPVDRDAIVGRAQWSPLVDEATFWAAQAVLDAPGRAPGRKSVRRHLLTGLAGCGKCGNHLAGSCRTDGRVVYVCKACHGVSILAVNIEPILYHIVAERLAKPDAVDLLRREIHDAAEAETIRLELGTLYGELDRLAVERAEGLLTARQVKISTDIVNAKITKLQARQLDQERLRVFDGIPLGAPQVAGVIAELSPDRFRAVLDVLAEVVVQPVGKSGKIFNPERVQVNWR

SEQ ID NO: 1069 - protein, 452 aa, synthetic construct
MKAAIYIRVSTQEQVGNYSIQAQTEKLTALCRSKDWDVYDIFVDGGYSGSNMNRPALNEMLSKLHEIDAVVVYRLDRLSRSQRDTTTLIEEYFLKNNVEFVSLSETLDTSSPFGRAMIGILSVFAQLERETIRDRMMMGKIKRIEAGLPLTTAKGRTFGYDVIDTKLYINEEEAKQLRLIYDIFEEERSITFLQKRLKELGFKVRSYNRYNSWLTNDLYCGYVSYKDKVHVRGIHEPIISEEQFYRVQEIFTRMGKNPNTNRDSASLLNNLVVCSKCGLGFVHRSKDTMCRGKKYHYRYYSCKTYKHTHELEKCGNKTWRADKLEELIINRVNNYSFASRNADKEDELDSLNEKLKIEHAKKKRLFDLYINGSFEVCELDSMMNDIDAQINHYESQIEANEELKENKKIQENLAGLATVDFDSLEFREKQLYLKSLINKIYIDGEQVTIEWL

SEQ ID NO: 1070 - protein, 452 aa, synthetic construct
MKAAIYIRVSTREQVENYSIQAQTEKLTALCRSKDWDVYDIFIDGGYSGSNMNRPALNEMLSKLHEIDAVVVYRLDRLSRSQRDTITLIEEYFLKNNVEFVSLSETLDTSSPFGRAMIGILSVFAQLERETIRDRMVMGKIKRIEAGLPLTTAKGRTFGYDVIDTKLYINEEEAKQLQLIYDIFEEEQSITFLQRRLKELGLKVRTYNRYNNWLTNDLYCGYVSYKDKVHVKGIHEPIISEEQFYRVQEIFTRMGKNPNMNRDSASLLNNLVVCGKCGLGFVHRRKDNMSRGKKYHYRYYSCKTYKHIHELEKCGNKIWRADKLEELIIDRVNNYSFASRNADKEDELDSLNEKLKIEHAKKKRLFDLYINGSYEVSELDSMMSDIDAQISYYESQIEANEELKRNKKIQENLADLATVDFDSLEFREKQLYLKGLINKIYIDGEQVTIEWL

SEQ ID NO: 1071 - protein, 485 aa, synthetic construct
MTKKVAIYTRVSTTNQAEEGFSIDEQIDRLTKYAEAMGWQVSDTYTDAGFSGAKLVRPAMQRLINDIENKAFDTVLVYKLDRLSRSVRDTLYLVKEVFTKNKIDFISLNESIDTSSAMGSLFLTILSAINEFERENIKERMTMGKLGRAKSGKSMMWTKTAFGYYHNRKTGILEIVPLQATIVEQIFTDYLSGISLTKLRDKLNESGHTGKDIPWSYRTLRQTLDNPVYCGYIKFKDSLFEGMHKPIIPYETYLKVQKELEERQQQTYERNNNPRPFQAKYMLSGMARCGYCGAPLKIVLGHKRKDGSRTMKYHCANRFPRKTKGVTVYNDNKKCDSGTYDLSDLENTVIDYLIGFQENNDSLLKIINGNNQPILDISSFKKQISQIDKKIQKNSDLYLNDFITMDELKDRTDSLQAEKRLLKAKISENKFNDSTDVFELVKTQLGSIPINELSYDNKKKIVNNLVSKVDVTADNVDIIFKFQLA

SEQ ID NO: 1072 - protein, 452 aa, synthetic construct
MKAAIYIRVSTREQVENYSIQAQTEKLTALCRSKDWDVYDIFIDGGYSGSNMNRPALNEMLNKLHEIDAVVVYRLDRLSRSQRDTITLIEEYFLKNNVEFVSLSETLDTSSPFGRAMIGILSVFAQLERETIRDRMVMGKIKRIEAGLPLTTAKGRTFGYDVIDTKLYINEEEAKQLQLVYDIFEEEQSITFLQKRLKKLGFKVRTYNRYNNWLTNDLYCGYVSYKDKVHVKGIHEPIISEEQFYRVQEIFTRMGKNPNMNRGSASLLNNLVVCSKCGLGFVHRRKDIMSHGKKYHYRYYSCKTYKHIHELEKCGNKIWRADKLEELIINRVDNYSLASRNADKEDELDSLNEKLKIEHAKKKRLFDLYINGSYEVSELDSMMNDIDAQINYYESQIEANEELKKNKKIQENLAHLATVDFDSLEFREKQQYLKSLINKIYIDGEQVTIEWL

SEQ ID NO: 1073 - protein, 469 aa, synthetic construct
MCYTTPVRAAVYLRISEDRSGEQLGVARQREDCLKLCGQRKWVPVEYLDNDVSASTGKRRPAYEQMLADITAGKIAAVVAWDLDRLHRRPIELEAFMSLADEKRLALATVAGDVDLATPQGRLVARLKASVAAHETEHKKARQRRAARQKAERGYPNWSKAFGYLPGPNGPEPDPRTAPLVKQAYADILAGASLGDVCRQWNDAGAFTITGRPWTTTTLSKFLRKPRNAGLRAYKGARYGPVDRDAIVGKAQWSPLVDEGTFWAAQAVLDAPGRAPGRKSVRRHLLTGLAGCGKCGNHLAGSYRTDGRVVYVCKACHGVAILADNIEPILYHIVAERLAKPDAVDLLRREIHDAAEAVTIRLELETLYGELDRLAVERAEGLLTARQVKISTDIVNAKITKLQARQLDQERLRVFDGIPLGTPQVAGMIAELSPDRFRAVLGALAEVVVLPVGKSGRIFSPERVQVNWR

SEQ ID NO: 1074 - protein, 452 aa, synthetic construct
MKAAIYIRVSTREQVENYSIQAQIEKLTALCRSKDWDVYDIFVDGGYSGSNMNRPALNEMLSKLHEIDAVVVYRLDRLSRSQRDTITLIEEYFLKNNVEFVSLSETLDTSSPFGRAMIGILSVFAQLERETIRDRMVMGKIKRIEAGLPLTTAKGRTFGYDVIDTKLYINEEEAKQLRLIYDIFEEEQSITFLQRRLKRLGFRVRTYNRYRNWLTNDLYCGYVSYKDKVHVKGIHEPIISEEQFYRVQEIFTRMGKNPNMNRDSASLLNNLVVCSKCGLSFVHRRKDAMSRDKKYHYRYYSCKTYKHIHELEKCGNKIWRADELEELIINRVNNYNLASRNVDKEDELDSLNEKLKIEHAKKKRLFDLYINGSYEVSELDSMMNDIDAQISYYEGQIEANEELKRNIKIQENLAYLATVDFDSLEFREKQLFLKSLINKIYIDGEQVTIEWL

SEQ ID NO: 1075 - protein, 452 aa, synthetic construct
MKAAIYIRVSTQEQVENYSIQAQTEKLTALCRSKGWDVYDIFIDGGYSGSNMNRPALNEMLSKLHEIDAVVVHRLDRLSRSQRDTITLIEEHFLKNNVEFVSLSETLDTSSPFGRAMIGILSVFAQLERETIRDRMVMGKIKRIEAGLPLTTAKGRTFGYDVVDTKLYINEEEAKQLQLIYDIFEEEQSITFLQKRLKKLGFKVRSYNRYSNWLTNDLYCGYVSYKDKVHVKGIHEPIISEEQFYRVQEIFTRMGKNPNMNRDSASLLNSLVVCSKCGLGFVHRRKDTTSRGKKYHYRYYSCKTYKHIHELEKCGNKIWRADKLEELIINRVNNYSSASRNVDKEDELNSLNEKLKIEHARKKRLFDLYINGGYEVSELDSMMSDIDAQINYYESQIEANEELKKNKKIQGNLADLVTMDFDSLEFREKQLYLKSLINKIYIDGEQVTIEWL

SEQ ID NO: 1076 - protein, 485 aa, synthetic construct
MTKKVAIYTRVSTTNQAEEGFSIDEQTDRLTKYAEAMGWQVSDTYTDAGFSGAKLERPAMQRLINDIENKAFDTVLVYKLDRLSRSVRDTLYLVKNVFTKNKIDFISLNESIDTSSAMGSLFLTILSAINEFERENIKERMTMGKLGRAKSGKSMMWTKTAFGYYHNRKTGILEIVPLQATIVKQIFTDYLSGISLTKLRDKLNESGHIGKDIPWSYRTLRQTLDNPVYCGYIKFKDNLFEGMHKPIIPYETYLKVQKELEERQQQAYERNNNPRPFQAKYMLSGMARCGYCGAPLRIVLGHKRKDGSRTMKYHCANRLPRKTKGVTVYNDNKKCDSGTYDLSNLENTVIDNLIGFQENNDSLLKIINGNNQPILDTSSFKKQVSQIDKRIQRNVDLCLNDFITMDELKDRTDSLQAEKRLLKAKISENKSDDSTDVFELVRTQLGSIPINELSYDDKKKIVNNLVSKVDVTADNVDIIFKFQLA

SEQ ID NO: 1077 - protein, 485 aa, synthetic construct
MTKKVAIYTRVSTTNQAEEGFSIDEQIDRLTKYAEAMGWQVSDTYTDAGFSGAKLERPAMQRLINDIETKAFDTVLVYKLDRLSRSVRDTLHLVRDVLTKNKIDFISLNESIDTSSAMGSLFLTILSAINEFERENIKERMTMGKLGRAKSGKSMMWTKTAFGYHHNRKTGILEIVPLQATIVEQIFTDYLSGISLTKLRDKLNESGHIGKDIPWSYRTLRQTLDNPVYCGYIKFKDSLFEGMHKPIIPYETYLKVQKELEERQQQTYERNNNPRPFQAKYMLSGMARCGYCGAPLKIVLGHKRKDGSRTMKYHCTNRFPRKTKGITVYNDNKKCDSGTYDLSNLENTVIDNLIGFQENNDSLLKIINGNNQPILDTSGFKEQISQIDKKIQKNNDLYLNDLITMDELRERTGSLRAEKELLKAKISENKFNDSTDVFELVKTQLGSIPINELSYDNKKKIVNNLVSKVDVTADNVDIIFKFQLA

SEQ ID NO: 1078 - protein, 452 aa, synthetic construct
MKAAIYIRVSTREQVENYSIQAQTEKLTALCRSKDWDVYDIFIDGGYSGSNMNRPALNEMLSKLHEIDAVVVYRLDRLSRSQRDTITLIEEYFLKNNVEFVSLSETLDTSSPFGRAMIGILSVFAQLERETIRDRMVMGKIKRIEAGLPLTTAKGRTFGYDVVDTKLYINEEEARQLQLIYDIFEEEQSITLLQKRLKKLGFKVRTYNRYNNWLTNDLYCGYVSYKDKVHVKGIHEPIISEEQFYRVQEIFTRMGKNPNKNRDSASLLNNLVVCSKCGLGFVHRRKDAMGRDKKYHYRYYSCKTYKHIHELEKCGNKIWRADKLEELIINRVNSYSVASRNVDKEGELDSLNEKLKTEHAKKKRLFDLYINGSYEVSELDSMMNDIDAQINYYESQIEANEELKKNKKIQENLAQLATVDFDGLEFREKQLYLKSLINKIYIDGDQVTIEWL

SEQ ID NO: 1079 - protein, 469 aa, synthetic construct
MCYTTPVRAAVYLRISEDRSGEQLGVARQREDCLKLCDQRRWVPVEYLDNDVSASTGKRRPAYEQMLADITAGKIAAVVAWDLDRLHRRPIELEAFMSLADEKRLALATVAGDIDLATPQGRLVARLKGSVAAHETEHKKARQRRAARQKAERGHPNWSKAFGYLPGPNGPEPDPRTAPLVKQAYADILAGASLGDVCRQWNGAGALTITGRPWTTTTLSKFLRKPRNAGLRAYKGARYGPVDRDAIVGKAQWDPLVDEATFWAAQAVLDAPGRAPGRKSVRRHLLTGLAGCGKCGNHLAGSYRTDGQVVYVCKACHGVSILAVNIEPILYHIVAERLAMPDAVDLLRREIHDAAGAETIRLELETLYGELDRLAVERAEGLLTARQVKISTDIVNAKITKLQARQLDQERLRVFDGIPLGTPQVAGVIAELSPDRFRAVLDVLAEVVVQPVGKSGRASNPERVRVNWR

SEQ ID NO: 1080 - protein, 452 aa, synthetic construct
MKAAIYIRVSTQEQVGNYSIQAQTEKLTALCRSKDWDVYDIFIDGGYSGSNMNRPALNEMLSKLHEIDAVVVYRLDRLSRSQRDTTTLIEEYFLKNNVEFVSLSETLDTSSPFGRAMIGILSVFAQLERETIRDRMVMGKIKRIEAGLPLTTAKGRTFGYDVIDTKLYINEEEAKQLRLIYDIFEEEQSITFLQKRLKKLGFKVRTYNRYNNWLTNDLYCGYVSYKDKVHVKGIHEPIISEEQFYRVQEIFTRMGKNPNMNRDSASLLSNLVVCSKCGLGFVHRSKDTMSRGKKYHYRYYSCKTYKHTHELEKCGNKTWRADKLEELIINRVNNYSFASRNGDKEDELGSLNEKLKIEHAKKRRLFDLYINGSYEVSELDSMMNDIDAQINYYESQIEANEELRKNKKIQENLADLAAVDFDSLEFREKRLYLKSLINKIYIDGEQVTIEWL

SEQ ID NO: 1081 - protein, 469 aa, synthetic construct
MSYTTPVRAAVYLRISEDRSGEQQGVARQREDCLKLCGQRKWVPVEYLDNDVSASTGKRRPAYEQMLADITAGKIAAVVAWDLDRLHRRPVELEAFMSLADEKRLALATVAGDVDLATPQGRLVARLKGSVAAHETEHKKARQRRAARQKAERGYPNWSRAFGYLPGPNGPEPDPRTAPLVKQAYADILAGASLGDVCRQWNDAGAFTITGRPWTTTTLSKFLRKPRNAGLRAYKGARYGPVDRDAIVGKAQWSPLVDEATFWAAQAVLDAPGRAPGRKSVRRHLLTGLAGCGKCGNRLAGSYRTDGRVVYVCKACHGVAILADNIEPILYHIVAERLAMPDAVDLLRREIHDAAEAETIRQELETLYGELDRLAVERAEGLLTARQVKISTDIVNAKITKLRARQLDQERLRVFDGIPLGTPQVAGVIAELSPDRFRAVLDVLAEVVVQPVGKSGRIFNPERVQVNWR

SEQ ID NO: 1082 - protein, 469 aa, synthetic construct
MSYTTPVRAAVYLRISEDRSGEQLGVARQREDCLKLCGQRKWVPVEYLDNDVSASTGKRRPAYEQMLADITAGKIAAVVTWDLDRLHRRPIELEAFMSLADEKRLALATVAGDVDLATPQGRLVARLKGSVAAHETEHKKARQRRAARQKAERGLPNWSKAFGYLPGPNGPEPDPRTAPLVKQAYADILAGASLGDVCRQWNDAGAFTITGRPWTTTTLSKFLRKPRNAGLRAYKGARYGPVDRGAIVGKAQWSPLVDEATFWVAQAVLDAPGRAPGRKSVRRHLLTGLAGCGKCGSHLAGSYRIDGRVVYVCKACHGVAILADNIEPILYHIVAERLAMPDAVDLLRREIHDAAEAETIRLGLETLYGELDRLAVERAEGLLTARQVKISTDIVNAKITRLQACQLDQERLRVFDGIPLGTPQVADAIAELSPDRFRAVLDVLAEVVVQPVGKGGRIFNPERVQVNWR

SEQ ID NO: 1083 - protein, 485 aa, synthetic construct
MTKKVAIYTRVSTTNQAEEGFSIDEQIDRLTKYAEAMGWQVSDTYTDAGSSGAKLERPAMQRLINDIENKAFDTVLVYKLDRLSRSVRDTLYLVKDVFTKNKIDFISLNESIDTSSAMGSLFLTILSAINEFERENIKERMTMGKLGRAKSGKSMMWTKTAFGYYHNRKTGILEIVPRQATIVEQIFTDYLSGISLTKLRDKLNESGHIGKDIPWSYRTLRQTLDNPVYCGYIKFKGRLFEGMHKPIIPYETYLKVQKELEERQQQTYERNNNPRPFRAKYMLSGMARCGYCGAPLRIVLGHKRKDGSRTMKYHCTNRFPRKTKGITVYNDNKKCDSGTYDLSNLENTVIDNLIGFQENNDSLLKIINGNNQPILDTGSFKKQISQIDKKIQKNSDLYLNDFITMDELKERTDSLQAEKKLLKAKISEDKFNDSTDVFELVKTQLGSIPINELSYDNKKKIVNNLVSKVDVTADNVDIIFKFQLA

SEQ ID NO: 1084 - protein, 452 aa, synthetic construct
MKAAIYIRVSTREQVENYSIQAQTEKLTALCRSKDWDVYDIFIDGGYSGSNMNRPALNEMLSKLHEIDAVVVYRLDRLSRSQRDTVTLIEEYFLKNNVEFVSLSETLDTSSPFGRAMIGILSVFAQLERETIRDRMVMGKIKRIEAGLPLTTAKGRTFGYDVVDTKLYINEEEAKQLQLIYDIFEEEQSITFLQKRLKKMGFKVRTYNRYNNWLTNDLYCGYVSYKDKVHVKGIHEPIISEEQFYRVQEIFTRTGKNPNMNRDSASLLNNLVVCSKCGLGFVHRRKDTMSRGKRYHYRYYSCKTYKHTHELEKCGNKIWRADKLEELIINRVNNYSFASRNVDKAEELDSLNEKLKVEHAKKKRLFDLYINGSYEVSELVSMMNDIDAQINYYESQIEANKELEKNKKIQEKLANLATVDYDSLEFREKQLYLKSLINKIYIDGEQVTIEWL

SEQ ID NO: 1085 - protein, 485 aa, synthetic construct
MTKKVAIYTRVSTTNQAEEGFSIDEQIDRLTKYAEAMGWQVSDTYTDAGISGAKLERPAMQRLINDIENKAFDTVLVYKLDRLSRSVRDTLYLVKDVFTRNKIDFISLNESIDTSSAMGSLFLTILSAINEFERENIKERMTMGKLGRAKSGKSMMWTKTAFGYYHNRKTGILEIVPPQATIVEQIFTDYLSGISLTKLRDKLNESGHIGKDTPWSYRTLRQTLDNPVYCGYIKFKDSLFEGMHKPIIPYETYLKVQKELEERQRQTYERNNNPRPFQAKYMLSGMARCGYCGAPLKIVLGHKRKDGSRTMKYHCANRFPRKTKGVTVYNDNKKCDSGTYDLSNLENAVIDNLVGFQENDDSLLKIINGNNQPIPDTSSFKKRISQIDKKIQKNSDLYLNDFITMDELKDRTDSLQAEKELLKAKISGSKFNDSADVFELVRTQLGSIPINELSYDNKKKIVNNLVSKVDVTADNVDIIFKFRLA

SEQ ID NO: 1086 - protein, 485 aa, synthetic construct
MTKKVAIYTRVSTTNQAEEGFSIDEQIDRLTKYAEAMGWQVSDTYTDAGFSGAKLERPAMQRLINDIENKAFDTVLVYKLDRLSRSARDTLYLVKEVFTKNKIDFISLNESIDTSSAMGSLFLTILSAINEFERENIKERMTMGKLGRAKSGKSMMWTKTAFGYYHNRETGILEIVPLQATIVEQIFTDYLSGISLTKLRDKLNESGHIGKDIPWSYRALRQTLDNPVYCGYIKFKDSLFEGMHKPIIPYETYLKVQKELEERQQQTYERNNNPRPFQAKYMLSGMARCGYCGAPLRIVLGRKRRDGSRTTKYHCANRFPRKTEGVTVYNDNKKCDSGTYDLSNLENTVIDNLVGFQENNDSLLKIINGNNQSILDTSSLKKQISLIDKKIQKNSDLYLNDFITMDELRDRTDSLQAEKELLKAKISENKFNDSTDVFELVKTQLGSIPINELSYDNKKKIVNNLVSKVDVTADSVDIIFKFQLA

SEQ ID NO: 1087 - protein, 469 aa, synthetic construct
MCYTTPMRAAVYLRISEDRSGEQLGVARQREDCLKLCDQRKWVPVEYLDNDVSASTGKRRPAYEQMLADITAGKIAAVVAWDLDRLHRRPIELEAFMSLADEKRLALATVAGDVDLATPQGRLVARLKGSVAAHETEHKKARQRRAARQKAERGHPNWSKAFGYLPGPNGPEPDPRTAPLVKQAYADILAGASLGDVCRQWNDAGAFTITGRPWTTTALSKFLRKPRNAGLRAYKGARYGPVDRDAIVGKAQWGPLVDEATFWAAQAVLDAPGRAPGRKSVRRHLLTGLAGCGKCGNHLAGSYRTDGRVVYVCKACHGVSILADNIEQILYHIVAERLAMPDAVDLLRREIHDAAEAETFRSELEALYGELDRLAVERAEGLLTARQVKICTDIVDAKITKLQARQQDQERLRVLDGIPLGTPQVADMIAGLSPDRFRAVLDVLAEVVVQPVGKSGRIFNPERVQVNWR

SEQ ID NO: 1088 - protein, 452 aa, synthetic construct
MKAAIYIRVSTQEQVENYSIQAQTEKLTALCRSKDWDVYDIFIDGGYSGSNMNRPALNEMLGKLHEIDAVVVYRLDRLSRSQRDTITLIEEYFLKNNVEFVSLSETLDTSSPFGRAMIGILSVFAQLERETIRDRMVMGKIKRIEAGLPLTTAKGRTFGYDVIDTKLYINEEEAKQLQLIYDIFEEEQSITFLQKRLKKLGFKVRTYSRYNSWLTNDLYCGYVSYKDKVHVKGIHVPIISEEQFYRVQEIFTRMGKNPNMNRESASLLNNLVVCSKCGLGFVHRRKDTLSRGKKYHYRYYSCKTYKHTHELEKCGNKIWRADILEELIINRVNNYSFTSRNVDKEGELDSLNEKLKIERAKRKRLFDLYINGSYEVSELDSMMSDIDAQINYYESQIEASEELKRDKKIQENLANLATVDYDSLEFREKQLYLKSLINKIYIDGEQVTIEWL

SEQ ID NO: 1089 - protein, 452 aa, synthetic construct
MKAAIYIRVSTREQVENYSIQAQTEKLTALCRSKDWDVYDIFIDGGYSGSNMNRPALNEMLSKLHEIDAVVVYRLDRLSRSQRDTIILIEEHFLKNNVEFVSLSETLDTSSPFGRAMIGILSVFAQLERETIRDRMVMGKIKRIEAGLPLTTAKGRTFGYDVIDTKLYINEEEAKQLRLIYDIFEEVQSITFLQKRLKKLGFKVHTYSRYNNWLTNDLYCGYVSYKDKVHVKGIHEPIISEEQFYRVQEIFTRMDKNPNMNRDSASLLNSLVVCSKCGLGFVHRRKDTTSRGKKYHYRYYSCKTYKHTHELEKCGNKIWRADTLEELIINRVNNYSFASRSVDKEDELDSLNEKLKIEHAKKKRLFDLYINGSYEVSELGSMMSDIDAQINYYESQIEANEELKKDKKIQEGLANLATVDYDSLEFREKQLYLKSLINKIYIDGEQVTIEWL

SEQ ID NO: 1090 - protein, 485 aa, synthetic construct
MTKKVAIYTRVSTTNQSEEGFSIGEQIDRLTKYAEAMGWQVSDTYTDAGFSGAKLERPAMQRLINDIENKAFDTVLVYKLDRLSRSVRDTLYLVKDVFTKNKIDFISLNESINTSSAMGSLFLTILSAINEFERENIKERMTMGKLGRAKSGKSMMWTKTAFGYYHNRKTGILEIVPPQATIVEQIFTDYLSGISLTKLRDKLNESGHIGKDIPWSYRTLRQTLDNPVYCGYIKFRGSLFEGMHKPIIPYETYLKVQKELEERQQQTYERNNNPRPFQAKYMLSGMARCGYCGAPLKIVLGHKRKDGSRTMKYHCANRFPRKTKGVTVYNDNKKCDSGTYDLSNLENTVIDNLIGLQEDNDSLLKIINGNNQPILDTSSFKEQISQIDKKIQKNSDLYLNDFITMDELKDRTNSLQAEKKLLKAKISETKFNDSTDVFELVKTQLGSIPINELSYENKKKIVNNLVSKVDVTADNVDITFKFQLA

SEQ ID NO: 1091 - protein, 469 aa, synthetic construct
MSYTTPVRAAVYLRISEDRSGEQLGVARQREDCLELCDQRKWVPVEYLDNDVSASTGKRRPAYEQMLADITAGKIAAVVAWDLDRLHRRPIELEAFMSLADEKRLALATVAGDVDLATPQGRLVARLKGSVAAHETEHKKARQRRAARQKAERGHPNWSKAFGYLPGPNGPEPDPRTAPLVKQAYADILAGASLGDVCRQWNGAGAFTITGRPWTTTTLSKFLRKPRNAGLRAYKGARYGPVDRDAIVGKAQWSPLVDEATFWAAQAVLDAPGRAPGRKSVRRHLLTGLAGCGKCGNHLAGSYRTDGKVVYVCKACHGVAILADNIEPTLYHIVAERLAMPDAVDLLRREIHDAAEAETIRLELEALYDELDRLAVERAEGLLTARQVKISTDIVNAKITKLQARQQDQERLRVLDGIPLGTPQVAGKITELSPDRFRAVLDVLAEVVVQPVGKSGRIFNPERVQVNWR

SEQ ID NO: 1092 - protein, 452 aa, synthetic construct
MKAAIYIRVSTREQVENYSIQAQTEKLTALCRSKDWDVYGIFIDGGYSGSNMNRPALNEMLSKLHEIDAVVVYRLDRLSRSQRDTITLIEEHFLKNNVEFVSLSETLDTSSPFGRAMIGILSVFAQLERETIRDRMVMGKIKRIEAGLPLTTAKGRTFGYDVIDTKLYVNEEEARQLQLIYDIFEEEQSITFLQKRLKELGYKVRTYNRYNNWLTNDLYCGYVSYKDKVHVKGIHEPIISEEQFYRVQEIFTRMGKNPNMNRDSASLLNNLVVCSKCGLSFVHRRKDAMGRDKKYHYRYYSCKTYKHIHELEKCGNKIWRADKLEELVINRVNSYSVASRNVEKEDELDSLNEKLKIEHAKKKRLFDLYINGSYEVSELDSMMNDINAQIDYYEGQIEANEELKKNKKIQENLANLATVDFDSLEFREKQLYLKSLINKIYIDGEQVTIEWL

SEQ ID NO: 1093 - protein, 469 aa, synthetic construct
MSYTTPVRAAVYLRISEDRSGEQLGVARQREDCLKLCDQRKWVPVEYLDNDVSASTGRRRPAYEQMLADITAGKIAAVVAWDLDRLHRRPIELEAFMSLADEKRLALATVAGDVDLATPQGRLVARLKGSVAAHETEHKKARQRRAARQKAERGHPNWSRAFGYLPGPNGPEPDPRTAPLVKQAYADILAGASLGDVCRQWNGAGAFTITGRPWTTTTLSKFLRKPRNAGLRAYKGARYGPVDRDAIVGRAQWSPLVDEATFWAAQAVLDAPGRAPGRKSVRRHLLTGLAGCGKCGNHLAGSYRTDGRIVYVCKACHGVAILADNIEPILYHIVAERLARPDAVDLLRSEFHDAAEAETIRLELETLYGELDRLAVERAEGLLTARQVKISTDIVNAKITKLQARLLDQERLRVFDGIPLGTPQVAGMIAELSPDRFRAVLDVLAEVVVQPVGKSGRVFNPKRVQVNWR

SEQ ID NO: 1094 - protein, 452 aa, synthetic construct
MKAAIYIRVSTREQVENYSIQAQTEKLAALCRSKDWDVYDIFIDGGYSGSNMNRPALNEMLSKLHEIDAVVVYRLDRLSRSQRDTITLIEEYFLKNNVEFVSLSETLDTSSPFGRAMIGILSVFAQLERETIRDRMVMGKIKRIEAGLPLTTAKGRTFGYDVIDTKLYINEEEAKQLRLIYDIFEEEQSITFLQKRLKKLGFKVRTYNRYNSWLTNDLYCGYVSYKDKVHVKGIHEPIISEEQFYRVQEIFTRMGKNPNMNRDSASLLSNLVVCSKCGLGFVHRRKDTVSRGKKYHYRYYSCKTYKHTHELEKCGNKIWRADKLEELIINRVNNYSLASRNVEREGELDSLNEKLKVEHAKKKRLFDLYINGSYEVSELDSMMNDIDAQINYYESQIEAKEGLRKNKKIQENLANLATVDYDSLEFREKQLYLKSLINKIYIDGEQVTIEWL

SEQ ID NO: 1095 - protein, 469 aa, synthetic construct
MSYTTPVRAAVYLRISEDRSGEQLGVARQREDCLKLCSQRKWVPVEYLDNDVSASTGKRRPAYEQMLVDITAGKIAAVVAWDLDRLHRRPIELEAFMSLADEKRLALATVAGDVDLATPQGRLVARLKGCVAAHETEHKKARQRRAARQKAERGHPNWSKAFGYLPGPNGPEPDPRTAPLVKQAYADILAGASLGDVCRQWNDAGAFTITGRPWTTTALSKFLRKPRNAGLRAYKGARYGPVDRDAIVGKAQWSPLVDEATFWAAQAVLDAPGRAPGRKSVRRHLLTGLAGCGKCGNHLAGSYRTDGRVVYVCKACHGVAILADNIESILYHIVAERLAMPDAVDLLRRGIRDAAEAETIRLELEALYGELDRLAVERAEGLLTARQVKISTDIVNAKITELQARQLDQERLRVFDGIPLGTPQVAGMIAELSPDRFRAVLDVLAEVVVQPVSKSGRIFNPERVQVNWR

SEQ ID NO: 1096 - protein, 469 aa, synthetic construct
MSYTTPVRAAVYLRISEDRSGEQLGVARQREDCLKLCDQRKWVPVEYLDNDVSASTGKRRPAYEQMLADIAAGRIAAVVAWDLDRLHRRPIELEAFMSLADEKRLALATVAGDVDLATPQGRLVARLKGSVAAHETEHKKARQRRAARQKAERGHPNWSKAFGYLPGPNGPELDPRTAPLVKQAYADILAGASLGDVCRQWNAAGAFTITGRPWTTTTLSKFLRKPRNAGLRAYKGARYGPVDRDAIVGKAQWSPLVDEATFWAAQAVLDAPGRAPGRKSVRRHLLTGLAGCGKCGNHLAGSYRTDGRVVYVCKACHGVAILADNIEPILYHIVAERLAMPDAVDLLRREIHDAAEAGAIRLELEALYGELDRLAVERAEGLLTARQVKISTDIVNAKITKLQARQLDQERLHVLDGIPLGTPQVAGMIVELSPDRFRAVLDVLAEVVVQPVGKSGRIFNPGRVQVNWR

SEQ ID NO: 1097 - protein, 469 aa, synthetic construct
MCYTTPVRAAVYLRISEDRSGEQLGVARQREDCLKLCDQRKWEPVEYLDNDVSASTGKRRPAYEQMLADITAGKIAAVVAWDLDRLHRRPIELEAFMSLADEKRLALATVAGDVDLATPQGRLVARLKGSVAAHETEHKKARQRRAARQKAERGYPNWSRAFGYLPGPNGPEPDPRTAPLVKQAYADILAGASLGDVCRQWNGAGAFTITGRPWTTTALSKFLRKPRNAGLRAYKGARYGPVDRDAIVGKARWSPLVDEATFWAAQAVLDAPGRAPGRKSVRRHLLTGLAGCGKCGNHLAGSYRTDGRVVYVCKACHGVAILADNIEPILYHIVAERLAMPDAVGLLRREIHDAAEAGTIRLELETLYGELDRLAVERAEGLLTARQVKISTDIVNAKITKLQARQLDQERLRVFDGIPLGTPQVAGVIAKLSPDRFRAVLDVLAEVIVQPVGKSSRIFNPKRVQVNWR

SEQ ID NO: 1098 - protein, 485 aa, synthetic construct
MTKKVAIYTRVSTTNQAEEGFSIDEQIDRLTKYAEAMGWQVSDTYTDAGFSGAKLERPAMQRLINDIENKAFDTVLVYKLDRLSRSVRDTLYLVKDVFTKNKIDFISLNESIDTSSAMGSLFLTILSAINEFERENIKERMTMGKLGRAKSGKSMMWTKTAFGYYHNRETGILEIVPLQATIVEQIFTDYLSGISLAKLRDKLNESGHIGKDIPWSYRTLRQTLDNPVYCGYIKFKDSLFEGKHKPIIPYETYLKVQKELEERQKQTYERNNNPRPFQAKYMLSGMARCGYCGAPLRIVLGHKRKDGSRTMKYHCTNRFPRITKGATVYNDNKKCDSGTYDLSNLENTVIDNLIGFQENKDSLLKIINGNNQPILDTSSFEKQISQIDKKIQKNSDLYLNDFITMDELKDRTDSLQAEKKLLEAKISENKFNDSTDVFELVKTQLGSVPINELSYDNKKKIVNNLVSKVDVTADNVDIIFKFQLA

SEQ ID NO: 1099 - protein, 452 aa, synthetic construct
MKAAIYIRVSTREQVENYSIQAQTEKLTALCRSKDWDVYDIFIDGGYSGSNMNRPALNEMLGKLHEIDAVVVYRLDRLSRSQRDTITLIEEYFLKNNVEFVSLSETLDTSSPFGRAMIGILSVFAQLERETIRDRMVMGKIKRIEAGLPLTTAKGRTFGYDVIDTKLYINEEEARQLQLIYDIFEEEQSITFLQKRLKKLGFKVRTYNRYNNWLTNDLYCGYVSYKDKVHVKGVHEPIISEEQFYRVQEIFTRMGKNPNMNRDSASLLNNLVVCSKCGLGFVHRRKDTTSRGKKYHYRYYSCKTYKHIHELEKCGNKIWRADKLEELIINRVNNYSFASRNVDKEDELDSLNEKLKIERAKKKRLFDLYINGSYEVSELDSMMNDIDAQINYYESQIEANEELRKNKKIQENLADLATVDFDSLEFREKQLYLKSLINKIYIDGEQVTVEWL

SEQ ID NO: 1100 - protein, 485 aa, synthetic construct
MTKKVAIYTRVSTTNQAEEGFSIDEQIDRLTKYAEAMGWQVGDTYTDAGFSGAKLERPAMQRLINDIENKAFDTVLVYKLDRLSRSVRDTLYLVKDVFTKNKIDFISLNESINTSSAMGSLFLTILSAINEFERENIKERMTMGKLGRARSGKSMMWTKTAFGYHHNRKTGILEIVPLQATIVEQIFTDYLSGISLTKLRDKLNESGHIGKDIPWSYRTLRQTLDNPVYCGYIKFKDSLFEGMHRPIIPYETYLKVQKELEERQQQAYERNNNPRPFQAKYMLSGMARCGYCGAPLRIVLGRRRKDGSRTMKYHCANRFPRKTKGVTVYNDNKKCDSGTYDLSNLENTVIDNLIGFQENNDSLLKIINGNNQPILDTSSFRKQISQIDKKIQKNSDLYLNDFITMDELKDRTDRLQAEKKLLKARISENKFNDSTDVFELVKTQLGSIPINELSYDNKKKIVNNLVSKVDVTADNVDIIFKFQLA

SEQ ID NO: 1101 - protein, 452 aa, synthetic construct
MKAAIYIRVSTQEQVGNYSIQAQTEKLTALCRSKDWDVYDIFIDGGYSGSNMNRPALNEMLSKLHEIDAVVVYRLDRLSRSQRDTTTLIEEYFLKNNVEFVSLSETLDTSSPFGRAMIGILSVFAQLERETIRDRMVMGKIKRIEAGLPLTTAKGRTFGYDVIDTKLYINEEEARQLRLIYDIFEEEQSITSLQKRLKKLGFKVRAYNRYNNWLTNDLYCGYVSYKDKVHVKGIHEPIISKEQFYRVQEIFTRMGKNPNMNRDSASLLSNLVVCSKCGLGFVHRSKDTMCRGKKYHYRYYSCKTYKHTHELEKCGNKTWRADKLEELIINRVNNYSFASRNVDTEDELDSLNEKLKIEHAKKKRLFDLYINGSYEVSELGSMMNNIDAQINYYESQIEANVKLKKNRKIQENLADLATVDFGSLEFREKQLYLKSLISKIYIDGEQVTIEWL

SEQ ID NO: 1102 - protein, 485 aa, synthetic construct
MTKKVAIYTRVSTTNQAEEGFSIDEQVDRLTKYAEAMGWQVSDTYTDAGFSGAKLERPAMQRLINDIENKAFDTVLVYKLDRLSRSVRDTLYLVKDVFTKNKIDFISLSESIDTSSAMGSLFLTILSAINEFERENIKERMTMGKLGRAKSGKSMMWTKTAFGYYHNRKTGILEIVPLQATIVEQIFTDYLSGISLTKLRDKLNESGHIGKDIPWSYRTLRQTLDNPVYCGYIKFKDSLFEGMHKPIIPYETYLKVQKELEERQQQTYERNNNPRPFQAKYMLSGMARCGYCGAPLRIVLGHKRKDGSRTMKYHCANRFPRKTRGITVYNDNKKCDSGTYDLSSLENTVIDNLIGFQEDNDSLLKIINGNNQPILDTSSFKKQISQIDKKIQKNSDLYLNDFITMDELRDRTDSLQAEKRLLKAKISENKSNGSTDVFELVKTQLGSIPINELSYDNKKKIVNNLVSKVDVTADNVDIIFKFQLV

SEQ ID NO: 1103 - protein, 485 aa, synthetic construct
MTKKVAIYTRVSTTNQAEEGFSIDEQIDRLTKYAEAMGWQVSDTYTDAGFSGAKLERPAVQRLINDIEDKAFDTVLVYKLDRLSRSVRDTLHLVKDVFTKNKIDFISLNESIDTSSAMGSLFLTILSAINEFERENIKERMTMGKLGRAKSGKSMMWTKTAFGYYHNRKTGILEIVPLQATIVEQIFTDYLSGISLTKLRDKLNESGHIGKDIPWSYRTLRQTLDNPVYCGYIKFKDSLFEGMHKPIIPYETYLKVQKELEERQQQTYERNNNPRPFQAKYMLSGMARCGYCGAPLKIVLGHKRKDGSRTMKYHCTNRFPRRTKGVTVYNDNKKCDSGTYDLGDLENTVIDNLIGFQENNDSLLKIINGNNQPILDTSSFKRQISQIDKKIQKNSDLYLNDFITMDELKARTDSLQAEKKLLKAKISENKFNNSTDVFELVKTQLGSIPINELSYDNKKKIVNNLVSKVDVTADNVDIIFKFQLA

SEQ ID NO: 1104 - protein, 452 aa, synthetic construct
MKAAIYIRVSTQEQVGNYSIQAQTEKLTALCRSKDWDVYDIFVDGGYSGSNMNRPALNEMLSKLHEIDAVVVYRLDRLSRSQRDTTTLIEEYFLKNNVEFVSLSETLDTSSPFGRAMIGILSVFAQLERETIRDRMVMGKIKRIEAGLPLTTAKGRTFGYDVIDTKLYINEEEARQLRLIYDIFEEEQSITSLQKRLKKLGFKVRTYNRYNNWLTNDLYCGYVSYKDKVHVKGIHEPIISEEQFYRVQEIFARMGKRPNMNRDSASLLNNLVVCSKCGLGFVHRSKDTMSRGKKYHYRYYSCKTYKHTHELEKCGNKTWRADKLEELVINRVINYNLASRNVDKEDELDSLNERLKIEHAKKKRLFDLYINGSYEVSELDSMMNDIDAQINYYGSQIEANEELRKNRKIQENLADLATVDFDGLEFRDKQLYLKSLINKIYIDGEQVTIEWL

SEQ ID NO: 1105 - protein, 452 aa, synthetic construct
MKAAIYIRVSTREQVENYSIQAQTEKLTALCRSKDWDVYDTFIDGGYSGSNMNRPALNEMLSKLHEIDAVVVYRLDRLSRSQRDTITLIEEYFLKNNVEFVSLSETLDTSSPFGRAMIGILSVFAQLERETIRDRMVMGKIKRIEAGLPLTTAKGRTFGYDVIDTKLYVNEEEAKQLQLIYDIFEEEQSITFLQKRLKKLGFKVRTYNRYSNWLTNDLYCGYVSYKDKVHVKGIHEPIISEEQFYRVQEIFTRMGKNPNMNRGSASLLNNLVVCSKCGLGFVHRRKDAMSRDKKYRYRYYSCKTYKHIHELEKCGNKIWRADKLEELIINRVNNYSLASRNVDKEDELDSLNEKLKIEHVKKKRLFDLYINGSYEVSELDSMMNDIDAQISYYESQIEASEELRKNRKIQENLADLATVDFDSLEFREKQLYLKSLINKIYIDGEQVTIEWL

SEQ ID NO: 1106 - protein, 485 aa, synthetic construct
MTKKVAIYTRVSTTNQAEEGFSIDEQTDRLTKYAEAMGWQVSDTYTDAGFSGAKLERPAMQRLINDIENKAFDTVLVYKLDRLSRSVRDTLYLVKDVFTKNRIDFISLNESINTSSAMGSLFLTILSAINEFERENIKERMTMGKLGRAKSGKSMMWTKTAFGYYHNRKTGILGIVPLQAAIVEQIFTDYLSGISLTKLRDKLNESGHIGKDIPWSYRTLRQTLDNPVYCGYIKFKDSLFEGMHKPIIPYETYLKVQKELEERQQQTYERNNNPRPFQAKYMLSGMARCGYCGAPLRIVLGHKRKDGSRTMKYHCANRFPRKTKGVTVYNDNKKCDSGAYDLSNLEDTVIDNLIGFQENNDSLLKIINGNNRPILDTSSFEKQISQIDKKIQKNSDLYLNDFITMDELKDRTDSLQAEKRLLKAKISEDKFNDSTDVFELVKTQLGSIPINELSYDNKKKIVNNLVSKVDVTADNVDIIFKFQQA

SEQ ID NO: 1107 - protein, 469 aa, synthetic construct
MCYTTPVRAAVYLRISEDRSGEQLGVARQREDCLKLCDQRKWVPVEYLDNDVSASTGKRRPAYEQMLADITAGKIAAVVAWDLDRLHRRPIELEAFMSLADEKRLALATVAGDVDLATPQGRLVARLKGSVAAHETEHKKARQRRAARQKAERGYPNWSKAFGYLPGPSGPEPDPRTAPLVKQAYADILAGASLGDVCRQWNAAGAFTITGRPWTTTTLSKFLRKPRNAGLRAYKGARYGPVDRDAIVGKAQWSPLVDEATFWAAQAVLDAPGRAPGRKSVRRHLLTGLAGCGKCGNHLAGSYRTDGRVVYVCKACHGVAILADNIEPILYHIVAERLAMPDAVDLLRREIHDAAEAETIRLELETLYGELDCLAVERAEGLLTARQVKVSTDIVNAKITKLQARQLDQERLRVFDGIPLGTPQVAGMIAELSPNRFRAVLDVLVEVVVRPVGKSGRIFNPERVQVSWR

SEQ ID NO: 1108 - protein, 469 aa, synthetic construct
MSYTTPVRAAVYLRISEDRSGEQLGVARQREDCLKLCDQRKWVPVEYLDNDVSASTGKRRPAYEQMLADITAGTIAAVVAWDLDRLHRRPIELEAFMSLADEKRLALATVAGDVDLATPQGRLVARLKGSVAAHETEHKKARQRRAARQKAERGLPNWSKAFGYLPGPNGPEPDPRTAPLVRQAYADILAGASLGDVCRQWNDAGAFTITGRPWTTTTLSKFLRKPRNAGLRAYKGARYGPVDRGAIVGKAQWSPLVDEATFWAAQAVLDAPGRAPGRKSVRRHLLAGLAGCGKCGNHLAGSYRTDGRVVYVCKACHGVAILADNIEPILYHIVAERLAMPDAVDLLRREIHDAAEAETIRLELETLYGELDRLAVERAEGLLTARQVKISTDIVNAKITKLQARQLDQERLRVLDGIPLGTPQVTGAIAELSPDRFRAVLDVLAEVVVQPVGKSGRVFNPERVQVNWR

SEQ ID NO: 1109 - protein, 452 aa, synthetic construct
MKAAIYIRVSTQEQVENYSIQAQTEKLTALCRSKDWDVYDIFIDGGYSGSNMNRPALNEMLSKLHEIDAVVVYRLDRLSRSQRDTTTLIEEYFLKNNVEFVSLSETLDTSSPFGRAMIGILSVFAQLERETIRDRMVMGKIKRIEAGLPLTTAKGRTFGYDVIDTKLYINEEEAKQLQLIYDIFEEEQSITFLQKRLKKLGFKVRTYNRYNSWLTNDLYCGYVSYKDKVHVKGIHEPIISEEQFYRVQEIFTRMGKNPNMNRDSASLLSNLMVCSKCGLGFVHRSKDTMSRGKKYHYRYYSCKTYKHTHELEKCGNKTWRADKLEELIINRVNNYSFASRNVDKEDELDSLNEKLKIEHAKKKRLFDLYINGSYEVSELDSMMNDIDAQINYYESQIEANEELKKNKKIQENLADLATVDFGSLEFREKQLYLKSLINKIYIDGEQVTIEWL

SEQ ID NO: 1110 - protein, 452 aa, synthetic construct
MKAAIYIRVSTQEQVGNYSIQAQTEKLIALCRSKDWDVYDIFIDGGYSGSNMNRPALNEMLSKLHEIDAVVVYRLDRLSRSQRDTTTLIEEYFLKNNVEFVSLSETLDTSSPFGRAMIGILSVFAQLERETIRDRMVMGKIKRIEAGLPLTTAKGRTFGYDVIDTKLYVNEEEAKQLQLIYDIFEEEQSITFLQKRLKKLGFKVRTYNRYNNWLTNDLYCGYVSYKDKVHVKGIHEPIISEEQFYRVQEIFTRMGKKPNMNRDSASLLNNLVVCSKCGLGFVHRSKDTMSRGKKYHYRYYSCKTYKHTHELEKCGNKTWRADKLEELIINRVNNYSFVSRNGDKEDELDSLNEKLKIEHAKKKRLFDLYINGSYEVSELDSMMNDIDAQINYYESQIGANEGLKENKKIQENLADLATVDFDSLEFREKQLYLRSLINKIYIDGEQVTIEWL

SEQ ID NO: 1111 - protein, 452 aa, synthetic construct
MKAAIYIRVSTQEQVGNYSIQAQTEKLTALCRSKDWDVYDIFIDGGYSGSNMNRPALNEMLSKLHEIDAVVVYRLDRLSRSQRDTTTLIEEYFLKNNVEFVSLSETLDTSSPFGRAMIGILSVFAQLERETIRDRMVMGKIKRIEAGLPLTTAKGRTFGYDVIDTKLYINEEEAKQLQLIYDIFEEEQSITFLQKRLKKLGFKVRTYNRYNSWLTNDLYCGYVSYKDKVHVKGIHEPIISEEQFYRVQEIFTRMGKNPNMNRDSASLLSNLVVCSKCGLGFIHRSKDTMSRGKKYHYRYYSCKTYKHTHELEKCGNKTWRADKLEELIINRVSNYSFASRNVDKEDELDSLNGKLKIEHAKKKRLFDLYINGSYEVSELDSMMNDIDAQINYYESQIEANKGLKKNKKIQENLADQAAVDFDSLEFREKQLYLKSLISKIYIDGEQVTIEWL

SEQ ID NO: 1112 - protein, 485 aa, synthetic construct
MTKKVAIYTRVSTTNQAEEGFSIDEQIDRLTKYAEAMGWQVSDTYTDAGSSGAKLERPAMQRMINDIENRAFDTVLVYKLDRLSRSVRDTLYLVKDVFTKNKIDFISLNESIDTSSAMGSLFLTILSAINEFERENIKERMTMGKLGRAKSGKSMMWTKTAFGYYHNRKTGILEIVPLQATIVEQIFTDYLGGISLTKLRDKLNEGGHIGKDIPWSYRTLRQILDNPVYCGYIKFKDSLFEGMHKPIIPYETYLKVQKELEERQQQTYERNNNPRPFQAKYMLSGVARCGYCGAPLRIVLGHKRKDGSRTMKYHCANRFPRKTKGVTVYNDNKKCDSGTYDLSDLENTVIDNLIGFQENNDSLLKIINGNNQPTLDTSSFRKRISQIDQKIQKNSDLYLNDLITMDELKDRTDSLQAEKKLLKAKISENKFNDSADVFELVKTQLGSIPINELSYVNKKRIVNNLVSKVDVTADNVDIIFKFQLA

SEQ ID NO: 1113 - protein, 469 aa, synthetic construct
MSYITPVRAAVYLRISEDRSGEQLGVARQREDCLKLCDQRKWVPVEYLDNDVSASTGKRRPAYEQMLADITAGKIAAVVAWDLDRLHRRPIELEAFMSLADEKRLVLATVAGDVDLATPQGRLVARLKGSVAAHETEHKKARQRRAARQKAERGYPNWSKAFGYLPGPNGPEPDPRTAPLVKQAYADILAGASLGDVCRQWNDAGTLTITGRPWTTTTLSKFLRKPRNAGLRAYKGARYGPVDRDAIVGKAQWSPLVDEATFWAAQAVLDAPGRAPGGKSVRRHLLTGLAGCGKCGSHLAGSYRTDGRVVYVCKACHGVAIRADNIEPILYHIVAERLAMPDAVDLLRCEIHDAAEAEAIHLELETLYGELDRLAVERAEGLLTARQVKISTDIVNAKITKLQARQLDQERLRVLDGIPLGTPQVAGMIAELSPDRFRAVIDVLAEVVVQPVGKSGRIFNPERVQVNWR

SEQ ID NO: 1114 - protein, 452 aa, synthetic construct
MKAAIYIRVSTREQVENYSIQAQTEKLTALCRSKGWDVYDIFTDGGYSGSNMNRPALNEMLSKLHEIDAVVVYRLDRLSRSQRDTITLIEEYFLKNNVEFVSLSETLDTSSPFGRAMIGILSVFAQLERETIRDRMVMGKIKRIEAGLPLTTAKGRTFGYDVIDTKLYINEEEAKQLQLIYDIFEEEQSITFLQRRLKELGLKVRTYNCYNNWLTNDLYCGYVSYKDKVHVKGIHEPIISEEQFNRVQEIFTRMGKSPNMNRDSASLLNSLVVCSKCGLGFVHRRKDAMSHGKKYHYRYYSCKTYKHIHELEKCGNKIWRADKLEELVINRVNNYSLASRNVDKEDELDSLNEKLRIEHAKKRRLLDLYINGSYDVSELDSMMNDIDAQINYYESQIEANEELKKNKKIQENLAHLATVDFDSLEFREKQLYLKSLINKIYIDGEQVTIEWL

SEQ ID NO: 1115 - protein, 469 aa, synthetic construct
MSYTTPVRAAVYLRISEDRSGEQLGVARQREDCLKLCDQRKWVPVEYLDNDVSASTGKRRPAYEQMLADITAGKIAAVVAWDLDRLHRRPIELEAFMSLADEKRLALATVAGDVDLATPQGRLVARLKGSVAAHETEHKKARQRRAARQKAERGLPNWSKAFGYLPGPNGPEPDPRTAPLVKQAYADILAGASLGDVCRQWNDAGAFTITGRPWTTTALSKFLRKPRNAGLRAYKGARYGPVDRDAIVGKAQWSPLVDEATFWAAQAVLDAPGRAPGRKSVRRHLLTGLAGCGKCGNHLAGSYRTDGKVVYVCKACHGIAILADNIEPILYHIVAERMAMPDAVDLLRREIRDAAEAETIRLELETLYGELDRLAVERAEGLLTARQVKISTDIVNAKITKLQACQQDQERLRVLDGIPLGTPQVAGIIAELSPDRFRAVLDVLAEVVVQPVGKSGRIFNPERVQVNWR

SEQ ID NO: 1116 - protein, 485 aa, synthetic construct
MTKKVAIYTRVSTTNQAEEGFSIDEQIDRLTKYAEAMGWQVSDTYTDAGLSGAKLERPAMQRLINDIENKAFDTVLVYKLDRLSRSVRDTLYLVKDVFTKNRIDFISLNESIDTSSAMGSLFLTILSAINEFERENIKERMTMGKLGRAKSGKSMMWTKTAFGYHHNRETGILEIVPLQATIVEQIFTDYLSGISLTKLRDKLNESGHIGKDIPWSYRTLRQTLDNPVYCGYIKFKDSLFEGMHKPIIPYETYLKVQKELEERQQQTYERNNNPRPFQAKYMLSGMARCGYCGAPLRIVLGHKRKDGSRTMKYHCANRFPRKTKGVTVYNDNKKCDSGTYDLSNLENTVIDNLIGFQENNDSLLKIINGNNQPILDTSSFKKQISQIDKKIQKNSDLYLNDFITMDELKDRTVSLLAEKKLLKAKISEDKFNDSTDVFELVKTQLGSIPINELSYDNKKKIVNSLVSKVDVTADSVDIIFKFQLA

SEQ ID NO: 1117 - protein, 452 aa, synthetic construct
MKAAIYIRVSTREQVENYSIQAQTEKLTALCHSKDWDVYDIFIDGGYSGSNMNRPALNEMLSKLHEIDAVVVYRLDRLSRSQRDTITLIEEYFLKNNVEFVSLCETLDTSSPFGRAMIGILSVFAQLERETIRDRMVMGKIKRIEAGLPLTTAKGRTFGYDVIDTKLYINEEEAKQLQLIYDIFEEEQSITFLQKRLKKLGFKVRTYSRYNSWLTNDLYCGYVSYKDKVHVKGIHEPIISEEQFYRVQEIFTRTGKHPNMNRDSASLLNNLVVCSKCGLGFVHRRKDTMSRGKKYHYRYYSCKTYKHVHELEKCGNKIWRADKLEELIINRVNNYSFASRNVDKEDELDSLNEKLKIEQAKKRRLFDLYINGSYEVSELDSMMNDIDAQINYYESQIEANEELKKNKKIQENLADLATVDYDSLEFREKQLYLKSLINKIYIDGEQVTIEWL

SEQ ID NO: 1118 - protein, 485 aa, synthetic construct
MTKKVAIYTRVSTTNQAEEGFSIDEQIDRLTKYAEAMGWQVSDTYTDAGFSGAKLERPAMQRLINDIESKSFDTVLVYKLDRLSRSVRDTLYLVKDVFTKNKIDFISLNESIDTSSAMGSLFLTILSAINEFERENIKERMTMGKLGRAKSGKSMMWTKTAFGYYHNRKTGILEIVPLQATIVEQIFTDYLSGISLTKLRDKLNESGHIGKDIPWSYRTLRQTLGNPVYCGYIKFKDSLFEGMHKPIIPYETYLKVQKELEERQQQAYERNNNPRPFQAKYMLSGMARCGYCGAPLRIVLGHRRKDGSRTMKYHCANRFPRKTKGVIVYNDNKKCDSGTYDLSSLESIVIDNLISFQENNDSLLKIINGNHQPTLDTSSFKKQISQIDKKIQKNSDLYLNDLITMDELRDRTDSLQAEKKLLRAKISESKFSDSTDVFELVKAQLGSIPINELSYDNKKKIVNNLVSKVDVTADNVDIIFKFQLA

SEQ ID NO: 1119 - protein, 452 aa, synthetic construct
MKAAIYIRVSTREQVENYSIQAQTEKLTALCRSKDWDVYNIFIDGGYSGSNMNRPALNEMLSKLHEIDAVVVYRLDRLSRSQRDTITLIEEYFLKNNVEFVSLSETLDTSSPFGRAMIGILSVFAQLERETIRDRMVMGKIKRIEAGLPLTTAKGRTFGYDVIDTKLYINEEEAKQLQLIYDIFEEEQSITFLQKRLKKLGFKVRTYNRYNNWLTNDLYCGYVSYKDKVHVKGIHEPIISEEQFYRVQEIFTRMGKNPNMNRDSASLLNGLVVCSKCGLGFVHRRKDAMSRDKKYHYRYYSCKTYKHIHELEKCGNKIWRADKLEELIINRVNNYSLASRNVDKEDELDSLYEKLKIEHAKRKRLFGLYLNGSYEASELDSMMNDIDAQINYYESQIEANEELKKNKKIQENLADLATVDFDSLEFREKQRYLKSLINKIYIDGEQVTIEWL

SEQ ID NO: 1120 - protein, 452 aa, synthetic construct
MKAAIYIRVSTREQVENYSIQAQTEKLTALCRSKGWDVYDIFIDGGYSGSNMNRPALNEMLSRLHEIDAVVVYRLDRLSRSQRDTITLIEEYFLKNNVEFVSLSETLDTSSPFGRAMIGILSVFAQLERETIRDRMVMGKIKRIEAGLPLTTAKGRTFGYDVIDTKLYINEEEAKQLQLIYDIFEEEQSITFLQKRLKKLGFKVRTYNRYHNWLTNDLYCGYVSYKDKVHVKGIHEPIISEEQFYRVQEIFTRMGKNPNMNRDSASLLSNLVVCSKCGLGFVHRRKDTTSRGKKYRYRYYSCKTYKHTHELEKCGNKIWRADKLEELIINRVNSYSLAGRNADKEDELDSLNERLKIEHAKKRRLFDLYINGSYEVSELDSMMSDIDAQINYYESQIEANEELRKIKKTQESLADLATVDFDSLEFREKQLYLRSLVNKIYIDGEQVTIEWL

SEQ ID NO: 1121 - protein, 485 aa, synthetic construct
MTKKVAIYTRVSTTNQAEEGFSIDEQIDRLTKYAEAMGWQVSDTYTDAGSSGAKLERPAMQRLINDIENKAFDTVLVYKLDRLSRSVRDTLYLVKDVFTKNKIDFVSLNESIDTSSAMGSLFLTILSAINEFERENIKERMTMGKLGRAKSGKSMMWTKTAFGYYHNRKTGILEIVPLQATIVEQIFTDYLSGISLTKLRDKLNESGHIGKDIPWSYRTLRQTLDNPVYCGYIKFKDSLFEGMHKPIIPYETYLKVQKELGERQQQTYERNDNPRPFQAKYMLSGTARCGYCGAPLRIVLGHKRKDGSRTMKYHCANRFPRKTKGVTVYNDNKKCDSGTYDLSNLENTVINYLIGFQENNGSLLKIINGNNQPILDTSSFEKQISQIDKKIQKNSDLYLNDFITMDELKDRTDSLQAEKKLLKAKISENKFNDSTDVFELVKTQLGSIPINELSYDNKKRIVNNLVSKVDVTADNVDIIFKFQLA

SEQ ID NO: 1122 - protein, 452 aa, synthetic construct
MKAAIYIRVSTREQVGNYSIQAQTEKLTALCRSKDWEVYDIFIDGGYSGSNMNRPALNEMLSKLHEIDAVVVYRLDRLSRSQRDTITLIEEYFLKNNVEFVSLSETLDTSSPFGRAMIGILSVFAQLERETIRDRMVMGKIKRIEAGLPLTTAKGRTFGYDVIDTKLYINEEEAKQLQLIYDIFEEEQSITFLQKRLKKLGFKVRTYNRYNNWLTNDLYCGYVSYKDKVHVKGIHEPIISEEQFYRVQEIFTRTGKNPNMNRGSASLLNNLVVCGKCGLGFVHRRKDIMSRGKKYHYRYYSCKTYKHIHELEKCGNKIWRADKLEELIISRVNNYSFVSRNVDKEDELDSLNEKLKTEHAKKKRLFDLYINGSYEVSELDSMMNDIDAQINYYESQIEANGELKKNKKIQENLADLATVDFDSLEFREKQRYLKSLINKIYIDGEQVTIEWL

SEQ ID NO: 1123 - protein, 485 aa, synthetic construct
MTKKVAIYTRVSTTNQAEEGFSIDEQIDRLTKYAEAMGWQVSDTYTDAGLSGAKLERPAMQRLINDIENKAFDTVLVYKLDRLSRSVRDTLYLVKDVFTKNKIDFISLNESIDTSSAMGSLFLTILSAINEFERENIKERMTMGKLGRAKSGKSMMWTKTAFGYYHNRETGILEIVPLQATIVEQIFTDYLSGISLTKLRDKLNEGGHIGKDIPWSYRTLRQTLDNPVYCGYIKFKGSLFEGMHKPIIPYETYLKVQKELEERQQQTYERNNSPRPFQAKYMLSGMARCGYCGAPLRIVLGHKRKDGSRTMKYHCANRFPRKTKGVTVYNDNKKCDSGTYDLSNLEDAVIDSLIGFQEDNDSLLKIINGNDRPILDTSSFKEQISQIDKRIQKNSDLYLNDFITMDELKDRTDSLQAEKKLLEAKISENKFNDSTDVFELVRTQLGSIPINELSYDNKKKIVNNLVSKVDVTADNVDIIFKFQLA

SEQ ID NO: 1124 - protein, 485 aa, synthetic construct
MTKKVAIYTRVSTTNQAEEGFSIDEQIDRLTKYAEAMGWQVSDTYTDAGFSGAKLERPAMQRLINDIENRAFDTVLVYKLDRLSRSVRDTLYLVKDVFTKNKIDFISLNESINTCSAMGSLFLTILSAINEFERENIKERMTMGKLGRAKSGKSMMWTKTAFGYYHNRKTGILEIVPLQATIVKQIFTDYLSGISLTKLRDKLNESGHIGKDIPWSYRTLRQTLDNPVYCGYIKFKDSLFEGMHKPIIPYETYLKVQKELEVRQQQTYERNNNPRPFQAKYMLSGMARCGYCGAPLRIVLGHKRKDGSRSMKYHCANRFPRKTKGVTVYNGNKKCDSGTYDLSNLENTVIDNLIGFQGNNDSLLKIINGNNQPILDTSSFKKQISQIDKKIQKNSDLYLNDFITMDELKDRTDSLQAEKKLLEAKISENKFNDSTDVFELVKTQLGSIPINELSYDNKKKIVNNLVSKVDVTADNVDIIFKFQLA

SEQ ID NO: 1125 - protein, 469 aa, synthetic construct
MSYTTPVRAAVYLRISEDRSGEQLGVARQREDCLKLCDQRKWVPVEYLDNDVSASTGKRRPAYEQMLADIAAGKIAAVVAWDLDRLHRRPIELEAFMSLADEKRLALATVAGDVDLATPQGRLVARLKGSVAAHETEHKKARQRRAARQKAERGLPNWSRAFGYLPGPNGPEPDPRTAPLVKQAYADILAGASLGDVCRQWNDAGAFTITGRPWTTTTLSKFLRKPRNAGLRAYKGARYGPVDRDAIVGKAQWSALVDEATFWAAQAVLDAPGRAPGRKSVRRHLLTGLAGCGKCGNHLAGSYRTDGRVVYVCKACHGVAILADNIEPALYHIVAERLAMPSAVDLLRRETHDAAEAETIRLELETLYDELDRLAVERAEGLLTARQVKISTDIVNAKITKLQACQLDQGRLRVLDGIPLGTPQVAGMIAELSPDRFRAVLDVLAEVVVQPVGKSGRIFNPERVQVNWR

SEQ ID NO: 1126 - protein, 452 aa, synthetic construct
MKAAIYIRVSTREQVENYSIQAQTEKLTALCRSKDWDVYDIFVDGGYSGSNMNRPALNEMLSKLHEIDAVVVYRLDRLSRSQRDTITLIEEYFLKNNVEFVSLSETLDTSSPFGRAMIGILSVFAQLERETIRDRMVMGKIKRIEAGLPLTTAKGRTFGYDVIDTRLYINEEEAKQLQLIYDIFEEEQSITFLQKRLKRLGFKVRTYNRYNNWLTNDLYCGYVSYKDKVHVKGIHEPIISEEQFYRVQEIFTRMGKNPNMNRDSASLLNNLVVCGKCGLGFVHRRKDAMSRDKKYHYRYYSCKTYKHIHELEKCGNKIWRADELEELIINRVNNYSLASRNVDKDDELDSLNEKLKIEHAKKKRLFDLYINGGYEVSELDSMMSDIDAQISCYESQIEANEGLKKNKKIQENLADLATVDFDSLEFREKQLYLKSLINKIYIDGEQVTIEWL

SEQ ID NO: 1127 - protein, 469 aa, synthetic construct
MSYTTPVRAAVYLRISEDRSGEQLGVARQREDCLKLCDQRKWVPVEYLDNDVSASTGKRRPAYEQMLADITAGKIAAVVAWDLDRLHRRPIELEAFMSLADEKRLALATVAGDVDLATPQGRLVARLKGCVAAHETEHKKARQRRAARQKAERGHPNWSRAFGYLPGPNGPEPDPRTAPLVKQAYADILAGASLGDVCRQWNGAGALTITGRPWTTTTLSKFLRKPRNAGLRAYKGARYGPVDRDAIVGKAQWSPLVDEATFWAAQAVLDAPGRAPGRKSVRRHLLTGLAGCGKCGNHLAGSYRTDGRVVYVCKACHGVAILADNIEPILYHIVAERLAMPDAVDLLRREIHDAAEAETIRLEMETLYGELDRLAVERAEGLLTARQVKISTDIVNAKITKLQARQLDQERLRVFDGIPLGTPQVAGTIAELSPDRFRAVLDVLAEVVVQPVGKGGRAFNLERVQVNWR

SEQ ID NO: 1128 - protein, 469 aa, synthetic construct
MCYTTPVRAAVYLRISEDRSGEQLGVARQREDCLELCGQRKWVPVEYLDNDVSASTGKRRPAYEQMLADITAGKIAAVVAWDLDRLHRRPVELEAFMSLADEKRLALATVAGDVDLATPQGRLVARLKGCVAAHETEHKKARQRRAARQKAERGHPNWSKAFGYLPGPNGPEPDPRTAPLVKQAYADILAGASLGDVCRQWNDAGAFTITGGLWTTTTLSKFLRKPRNAGLRAYKGARYGPVDRDAIVGKAQWSPLVDEATFWAAQAVLDAPGRAPGGKSVRRHLLTGLAGCGKCGNHLAGSYRTDGRVVYVCKACHGVAILADNIEPILYHIVAERLATPDAVDLLRREVHDAAEAETIRLELEALYGELDRLAVERAEGLLTARQVKISTDIVNAKITKLQARQLDQERLRVFDGIPLGTPQVAGVIAELSPDRFRAVLDVLAEVVVQPVGKSGRIFNPERVQVNWR

SEQ ID NO: 1129 - protein, 485 aa, synthetic construct
MTRKVAIYTRVSTTNQAEEGFSIDEQIDRLTKYAEAMGWQVSDTYTDAGFSGAKLERPAMQRLINDIENKAFDTVLVYKLDRLSRSVRDTLYLVKGVFTKNKIDFISLNESIDTSSAMGSLFLTILSAINEFERENIKERMTTGKLGRAKSGKSMMWTKTAFGYYHNRKTGILEIVPLQATIVEQIFTDYLSGISLTKLRDKLNESGHIGKDIPWSYRTLRQTLDNPVYCGYIKFKDSLFEGMHKPIIPYETYLKVQKELEERQQQTYERNNNPRPFQAKYMLSGMARCGYCGAPLRIVLGHKRKDGSRTMKYHCANRFPRKTKGVTVYNDNKKCDSGTYDLSNLENTVIDSLIGFQENNDSLLKIINGNNQPILDTSSFKEQISQIDKKIQKNSDLYLNDFITMDELKDRTDSLQAEKRLLKAKISENKFNDSTDVFELVKTQLGSIPINELSYDDKKKIVNNLVSKVDVTADNVDIIFKFQLA

SEQ ID NO: 1130 - protein, 485 aa, synthetic construct; identical to SEQ ID NO: 665

SEQ ID NO: 1131 - protein, 485 aa, synthetic construct
MIKKVAIYTRVSTTNQAEEGFSIDEQINRLTKYAEAMGWQVSGTYTDAGFSGAKLERPAMQRLINDIENKAFDTVLVYKLDRLSRSARDTLYLVKDVFTKNKIDFISLNESIDTSSAMGSLFLTILSAINEFERENIKERMTMGKLGRAKSGKSMMWTKTAFGYYHNRKTGILEIVPLQATIVEQIFTDYLSGISLTKLRDKLNESGHIGKDIPWSYRTLRQTLGNPVYCGYIKFKDSLFEGMHKPIIPYETYLKVQKELEGRQQQTYERNNNPRPFQAKYMLSGMARCGYCGAPLRIVLGHKRRDGSRTMKYHCANRFPRKTKGITVYNDNKKCDSGTYDLSNLENTVIDNLIGFQENNDSLLKIINGNNQPILDTSSLKEQISQIDKKIQKNSDLYLNDFITMDELKDRTDSLQAEKKLLKAKISGNKFNDNTDVFELVKTQLGSIPINELSYDNKKKIVNNLVSKVDVTADNVDIIFKFQLA

SEQ ID NO: 1132 - protein, 452 aa, synthetic construct
MKAAIYIRVSTREQVENYSIQAQTEKLTALCRSKDWDVYDIFIDGGYSGSNMNRPALNEMLSKLHEIDAVVVYRLDRLSRSQRDTITLIEEYFLKNNVEFASLSETLDTSSPFGRAMIGILSVFAQLERETIRDRMVMGKIKRIEAGLPLTTAKGRTFGYDVIDTKLYINEEEAEQLQLIYDIFEEEQSITFLQKRLKKLGFKVHTYSRYNNWLTNDLYCGYVSYKDKVHVKGIHEPIISEEQFYRVQEIFTRMSKNPNMNRDSASLLNNLVVCSRCGLSFVHRRKDTMSRGKKYHYRYYSCKTYKHIHELEKCGNKIWRADKLEELIINRVNNYSFASRNVDKEDELDSLNEKLKIEHAKKKRLFDLYINGSYNVCELDSMMNDIDAQISYYESQIEANEELKKNKKIQENLADLATVDFDGLEFREKQLYLRSLINKIYIDGEQVIIEWL

SEQ ID NO: 1133 - protein, 452 aa, synthetic construct
MKAAIYIRVSTREQVENYSIQAQTEKLTALCRSKDWDVYDIFIDGGYSGSNMNRPALNEMLSKLHEIDAVVVYRLDRLSRSQRDTITLIEEYFLKNNVEFVSLSETLDTSSPFGRAMIGILSVFAQLERETIRDRMVMGKIKRIEAGLPLTTAKGRTFGYDVIDTKLYINEEEAKQLQLIYDIFEEEQSITFLQKRLKKLGFKVRTYNRYNNWLTNDLYCGYVSYKDKVHVKGIHEPIISEEQFYRVQEIFARMGKNPNMNRDSASLLNNLVVCSKCGLGFVHRRKDAMSRDKKYHYRYYSCKTYKHIHELEKCGNKIWRADKLEELVINRVNNYSFASRNADKEDKLDSRSEKLKIEHAKKKRLFDLYINGSYEVSELDSMMNDIDAQIGYYESQIEANEELKKNKKIQENLADLATVDFDSLEFREKQLYLKSLINKIYIDGEQVTIEWL

SEQ ID NO: 1134 - protein, 485 aa, synthetic construct
MTRKVAIYTRVSTTNQAEEGFSIDEQIDRLTKYAEAMGWQVSDTYTDAGVSGAKLERPAMQRLINDIENKAFDTVLVYKLDRLSRSVRDTLYLVKDVFTKNKIDFISLNESIDTSSAMGSLFLTILSAINEFERENIKERMTMGKLGRAKSGKSMMWTKTAFGYYHNRKTGILEVVPLQATIVEQIFTDYLSGISLTKLRDELNESGHIGKDIPWSYRTLRQTLDNPVYCGYIKFKDSLFEGMHKPIIPYETYLKVQKELEERQQQTYERNNNPRPFQAKYMLSGMARCGYCGAPLRIVLGHKRKDGSRTMKYHCASRFPRKTKGVTVYNDNKKCDSGTYDLSDLENTVIDNLIGLQENNDSLLKIINGNNQPILDTSSFKKQISQIDKKIQKNSDLYLNDFITMDELKDRTDSLQAEKRLLKAKISENKFNDSTDVFELVKTQLGSIPINELSYDDKKKIVNNLVSKVDVTADNVDIIFKFQLA

SEQ ID NO: 1135 - protein, 469 aa, synthetic construct
MSYTTPMRAAVYLRISEDRSGEQLGVARQREDCLKLCDQRKWVPVEYLDNDVSASTGKRRPAYEQMLADIAAGRIAAVVTWDLDRLHRRPIELEAFMSLADEKRLALATVAGDVDLATPQGRLVARLKGSVAAHETEHKKARQRRAARQKAERGLPNWSKAFGYLPGPNGPEPDPRTAPLVKQAYADILAGASLGDVCRQWNDAGAFTITGRPWTTTTLSKFLRKPRNAGLRAYKGARYGPVDRDAIVGKAQWSPLVDEATFWAAQAVLDAPGRAPGRKSVRRHLLTGLACCGKCGNHLAGSYRTDGRVVYVCKACHGVAILADNIEPILYHIVAERLAMPDAVDLLRRDIHDTVEAETIRLKLKTLYGELDRLAVERAEGLLTARQVKISTDIVNAKITKLQARQLDQERLRVLDGIPLGTPQVAGVIAELSPDRFRAVLDVLAEVVVQPVGKSGRIFNPERVQVNWR

SEQ ID NO: 1136 - protein, 452 aa, synthetic construct
MKAAIYIRVSTREQVENYSIQAQTEKLTALCRSKDWDVYDIFIDGGYSGSNMNRPALNEMLSKLHEIDAVVVYRLDRLSRSQRDTITLIEEYFLKNNVEFVSLSETLDTSSPFGRAMIGILSVFAQLERETIRDRMVMGKIKRIEAGLPLTTAKGRTFGYDVIDTKLYINEEEAKQLRLIYDIFEEEQSITFLQKRLKKLGFKVHTYNRYNNWLTNDLYCGYVSYKDKVHVKGIHEPIISEEQFYRVQEIFTRMGKNPNMNRDSASLLNNLVVCGKCGLGFVHRRKDAASRDKKYHYRYYSCKTYKHIHELEKCGNKIWRADKLEELIVSRVNNYSFASRNADKEDELDSLNEKLKTEHAKKKRLFDLYINGSFEVSELDSMMNDIDAQISYYESQIEANEELKKSKRIQENLANLATVDFDSLEFREKQLYLKSLINKIYIDGEQVTIEWL

SEQ ID NO: 1137 - protein, 485 aa, synthetic construct
MTRKVAIYTRVSTTNQAEEGFSIDEQIDRLTKYAEAMGWQVSDTYTDAGFSGAKLERPALQRLINDIENKAFDTVLVYKLDRLSRSVRDTLYLVKDVFTKNKIDFISLNECIDTSSAMGSLFLTILSAINEFERENIKERMTMGKLGRAKSGKSMMWAKTAFGYYHNSKTGILEIVPLQATIVEQIFTDYLSGISLTKLRDKLNESGHIGKDIPWSYRTLRQTLDNPVYCGYIKFKGSLFEGMHKPIIPYETYLKVQKELEERQQQTYERNNNPRPFQAKYMLSGVARCGYCGAPLRVVLGHKRKDGSRTMKYRCANRSPRKTKGVTVYNDNKKCDSGTYDLSNLENIVIDNLIGFQENNDSLLKIINGNSQPILDTSSLKKQISQIDKKIQKNSDLYLNDFITMDELKDRTDSLQAEKKLLEAKISENKFNDSTDVFELVKTQLGSIPINELSYDNKKKIVNNLVSKVDVTADSVGIIFKFQLA

SEQ ID NO: 1138 - protein, 469 aa, synthetic construct
MSYTTPVRAAVYLRISEDRSGEQLGVARQREDCLRLCDQRKWVPVEYLDNDVSASTGKRRPAYERMLADIAAGKIAAVVAWDLDRLHRRPIELEAFMSLADEKRLALATVAGDVDLATPQGRLVARLKGSVAAHETEHKKARQRRAARQKAERGHPNWSKAFGYLPGPNGPEPDPRTAPLVKQAYADILAGASLGDVCRQWNDAGAFTITGRLWTTTTLSKFLRKPRNAGLRAYKGARYGPVDRDAIVGKAQWSPLVDEATFWAAQAVLDTPGRAPGRKSVRRHLLTGLAGCGKCGNRLAGSYRTDGRVVYVCKACHGVAILADNIEPILYHIVAERLAMPDAVDLLRREIHDAAEAETIRLGLETLYGELDSLAVERAEGLLTARQVKISTDIVNAKITKLQARQLDQERLRVFDGIPLGTPQVAGMIAELSPDRFRAVLDVLAEVVVQPVGKGGRISNPERVQVNWR

SEQ ID NO: 1139 - protein, 452 aa, synthetic construct
MKAAIYIRVSTREQVENYSIQAQTEKLTALCRSKDWDVYDIFIDGGYSGSNMNRPALNEMLGKLHEIDAVVVYRLDRLSRSQRDTITLIEEYFLKNNVEFVSLSETLDTSSPFGRAMIGILSVFAQLERETIRDRMVMGKIKRIEAGLPLTTAKGRTFGYNVIDTKLYINEEEAKQLQLIYDIFEEEQSITFLQKRLKKLGFKVRTYNRYNNWLTNDLYCGYVSYKDKVHVKGIHEPIISEEQFYRVQEIFTRMGKNPNMNRDSASLLNNLVVCGKCGLGFVHRRKDTMSRDKKYHYRYYSCKTYKHIHELEKCGNKIWRADKLEELIINRVNNYSLVNRNADKEDELDSLNEKLKIEHAKKKRLFDLYINGSYEVSELDSMMNGIDAQIGYYESQIEANKGLRKDKKIQENLANLATVDLDSLEFREKQLYLKSLINKIYIDGEQVTIEWL

SEQ ID NO: 1140 - protein, 469 aa, synthetic construct
MCYTTPVRAAVYLRISEDRSGEQLGVARQREDCLKLCGQRKWEPVEYLDNDVSASTGKRRPAYEQMLADITAGKIAAVVAWDLDRLHRRPIELEAFMSLADEKRLALATVAGDVDLATPQGRLVARLKGSVAAHETEHKKARQRRAARQKAERGHPNWSKAFGYLPGPNGPEPDPRTAPLVKQAYADILAGASLGDVCRRWNGAGAFTITGRPWATTALSKFLRKPRNAGLRAYKGARYGPVDRDAIVGKAQWSPLVDEATFWAAQAVLDAPGRAPGRKSVRRHLLTGLAGCGKCGNHLAGSYRTDGRVVYVCKACHGVAILADNIEPILYHIVAERLAMPDAVDLLRREIHDAAEAETIRLELETLYGELDRLAVERAEGLLTARQVKISTDIVNAKITKLQVRQLDQERLRVLDGIPLGTPQVAGVIAELSPNRFRAVLDVLAEVVVQPVGKSGRIFNPERVQVSWR

SEQ ID NO: 1141 - protein, 485 aa, synthetic construct
MTKKVAIYTRVSTTNQAEEGFSIDEQIDRLTKYAEAMGWQVSDTYTDAGCSGAKLERPAMQRLINDIENKAFDTVLVYKLDRLSRSVRDTLYLVKDVFTKNKIDFISLNESIDTSSAMGSLFLTILSAINEFERENIKERMTMGKLGRAKSGKSMMWTKTAFGYYHNRKTGILEIAPPQATIVEQIFTDYLSGISLTKLRDKLNESGHIGKDIPWSYRTLRQTLDNPVYCGYIKFKDRLFEGMHKPIIPYETYLKVQKELEERQQQAYERNNNQRPFQAKYMLSGMARCGYCGAPLRIVLGRKRKDGSRTMKYHCANRFPRKTKGVTVYNDNKKCDSGTYDLSNLENTVIDTLIGFQENNDSLLKIINGNNQPILDTSSFKKQISQIDKKIQKNSDLYLNDFITMDELKDRTDSLQAEKKLLKAKISENKFNDSTDVFELVKTQLGSIPINELSYDNKKKIVNNLVSKVDVTADNVDIIFKFQLA

SEQ ID NO: 1142 - protein, 452 aa, synthetic construct
MKAAIYIRVSTQEQVGNYSIQAQTEKLTALCCSKGWDVYDIFIDGGYSGSNMNRPALNKMLSKLHEIDAVVVYRLDRLSRSQRDTTTLIEEYFLKNNVEFVSLSETLDTSSPFGRAMIGILSVFAQLERETIRDRMVMGKIKRIEAGLPLTTAKGRTFGYDVIDTKLYINEEEAKQLRLIYDIFEEEQSITSLQKRLKKLGFKVRTYNRYNNWLTNDLYCGYVSYKDKVHVKGIHEPIISEEQFYRVQEIFTRMGKNPNMNRGSASLLNNLVVCSKCGLSFVHRSKDTMSRGKKYHYRYYSCKTYKHTHELEKCGNKTWRADKLEELIINRVNNYSFASRNVDKEDELDSLNEKLKIEHAKKKRLFDLYINGSYEVSELDSMMNDIDAQINYYESQIGANEELERNKKIQENLADLATVDFDSLEFREKQLCLKSLINKIYIDGEQVTIEWL

SEQ ID NO: 1143 - protein, 452 aa, synthetic construct
MKAAIYIRVSTREQVENYSIQAQTEKLTALCRSKDWDVYDIFIDGGYSGSNMNRPALNEMLSKLHEIDAVVVYRLDRLSRSQRDTITLIEEYFLKNNVEFVSLSETLDTSSPFGRAMIGILSVFAQLERETIRDRMVMGKIKRIEAGLPLTTAKGRTFGYDVIDTKLYINEEEAKQLRLIYDIFEEEKSITFLQKRLKKLGFKVRTYNRYNNWLTNDLYCGYVSYKDKVHVKGIHEPIISEEQFYRVQEIFARMGKNPNMNRDSASLLNNLVVCSKCGLGFVHRRKDAMSRSKKYHYRYYSCKTYKHIHELEKCGNKIWRADKLEELIINRVNNYSLASRNVDKEDELDSLNEKLKIEHAKKKRLFDLYVNGSYEVSELDSMMNDIDAQINYYEGQIEANEELRKNKKIQENLANLATVDFDSLEFREKQLYLKSLINKIYIDGEQVTIEWL

SEQ ID NO: 1144 - protein, 485 aa, synthetic construct
MTKKVAIYTRVSTTNQAEEGFSIDEQIDRLTKYAEAMGWQVSDTYTDAGLSGAKLERPAMQRLINDIENKAFDTVLVYKLDRLSRSVRDTLYLVKDVFTKNRIDFISLNESIDTSSAMGSLFLTILSAINEFERENIKERMTMGKLGRAKSGKSMMWTKTAFGYHHNRETGILEIVPLQATIVEQIFTDYLSGISLTKLRDKLNESGHIGKDIPWSYRTLRQTLDNPVYCGYIKFKDSLFEGMHKPIIPYETYLKVQKELEERQQQTYERNNNPRPFQAKYMLSGMARCGYCGAPLRIVLGRKRKDGSRTMKYHCANRFPRKTGGVTVYNDNKKCDSGTYDLSNLENTVIDYLIGLQENNDSLLKIINGNNQPILDTSSFKKQISLIDKKIQKNSDLYLNDFITMDELKDRTDGLLAEKKLLKAKISENKFNGSTDVFELVKTQLGSIPINELSYDNKKKIVNNLVSKVDVTADNVDIIFKFQLA

SEQ ID NO: 1145 - protein, 452 aa, synthetic construct
MKAAIYIRVSTQEQVENYSIQAQTEKLTALCRSKDWDVYDIFIDGGYSGSNMNRPALNEMLSKLHEIDAVVVYRLDRLSRSQRDTTTLIEEYFLKNNVEFVSLSETLDTSSPFGRAMIGVLSVFAQLERETIRDRMVMGKIKRIEAGLPLTTAKGRTFGYDVIDTKLYINEEEAKQLRLIYDIFEEERSITFLQKRLKKLGFKVRTYNRYNNWLTNDLYCGYVSYKDKVHVKGIHEPIISEEQFYRVQEIFTRMGKNPNMNRDSASLLNSLVVCSKCGLSFVHRSKGTMSGGKKYHYRYYSCKTYKHTHELEKCGNKTWRADVLEELIIDRVNNYSFASRNVDKEDELDGLNEKLKIEHAKKRRLFDLYINGGYEMSELDSMMNDIDAQINYYESQIEANEELKKNKKIQENLADLATVGFDSLEFREKQLYLKSLINKIYIDGEQVTIEWL

SEQ ID NO: 1146 - protein, 469 aa, synthetic construct
MSYTTPVRAAVYLRISEDRSGEQLGVARQREDCLKLCGQRKWEPVEYLDNDVSASTGKRRPAYEQMLADIAAGKIAAVVAWDLDRLHRRPMELEAFMSLADEKRLALATVAGDVDLATPQGRLVARLKGSVAAHETEHKKARQRRAARQKAERGHPNWSKAFGYLPGPNGPEPDPRTAPLVKQAYADILAGASLGDVCRRWNAAGAFTITGRPWATTTLSKFLRKPRNAGLRAYKGARYGPVDRDAIVGKAQWSPLVDEATFWAAQAVLDAPGRAPGRKSVRRHLLTGLAGCGKCGNHLAGSYRTDGRVVYVCKACHGVAILADNIEPILYHIVAERLAMPDAVDLLRREIHDAAEAETIRLELETLYGELDCLAVERAEGLLTARQVKISTDVVNAKITKLQAHQQDQERLRVLDGIPLGTPQVAGVIAELSPNRFRAVLDVLAEVVVQPVGKSGRIFNPERVQVNWR

SEQ ID NO: 1147 - protein, 452 aa, synthetic construct
MKAAIYIRVSTREQVENYSIQAQAEKLTALCRSKDWDVYDIFIDGGYSGSNMNRPALNEMLSKLHEIDAVVVYRLDRLSRSQRDTITLIEEYFLKNNVEFVSLSETLDTSSPFGRAMIGILSVFAQLERETIRDRMVMGKIKRIEAGLPLTTAKGRTFGYDVIDTKLYINEEEAKQLRLIYDIFEEEQSITFLQKRLKKLGLKVRTYNCYNNWLTNDLYCGYVSYKDKVHVRGIHEPIISEEQFYRVQEIFTRMGKNPNMNRESASLLNNLVVCSKCGLGFVHRRKDTMSRDKKYHYRYYSCKTYKHIHELEKCGNKIWRADKLEELIINRVSNYSFASRDVDKEDELDSLNEKLKIEHAKKKRLFDLYINGSYEVSELDSMMNDIDARINYYESQIEANEELKKNKKIQDNLAELVTVDFDSLEFREKQRYLKSLINKIYIDGEQVTIEWL

SEQ ID NO: 1148 - protein, 485 aa, synthetic construct
MTKKVAIYTRVSTTNQAEEGFSIDEQIDRLTKYAEAMGWQVSDTYTDAGLSGAKLERPAMQRLINDIENKAFDTVLVYKLDRLSRSVRDTLHLVKDVFTKNRIDFISLNESIDTSSAMGSLFLTILSAINEFERENIKERMTMGKLGRAKSGKSMMWSKTAFGYYHNRKTGILEIVPLQATIVEQIFTDYLSGISLTKLRDKLNESGHIGKDIPWSYRTLRQTLDNPVYCGYIKFKDSLFEGMHKPIITYETYLKVQKELEERQRQAYERNNNPRPFQAKYMLSGMARCGYCGAPLKIVLGHKRKDGSRTMKYHCANRFPRKTRGVTVYNDNKKCDSGTYDLSSLENTVIDNLIGFQEDNDSLLRIINGNNQPVLDTSSFKKQISQIDKKIQKNSDLYLNDFITMDELKDRTDSLQAEKRLLKAKISENKFNDGTDVFELVKAQLGSIPINELSYDNKKKIVNNLVSKVDVTADNVDIIFKFQLA

SEQ ID NO: 1149 - protein, 452 aa, synthetic construct
MKAAIYIRVSTREQVENYSIQAQTEKLTALCRSKDWDVYDIFIDGGYSGSNMNRPALNEMLSKLHEIDAVVVYRLDRLSRSQRDTITLIEEYFLKNNVEFVSLSETLDTSSPFGRAMIGILSVFAQLERETIRDRMVMGKIKRIEAGLPLTTAKGRTFGYDVIDTKLYINEEEAKQLQLIYDIFEEEQSITFLQKRLKKLGFKVRTYSCYNNWLTNDLYCGYVSYKDKVHVKGIHEPIISEEQFYRVQEIFTRMCKNPNMNRDSASLLNNLVVCSKCGLGFVHRRKDTMSRGKKYHYRYYSCKTYKHIHELEKCGNKIWRADKLEELVINRVNNYSFASRNVDKEDELDSLNERLKIEHAKKKRLFDLYINGSYEVSELDSMMNDIDAQINYYESQVEANEELKKSKKIQDSLANLATVDYDSLEFREKQLYLKSLINKIYIDGEQVTIEWL

SEQ ID NO: 1150 - protein, 469 aa, synthetic construct
MCYTTPVRAAVYLRISEDRSGEQLGVARQREDCLKLCGQRKWVPVEYLDNDVSASTGKRRPAYEQMLADITAGKIAAVVAWDLDRLHRRPIELEAFMSLADEKRLALATVAGDVDLATPQGRLVARLKGSVAAHETEHKKARQRRAARQKAERGHPNWSKAFGYLPGPNGPEPDPRTAPLVKQAYADILAGASLGDVCRQWNAAGAFTITGRPWTATTLSKFLRKPRNAGLRTYKGARYGPVDRAAIVGKALWSPLVDEATFWAAQAVLDAPGRAPGRKSVRRHLLTGLAGCGKCGNHLAGSYRTDGRVVYVCKACHGVAILADNIEPILYHIVAERLAMPDAVDLLRREIHDAAEAEAIRLELETLYGELDRLAVERAEGLLTARQVKICTDIVDAKIAKLQARQLDQERLRVLDGIPLGTPQVAGAIAELSPNRFRAVLDVLAEVVVQPVGKSGRVFNPERVQVNWR

SEQ ID NO: 1151 - protein, 452 aa, synthetic construct
MKAAIYIRVSTQEQVGNYSIQAQTEKLTALCRSKDWDVYDIFIDGGYSGSNMNRPALNEMLSKLHEIDAVVVYRLDRLSRSQRDTTTLIEEYFLKNNVEFVSLSETLDTSSPFGRAMIGILSVFAQLERETIRDRMVMGKIKRIEAGLPLTTAKGRTFGYDVIDTKLYINEEEAKQLQLIYDIFEEEQSITSLQKRLKKLGFKVRTYNRYHNWLTNDLYCGYVSYKDKVHVRGIHEPIISEEQFYRVQEIFTRMGKNPNMSRDSASLLSNLVVCSKCGLGFVHRSKDTMSRGKKYHYRYYSCKTYKHTHELEKCGNKTWRADKLEELIINRVNNYSFASRDADKEDELDSLNEKLKIEHARKKRLFDLYINGSYEVSELDSMMNDIDAQINYYESQIEAVKELKKNKKIQENLADLATVDFDSLGFREKQLYLKSLINKIYIDDEQVTIEWL

SEQ ID NO: 1152 - protein, 469 aa, synthetic construct
MSYTTPVRAAVYLRISEDRSGEQLGVARQREDCLKLCGQRKWVPVEYLDNDVSASTGKRRPAYEQMLADITAGKIAAVVAWDLDRLHRRPIELEAFMSLADEKRLALATVAGDVDLATPQGRLVARLKGCVAAHETEHKKARQRRAARQKAERGHPNWSKAFGYLPGPNGPEPDPRTAPLVKQAYADILAGASLGDVCRRWNDAGAFTITGRPWTTTTLSKFLRKPRNAGLRAYKGARYGPVDRDAIVGKAQWSPLVDEATFWAAQAVLDAPGRAPGRKSVRRHLLTSLAGCGKCGNHLAGSYRTDGQVVYVCKACHGVSILAVNIEPILYHVVAERLAMPDAVDLLRREIHDAAEAETVRLELETLYGELDRLAVERAEGLLTARQVKISTDIVNAKIAKLQARQLDQERLRVFDGIPLGTPQVAGMIAELSPDRFRAVLDVLAEVVVQPVGKSGRIFNPERVQVNWR

SEQ ID NO: 1153 - protein, 452 aa, synthetic construct
MKAAIYIRVSTREQVENYSIQAQTEKLTALCRSKDWDVYDIFIDGGYSGSNMNRPALNEMLSKLHEIDAVVVYRLDRLSRSQRDTITLIEEYFLKNNVEFVSLSETLDTSSPFGRAMIGILSVFAQLERETIRDRMVMGKIKRIEAGLPLTTAKGRSFGYDVIDTKLYINEEEAKQLQLIYDIFEEEQSITFLQKRLKKLGFKVHTYNRYNNWLTNDLYCGYVSYKDKVHVKGIHEPIISEEQFYRVQEIFTRMGKNPNMNRGSASLLNNLVVCGKCGLGFVHRRKDIMSRGKKYHYRYYSCKTYKHIHELEKCGNKIWRADKLEELIIDRVNNYSLASRNVDKEDELDSLDEKLKIEHAKKRRLFDLYINGRYEVCELDSMMSDIDAQINYYESQIEADVELKKNKKIQENLANLATVDFGSLEFREKQLYLKSLINKIYIDGEQVTIEWL

SEQ ID NO: 1154 - protein, 485 aa, synthetic construct
MTKKVAIYTRVSTTNQAEEGFSIDEQIDRLTKYAEAMGWQVSDTYTDAGFSGAKLERPAMQRLINDIENKAFDTVLVYKLDRLSRSVRDTLYLVKDVFTKNKIDFISLNESINTSSAMGSLFLTILSAINEFERENIKERMTMGKLGRAKSGKSMMWTRTAFGYYHDRKTGILEIVPLQATIVEQIFTDYLSGISLTKLRDKLNESGHIGKDIPWSYRTLRQILDNPVYCGYIKFKGSLFEGMHKPIIPYETYLKVQKELEERQQQTYERNNNPRPFQAKYMLSGMARCGYCGAPLRIVLGHKRKDGSRTMKYHCANRFPRKTKGITVYNDNKKCDSGTYDLSNLENTVIDNLIGLQENNDSLLKIINGNNQPIPDTSSFKKQISQIDKKIQKNSDLYLNDFITMDELKDRTDSLQAEKKLLKAKISENKFNDSTDVFELVKTQLGSIPINELSYDNKKKIVNSLVSKVDVTADNVDIIFKFQLT

SEQ ID NO: 1155 - protein, 485 aa, synthetic construct
MTKKVAIYTRVSTTNQAEEGFSIGEQIDRLTKYAEAMGWQVSGTYTDAGLSGAKLERPAMQRLINDIENKAFDTVLVYKLDRLSRSVRDTLYLVKDVFTKNKIDFISLNESIDTSSAMGSLFLTILSAINEFERENIKERMTMGKLGRAKSGKSMMWTKTAFGYHHNRKTGILEIVPLQATIVEQIFTDYLSGISLTKLRDKLNESGHIGKDIPWSYRTLRQTLDNPVYCGYIKFKDSLFEGMHKPIIPYETYLKVQKELEERQQQTYERNNNPRPFQAKYMLSGMARCGYCGAPLKIVLGHKRKDGSRTMKYHCANRFPRKTKGITVYNDNKKCDGGTYDLSNLENIVIDNLIGLQENNDSLLKIINGNNLPILDTSSFEKQISQIDEKIQKNSDLYLNDFITMDELKDRTDSLQAEKRLLKAKISENKFNDSTNVFELVKTQLGSIPINELSYDNKKKIVNNLVSKVDVTADNVDIIFKFQLA

SEQ ID NO: 1156 - protein, 485 aa, synthetic construct
MTKKVAIYTRVSTTNQAEEGFSIDEQIDRLTKYAEAMGWQVSDTYTDAGSSGAKLERPAMQRLINDIENKAFDTVLVYKLDRLSRSVRDTLYLVKDVFTKNKIDFISLNESIDTSSAMGSLFLTILSAINEFERENIKERMTMGKLGRAKSGKSMMWTKTAFGYYHNRKTGILEIVPLQATIVEQIFTDYLSGISLTKLRDKLNECGHIGKDIPWSYRTLRQTLDNPVYCGYIKFKGSLFEGMHKPIIPYETYLRVQKELEERQQQTYERNNNPRPFQAKYMLSGMARCGYCGAPLRIVLGHKRKDGSRTMKYHCANRFPRKTKGVTVYNDNKKCDSGTYDLSNLENTVIDNLIGFQENNDSLLKIINGSNQPILDTSNFKKQISRIDKKIQKNSDLYLNDFITMDELKYRTDSLQAEKKLLKAKISETKFNDSADVFEQVKTQLGSIPINELSYDNKKKIVNNLVSKVDVTADNVDIIFKFQLA

SEQ ID NO: 1157 - protein, 469 aa, synthetic construct
MSFTTPMRAAVYLRISEDRSGEQLGVARQREDCLKLCDQRKWVPVEYLDNDVSASTGKRRPAYEQMLADITAGRIAAVVAWDLDRLHRRPIELEAFMSLADEKRLALATVAGDVDLATPQGRLVARLKGSVAAHETEHKKARQRRAARQKAERGHPNWSKAFGYLPGPNGPEPDPRTAPLVKQAYADILAGASLGDVCRQWNGAGAFTITGRLWTTTALSKFLRKPRNAGLRAYKGARYGPVDRDAIVGKAQWYPLVDEATFWAAQAVLDAPGRAPGRKSVRRHLLTGLAGCGKCGNHLAGSYRTDGRVVYVCKACHGVAILADNIEPILYHIVAERLAMPDAVDLLRREIHDAAEAETIRLELETLYGELDRLAVERAEGLLTARQVKISTDIVNAKIATLQARQLDQERLRVFDGIPLGTPQVAGMIAELSPDRFRAVLDVLAEVVVQPVSKRGRIFNPERVQVNWR

SEQ ID NO: 1158 - protein, 469 aa, synthetic construct
MSYTIPVRAAVYLRISEDRSGEQLGVARQREDCLKLCDQRKWVPVEYLDNDVSASTGKRRPAYEQMLADITAGKIAAVVAWDLDRLHRRPVELEAFMSLADEKRLALATVAGDVDLATPQGRLVARLKGVVAAHETEHKKARQRRAARQKAERGHPNWSKAFGYLPGPSGPEPDPRTAPLVKQAYADILAGASLGDVCRRWNDAGAFTITGRPWTTTTLSKFLRKPRNAGLRTYKGARYGPVDRDAIVGKAQWSPLVDEATFWAAQAVLDAPGRAPGRKSVRRHLLTGLAGCGKCGNHLAGSYRTDGRVVYVCKACHGVAILADNVEPILYHVVAERLAMPDAVDLLRREIHDATEAETIRLELETLYGELDRLAVERAEGLLTARQVKIGTDIVNAKITKLQARQLDQERLRVLDGIPLGTPQVAGVIAGLSPNRFRAVLDALAEVVVQPVGKGGRIFNPERVQVSWR

SEQ ID NO: 1159 - protein, 485 aa, synthetic construct
MTRKVAIYTRVSTTNQAEEGFSIDEQIDRLTKYAEAMGWQVSDTYTDAGFSGAKLERPAMQRLINDIENKAFDTVLVYKLDRLSRSVRDTLYLVKDVFTKNKIDFISLNESIDTSSAMGSLFLTILSAINEFERENIKERMTMGKLGRAKSGKSMMWTKTAFGYYHNRKTGILEIVPLQATIVEQIFTDYLSGISLTKLRDKLNESGHIGKDIPWSYRTLRQTLDNPVYCGYIKFKGSLFEGMHKPIIPYETYLKVQKELEERQQQTYERNNNPRPFQAKYMLSGMARCGYCGAPLRIVLGHKRKDGGRTMKYHCANRFPRKTKGVTVYNDNKKCDSGTYDLSNLEDTVIDNLIGFQENNDSLLEIINGNNQPILDASSFKKQISQIDKKIQKNSDLYLNDFITMDELKDRTDSLQAEKRLLEAKISENKFNDSTDVFELVKTQLGSIPINELSYDSKKKIVNNLVSKVDVSADNVDIIFKFQLA

SEQ ID NO: 1160 - protein, 452 aa, synthetic construct
MKAAIYIRVSTREQVENYSIQAQTEKLTALCRSKDWDVYDIFIDGGYSGSNMNRPALNEMLSKLHEIDAVVVYRLDRLSRSQRDTITLIEEYFLKNNVEFVSLSETLDTSSPFGRAMIGILSVFAQLERETIRDRMVMGKIKRIEAGLPLTTAKGRTFGYDVIDTKLYINEEEAKQLQLIYDIFEEEQSITFLQKRLKKLGFKVRTYNRYNNWLTNDLYCGYVSYKDKVHVRGIHEPIISEEQFYRVQEIFTRMGKSPNMNRDSASLLNNLVVCSKCGLGFVHRRKDAMSRDKKYHYRYYSCKTYKHIHELEKCGNKIWRADKLEELIINRVNNYSITSRNADKEDELDSLSEKLKIEHAKKKRLFDLYINGSYEVSELDSMMNDIDAQINYYESQIEANEELKRNKKVQENLAYLATVDFDSLEFREKQLYLKSLINKIYIDGEQVTIEWL

SEQ ID NO: 1161 - protein, 485 aa, synthetic construct
MTKKVAIYTRVSTTNQAEEGFSIDEQIDRLTKYAEAMGWQVSDTYTDAGFSGAKLERPAMQRLINDIENKAFDTVLVYKLDRLSRSVRDTLYLVKDVFTKNKIDFISLNESIDTSSAMGSLFLTILSAINEFERENIKERMTMGKLGRAKSGKSMMWTKTAFGYYHNRKTGILEIVPLQATIVERIFTDYLSGISLTKLRDKLNESGHIGKDIPWSYRTLRQTLDNPVYCGYIKFKGSLFEGMHKPIIPYETYLEVQRELEERQQRAYERNNNPRPFQAKYMLSGMARCGYCGAPLKIVLGHKRKDGSRTMKYHCANRFPRKTKGITVYNDNKKCDSGTYDLSSLENAVIDNLIGFQENNDSLLKIINGNNQPILDTSSFKKQISQIDKKIQKNSDLYLNDFITMDELKDRTGSLQAEKKLLKAKISENKFNDRTGVFELVKTQLGSIPINELSYDNKKKIVNNLVSKVDVTADNVDIIFKFQLA

SEQ ID NO: 1162 - protein, 485 aa, synthetic construct
MTKKVAIYTRVSTTNQAEEGFSIDEQIDRLSKYAEAMGWQVSDTYTDAGFSGAKLERPAMQRLINDIENKAFDTVLVYKLDRLSRSVRDTLHLVKEVFTKNKIDFISLNESIDTSSAMGSLFLTILSAINEFERENIKERMTMGKLGRAKSGKSMMWTKTAFGYYHNRETGILEIVPQQATIVEQIFTDYLSGISLTKLRDKLNEGGHIGKDIPWSYRTLRQTLDNPVYCGYIKFKDSLFEGMHKPIIPYETYLEVQKELEKRQQQTYERNNNPRPFQAKYMLSGMARCGYCGAPLKIVLGHKRKDGSRTMKYHCANRFPRKTKGITVCNDNKKCDSGTYDLRSLENTVVDNLIGFQENNDSLLKIISGNSQPILDTSSFKKQISQIDKKIQKNSDLYLNDFITMDELKDRTDSLQAEKKLLKAKISENKFNDSTDVFELVNTQLGSIPINELSYDNKKKIVNNLVSKVDVTADNVDIIFKFQLA

SEQ ID NO: 1163 - protein, 485 aa, synthetic construct
MTKKVAIYTRVSTTNQAEEGFSIDEQIDRLTKYAEAMGWQVSDTYTDAGLSGAKLERPAMQRLINDIENKAFDTVLVYKLDRLSRSVRDTLYLVKDVFTKNKIDFISLNESIDTSSAMGSLFLTILSAINEFERENIKERMTMGKLGRAKSGKSMMWTKTAFGYYHNRKTGILEIVPLQATIVEQIFTDYLSGISLTKLRDKLNESGHIGKDIPWSYRTLRQTLDNPVYCGYIKFKDSLFEGMHKPIIPYETYLKVQKELEERQQQAYERNNNPRPFQAKYMLSGMARCGYCGAPLKIVLGHRRKDGSRTMKYHCANRFPRKTKGITVYNDNKKCDSGTYDLSNLENTVIDSLIGFQENNDSLLKIINGNNQPILDTSSFEKQISQIDKKIQKNSDLYLNDLITMDELKDRTDSLQAEKKLLKAKFSENKFNDGTDVFELVKTQLGSIPINELSYDNKKKIVNNLVSKVDVTADNVDIIFKFQLA

SEQ ID NO: 1164 - protein, 452 aa, synthetic construct
MKAAIYIRVSTQEQVGNYSIQAQTEKLTALCRSKDWDVYDIFIDGGYSGSNMNRPALNEMLSKLHEIDAVVVYRLDRLSRSQRDTTTLIEEYFLKNNVEFVSLSETLDTSSPFGRAMIGILSVFAQLERETIRDRMVMGKIKRIESGLPLTTAKGRTFGYDVIDTKLYINEEEAKQLQLIYDIFEEEQSITFLQKRLKKLGFKVRTYNRYNNWLTNDLYCGYVSYKDKVHVKGIHEPIISEEQFYRVQEIFTRMGKNPNMNRDSASLLSNLVVCSKCGLGFVHRSKDTMSRGKKYHYRYYSCKTYKHTHELEKCGNKTWRADKLEELIINRVNNYSSASRNVDKEDELNSLNEKLKIEHAKKKRLFDLYINGSYEVSELDSMMNDIDAQINYYESQIEANKELKRSKKIQENLADLATVDFDSLEFREKQQYLKSLINKIYIDGEQVTIEWL

SEQ ID NO: 1165 - protein, 485 aa, synthetic construct
MTKRVAIYTRVSTTNQAEEGFSIDEQVDRLTKYAEAMGWQVSDTYTDAGFSGAKLERPAMQRLINDIEHKAFDTVLVYKLDRLSRSVRDTLYLVKDVFTKNRIDFISLSESIDTSSAMGSLFLTILSAINEFERENIKERMTMGKLGRAKSGKSMMWTKTAFGYYHNRKTGILEVVPLQATIVEQIFTDYLSGISLTKLRDKLNESGHIGKDIPWSYRTLRQTLDNPVYCGYIKFKGSLFEGMHKPIIPYETYLKVQKELEERQQQTYERNNNPRPFQAKYMLSGMARCGYCGAPLKIVLGHKRKDGSRTMKYHCANRFPRKTKGITVYNDNKKCDSGTYDLSSLENTVIDNLIGLQENNDSLLEVINGNNQPILDTSSFKEQISQIDKKIQKNSDLYLNDFITMDELKDRTDSLRAEKKLLKAKISENKFNDNTDMFELVKTQLGSIPINELSYDNKKKIVNNLVSKVDVTADNVDIIFKFQLA

SEQ ID NO: 1166 - protein, 470 aa, synthetic construct
MSYTTPVRAAVYLRISEDRSGEQLGVARQREDCLELCGQRKWVPVEYLDNDVSASTGKRRPAYEQMLADIAAGKIAAVVAWDLDRLHRRPIELEAFMCLADEKRLALATVAGDVDLATPQGRLVARLKGSVAAHETEHKKARQRRAARQKAERGHPNWSKAFGYLPGPNGPEPDPQTAPLVRQAYADILAGASLGDVCRQWNDAGAFTITGRPWTTTALSKFLRKPRNAGLRAYKGARYGPVDRDAIVGKAQWSPLVDEATFWAAQAVLDAPGRAPGRKSVRRHLLTGLAGCGKCGNHLAGSYRTDGRVVYVCKACHGIAILADNIEPILYHIVAERLAMPGAVDLLRREFHDAAEAETIRLELETLYDELDRLAVERAEGLLTARQVKISTDIVNAKITKLRACQLDQERLRVLDGIPLGTPQVAGMIAELSPDRFRAVLDVLAEVVVQPVGKSGRIFNPERVQVNWRQ

SEQ ID NO: 1167 - protein, 469 aa, synthetic construct
MSYTTPVRAAVYLRISEDRSGEQLGVARQREDCLKLCGQRKWVPVEYLDNDVSASTGKRRPAYEQMLADITAGKIAAVVAWDLDRLHRRPIELEAFMSLADEKRLALATVAGDVDLATPQGRLVARLKGCVAAHETEHKKARQRRAARQKAERGLPNWSKAFGYLPGPNGPEPDPRTAPLVKQAYADILAGASLGDVCRQWNDAGAFTITGRPWTTTTLSKFLRKPRNAGLRAYKGARYGPVDRDAIVGKAQWSPLVDEATFWAAQAVLDAPGRAPGRKSVRRHLLTGLAGCGKCGNHLAGSYRTDGRVVYVCKACHGVAILADNIEPILYHIAAERLAMPDAVDLLRREIHDAAEAETIRLELEALYGELDRLAVERAEGLLTARQVKISTDVVNAKITKLQARQLDQERLRVFDGIPLGTPQVAGMIAELSPDRFRAVLDVLAEVVVQPVGKCGRIFNPERVQVNWR

SEQ ID NO: 1168 - protein, 469 aa, synthetic construct
MSYTTPVRAAVYLRISEDRSGEQLGVARQREDCLKLCGQRKWVPVEYLDNDVSASTGKRRPAYEQMLADITAGKIAAVVAWDLDRLHRRPIELEAFMSLADEKRLALATVAGDVDLATPQGRLVARLKGSVAAHETEHKKARQRRAARQKAERGLPNWSKAFGYLPGPNGPEPDPRTAPLVKQAYADILAGASLGDVCRQWNDAGALTITGRPWTTTTLSKFLRKPRNAGLRAYKGARHGPVDRDAIVGKARWSPLVDEATFWAAQAVLDAPGRAPSRKSVRRHLLTGLAGCGKCGNHLAGSYRTDGRVVYVCKACHGIAILADNIEPILYHIVAERLAMPDAVDLLRREIHDAAEAETIRLELETLYGELDRLAVERAEGLLTARQVKISTDIVSAKITKLQARQQDQERLRVLDGIPLGTPQVAGKIAELSPNRFRAVLDVLVEVVVQPVGKSGRIFNPERVQVNWR

SEQ ID NO: 1169 - protein, 485 aa, synthetic construct
MTKKVAIYTRVSTTNQAEEGFSIDEQTDRLTKYAEAMGWQVSDTYTDAGFSGAKLERPAMQRLINDIENKAFDTVLVYKLDRLSRSARDTLHLVKDVFTKNKIDFISLNESIDTSSAMGSLFLTILSAINEFERENIKERMTMGKLGRAKSGKSMMWTKTAFGYYHNRKTGILEIVPPQATIVEQIFTDYLSGISLTKLRDKLNESGHIGKDIPWSYRTLRQTLDNPVYCGYIKFKGSLFEGMHKPIIPYETYLKVQKELEERQQQTYERNNNPRPFQAKYMLSGMARCGYCGAPLRIVLGHKRKDGSRTMRYHCANRFPRKTKGVTVYNDNKKCDSGTYDLSSLENTVIDNLIGFQENNDSLLKIINSNNQPIMDTSSFREQISQIDKKIQKNSDLYLNDFITMDELKDRTDSLQAEKKLLIAKISENKFNDSSDVFELVKTQLGSIPINELSYDNKKKIVNNLVSKVDVTADDVDIIFKFQLA

SEQ ID NO: 1170 - protein, 486 aa, synthetic construct
MTRKVAVYTRVSTTNQAEEGFSIDEQIDRLTKYAEAMGWQVSGTYTDAGVSGAKLERPAMQRLINDIENKAFDTVLVYKLDRLSRSVRDTLYLVKDVFTKNKIDFISLNESIDTSSAMGSLFLTILSAINEFERENIKERMTMGKLGRAKSGKSMMWTKTAFGYYHNRKTGILEIVPLQATIVEQIFTDYLSGISLTKLRDKLNESGHIGKDIPWSYRTLRQTLDNPVYCGYIKFKDSLFEGMHRPIIPYETYLKVQKELKERQQQTYERNNNPRPFQAKYMLSGMARCGYCGAPLKIVLGHKRKDGSRTKKYHCANRFPRKTKGVTVYNDNKKCDSGTYDLSNLENTVIDNLIGLQENNDSLLKIINGNNQPILDTSSLEKQISQIDKKIQKNSDLYLNDFITMDELKDRTDSLQAVKKLLKAKISENKFNDSTGVFELVKTQLGSIPINELSYDNKKKIVNNLVSKVDVTADNVDIIFKFQLAQ

SEQ ID NO: 1171 - protein, 469 aa, synthetic construct
MCYTTPVRAAVYLRISEDRSGEQLGVARQREDCLKLCGQRKWVPVEYLDNDVSASTGKRRPAYEQMLADITAGKIAAVVAWDLDRLHRRPAELEAFMSLADEKRLALATVAGDVDLATPQGRLVARLKGSVAAHETEHKKARQRRAARQKAERGHPNWSKAFGYLPGPNGPEPDPRTAPLVKQAYADILAGASLGDVCRQWNDAGALTITGRPWTTTTLSKFLRKPRNAGLRAYKGARYGPVDRDAIVGKAQWSPLVDEATFWAAQAVLDAPGRAPGRKSVRRHLLTGLAGCGKCGNHLAGSYRADGRVVYVCKACHGVAILADNIEPILYHIVAERLAMPDAADLLRREFHDAAEAETIRLELEILYGELDRLAVERAEGLLTARQVKICTDTVAAKITRLQARQLDQERLRVLDGIPLGTPQVAGVIADLSPDRFRAVLDVLAEVVVRPVGKGGRIFNPERVQVYWR

SEQ ID NO: 1172 - protein, 452 aa, synthetic construct
MKAAIYIRVSTREQVENYSIQAQTEKLTALCRSKDWDVYDIFIDGGYSGSNMNRPALNEMLSKLHEIDAVVVYRLDRLSRSQRDTITLIEEYFLKNNVEFVSLSETLDTSSPFGRAMIGILSVFAQLERETIRDRMVMGKIKRIEAGLPLTTAKGRTFGYDVIDTKLYINEEEARQLRLIYDIFEEEQSITFLQKRLKKLGFKVRTYNRYNNWLTNDLYCGYVSYKDKVHVKGIHEPIISEEQFYRVQEIFTRMGKNPNMNRDSASLLNNLVVCSKCGRGFVHRRKDAKSRDKKYHYRYYSCKTYKHIHELEKCGNKVWRADKLEELIINRVNNYSLASCNVDKEDELDSLNEKLKIEHAKKKRLFDLYINGSYEVSELDSMMNDIDAQINYYESRIEANEELKRDKKIQENLAYLATVDFDSLEFREKQLYLKSLINKIYIDGEQVTIEWL

SEQ ID NO: 1173 - protein, 469 aa, synthetic construct
MSYTTPVRAAVYLRISEDRSGEQLGVARQREDCLKLCDQRKWVPVEYLDNDVSASTGKRRPAYEQMLADITAGKIAAVVAWDLDRLHRRPVELEAFMSLADEKRLALATVAGDVDLATPQGRLVARLRGSVAAHETEHKKARQRRAARQKAERGYPNWSKAFGYLPGPNGPEPDPRTAPLVKQAYADILAGASLGDVCRQWNAAGASTITGRPWTTTALSKFLRKPRNAGLRAYKGAPYGPVDRNAIVGKAQWSPLVDEATFWAAQAVLDAPGRAPGRKSVRRHLLTGLAGCGKCGNRLAGSYRTDGRVVYVCKACHGVAILADNIEPILYHIVAERLAMPDAVDLLRREIHDAAEAETIRLELETLYGELDRLAVERAEGLLTARQVKISTDIVNAKITKLQAHQQDQERLRVLDGIPLGTPQVAGVIAELSPDRFRAVLDVLAEVVVQPVGKSGRISSPERVQVNWR

SEQ ID NO: 1174 - protein, 452 aa, synthetic construct
MKAAIYIRVSTQEQVGNYSIQAQTEKLTALCRSKDWDVYDIFIDGGYSGSNINRPALNEMLSKLHEIDAVVVYRLDRLSRSQRDTITLIEDYFLKNNVEFVSLSETLDTSSPFGRAMIGILSVFAQLERETIRDRMVMGKIKRIEAGLPLTTAKGRTFGYDVIDTKLYINEEEAKQLQLIYDIFEEEQSITSLQKRLKKLGFKVRTYNRYNNWLTNDLYCGYVSYKDKVHVKGIHEPIISEEQFYRVQEIFTRMGKNPNMNRDSASLLNSLVVCSKCGLGFVHRRKDTMSRGKKYQYRYYSCKTYKHTHELEKCGNKIWRADKLEELIVNRVNNYSFASRNVDKEDELDSLNEKLKIEHAKKKRLFDLYIDGSYEVSELDSMMNDIDAQINYYESQIEANEELKRNKKIQENLAYLASVDYDSLEFREKQLYLKSLINKIYIDGEQVTIEWL

SEQ ID NO: 1175 - protein, 469 aa, synthetic construct
MCYTTPVRAAVYLRISEDRSGEQLGVARQREDCLKLCGQRNWVPVEYLDNDVSASTGKRRPAYEQMLADITAGKIAAVVAWDLDRLHRRPIELEAFMSLADEKRLALATVAGDVDLATPQGRLVARLKGSVAAHETEHKKARQRRAARQKAERGHPNWSKAFGYLPGPDGPEPDPRTAPLVKQAYADILAGASLGDVCRQWNDAGAFTITGRPWTTTTLSKFLRKPRNAGLRAYKGARYGPVDRDAIVGKAQWSPLVDEATFWAAQAVLDAPGRAPGRKSVRRHLLTGLAGCGKCGNHLAGSYRTDGRVAYVCKACHGVTILADNIEPILYHIVAERLAMPDAVDLLRREIHDVAEAETIRLELETLYGELDRLAVERAEGLLTARQVKISTDIVNAKIAKLQARQQDQERLRVLDGIPLGTPQVAGVIAELSPDRFRAVLDVLAEVVVQPVGKSGRIFNPERVQVNWR

SEQ ID NO: 1176 - protein, 485 aa, synthetic construct
MTKKVAIYTRVSTTNQAEEGFSIDEQVDRLTKYAEAMGWQVSDTYTDAGSSGAKLERPAMQRLINDIVNKAFDTVLVYKLDRLSRSVRDTLYLVKDVFTKNKIDFISLNESIDTSSAMGSLFLTILSAINEFERENIKERMTMGKLGRAKSGKSMMWTKTAFGYYHNRKTGILEIVPLQATIVEQIFTDYLSGISLTKLRDKLNESGHIGKDIPWSYRTLRQTLDNPVYCGYIKFKDSLFEGMHKPIIPYETYLKVQKELEERQQQTYERNNNPRPFQAKYMLSGMARCGYCGAPLKIVLGHKRKDGSRTMKYHCANRFPRKTKGVTVYNDNKKCDSGTYDLSSLENTVIDNLIGFQENSDSLLKIINGYNRPILDTSSFKKQISQIDKKIQKNSDLYLNDFITMDELKDRTDSLQAEKKLLKAKISENKFNDSIDVFELVKTQLGSIPINELSYDNKKKIVNNLVSKVDVTADNVDIVFKFQLA

SEQ ID NO: 1177 - protein, 452 aa, synthetic construct
MKAAIYIRVSTREQVENYSIQAQTEKLTALCRSKDWDVYDIFIDGGYSGSNMNRPALNEMLSRLHEIDVVVVYRLDRLSRSQRDTITLIEEYFLKNDVEFVSLSETLDTSSPFGRAMIGILSVFAQLERETIRDRTVMGKIKRIEAGLPLTTAKGRTFGYDVIDTKLYINEEEAKQLQLIYDIFEEEQSITFLQKRLKKLGFKVRTYNCYNNWLTNDLYCGYVSYKDKVHVKGIHEPIISEEQFYRVQEIFTRMGKNPNMNRGSASLLNNLVVCSKCGLGFVHRRKDAMSRDKKYHYRYYSCKTYKHIHELEKCGNKIWRADELEELIINRVNNYSLASRNVDKEDGLDSLNEKLKIEHARRKRLFDLYLNGSYEVSELDSMMNDIDAQISYYESQIGANEELKKDKKIQENLADLATVDFDSLEFREKQLYLKSLINKIYIDGEQVTIEWL

SEQ ID NO: 1178 - protein, 485 aa, synthetic construct
MTKKVAIYTRVSTTNQAEEGFSIDEQIDRLTKYAEAMGWQVSDTYTDAGFSGAKLERPAMQRLINDIEIKAFDTVLVYKLDRLSRSVRDTLYLVKDVFTKNEIDFISLNESISTSSAMGSLFLTILSAINEFERENIKERMTMGKLGRARSGKSMMWTKTAFGYNHNRKTGILEVVPLQATIVEQIFTDYLSGISLTKLRDKLNESGHIGKDIPWSYRTLRQTLDNPVYCGYIKFKDSLFEGMHKPIIPYETYLKVQKELEERQQQTYERNNNPRPFQAKYMLSGMARCGYCGAPLRVVLSRKRKDGSRTMRYHCANRFPRKTKGVTVYNDNKKCDSGTYDLSNLENIVIDNLIGFQENSDSLLKIISGNDQPILDTSSFEKQISQIDKKIQKNSDLYLNDFITMDELKDRTDSLQAEKRLLKAKISENKFNDGTDVFELVKTQLGSIPINELSYDNKKKIVNNLVSKVVVTADNVDVIFKFQLA

SEQ ID NO: 1179 - protein, 485 aa, synthetic construct
MTKKVAIYTRVSTTNQAEEGFSIDEQIDRLTKYAEAMGWQVSDTYTDAGFSGAKLDRPAMQRLINDIENKAFDTVLVYKLDRLSRSVRDTLYLVKDVFTKNTIDFISLNESIDTSSAMGSLFLTILSAINEFERENIKERMTMGKLGRAKSGKSMMWTKTAFGYYHNRETGILEIVPLQATIVEQIFTDYLSGISLTKLRDKLNESGHIGKDIPWSYRTLRQTLDNPVYCGYIKFKDSLFEGMHKPIIPYETYLKVQKELEKRQQQTYERNNNPRPFQAKYMLSGMARCGYCGAPLRIVLGHKRKDGSRTMKYHCANRFPRKTNGITVYNDNKKCDSGTYDLSNLENTVIDNLIGFQENNDSLLKIINGNNQPILDTSSFKEQISQIDKKIQKNSDLYLNDFITMDELKDRTDSLQAEKKLLKAKISENKFNDSANVFELVKTQLGSIPINELSYDNKKRIVNNLVSKVDVTADNVDIIFKFQLA

SEQ ID NO: 1180 - protein, 452 aa, synthetic construct
MKAAIYIRVSTREQVENYSIQAQTERLTALCRSKDWDVYDIFIDGGYSGSNMNRPALNEMLSKLHEIDAVVVYRLDRLSRSQRDTITLIEEYFLKNNVEFVSLSETLDTSSPFGRAMIGILSVFAQLERETIRDRMVMGKIKRIEAGLPLTTAKGRTFGYDVIDTKLYINEEEAKQLRLIYDIFEEERSITFLQKRLKKLGLKVRTYNRYNNWLTNDLYCGYVSYKDKVHVKGIHEPIISEEQFHRVQEIFTRVGKNPNMNRGSASLLNNLVVCSKCGLGFVHRRKDVMSHGKKYHYRYYSCKTYKHIHELEKCGNKIWRADELEELIINRVNNYSLASRNTDKEDELDSLNEKLKIEHAKKKRLFELYINGSYEASELDSMMSDIDAQINYYESQIEANEELKKSKKIQENLAYLATVDFDSLEFREKQLYLKSLINKIYIDGEQVTIEWL

SEQ ID NO: 1181 - protein, 485 aa, synthetic construct
MTKKVAIYTRVSTTNQAEEGFSIDEQVDRLTKYAEAMGWQVSDTYTDAGFSGAKLERPAMQRLINDIENKAFDAVLVYKLDRLSRSVRDTLYLVKDVFTKNKIDFISLNESIDTSSAMGSLFLTILSAINEFERENIKERMTMGKLGRAKSGKSMMWTKTAFGYYHNRKTGILEIVPLQATIVEQIFTDYLSGISLTKLRDKLNESGHIGKDIPWSYRTLRQTLDNPVYCGYIKFKDSLFEGMHKPIIPYETYLRVQKELGERQQQTYERNNNPRPFQAKYMLSGMARCGYCGAPLRIVLGHKRKDGSRTMKYHCANRFPRKTRGVTVYSDNKKCDSGTYDLSNLENTVIDSLIGFQENSDSLLRIINGNNQPILDTSSFEKQISQIDKKIQKNGDLYLNDFITMDELKERTDSLQAEKRLLKAKISENKFNDSTDVFELVKTQLGSIPINELSYDSKKKIVNNLVSKVDVTADNVDIIFKFQLA

SEQ ID NO: 1182 - protein, 485 aa, synthetic construct
MTKKVAIYTRVSTTNQAEEGFSIDEQIDRLTKYAEAMGWQVSDTYTDAGFSGAKLERPAMQRLINDIENKAFDTVLVYKLDRLSRSVRDTLYLVKDVFTKNKIDFISLNESIDTSSAMGSLFLTILSAINEFERENIKERMTMGKLGRAKSGKSMMWTKTAFGYYHNRETGILEIVPLQATIVEQIFTDYLSGISLTKLRDKLNESGHIGKDIPWSYRTLRQTLDNPVYCGYIKFKDSLFEGMHKPIIPYETYLKVQKELEERQQQTYERNNNPRPFQAKYMLSGMARCGYCGAPLKIVLGHKRKDGSRTMKYHCANRFPRKTKGVTVYNDNKKCDSGTYDLSDLENTVIDNLTGFQENNDSLLKIINGNNQPILDTSSFKEQISQIDKKIQKNSDLYLNDLITMDELKDRTDSLQAEKKLLKAKISENKFNDSTDVFELVKTQLGSIPINELSYDNKKKIVNNLVSKVDVTADNVDIIFKFQLA

SEQ ID NO: 1183 - protein, 452 aa, synthetic construct
MKAAIYIRVSTREQVENYSIQAQTEKLTALCRSKDWDVYDIFIDGGYSGSNMNRPALNEMLSKLHEIDAVVVYRLDRLSRSQRDTITLIEEYFLKNNVEFVSLSETLDTSSPFGRAMIGILSVFAQLERETIHDRMVMGKIKRIEAGLPLTTAKGRTFGYDVIDTKLYINEEEAKQLRLIYDIFEEEQSITFLQKRLKKLGFKVHTYNRYNNWLTNDLYCGYVSYKDKVHVKGIHEPIISEEQFYRVQEIFTRMGKNPNMNRGSASLLNNLVVCSKCGLGFVHRRKDAMSRDKKYHYRYYSCKTYKHIHELEKCGNKIWRADKLEELIINRVNDYSLAGRNVDKEDGLDSLSEKLKIEHAKKKRLFDLYINGRYEVSELDSMMSDIDAQINYYESQIEANEELKRNKKIQENLADLATVDFDSLEFREKQLYLKSLINKIYIDGEQVTIEWL

SEQ ID NO: 1184 - protein, 452 aa, synthetic construct
MKAAIYIRVSTREQVENYSIQAQTEKLTALCRSKDWDVYDIFIDGGYSGSNMNRPALNEMLSKLHEIDAVVVYRLDRLSRSQRDTITLIEEYFLKNNVEFVSLSETLDTSSPFGRAMIGILSVFAQLERETIRDRMVMGKIKRIEAGLPLTTAKGRTFGYDVIDTKLYVNEEEAKQLQLIYDIFEEERSITFLQKRLKKLGFKVRTYNCYNNWLTNDLYCGYVSYKDKVHVKGIHEPIISEEQFYRVQEIFTRMGKNPNMNRDSASLLNNLVVCSKCGLGFVHRRKDAASRDKKYHYRYYSCKTYKHIHELEKCGNKIWRADKLEELIIDRVNNYSFASRNVDKEDELGSLNEKLKIEHAKKKRLFDLYINGGYEVSELDSMMNDIDAQINYYESQIEANEELNKNRKIQENLADLAAVDFDSLEFREKQLYLKSLINKIYIDGEQVTIEWL

SEQ ID NO: 1185 - protein, 452 aa, synthetic construct
MKAAIYIRVSTREQVENYSIQAQTEKLTALCRSKDWDVYDIFVDGGYSGSNMNRPALNEMLSKLHEIDAVVVYRLDRLSRSQRDTITLIEEYFLKNNVEFVSLSETLDTSSPFGRAMIGILSVFAQLERETIRDRMVMGKIKRIEAGLPLTTAKGRTFGYDVIDAKLYINEEEAKQLQLIYDIFEEEQSITFLQKRLKKLGFKVRTYNRYNNWLTNDLYCGYVSYKDKVHVKGIHEPIISEEQFYRVQEIFARMGKNPNMSRDSASLLNNLVVCSKCGLGFVHRRKDAMSRDKKYHYRYYSCKTYKHIHELEKCGNKIWRADKLEELIINRVNNYSVASRNADKEDELDSLNEKLKIEHAKKKRLFDLYINGSYEVSELDSMMNDIDAQINYYESQIEANEELKKTKKIQENLANLATVDFDSLEFREKQLYLKSLINKIYIDGEQVTIEWL

SEQ ID NO: 1186 - protein, 452 aa, synthetic construct
MKAAIYIRVSTREQVENYSIQAQTEKLTALCRSKDWDVYDIFIDGGYSGSNMNRPALNEMLSKLHEIDAVVVYRLDRLSRSQRDTITLIEEYFLKNNVEFVSLSETLDTSSPFGRAMIGILSVFAQLERETIRDRMVMGKIKRIEAGLPLTTAKGRTFGYDVIDTKLYINEEEARQLRLIYDIFEEEQSITFLQKRLKKLGFKVRTYSCYNNWLTNDLYCGYVSYKDKVHVKGIHEPIISEEQFYRVQEIFTRMGKNPNMNRDSASLLNNLVVCSKCGLGFVHRRKDAMSRDKKYHYRYYSCKTYKHIHELEKCGNKIWRADKLEELIISRVNNYSLASRNVDKEDELDSLNEKLKIEHAKKRRLFDLYINGRYEVSELDSMMNDIDAQISYYESQIEANEELKKNKKIQKNLANLATVDFDSLEFREKQLYLKSLINKIYIDGEQVTIEWL

SEQ ID NO: 1187 - protein, 452 aa, synthetic construct
MKAAIYIRVSTREQVENYSIQAQTEKLTALCHSKDWDVYDIFIDGGYSGSNMNRPALNEMLSKLHEIDAVVVYRLDRLSRSQRDTITLIEEYFLKNNVEFVSLSETLDTSSPFGRAMIGILSVFAQLERETIRDRMVMGKIKRIEAGLPLTTAKGRTFGYDVIDTKLYINEEEAKQLQLIYDIFEEEQSITFLQKRLKELGFKVRTYNCYNNWLTNDLYCGYVSYKDKVHVKGIHEPIISEEQFYRVQEIFTRMGKNPNMNRDSASLLNNLVVCSKCGLGFVHRRKDAMSRDKKYHYRYYSCKTYKHIHELEKCGNKIWRADKLEELVINRVNNYSLASCNVDKENELDSLNEKLKIEHAKKKRLFDLYINGGYEMSELDSMMNDIDAQINYYESRIEANEELKKNKKIQENLANLATVDFDSLEFREKQLYLKSLINKIYIDGEQVTIEWL

SEQ ID NO: 1188 - protein, 452 aa, synthetic construct
MKAAIYIRVSTREQVENYSIQAQTEKLTALCRSKDWDVYDIFIDGGYSGSNMDRPALNEMLSKLHEIDAVVVYRLDRLSRSQRDTITLIEEYFLKNNVEFVSLSETLDTSSPFGRAMIGILSVFAQLERETIRDRMVMGKIKRIEAGLPLTTAKGRTFGYEVIDTKLYINEEEAKQLRLIYDIFEEEQSITFLQKRLKKLGFKVRTYNRYSNWLTNDLYCGYVSYKDKVHVKGIHEPIISEEQFYRVQEIFARMGKNPNMNRDSASLLNNLVVCGKCGLGFVHRRKDAMSRDKKYHYRYYSCKTYKHIHELEKCGNKIWRADKLEELIINRVNNYSLASRNVDKEDELDSLNEKLKIEHANKKRLFDLYINGRYEVSELDSMMNDIDAQINHYESQIEANEGLKRNRKIQENLADLATVDFDSLEFREKQLYLKSLINKIYIDGDQVTIEWL

SEQ ID NO: 1189 - protein, 469 aa, synthetic construct
MSYTTPVRAAVYLRISEDRSGEQLGVARQREDCLKLCGQRKWVPVEYLDNDVSASTGKRRPAYEQMLADITAGKIAAVVAWDLDRLHRRPVELEAFMSLADEKRLALATVAGDVDLATPQGRLVARLKGCVAAHEMEHKKARQRRAARQKAERGYPNWSKAFGYLPGPNGPEPDPRAAPLVKQAYADILAGASLGDVCRQWNDAGAFTITGRPWTTTTLSKFLRKPRNAGLRAYKGARYGPVDRDAIVGRAQWSPLVDEATFWAAQAVLDAPGRAPGRKSVRRHLLTGLAGCGKCGNHLAGSYRTDGRVVYVCKACHGVAILADNIEPVLYHIVAERLAMPDAVDLLRREIHDAAEAETIRLELETLHGELDRLAVERAEGLLTARQVKISTDIVNAKITKLQARQLDQERLRVFDGIPLGTPQVADMIAELSPDRFRAVLDVLAEVVVQPAGKSGRIFNPERVQVNWR

SEQ ID NO: 1190 - protein, 469 aa, synthetic construct
MSYTTPVRAAVYLRISEDRSGEQLGVARQREDCLKLCDQRKWVPVEYLDNDVSASTSKRRPAYEQMLADITAGKIAAVVAWDLDRLHRRPIELEAFMSLADEKRLALATVAGDVDLATPQGRLVARLKGSVAAHETEHKKARQRRAARQKAERGYPNWSKAFGYLPGPNGPEPDPRTAPLVKQAYADILAGASLGDVCRQWNGAGAFTITGRPWTTTTLSKFLRKPRNAGLRAYKGAPYGPVDRDAIVGKAQWSPLVDEATFWAAQAVLDAPGRAPGRKSVRRHLLTGLAGCGKCGNHLAGSYRTDGRVVYVCKACHGVAILADNIEPILYHIVAERLAMPDAVDLLRREIHDAAEAETIRLELETLYGELDRLAVERAEGLLTARQVKISTDIVNAKITELRARQLDQERLRVFDGIPLGTPQVAGMIAELSPDRFRAVLDVLAEVVVRPVGKSGRIPNPERVQVNWR

SEQ ID NO: 1191 - protein, 469 aa, synthetic construct
MSYTTPVRAAVYLRISEDRSGEQLGVARQREDCLKLCDQRKWVPVEYLDNDVSASTGKRRPAYEQMLADITAGKIAAVVAWDLDRLHRRPIELEAFMSLADEKRLALATVAGDVDLATPQGRLVARLKGSVAAHETEHKKARQRRAARQKAERGLPNWSKAFGYLPGPDGPEPDPRTAPLVKQAYADILAGASLGDVCRQWNDAGAFTITGRPWTTTTLSKFLRKPRNAGLRAYKGARYGPVDRDAIVGKAQWSPLVDEATFWAAQAVLDAPGRAPGRKSVRRHLLTGLAGCGKCGNHLAGSYRTDGRVVYVCKACHGVAILADNIEPILYHIVAERLAMPDAVDLLRREIHDAAEAETIRQELETLYGELDRLAVERAEGLLTARQVKISTDIVNAKITKLQARQLDQERLRVFDGIPLGTPQVAGMIAELSPNRFRAVLDVLAEVVVQPVGKSGRIFNPERVQVNWR

SEQ ID NO: 1192 - protein, 485 aa, synthetic construct
MTKKVAIYTRVSTTNQAEEGFSIDEQVDRLTKYAEAMGWQVSDTYTDAGFSGAKLERPAMQRLINDIENKAFDTVLVYKLDRLSRNVRDTLYLVKDVFTKNKIDFISLNESIDTSSAMGSLFLTILSAINEFERENIKERMTMGKLGRAKSGKSMMWTKTAFGYYHNRKTGILEIVPLQATIVEQIFTDYLSGISLTKLRDKLNESGHIGKDIPWSYRTLRQTLSNPVYCGYTKFKDSLFEGMHKPIIPYETYLKVQKELEERQQQTYERNNNPRPFQAKYMLSGMARCGYCGAPLRIVLGHKRKDGSRTMKYHCANRFPRKTKGVTVYNDNKKCDSGTYDLSNLENTVIDNLIGFQENNDSLLKIINGNNQPILDTSSFKGQISQIDKKIQRNSDLYLNGFITMDELKDRTDSLQAEKKLLEAKISENKINDSTDVFELVKTQLGSIPINELSYDDKKKIVNNLVSKVDVTADNVDIIFKFQLA

SEQ ID NO: 1193 - protein, 469 aa, synthetic construct
MSYTTPVRAAVYLRISEDRSGEQLGVARQREDCLKLCGQRKWVPVEYLDNDVSASTGKRRPAYEQMLADITAGKIAAVVAWDLDRLHRRPVELEAFMSLADEKRLALATVAGDVDLATPQGRLVARLKGVVAAHETEHKKARQRRAARQKAERGHPNWSKAFGYLPGPNGPEPDPRTAPLVKQAYADILAGASLGDVCRQWNDTGAYTITGRPWTTTTLSKFLRKPRNAGLRAYKGARYGPVDRDAIVGKARWSPLVDEATFWAAQAVLDAPGRAPGRKSVRRHLLTGLAGCGKCGNHLAGSQRTDGRVVYVCKACHGIAILAENIEPILYHIMVERLAMPDAVDLLRREIHDAAEAETIRLELETLYGELDHLAVERAEGLLTARQVKISTDIVNAKITKLQARQLDQERLRVLDGIPLGTPQVAGMIAELSPDRFRAVLDVLAEVVVQPVGKSGRTFNPERVQVNWR

SEQ ID NO: 1194 - protein, 485 aa, synthetic construct
MTKKVAIYTRVSTINQAEEGFSIDEQTDRLTKYAEAMGWQVSDTYTDAGFSGAKLERPAMQRLINDIENKAFDTVLVYKLDRLSRSVRDTLYLVKDVFTRNKIDFISLSESIDTSSAMGSLFLTILSAINEFERENIKERMTMGKLGRAKSGKSMMWTKTAFGYYHNRKTGILEIVPLQATIVEQIFADYLSGISLTKLRDKLNESGHIGKDIPWSYRTLRQTLDNPVYCGYIKFKDSLFEGMHKPIIPYETYLKVQKELVERQQRTYERNNNPRPFQAKYMLSGMARCGYCGAPLRIVLGHKRKDGSRTLKYHCANRFPRKTKGVTVYNDNKKCDSGTYDLSNLENTVIDNLIGFQENNDSLLKIINGNNQPILDTSSFKKQISQIDKEIRKNSDLYLNDFITMDELRDRTDSLQAEKKLLKAKISENKFNDSTDVFELVKTQLGSIPINELSYGNKKKIVNSLVSKVDVTADNVDIIFKFQLA

SEQ ID NO: 1195 - protein, 452 aa, synthetic construct
MKAAIYIRVSTREQVENYSIQAQTEKLTALCRSKDWDVYDIFIDGGYSGSNMNRPALNEMLNKLHEIDAVVVYRLDRLSRSQRDTITLIEEYFLKNSVEFVSLSETLDTSSPFGRAMIGILSVFAQLERETIRDRMVMGKIKRIEAGLPLTTAKGRTFGYDVIDTKLYINEEEAKQLQLIYDIFEEEQSITSLQKRLKKLGFKVRTYNCYNNWLTNDLYCGYVSYKDKVHVKGIHEPIISEEQFYRVQEIFTRMGKNPNMNRDSASLLNNLVVCSKCGLGFVHRRKDAMSRDKKYHYRYYSCKTYKHIHELEKCGNKIWRADKLEELIINRVNNYSIVSRNTDKEDELDSLNDKLKIEHAKKRRLFELYINGSYEMSELDSMMSDIDAQINYYESQIEANEELKKDKKIQENLAYLATVDFDSLEFREKQLYLKSLINKIYIDGEQVTIEWL

SEQ ID NO: 1196 - protein, 485 aa, synthetic construct
MTKKVAIYTRVSTTNQAEEGFSIDEQIDRLTKYAEAMGWQVSDTYTDAGSSGAKLERPAMQRLINDIENKAFDTVLVYKLDRLSRSVRDTLYLVKDVFTKNKIDFISLSESIDTSSAMGSLFLTILSAINEFERENIKERMTMGKLGRAKSGKSMMWTKTAFGYYHNRKTGILEIVPLQATIVEQIFADYLSGISLTKLRDKLNESGHIGKDIPWSYRTLRQTLDNPVYCGYIKFKGSLFEGMHKPIIPYETYLKVQKELEERQQQTYERNNNPRPFQAKYMLSGMARCGYCGAPLRIVLGHKRKDGSRTMKYHCANRFPRKTKGVTVYNDNKKCDSGTYDLSNLENTVIDNLIGFQENNNSLLKIINGNNQPILDASSFKKQISQIDKKIQKNSDLYLNDLITMDELKDRTDSLQAEKKLLKAKISENKFNDSTDVFELVKTQLGSIPINELSYDNKKKIVNNLVSKVDVTADNVDIIFKFQLA

SEQ ID NO: 1197 - protein, 452 aa, synthetic construct
MKAAIYIRVSTREQVENYSIQAQTEKLTALCRSKDWDVYDIFIDGGYSGSNMNRPALNEMLSKLHEIDAVVVYRLDRLSRSQRDTITLIEEYFLKNNVEFVSLSETLDTSSPFGRAMIGILSVFAQLERETIRDRMVMGKIKRIEAGLPLTTAKGRTFGYDVIDTKLYINEEEAKQLQLIYDIFEEEQSITFLQKRLKKLGFRVRTYSCYNNWLTNDLYCGYVSYKDKVHVKGIHEPIISEEQFYRVQEIFTRTGKNPNMNRDSASLLNNLVVCSKCGLGFVHRRKDTVSRGKKYHYRYYSCKTYKHIHELEKCGNKIWRADKLEALIINRVNNYSFASRNVDKEDELDSLNEKLKIEHAKKRRLFDLYINGSYDVGELDSMMSGIDAQINYYESQIEANEELKKNKKIQENLADLATVDFDSLEFREKQLYLKSLIDKIYIDGEQVTIEWL

SEQ ID NO: 1198 - protein, 452 aa, synthetic construct
MKAAIYIRVSTREQVENYSIQAQTEKLTALCRSKGWDVYDIFIDGGYSGSNMNRPALNEMLSKLHEIDAVVVYRLDRLSRSQRDTITLIEEYFLKNDVEFVSLSETLDTSSPFGRAMIGILSVFAQLERETIRDRMVMGKIKRVEAGLPLTTAKGRTFGYDVIDTKLYINEEEAKQLQLIYDIFEEEQSITFLQKRLKELGFKVRTYNCYNNWLTNDLYCGYVSYKDKVHVKGIHEPIISEEQFYRVQEIFTRMGKNPNMNRDSASLLNNLVVCSKCGLGFVHRRKDAMSRDKKYHYRYYSCKTYKHIHELEKCGNKIWRADKLEELIIDRVNNYSFAGRNADKEGELDSLNEKLKIEHAKKKRLFELYINGSYEVSELDSMMNDIDAQINYYESQIEANEGLRKNKKIQENLANLATVDFDSLEFREKQLYLKSLINKIYIDGEQVTIEWL

SEQ ID NO: 1199 - protein, 469 aa, synthetic construct
MSYTTPVRAAVYLRISEDRSGEQLGVARQREDCLKLCGQRKWVPVEYLDNDVSASTGKRRPAYEQMLADITAGKIAAVVAWDLDRLHRRPVELEAFMSLADEKRLALATVAGDVDLATPQGRLVARLKGCVAAHETEHKKARQRRAARQKAERGHPNWSKAFGYLPGPNGPEPDPRTAPLVKQAYADILAGASLGDVCRQWNDAGAFTITGRPWTTTTLSKFLRKPRNAGLRAYKGARYGPVDRDAIVGKAQWSPLVDEATFWAAQAVLDAPGRAPGRKSVRRHLLTGMAGCGKCGNHLAGSYRTDGRVVYVCKACHGVAILADNIEPILYHIVAERLAMPDAVDLLRREIHDAAEAETIRLELETLYGELDRLAVERAEGLLTARQVKISTDIVNAKITKLQARQLDQERLRVFDGIPLGTPQVAGMIAELSPDRFRAVLDVLAEVVVQPVGKSGRMFNPERMQVNWR

SEQ ID NO: 1200 - protein, 469 aa, synthetic construct
MSYTTPVRAAVYLRISEDRSGEQLGVARQREDCLKLCGQRKWVPVEYLDNDVSASTGKRRPAYEQMLVDITAGRIAAVVAWDLDRLHRRPIELEAFMSLADERRLALATVAGDVDLATPQGRLVARLKGCVAAHETEHKKARQRRAARQKAERGLPNWSKAFGYLPGPNGPEPDPRTAPLVKQAYADILAGESLGDVCRQWNDAGALTITGRPWTTTALSKFLRKPRNAGLRAYKGARYGPVDRDAIVGRAQWSPLVDEATFWAAQAVLDAPGRAPGRKSVRRHLLTGLAGCGKCGNHLAGSYRTDGQVVYVCKACHGVSILAVNIEPILYHIVAERLAMPDAVDLLRREIHDAAEAETIRLELETLYGELDRLAVERAEGLLTARQVKISTDIVNAKITKLQARQLDQERLRVLDGIPLGTPQVAGMITELSPDRFRAVLDVLAEVVVQPVGKGGRIFNPERVQVNWR

SEQ ID NO: 1201 - protein, 469 aa, synthetic construct
MSYTTPVRAAVYLRISEDRSGEQLGVARQREDCLKLCDQRKWVPVEYLDNDVSASTGKRRPAYEQMLADITAGKIAAVVAWDLDRLHRRPIELEAFMSLADEKRLALATVAGDVDLATPQGRLVARLKGSVAAHETEHKKARQRRAARQKAERGHPNWSKAFGYLPGPNGPEPDPRTAPLVKQAYADILAGASLGDVCRRWNDAGAFTITGRPWTTTTLSKFLRKPRNAGLRTYKGARYGPVDRNAIVSKAQWGPLVDEATFWAAQAVLDAPGRAPGRKSVRRHLLTGLAGCGKCGNHLAGSYRTDGRVVYVCKACHGVAILADNIEPILYHVLAERLAMPDAVDLLRCEIHDAAEAEAIRLELETLYGELDRLAVERAEGLLTARQVRISTDIVNAKITKLQARQLDQERLHVLDGIPLGTPQVVGMIAELSPDRFRAVLDVLAEVVVQPVGKGGRIFNPERVQVNWR

SEQ ID NO: 1202 - protein, 469 aa, synthetic construct
MCYTTPVRAAVYLRISEDRSGEQLGVARQREDCLRLCGQRNWVPVEYLDNDVSASTGKRRPAYEQMLADITAGKIAAVVTWDLDRLHRRPIELEAFMSLADEKRLALATVAGDVDLATPQGRLVARLKGSVAAHETEHKKARQRRAARQKAERGHPNWSKAFGYLPGPNGPEPDPRTAPLVKQAYADILAGASLGDVCRQWNDAGVSTITGRPWTTTTLSKFLRKPRNAGLRTYKGASYGPVDRDAIVGKAQWSPLVDEATFWAAQTVLDAPGRAPGRKSVRRHLLTGLAGCGKCGHHLAGSYRSDGRVVYVCKACHGVAILADNIEPTLYHIVAERLAMPDAVDLLRREIHDTVEAETIRLELETLYGELDRLAVERAEGLLTARQVKISTDIVNAKITKLQARHLDQERLRVFDGIPLGTPQVAGMIAELSPDRFRAVLGVLAEVVVQPVGKGGRIFSPGRVHVNWR

SEQ ID NO: 1203 - protein, 485 aa, synthetic construct
MTKKVAIYTRVSTTNQAEEGFSIDEQIDRLTKYAEAMGWQVSDTYTDAGSSGAKLERPAMQRLINDIENKAFDTVLVYKLDRLSRSVRDTLYLVKDVFTKNKIDFISLNESIDTSSAMGSLFLTILSAINEFERENIRERMTMGKLGRAKSGKSMMWTRTAFGYYHNRKTGILEIVPPQATIVEQIFTDYLSGISLTKLRDKLNESGHSGKDIPWSYRTLRQTLDNPVYCGYIKFKDSLFEGMHKPIIPYETYLKVQKELEERQQQTYERNNNPRPFQAKYMLSGKARCGYCGAPLKIVLGHKRKDGSRTMKYHCANRFPRKTKGVTVYNDNKKCDSGTYDLSNLENTVIDNLIGFQENNDRLLKIINGNNQPILDTSSFKKQISQIDKIIQKNSDLYLNDFITMDELKDRTDSLQAEKKLLKAKISESKFNDSTDAFELVKTQLGSIPINELSYDDKKKIVNNLVSKVDVTADNVDIIFKFQLA

SEQ ID NO: 1204 - protein, 469 aa, synthetic construct
MCYTTPVRAAVYLRISEDRSGEQLGVARQREDCLKLCGQRKWVPVEYLDNDVSASTGKRRPAYEQMLADITAGKIAAVVAWDLDRLHRRPVELEAFMSLADEKRLALATVAGDVDLATPQGRLVARLKGCVAAHETEHKKARQRRAARQKAERGHPNWSKAFGYLPGPNGPEPDPRTAPLVKQAYADILAGASLGDVCRRWNDAGAFTITGRPWTTTTLSKFLRKPRNAGLRAYKGARYGPVDRDAIVGKAQWSPLVDEATFWAAQAVLDAPGRAPGRKSVRRHLLTGLAGCGKCGNHLAGSYRTDGRVVYVCKACHGVAILADNIEPILYHVVAERLAMPDAVDLLRREIHDAAEAETIRLELETLYGELDRLAVERAEGLLTARQVKISTDIVNAKITKLQACQLDQERLRVFDGIPLGTPQVAGVIAELSPDRFRAVLDVLAEVVVQPAGKGGRIFNPERVQVNWR

SEQ ID NO: 1205 - protein, 469 aa, synthetic construct
MSYTTPVRAAVYLRISEDRSGEQLGVARQREDCLKLCGQRQWVPVEYLDNDVSASTGKRRPAYEQMLADITAGKVAAVVAWDLDRLHRRPIELEAFMSLADEKRLALATVAGDVDLATPQGRLVARLKGSVAAHETEHKKARQRRAARQKAERGHPNWSKAFGYLPGPNGPEPDPRTAPLVKQAYADILAGASLGDVCRRWNDAGAFTITGRPWTATTLSKFLRKPRNAGLRAYKGARYGPVDRDAIVGKAQWSPLVDEATFWAAQAVLDAPGRAPGRKSVRRHLLTGLAGCGKCGNRLAGSYRTDGRVVYVCKACHGVAILADNIEPILYNIVAERLAMPDAVDLLRREIHDAAEAEIIRLELETLYGELDRLAVERAEGLLTARQVKISTDIVNAKITKLQARQLDQERLCVLDGIPLGTPQVAGMIAELSPNRFRAVLDVLAEVVVQPVGKGGRIFNPERVQVNWR

SEQ ID NO: 1206 - protein, 469 aa, synthetic construct
MCYTTPVRAAVYLRISEDRSGEQLGVARQREDCLKLCGQRKWVPVEYLDNDVSASTGKRRPAYEQMLADITAGKIAAVVVWDLDRLHRRPIELEAFMSLADEKRLALATVAGDVDLATPQGRLVARLKGSVAAHETEHKRARQRRAARQKAERGHPNWSKAFGYLPGPNGPEPDPRTAPLVKQAYADILAGASLGDVCRRWNDAGASTITGRPWTTTTLSKFLRKPRNAGLRAYKGARYGPVDRDAIVGKAQWSPLVDEATFWAAQAVLDAPGRAPGRKSVRRHLLTGLAGCGKCGNHLAGSYRTDGRVVYVCKACHGVAILADNIEPVLYHIVAERLAMPDAVDLLRREIHDVAEAETIRLELETLYGELDRLAVERAEGLLTARQVKISTDIVNAKITRLRTRQQDQERLRVLDGIPLGTPQAAGAIAELSPDRFRAVLDVLVEVVVQPVGKGGRIPNPERVQVNWR

SEQ ID NO: 1207 - protein, 452 aa, synthetic construct
MKAAIYIRVSTQEQVGNYSIQAQTEKLTALCRSKDWDVYDIFIDGGYSGSNMNRPALNEMLSKLHEIDAVVVYRLDRLSRSQRDTTTLIEEYFLKNNVEFVSLSETLDTSSPFGRAMIGILSVFAQLERETIRDRMVMGKIKRIEAGLPLTTAKGRTFGYDVIDTKLYINEEEARQLQLIYDIFEEEQSITFLQKRLKELGYKVRSYNRYNSWLTNDLYCGYVSYKDKVHVKGIHEPIISEEQFYRVQEIFTRMGKNPNMNRDSASLLSNLVVCSKCGLGFVHRSKDTTSRGKKYHYRYYSCKTYKHTHELEKCGNKTWRADKLEELIISRVNNYSFASRNVDKEGELDSLNEKLKIEHAKKRRLFDLYINGSCEVSELDSMMNDIDAQINYYESQIGANEELKKNQKIQESLADLATVDFDSLEFREKQLYLKSLINKIYIDGEQVTIEWL

SEQ ID NO: 1208 - protein, 485 aa, synthetic construct
MTKKVAIYTRVSTTSQAEEGFSIDEQIDRLTKYAEAMGWQVSGTYTDAGLSGAKLERPAMQRLINDIETKAFDTVLVYKLDRLSRSVRDTLYLVKDVFTKNKIDFISLNESIDTSSAMGSLFLTILSAINEFERENIKERMTMGKLGRAKSGKSMMWTKTAFGYYHNRKTGILEIVPLQAAIVEQIFTDYLSGISLTKLRDKLNESGHIGKDIPWSYRTLRQTLDNPVYCGYIKFKDSLFEGMHKPIIPYETYLKVQKELEERQQQTYKRNNNPRPFQAKYMLSGMARCGYCGAPLRIVLGHKRKDGSRTMKYHCTNRFPRKTKGVTVYNDNKKCDSGTYDLSSLENTVIDNLIGFQENSDSLLKIINGNNQQILDTSSFKKQISQIDEKIQKNSDLYLNDFITMDELKDRTDSLQAEKKLLKAEISENKSNDSTDVFELVKTQLGSIPINELSYDNKKKIVNNLVSKVNVTADNVDIIFKFQLA

SEQ ID NO: 1209 - protein, 485 aa, synthetic construct
MTKKVAIYTRVSTTNQAEEGFSIDEQIDRLTKYAEAMGWQVSDTYTDAGFSGAKLERPAMQRLINDIENKAFDTVLVYKLDRLSRSVRDTLYLVKDVFTKNKIDFISLNESIDTSSAMGSLFLTILSAINEFERENIKERMTMGKLGRAKSGKSMMWTKTAFGYYHNRKTGILEIVPLQATIVEQIFTDYLSGISLTKLRDKLNESGHVGKDIPWSYRTLRQTLDNPVYCGYIKFKDSLFEGMHKPIIPYETYLKVQKELEERQQQTYERNNNPRPFQAKYMLSGMARCGYCGAPLRIVLGHRRKDGSRTMKYHCANRFPRKTKGVTVYNDNKKCDSGTYDLSNLENTVIDNLIGFQENNDSLLKIINGNNQPIPDTSSFKKQISQIDKKIQKNSDLYLNDFITMDELKDRTDNLQAEKKLLEAKISENKFNDSTDVFELVKTQLGSIPINELSYDNKRKIVNSLVSKVDVTADNVDIIFKFQLA

SEQ ID NO: 1210 - protein, 469 aa, synthetic construct
MSYTTPVRAAVYLRISEDRSGEQLGVARQREDCLELCGQRKWVPVEYLDNDVSASTGKRRPAYEQMLADITAGKIAAVVAWDLDRLHRRPVELEAFMSLADEKRLALATVAGDVDLATPQGRLVARLKGSVAAHETEHKKARQRRAARQKAERGHPNWSRAFGYLPGPNGPEPDPRTAPLVKQAYADILAGASLGDVCRQWNDAGAFTITGRPWTTTTLSKFLRKPRNAGLRAYKGARYGPVDRDAIVGKAQWRPLVDEATFWAAQAVLDAPDRAPGRKSVRRHLLTGLAGCGKCGNHLAGSYRTDGRVVYVCKACHGVAILADNIEPILYHIVVERLAMPDAVDLLRREIRDAAEAETIRLELEALYGELDCLAVERAEGLLTARQVKISTDIVNAKITKLQARQLDQERLRVFDGIPLGTPQVAGMIAELSPDRFRAVLDVLAVVVVQPVGKSGRIFNPERVQVNWR

SEQ ID NO: 1211 - protein, 485 aa, synthetic construct
MTKKVAIYTRVSTTNQAEEGFSIDEQIDRLTKYAEAMGWQVSDTYTDAGYSGAKLERPAMQRLINDIESRAFDTVLVYKLDRLSRSARDTLYLVKDVFTKNKIDFISLNESIDTSSAMGSLFLTILSAINEFERENIKERMTMGKLGRAKSGKSMMWTKTAFGYYHNRKTGILEIVPLQATIVEQIFTDYLSGISLTKLRDKLNESGHIGKDIPWSYRTLRQTLDNPVYCGYIKFKDSLFEGMHKPIIPYETYQKVQKELEERQQQTYERNNNPRPFQAKYMLSGMARCGYCGAPLKIVLGHKRKDGSRTMKYHCANRFPRKTKGVTVYNDNKKCDSGTYDLSNLENTVIDSLIGFQEDNDSLLKIINGNNQPILDTSSLKKQISQIDKKIQKNSDLYLYDFITMDELKDRTDSLQAEKKLLKAKISENKFNDSTDVFELVKAQLGSIPINELSYDNKKKIVNNLVSKVDVTADNVDIIFKFQLA

SEQ ID NO: 1212 - protein, 452 aa, synthetic construct
MKAAIYIRVSTQEQVENYSIQAQTEKLTALCRSKDWDVYDIFIDGGYSGSNMNRPALNEMLSKLHEIDAVVVYRLDRLSRSQRDTTTLIEEYFLKNNVEFVSLSETLDTSSPFGRAMIGILSVFAQLERETIRDRMVMGKIKRIEAGLPLTTAKGRTFGYDVIDTKLYINEEEAKQLQLIYDIFEEVQSITLLQKRLKKLGFKVRTYNRYSNWLTNDLYCGYVSYKDKVHVKGIHEPIIGEEQFYRVQEIFTRMGKSPNMNRDSASLLSNLVVCSKCGLGFVHRSKDTMSRGKKYHYRYYSCKTYKHTHELEKCGNKTWRADVLEELIINRVNNYSFASRNADKEGELDSLNEKLKAEHAKKKRLFDLYINGSYEVSELDSMMNDIDAQINYYESQIEANKELKKNKKIQENLADLATVDFDSLELREKQLYLKSLINKIYIDGEQVTIEWL

SEQ ID NO: 1213 - protein, 469 aa, synthetic construct
MCYTTPVRAAVYLRISEDRSGEQLGVARQREDCLKLCDQRKWVPVEYLDNDVSASTGKRRPAYEQMLADITAGKIAAVVAWDLDRLHRRPIELEAFMSLADEKRLALATVAGDVDLATPQGRLVARLKGSVAAHETEHKKARQRRAARQKAERGHPNWSKAFGYLPGPNGPEPDPRTAPLVKQAYADILAGASLGDVCRRWNDVGAFTITGRPWTTTTLSKFLRKPRNAGLRAYKGARYGPVDRDAIVGKAQWSPLVDEATFWAAQAVLDAPGRAPGRKSVRRHLLTGLAGCGKCGNHLAGSYRTDGRVVYVCKACHGVAILADNIEPILYRTVAERLAMPDAVDLLRREIHDAAEAETIRLELETLYGELDRLAVERAEGLLTARQVKISTDIVNAKITKLQARRLDQERLRVFDGIPLGTPQVAGMIAELSPNRFRAVLDVLAEVVVQPVGKGGRIFNPERVQVNWR

SEQ ID NO: 1214 - protein, 469 aa, synthetic construct
MSYITPVRAAVYLRISEDRSGEQLGVARQREDCLKLCDQRKWVPVEYLDNDVSASTGKRRPAYEQMLADITAGKIAAVVAWDLDRLHRRPIELEAFMCLADEKRLALATVAGDVDLATPQGRLVARLKGSVAAHETEHKKARQRRAARQKAERGHPNWSKAFGYLPGPNGPEPDPRTAPLVKQAYTDILAGASLGDVCRRWNDAGAFTITGRPWTTTTLSKFLRKPRNAGLRAYKGARYGPVDRDAIVGKAQWSPLVDEATFWAAQAVLDAPGRAPGRKSVRRHLLTGLAGCGKCGNHLAGSYRTDGKIVYVCKACHGVAILADNIEPILYHIVAERLAMPDAVDLLRREIHDAAEAETVRLELETLYGELDRLAVERAEGLLTARQVKISTDIVNAKIAKLQARQQDQERLRVLDGIPLGTPRVAGMIAELSPDRFRAVLDVLAEVVVQPVGKSGSVFNPERVQVNWR

SEQ ID NO: 1215 - protein, 452 aa, synthetic construct
MKAAIYIRVSTQEQVDNYSIQAQTEKLTALCRSKDWDVYDIFIDGGYSGSNMNRPALNEMLSKLHEIDAVVVYRLDRLSRSQRDTTTLIEEYFLKNNVEFVSLSETLDTSSPFGRAMIGILSVFAQLERETIRDRMVMGKIKRIEAGLPLTTAKGRTFGYDVIDTKLYINEEEAKQLRLIYDIFEEEQSITSLQKRLKKLGFKVRTYNRYNNWLTNDLYCGYVSYKDKVHVKGIHEPIISEEQFYRVQEIFTRMGKNPNMNRDSASLLSNLVVCSKCGLGFVHRSKDTMSRGKKYHYRYYSCKTYKHTHELEKCGNKTWRADKLEELIISRVNNYSSASRSVDKEDELDSLNEKLKTEHAKKKRLFDLYINGSYEVSELDSMMNDIDAQINYYESQIEANEELKKNKKIQENLADLATVDFDSLEFREKRLYLKSLINKIYIDGEQVTIEWL

SEQ ID NO: 1216 - protein, 452 aa, synthetic construct
MKAAIYIRVSTREQVENYSIQAQTEKLTALCRSKDWDVYDIFIDGGYSGSNMDRPALNEMLSKLHEIDAVVVYRLDRLSRSQRDTITLIEEYFLKNNVEFVSLSETLDTSSPFGRAMIGILSVFAQLERETIRDRMVMGKIKRIEAGLPLTTAKGRTFGYDVIDTKLYINEEEAKQLQLIYDIFEEEQSITFLQKRLKKLGFKVRTYSCYNNWLTNDLYCGYVSYKDKVHVKGIHEPIISEEQFYRVQEIFTRMGKNPNMNRDSASLLNNLVVCSKCGLGFVHRRKDIMSRDKKYHYRYYSCKTYKHIHELEKCGNKIWRADELEELVINRVNSYGVASRNVDKEDELGSLNEKLKIEHAKKKRLFDLYINGSYEVSELDSMMNDIDAQINYYESQIEANEELKKNKKIQETLAHLATVDFDSLEFREKQLYLKSLINKIYIDGEQVTIEWL

SEQ ID NO: 1217 - protein, 485 aa, synthetic construct
MTKKVAIYTRVSTTNQAEEGFSIDEQIDRLTKYAEAMGWQVSDTYTDAGFSGAKLERPAMQRLIDDIENKAFDTVLVYKLDRLSRSVRDTLYLVKDVFTKNKIDFISLNESINTSSAMGSLFLTILSAINEFERENIKERMTMGKLGRAKSGKSMMWTKTAFGYYHNRKTGILEVVPLQATIVEQIFTDYLSGISLTKLRDKLNESGHIGKDIPWSYRTLRQTLDNPVYCGYIKFKDSLFEGMHKPIIPYETYLKVQRELEERQQQTYERNNNPRPFQAKYMLSGMARCGYCGAPLKIVLGHKRKDGSRTMKYHCANRFPRKTKGVTVYNDNKKCDSGTYDLSNLENTVIDNLIGFQENNNSLLKIINGNNQPILDTSSLKKQISLIDKKIQKNSDLYLNDFITMDELKDRTDSLQAEKKLLKAKVSENKFNDSTDVFELVRTQLGSIPINELSYDIKKKIVNNLVSKVDVTADNVDIIFKFQLA

SEQ ID NO: 1218 - protein, 469 aa, synthetic construct
MSYTTPVRAAVYLRISEDRSGEQLGVARQREDCLKLCGQRKWVPVEYLDNDVSASTGKRRPAYEQMLADITAGKIAAVVAWDLDRLHRRPVELEAFMSLVDEKRLALATVAGDVDLATPQGRLVARLKGCVAAHETEHKKARQRRAARQKAERGLPNWSKAFGYLPGPNGPEPDPRTAPLVKQAYADILAGASLGDMCRQWNDAGAFTITGRPWTTTTLSKFLRKPRNAGLRAYKGARYGPVDRDAIVGKAQWSPLVDEATFWAAQAVLDAPGRAPGRKSVRRHLLTGLAGCGKCGNHLAGSYRTDGRVVYVCKACHGVSILADNIEPILYRIVAERLAMPDAVDLLRREIHDAAEAETIRLELEILYGELDRLAVERAEGLLTARQVKICTDIVNAKITRLQARQLDQERLHVLGGIPLGTPQVAGVIAELSPDRFRAVLDVLAEVVVQPVGKSGRIFSPERVQVNWR

SEQ ID NO: 1219 - protein, 469 aa, synthetic construct
MSYTTPVRAAVYLRISEDRSGEQLGVARQREDCLKLCGQRKWVPVEYLDNDVSASTGKRRPAYEQMLADITAGKIAAVVAWDLDRLHRRPVELEAFMSLADEKRLALATVAGDVDLATPQGRLVARLKGSVAAHETEHKKARQRRAARQKAERGLPNWSKAFGYLPGPNGPEPDPRTAPLVKQAYADILAGASLGDVCRRWNGAGAFTITGRPWTTTTLSKFLRKPRNAGLRAYKGARYGPVDRDAIVGKARWSPLVDEATFWAAQAVLDAPGRAPGRKSVRRHLLTGLAGCGKCGSHLAGSYRTGGKVAYVCKACHGVAILADNIEPMLYHIVAERLAMPDAMDLLRREIHDAAEAETIRLELETLYGELDRLAVERAEGLLTARQVKIGTDIVNAKITELQARQLDQERLRVLDGIPLGTPQVAGMIAELSPDRFRAVLDVLAEVVVQPVGKSGGIFNPERVQVNWR

SEQ ID NO: 1220 - protein, 469 aa, synthetic construct
MSYTTPVRAAVYLRISEDRSGEQLGVARQREDCLKLCGQRKWVPVEYLDNDVSASTGKRRPAYEQMLADITAGKIAAVVAWDLDRLHRRPIELEAFMSLADEKRLALATVAGDVDLATPQGRLVARLKGSVAAHETEHKKARQRRAARQKAERGHPNWSKAFGYLPGPNGPEPDPRTAPLVKQAYADILAGASLGDVCRRWNDAGAFTITGRPWTTTTLSKFLRKPRNAGLRAYKGARYGPVDRDAIVGKAQWSPLVDEATFWAAQAVLDAPGRAPGRKSVRRHLLTGLAGCGKCGNHLAGSYRTDGRVVYVCKACHGVAILADNIEPILYHIVAERLAMPDAVDLLRREIYDAAEAETIRLELETLYGELDRLAVERAEGLLTARQVKIGTDIVSAKITKLQARQLDQERLRVLDGIPLGTPQVAGMIAELSPDRFRAVLDALAEVVVQPVGKSGRTFNPGRVQVNWR

SEQ ID NO: 1221 - protein, 485 aa, synthetic construct
MTKKVAIYTRVSTTNQAEEGFSIDEQIDRLTKYAEAMGWQVSGTYTDAGLSGAKLERPAMQRLINDIENKAFDTVLVYKLDRLSRSVRDTLYLVKDVFTKNKIDFISLNESIDTSSAMGSLFLTILSAINEFERENIKERMTMGKLGRAKSGKSMMWTKTAFGYYHNRKTGILEIVPLQATIVEQIFTDYLSGISLTKLRDKLNEGGHIGKDIPWSYRTLRQTLDNPVYCGYIKFKGSLFEGMHKPIIPYETYLEVQKELEERQQQTYERNNNPRPFQAKYMLSGKARCGYCGAPLRIVLGHKRRDGSRTMKYHCANRFPRKTKGVTVYNDNKKCDSGTYDLSDLENTVIDTLIGFQENNDSLLKIINGDDQPILDTSSLKEQISQIDKKIQKNSDLYLNDFITMDELKDRTDSLQAEKKLLKAKICENKINDSTDVFELVKTQLGSIPINELSYDNKKKIVNNLVSKVDVTADNVDIIFKFQLA

SEQ ID NO: 1222 - protein, 452 aa, synthetic construct
MKAAIYIRVSTREQVENYSIQAQTERLTALCRSKDWDVYDIFIDGGYSGSNMNRPALNEMLSKLHEIDAVVVYRLDRLSRSQRDTITLIEEYFLKNNVEFVSLSETLDTSSPFGRAMIGILSVFAQLERETIRDRMVMGKIKRIEAGLPLTTAKGRTFGYDVIDTKLYINEEEAKQLQLIYDIFEEEQSITSLQKRLKKLGFKVRSYNRYNNWLTNDLYCGYVSYKDKVHVKGIHEPIISEEQFYRVQEIFTRMGKNPNMNRDSASLLNNLVVCSKCGLGFVHRRKDTMSRGKKYHYRYYSCKTYKHTHELEKCGNKIWRADKLEELIINRVNNYSFASRNVDKAEELDSLNEKLKVEHAKKKRLFDLYINGSYNVSELDSMMNDIDAQINYYESQIEANEELKKNKKIQENLAGLATVDFDSLEFREKQLYLKSLINKIYIDGEQVTIEWL

SEQ ID NO: 1223 - protein, 485 aa, synthetic construct
MTKKVAIYTRVSTTNQAEEGFSIDEQIDRLTKYAEAMGWQVSGTYTDAGCSGAKLERPAMQRLINDIENKAFDTVLVYKLDRLSRSVRDTLYLVKDVFTKNKIDFISLSESIDTSSAMGSLFLTILSAINEFERENIKERMTMGKLGRAKSGKSMMWTKTAFGYYHNRKTGILEIVPLQATIVEQIFTDYLSGISLTKLRDKLNESGHIGRDIPWSYRTLRQTLDNPVYCGYIKFKDSLFEGMHKPIIPYETYLKVQKELEERQQQTYERNNNPRPFQAKYMLSGTARCGYCGAPLKIVLGRKRKDGSRTMKYHCANRFPRKTKGVTVYNDNKKCDSGTYDLSNLENTVIDNLIGFQEDNDSLLKIINGDNQPILDTSSLKKQISQIDKKIQKNSDLYLNDFITMDELKNRTDSLQAEKKLLKAKISENKFNDSTDVFELVKTQLGSIPINELSYDNKKRIVNNLVSKVDVTAGNVDIIFKFQLA

SEQ ID NO: 1224 - protein, 452 aa, synthetic construct
MKAAIYIRVSTREQVENYSIQAQTEKLTALCRSKGWDVYDIFIDGGYSGSNMNRPALNEMLSKLHEIDAVVVYRLDRLSRSQRDTITLIEEYFLKNNVEFVSLSETLDTSSPFGRAMIGILSVFAQLERETIRDRMVMGKIKRIEAGLPLTTAKGRTFGYDVIDTKLYVNEEEAKQLQLIYDIFEEEQSITFLQKRLKKLGFKVRTYSRYNNWLTNDLYCGYVSYKDKVHVKGIHEPIISEEQFYRVQEIFTRMGKNPNMNRDSASLLSNLVVCSKCGLGFVHRRKDTTSRGKKYHYRYYSCKTYKHTHELEKCGNKIWRADKLEELIISRVSNYSFASRNADKEDELDSLNEKLRIEHAKKKRLFDLYISGSYEVSELDSMMSDIDAQISYYESQIEANEELKKNKKIQENLANLATVDYDSLEFREKQLYLKSLINKIYIDGEQVTIEWL

SEQ ID NO: 1225 - protein, 485 aa, synthetic construct
MTKKVAIYTRVSTTNQAEEGFSIDEQIDRLTKYAEAMGWQVGDTYTDAGISGAKLERPAMQRLINDIENKAFDTVLVYKLDRLSRSVRDTLYLVKDVFTKNKIDFISLNESIDTSSAMGSLFLTILSAINEFERENIKERMTMGKLGRAKSGKSMMWTKTAFGYYHNRKTGILEIVPLQATIVEQIFTDYLSGISLTKLRDKLNESGHIGKDIPWSYRTLRQTLDNPVYCGYIKFKDSLFEGMHKPIIPYETYLKVQKELEERQQQTYERNNNPRPFQAKYMLSGMARCGYCGAPLRIVLGHKRKDGSRTMKYHCANRFPRKTKGVTVYNDNKKCDSGTYDLSNLENTVIDNLIGFQENNDSLLKIINGNNQPILDTSSFKEQINQIDKKIQKNSDLYLNDFITMDELKDRTDSLRAEKKLLKAKISENKFNDSTDVFELVITQLGSIPINELSYDNKKKIVNNLVSKVDVTADSVDIIFKFQLA

SEQ ID NO: 1226 - protein, 452 aa, synthetic construct
MKAAIYIRVSTREQVENYSIQAQTEKLTALCRSKDWDVYDIFIDGGYSGSNMDRPALNEMLSKLHEIDAVVVYRLDRLSRSQRDTITLIEEYFLKNNVEFVSLSETLDTSSPFGRAMIGILSVFAQLERETIRDRMVMGKIKRIEAGLPLTTAKGRTFGYDVIDTKLYINEEEAKQLRLIYDIFEEEQSITSLQKRLKKLGFKVRTYNRYNNWLTNDLYCGYVSYKDKVHVKGIHEPIISEEQFYRVQEIFTRMGKNPNMNRVSASLLNNLVVCSKCGLGFVHRRKDAMSRDKKYHYRYYSCKTYKHIHELEKCGNKIWRADKLEELIINRVNNYSLASRNVDKEDELDSLNEKLRTEHAKKRRLFDLYINGSYEVSELDSMMNDIDAQISYYESQIEANEELKKNKKIQENLAELAAVDFDSLEFREKQLYLRSLINKIYIDGEQVTIEWL

SEQ ID NO: 1227 - protein, 485 aa, synthetic construct
MTKKVAIYTRVSTTNQAEEGFSIDEQIDRLTKYAEAMGWQVSDTYTDAGFSGAKLERPAMQRLINDIENKAFDTVLVYKLDRLSRSVRDTLYLVKDVFTKNKIDFISLNESINTSSAMGSLFLTILSAINEFERENIKERMTMGKLGRAKSGKSMMWAKTAFGYYHNRKTGILEIVPLQATIVEQIFTDYLSGTSLTKLRDKLNESGHIGKDIPWSYRTLRQTLDNPVYCGYIKFKGSLFEGMHKPIIPYETYLKVQKELEERQQQAYERNNNPRPFQAKYMLSGMARCGYCGAPLRIVLGHKRKDGSRTMKYHCANRLPRKTKGITVYNDNKKCDSGTYDLSNLESAVIDILIGFQEDNDSLLKIINGNNQPILDTSSFKRQISQIDKKIQKNSDLYLNDFITMDELRDRTDSLQAEKKLLKAKIGENKFNDSTDVFELVKTQLGSIPINELSYGNKKKIVNNLVSKVDVTADNVDIIFKFQLA

SEQ ID NO: 1228 - protein, 469 aa, synthetic construct
MSYTTPVRAAVYLRISEDRSGEQLGVARQREDCLKLCDQREWVPVEYLDNDVSASTGKRRPAYEQMLADISAGKIAAVVAWDLDRLHRRPIELEAFMSLADEKRLALATAAGDVDLATPQGRLVARLKGSVAAHETEHKKARQRRAARQKAEHGHPNWSKAFGYLPGPNGPEPDPRTAPLVKQAYADILAGASLGDVCRQWNGAGAFTITGRPWTTTTLSKFLRKPRNAGLRAYKGARYGPVDRDAIVGKAQWSPLVDEATFWAAQAVLDAPGRAPGRKSVRRHLLTGLAGCGKCGNHLAGSYRTDGRVVYVCKACHGVAILADNIEPILYRIVVERLAMPDAVDLLCREIQDAAEVETIRLELETLYGELDRLAVERAEGLLTARQVKISTDIVNAKITKLRAHQQDQERLRVLDGIPLGTPQVAGMIAELSPDRFRAVLDVLAEVVVQPVGKGGRIFNPERVQVNWR

SEQ ID NO: 1229 - protein, 469 aa, synthetic construct
MSYTTPVRAAVYLRISEDRSGEQLGVARQREDCLKLCGQRKWVPVEYLDNDVSASTGKRRPAYEQMLADITAGKIAAVVAWDLDRLHRRPVELEAFMSLADEKRLALATVAGDVDLATPQGRLVARLKGCVAAHETEHKKARQRRAARQKAERGLPNWSKAFGYLPGPNGPEPDPRAAPLVKQAYADILAGASLGDVCRRWNGAGAFTITGRPWTTTTLSKFLRKPRNAGLRAYKGARYGPVDRDAIVGKAQWSPLVDEATFWAAQAVLDAPGRAPGRKSVRRHLLTGLAGCGKCGNHLAGSYRTDGRVVYVCKACHGVVILADNIVPILYHIVAERLAMPNAVDLLGCEVHDAAEAETIRLELETLYGELDRLAVERAEGLLTARQVKISTDIVNAKITELQARQLDQERLRVFDGIPLGTPQVAGMIAKLSPNRFRAVLNVLAEVVVQPVGKRGRIFNPERVQVNWR

SEQ ID NO: 1230 - protein, 452 aa, synthetic construct
MKAAIYIRVSTQEQVENYSIQAQTEKLTALCRSKDWDVYDIFIDGGYSGSNMNRPALNEMLSKLHEIDAVVVYRLDRLSRSQRDTITLIEEYFLKNNVEFVSLSETLDTSSPFGRAMIGILSVFAQLERETIRDRMVMGKIKRIEAGLPLTTAKGRTFGYDVIDTKLYINEEEAKQLRLIYNIFEEEQSITFLQKRLKRLGFKVRTYNRYNSWLTNDLYCGYVSYKDKVHVKGIHEPIISEEQFYRVQEIFTRMGKNPNMNRDSASLLSNLVVCSKCGLGFVHRRKDTTSRGKKYHYRYYSCKTYKHIHELEKCGNKIWRADKLEELIINRVDNYSLASRNVDKEDELDSLNEKLKIEHAKKKRLFDLYINGSYEVSELDSMMSDIDAQINYYEGQIEANEELKRNKKIQENLANLATVDYDSLEFREKQLYLKSLINKIYIDGEQVTIEWL

SEQ ID NO: 1231 - protein, 469 aa, synthetic construct
MCYTTPVRAAVYLRISEDRSGEQLGVARQREDCLKLCGQRKWVPVEYLDNDVSASTGKRRPAYEQMLADITAGKIAAVVAWDLDRLHRRPIELEAFMSLADEKRLALATVAGDVDLATPQGRLVARLKGCVAAHETEHKKARQRRAARQKAERGLPNWSKAFGYLPGPNGPEPDPRTAPLVKQAYADILAGASLGDVCRQWNDAGAFTITGRPWTTTTLSKFLRKPRNAGLRAYKGTRYGPVDRDAIVGKAQWSPLVDEATFWAAQAVLDAPGRAPGRKSVRRHLLTGLAGCGKCGNHLAGSHRTDGRVVYVCKACHGVAILADNIVPTLYHIVAERLAMPDAVDLLRCEIHDAAEAETIRLELETLYGELDRLAVERAEGLLTARQVKISTDIVNAKITKLQARQLDQDRLRVLDGIPLGTPQVAGAIAELSPDRFRAVLDVLAEVVVQPVGRSGRIFNLERVQVNWR

SEQ ID NO: 1232 - protein, 469 aa, synthetic construct
MSYTTPVRAAVYLRISEDRSGEQLGVARQREDCLKLCDQRKWVPVEYLDNDVSASTGKRRPAYEQMLADITAGKIAAVVAWDLDRLHRRPIELEAFMSLADEKRLALATVAGDVDLATPQGRLVARLKGCVAAHETEHKKARQRRAARQKAERGYPNWSKAFGYLPSPNGPEPDPRTAPLVKQAYADILAGASLGDVCRRWNDAGAFTITGRPWTTTTLSKFLRKPRNAGLRAYKGARYGPVDRDAIVGKAQWSPLVDEATFWAAQAVLDAPGRAPGRKSVRRHLLTGLAGCGKCGNHLAGSYRTDGRVVYVCKACHGVAILAENIEPILYHVVAERLAMPDAVDLLRREVHDAAEAETIRLELETLYGELDRLAVERAEGLLTARQVKISTDIVNAKITKLQTRQLDQERLRVFDGIPLGTPQVAGMIAELSPDRFRAVLDVLAEVVVQPVGKSGRIFNPERVQVNWR

SEQ ID NO: 1233 - protein, 452 aa, synthetic construct
MKAAIYIRVSTREQVENYSVQAQTEKLTALCRSKDWDVYDIFVDGGYSGSNMNRPALNEMLSKLHEIDAVVVYRLDRLSRSQRDTITLIEEYFLKNNVEFVSLSETLDTSSPFGRAMIGILSVFAQLERETIRDRMVMGKIKRIEAGLPLTTAKGRTFGYDVIDTKLYINEEEAKQLRLIYDIFEEVQSITFLQKRLKKLGFKVRTYNRYNNWLTNDLYCGYVSYKDKVHVKGIHEPIISEEQFYRVQEIFTRMGKNPNMNRNSASLLNNLVVCGKCGLGFVHRRKDIMSRGKKYHYRYYSCKTYKHIHELEKCGNKIWRADKLEELIINRVNDYSVASRNVDKGDELDSLNEKLRIEHAKKKRLFDLYINGSYEVSELDSMMSDIDAQINYYESQIEANEELKKNKKIQENLAHLATVDFDSLEFREKQLYLKGLINKIYIDGEQVTIEWL

SEQ ID NO: 1234 - protein, 485 aa, synthetic construct
MTKKVAIYTRVSTANQAEEGFSIDEQIDRLTKYAEAMGWQVSDTYTDAGFSGAKLERPAMQRLINDIEYKAFDTVLVYKLDRLSRSVRDTLHLVKDVFTKNKIDFISLNESIDTSSAMGSLFLTILSAINEFERENIKERMTMGKLGRAKSGKSMMWTKTAFGYYHNRKTGILEIVPLQATIVEQIFADYLSGISLTKLRDKLNESGHIGKDIPWSYRTLRQTLDNPVYCGFIKFKDSLFEGTHKPIIPYETYLKVQKELEERQQQAYERNNNPRPFQAKYMLSGMARCGYCGAPLKIVLGHKRKDGSRTMKYHCANRFPRKTKGVTVYNDNKKCDSGTYDLSNLENTVIDNLIGLQENDDSLLKIINGNSQPTLDTGSFEKQISQIDKKIQKNSDLYLNDFITMDELKDRTDSLQAEKKLLKVKISENKFNDSTDVFELVKTQLGSIPINELSYDNKKKIVNNLVSKVDVTADNVDIIFKFQLA

SEQ ID NO: 1235 - protein, 452 aa, synthetic construct
MKAAIYIRVSTREQVENYSIQAQAEKLTALCRSKDWDVYDIFIDGGYSGSNMNRPALNEMLSKLHEIDAVVVHRLDRLSRSQRDTITLIEEYFLKNNVEFVSLSETLDTSSPFGRAMIGILSVFAQLERETIRDRMVMGKIKRIEAGLPLTTAKGRTFGYDVIDTKLYINEEEAKQLQLIYDIFEEEQSITFLQKRLKKLGFKVRTYNRYNNWLTNDLYCGYVSYKDKVHVKGIHEPIISEEQFYRVQEIFARMGKNPNMNRDSASLLNNLVVCRKCGLGFVHRRKDTTSRGKKYHYRYYSCKTYKHTHELEKCGNKIWRADKLEELIIDRVNNYSFASRNVDKEDELDSLNGKLKIEHAKKKRLFDLYINGNYEVSELDGMMNDIDAQINYYESQIEANEGLRKSKKIQENLADLATVDIDSLEFREKQLYLKSLISKIYIDGEQVTIEWL

SEQ ID NO: 1236 - protein, 452 aa, synthetic construct
MKAAIYIRVSTREQVENYSIQAQTEKLTALCRSKDWDVYDIFIDGGYSGSNMNRPALNEMLSKLHEIDAVVVYRLDRLSRSQRDTITLIEEYFLKNNVEFVSLSETLDTSSPFGRAMIGILSVFAQLERETIRDRMVMGKIKRIEAGLPLTTAKGRTFGYDVIDTKLYINEEEAKQLQLIYDIFEEEQSITSLQKRLKKLGFKVRTYNRYNNWLTNDLYCGYVSYKDKVHVKGIHEPIISEEQFYRVQEIFTRMGKNPNMNRDSASLLNNLVVCSKCGRGFVHRRKDAKSRDKKYHYRYYSCKTYKHIHELEKCGNKIWRADKLEELIINRVNNYSLAGRNVDKEDELDSLNEKLKIEHAKKKRLFDLYINGSYEVSELDSMMKDIGAQINYYESQIEANEELKKNKKIQENLADLASVDFDSLEFREKQLYLKSLINKIYIDGEQVTIEWL

SEQ ID NO: 1237 - protein, 469 aa, synthetic construct
MSYTTPVRAAVYLRISEDRSGEQLGVARQREDCLKLCGQRKWVPVEYLDNDVSASTGKRRPAYEQMLADITAGKIAAVVAWDLDRLHRRPIELEAFMSLADEKRLALATVAGDVDLATPQGRLVARLKGSVAAHETEHKKARQRRAARQKAERGHPNWSKAFGYLPGPNGPEPDPRTAPLVKQAYADILAGASLGDVCRQWNDAGAFTITGRPWTTTALSKFLRKPRNAGLRAYKGARYGPVDRDAIVGKAQWSPLVDEATFWAAQAVLDAPGRAPGRKSVRRHLLTGLAGCGKCGNHLAGSYRTDGRVVYVCKACHGVAILADNIEPTLYHIVAERLAMPDAVDLLRREIHDAAEAETVRLELETLYGELDRLAVERAEGLLTARQVKISTDIVNAKITKLQACQLDQERLRVFDGIPLGTPQVAGMIAELSPDRFRAVLDVLAEVVVQPVGKGGRIFNPERVQVNWR

SEQ ID NO: 1238 - protein, 469 aa, synthetic construct
MSYTTPVRAAVYLRISEDRSGEQLGVARQREDCLKLCDQRKWVPVEYLDNDVSASTGRRRPAYEQMLADITAGKIAAVVAWDLDRLHRRPIELEAFMSLADEKRLALATVAGDVDLATPQGRLVARLKGCVAAHETEHKKARQRRAARQKAERGHPNWSKAFGYLPGPNGPEPDPRTAPLVKQAYADILAGASLGDVCRQWNDTGAFTITGRPWTTTTLSKFLRKPRNAGLRAYKGARYGPVDRDAIVGKAQWSPLVDEATFWAAQAVLDAPGRAPGRKSVRRHLLTGLAGCGKCGNHLAGSYRTKGQVVYVCKACHGVAILADNIEPILYHIVAERLAKPDAVDLLRCEIHDAAEAETIRLELGALYGELDRLAVERAEGLLTARQVKISTDIVNAKITRLQARQLDQERLRVFDGIPLGTPQVAGMIAELSPDRFRAVLDVLAEVVVQPVGKSGRIFNPERVQVNWR

SEQ ID NO: 1239 - protein, 452 aa, synthetic construct
MKAAIYIRVSTREQVENYSIQAQTEKLTALCRSKDWDVYDIFIDGGYSGSNMNRPALNEMLSKLHEIDAVVVYRLDRLSRSQRDTITLIEEYFLKNNVEFVSLSETLDTSSPFGRAMIGILSVFAQLERETIRDRMVMGKIKRIEAGLPLTTAKGRTFGYDVIDTKLYVNEEEAKQLQLIYDIFEEEQSITFLQKRLKKLGFKVRTYNRYNNWLTNDLYCGYVSYKDKVHVKGIHEPIISEEQFYRVQGIFTRMGKNPNMNRDSASLLSNLVVCSKCGLGFVHRRKDTTSRGKKYHYRYYSCKTYKHTHELEKCGNKIWRADKLEELIINRVNNYSFASRNVGKEDELDSLNEKLKIEHAKKKRLFDLYINGSYEVSELDSTMNDIDAQINYYESQIEANGELKKNKKVQENLANLATVDYDSLEFREKQLYLRSLINKIYVDGDQVTIEWL

SEQ ID NO: 1240 - protein, 452 aa, synthetic construct
MKAAIYIRVSTREQVENYSIQAQTEKLTALCRSKDWDVYDIFIDGGYSGSNMNRPALNEMLSKLHEIDAVVVYRLDRLSRSQRDTITLIEEYFLKNNVEFVSLSETLDTSSPFGRAMIGILSVFAQLERETIRDRMVMGKIKRIEAGLPLTTAKGRTFGYDVIDTKLYINEEEAKQLRLIYDIFEEEQSITFLQKRLKKLGFKVRTYNRYNNWLTNDLYCGYVSYKDKVHVKGIHEPIISEEQFYRVQEIFTRMGKNPNMNRDSASLLNNLVVCGKCGLSFVHRRKDAMSRDKKYHYRYYSCKTYKHIHELEKCGNKIWRADKLEELIINRVNNYSVAGRNVDKEDELDSLYEKLKIEHAKRKRLFDLYLNGSYEASELDSMMNDIDAQINYYESQIEANEELKKSKKIQENLAYLATVDFDSLEFREKQLYLKSLINKIYIDGEQVTIEWL

SEQ ID NO: 1241 - protein, 469 aa, synthetic construct
MSYTTPVRAAVYLRISEDRSGEQLGVARQREDCLKLCGQRKWVPVEYLDNDVSASTGKRRPAYEQMLADITAGKIAAVVAWDLDRLHRRPIELEAFMSLADEKRLALVTVAGDVDLATPQGRLVARLKGSVAAHETEHKKARQRRAARQKAERGHPNWSKAFGYLPGPNGPEPDPRTAPLVKQAYADILAGASLGDVCRLWNDAGAFTITGRPWTTTTLSKFLRKPRNAGLRAYKGACYGPVDRDAIVGKAQWSPLVDEATFWAAQAVLDAPGRAPGRKSVRRHLLTGLAGCGKCGNHLAGSHRADGQVVYVCKACHGVAILADNIEPMLYHIVAGRLAMPDAVGLLRREIHDAAEAETVRLELETLYGELDRLAVERAEGLLTARQVKISTDIVSAKITKLQARQLDQERLRVFEGIPLGTPQVAGTIAELSPDRFRAVLDVLAEVVVLPVGKGGRIFNPERVQVNWR

SEQ ID NO: 1242 - protein, 452 aa, synthetic construct
MKAAIYIRVSTREQVENYSIQAQTEKLTALCRSKDWDVYDIFIDGGYSGSNMNRPALNEMLSKLHEIDAVVVYRLDRLSRSQRDTITLIEEYFLKNNVEFVSLSETLDTSSPFGRAMIGILSVFAQLERETIRDRMVMGKIKRIEAGLPLTTAKGRTFGYDVIDTKLYINEEEAKQLQLIYDIFEEEQSITSLQKRLKKLGFKVRTYSRYSNWLTNDLYCGYVSYKDKVHVKGIHEPIISEEQFYRVQDIFTRMGKNPNMNRDSASLLNSLVVCSKCGLGFVHRRKDTTSRGKKYHYRYYSCKTYKHTHELEKCGNKIWRADKLEELIINRVNNYNFASRNVDKEDELDSLNEKLKAERAKKKRLFDLYINGSYEVSELDSMMNDIDAQINYYESQIEANEELKKDKKIQESLANLATVDYDSLEFREKQLYLKGLINKIYIDGEQVTIEWL

SEQ ID NO: 1243 - protein, 452 aa, synthetic construct
MKAAIYIRVSTREQVENYSIQAQTEKLTALCRSKDWDVYDIFIDGGYSGSNMNRPALNEMLSKLHEIDAVVVYRLDRLSRSQRDTITLIEEHFLKNNVEFVSLSESLDTSSPFGRAMIGILSVFAQLERETIRDRMVMGKIKRIEAGLPLTTAKGRTFGYDVIDTKLYINEEEAKQLQLIYDIFEEEQSITFLQKRLKGLGFKVHTYNRYSNWLTNDLYCGYVSYKDKVHVKGIHEPIISEEQFYRVQEIFARMGKNPNMNRDSASLLNNLVVCSKCGLGFVHRRKDTTSRGKKYHYRYYSCKTYKHTHELEKCGNKIWRADKLEELVINCVNNYSFASRNVDKEDELDSLNEKLKIEHAKRKRLFDLYINGSYEVSELDSMMNDIDAQINYYESQIEANEELKKNKKIQENLANLATVDYDSLEFREKQLYLKSLINKIYIDGEQVTIEWL

SEQ ID NO: 1244 - protein, 469 aa, synthetic construct
MSYTTPVRAAVYLRISEDRSGEQLGVARQREDCLKLCGQRKWVPVEYLDNDVSASTGKRRPAYEQMLADITAGKIAAVVAWDLDRLHRRPIELEAFMSLADEKRLALATVAGDVDLSTPQGRLVARLKGSVAAHETEHKKARQRRAARQKAERGLPNWSKAFGYLPGPNGPEPDPRTAPLVKQAYADILAGASLGDVCRQWNDAGAFTITGRPWTTTTLSKFLRKPRNAGLRAYKGARYGPVDRDAIVGKAQWSPLVDEATFWAAQAVLDAPGRAPGRKSVRRHLLTGLAGCGKCGNRLAGSYRTDGRVVYVCKACHGVAILADNIEPILYHIVAERLAMPDAVDLLRREIHDAAEAETIRLELETLYGELDRLAVERAEGLLTARQVKISTDVVNAKIAKLRARQQDQERLRVLDGIPLGTPQVAGMIAELSPDRFRAVLDVLAEVVVQPVGKSGRISNPERVQVNWR

SEQ ID NO: 1245 - protein, 485 aa, synthetic construct
MTKKVAIYTRVSTTSQAEEGFSIDEQIDRLTKYAEAMGWQVSDTYTDAGLSGAKLERPAMQRLINDIENKAFDTVLVYKLDRLSRSVRDTLYLVKDVFTKNKIDFISLNESIDTSSAMGSLFLTILSAINEFERENIKERMTMGKLGRAKSGKSMMWAKTAFGYYHNRKTGILEIVPLQATIVEQIFTDYLSGISLTKLRDKLNESGHIGKDIPWSYRTLRQTLDNPVYCGYIKFKDSLFEGMHKPIIPYETYLKVQRELEERQQQTYERNNNPRPFQAKYMLSGMARCGYCGAPLRIVLGHKRKDGSRTMKYHCANRFPRKTKGITVYNDNKKCDSGTYDLSDLENTVIDNLIGFQENNDSLLKIINGNNQPILDTSSFKEQISQIDKKIQKNSDLYLNDFITMDELKDRTDSLQAEKKLLKAKVSENKFNDSTDVFELVKTQLGSIPINELSYDNKKKIVNNLVSKVDVTADNVDIVFKFQLT

SEQ ID NO: 1246 - protein, 469 aa, synthetic construct
MSYTTPVRAAVYLRISEDRSGEQLGVARQREDCLKLCDQRKWEPVEYLDNDVSASTGKRRPAYEQMLADIIAGKIAAVVAWDLDRLHRRPIELEAFMSLADEKRLALATVAGDVDLATPQGRLVARLKGSVAAHETEHKKARQRRAARQKAERGHPNWSKAFGYLPGPNGPEPDPRTAPLVKQAYADILAGASLGDVCRQWNDAGAFTITGRPWITTTLSKFLRKPRNAGLRAYKGARYGPVDRDAIVGKARWSPLVDEATFWAAQAVLDAPGRAPGRKSVRRHLLTGLAGCGKCGNHLAGSYRTDGRVVYVCKACHGVAILADNIVPILYHIVAERLAMPDAVDLLRREIHDAAEAETTRLGLETLYGELDRLAVERAEGLLTARQVKISTDIVNVKITKLQARQLDQERLRVFDGIPLGTPQVASMIAELSPDRFRAVLDVLAEVVVQPVGKSGRIFNPERVQVNWR

SEQ ID NO: 1247 - protein, 485 aa, synthetic construct
MTKKVAIYTRVSTTNQAEEGFSIDEQIDRLTKYAEAMGWQVSDTYTDAGSSGAKLERPAMQRLINDIENRAFDTVLVYKLDRLSRSVRDTLYLVKDVFTKNKIDLISLNESIDTSSAMGSLFLTILSAINEFERENIKERMTMGKLGRAKSGKSMMWTKTAFGYYHNRKTGILEIVPPQATIVEQIFTDYLSGTSLTKLRDKLNENGHIGKDIPWSYRTLRQTLDNPVYCGYIKFKGSLFEGMHKPIIPYETYLKVQKELEERQRQTYERNNNPRPFQAKYMLSGMARCGYCGAPLKIVLGHKRKDGSRTMKYHCANRFPRKTKGVTVYNNNKKCDSGTYDLSNLENTVIDNLIGFQENNDSLLKIINGNNQPILDTSSFKKQISRIDKKIQKNSDLYLNDFITMDELRDRTDSLQAEKKLLKAKIGENKSNDSTDVFELVKTQLGSIPINELSYDNKKKIVNNLVSKVDVTADNVDIIFKFQLA

SEQ ID NO: 1248 - protein, 469 aa, synthetic construct
MSYTTPVRAAVYLRISEDRSGEQLGVARQREDCLKLCGQRKWVPVEYLDNDVSASTGKRRPAYEQMLADITAGKIAAVVAWDLDRLHRRPVELEAFMSLADEKRLALATVAGDVDLATPQGRLVARLKGSVAAHETEHKKARQRRAARQKAERGHPNWSKAFGYLPGPNGPEPDPRTAPLVKQAYADILAGASLGDMCRQWNDAGAFTITGRPWTTTTLSKFLRKPRNAGLRAYKGARYGPVDRDAIVGKAQWSPLVDEATFWAAQAVLDAPGRAPGRKSVRRHLLTGLAGCGKCGNHLAGSYRTDGRVAYVCKACHGVSILADNIEPILYRIVAERLAMPDAVDLLRREIHDAAEAETIRLELETLYGELDRLAVERAEGLLTARQVKISTDIVNAKITELQARQLDQERLRVLDGIPLGTPQVAGTIAELSPDRFRAVLDALAEVVVQPVGKGGRISNPERVQVNWR

SEQ ID NO: 1249 - protein, 485 aa, synthetic construct
MTKKVAIYTRVSTTNQAEEGFSIDEQTDRLTKYAEAMGWQVSDTYTDAGFSGAKLERPAMQRLINDIENKAFDTVLVYKLDRLSRSVRDTLYLVKDVFTKNKIDFISLNECIDTSSAMGSLFLTILSAINEFERENIKERMAMGKLGRAKSGKSMMWTKTAFGYHHNRKTGILEIVPLQATIVEQIFTDYLSGISLTKLRDKLNEGGHIGKDIPWSYRTLRQTLDNPVYCGYIKFKGSLFEGVHKPIIPYETYLKVQKELEERQQQTYERNNNPRPFQAKYMLSGKARCGYCGAPLRIVLGHKRKDGSRTMKYHCANRFPRKTKGVTVYNDNKKCDSGTYDLSKLENTVIDTLIGLQENNDSLLKIINGSNQPILDTSNFKKQISQIDKKIQKNSDLYLNDFITMDELKDRTNSLQAEKKLLEAKISEDKFNDSTDVFELVKTQLGSIPINELSYDNKKKIVNNLVSRVDVTADNVDIIFKFQLA

SEQ ID NO: 1250 - protein, 485 aa, synthetic construct
MTKKVAIYTRVSTTNQAEEGFSIDEQIDRLTRYAGAMGWQVSDTYTDAGVSGAKLERPAMQRLINDIENKAFDTVLVYKLDRLSRSVRDTLYLVKDVFTKNKIDFISLNESIDTSSAMGSLFLTILSAINEFERENIKERMTMGKLGRAKSGKSMMWTKTAFGYHHNRKTGILEIAPLQATIVEQIFTDYLSGISLTKLRDKLNESGHIGKDIPWSYRTLRQTLDNPVYCGYIKFKDSLFEGMHKPIIPYETYLKVQKELEERQQQTYERNNNPRPFQAKYMLSGMARCGYCGAPLRIVLGHKRKDGSRTMKYHCANRFPRKTKGVTVYNDNKKCDSGTYDLSSLENTVIDNLIGFQENNDSLLKIINGNDQPILDTSSFENQISQIDKKIQKNSDLYLNDFITMDELKDRTDSLQAEKKLLKAKISENKSNVSTDVFELVKTQLGSTPINELSYDSKKKIVNNLVSKVDVTADNVDIIFKFQLA

SEQ ID NO: 1251 - protein, 452 aa, synthetic construct
MKAAIYIRVSTREQVENYSIQAQTEKLTALCRSKDWDVYDIFIDGGYSGSNMNRPALNEMLSKLHEIDAVVVYRLDRLSRSQRDTITLIEEYFLKNNVEFVSLSETLDTSSPFGRAMIGILSVFAQLERETIRDRMVMGKIKRIEAGLPLTTAKGRTFGYDVIDTKLYINEEEAKQLQLIYDIFEEEQSITLLQKRLKKLGFKVRSYSRYNNWLTNDLYCGYVSYKDKVHVKGIHEPIISEEQFYRVQEIFTRMGKNPNMNRASASLLNNLVVCSKCGLGFVHRRKDAMSRDKKYHYRYYSCKTYKHIHELEKCGNKIWRADKLEELIINRVNNYSIASRNAVKEDELDSLSEKLKTEHAKKKRLFELYVNGSYEVSELDSMMNDIDAQINYYESQIEANKELKKDKKIQENLADLATVDFDSLEFREKQLYLKSLINKIYIDGEQVTIEWL

SEQ ID NO: 1252 - protein, 485 aa, synthetic construct
MTKKVAIYTRVSTTNQAEEGFSIDEQVDRLAKYAEAMGWQVSDTYTDAGFSGAKLERPAMRRLINDIENKAFDSVLVYKLDRLSRSVRDTLYLVKDVFTKNKIDFISLNESIDTSSAMGSLFLTILSAINEFERENIKERMTMGKLGRAKSGKSMMWTKTAFGYYHNRKTGILEIVPLQATIVEQIFTDYLSGISLTKLRDKLNESGHIGKDIPWSYRTLRQTLDNPVYCGYIKFKDSLFEGLHKPIIPYETYLKVQKELEERQQQTYERNNNPRPFQAKYMLSGMARCGYCGAPLKIVLGHKRKDGSRTMKYHCANRFPRKTKGITVYNDNKKCDSGTYELSNLENTVIDNLIGFQENNDSLLKIINGNNQPILDTSSFKKQISQIDEKIQKNSNLYLNDFITMDELKDRTDSLQAEKKLLKAKISENKFNDSTDVFELVKTQLGSIPINELSYDDKKKIVNNLVSKVDVTADNVDIIFKFQLA

SEQ ID NO: 1253 - protein, 452 aa, synthetic construct
MKAAIYIRVSTREQVENYSIQAQTEKLTALCRSKDWDVYDIFIDGGYSGSNMNRPALNEMLSKLHEIDAVVVYRLDRLSRSQRDTITLIEEYFLKNNVEFVSLSETLDTSSPFGRAMIGILSVFAQLERETIRDRMVMGKIKRIEAGLPLTTAKGRTFGYDVIDTKLYINEEEAKQLQLIYDIFEEEQSITFLQKRLKKLGFKVRTYNRYNNWLTNDLYCGYVSYKDKVHVKGIHEPIISEEQFYRVQEIFARMGKNPNMNRDSASLLNGLVVCSKCGLGFVHRRKDAMSRDKKYHYRYYSCKTYKHIHELEKCGNKTWRADKLEELIINRVNNYSLASRNVGKEDELDSLNEKLKIEHAKKKRLFDLYINGSYEVSELDSMMNDIDAQITYYESQIEANEDLKKNKKIQENLADLATVDFDSLEFREKQLYLKSLINKIYIDGEQVTIEWL

SEQ ID NO: 1254 - protein, 485 aa, synthetic construct
MTKKVAIYTRVSTTNQAEEGFSIDEQIDRLTKYAEAMGWQVSDTYTDAGFSGAKLVRPAMQRLINDIENKAFDTVLVYKLDRLSRSVRDTLHLVKDVFTKNKIDFISLNESIDTSSAMGSLFLTILSAINEFERENIKERMTMGKLGRAKSGKSMMWTKTAFGYYHNRKTGILEIVPLQATIVEQIFTDYLSGISLTKLRDKLNESGHIGKDIPWSYRTLRQTLSNPVYCGYIKFKDSLFEGMHKPIIPYETYLKVQKELGERQQQTYERNNNPRPFQAKYMLSGMARCGYCGAPLRIVLGHKRKDGSRTMKYHCANRFPRKTKGVTVYNDNKKCDSGTYDLSNLENTVIDNLIGLQENSDSLLKIINGNNQPILDTSSFEKQISQIDKKIQKNSDLYLNDFITMDELKDRTDSLQAEKKLLKAKISESKCNDSTDVFELVKTQLGSVPINELSYDNKKKIVNNLVSKVDVTADSVDIIFKFQLA

SEQ ID NO: 1255 - protein, 469 aa, synthetic construct
MNYTTPVRAAVYLRISEDRSGEQLGVARQREDCLKLCDQRKWVPVEYLDNDVSASTGKRRPAYEQMLADITAGKIAAVVAWDLDRLHRRPIELEAFMSLADEKRLALATVAGDVDLATPQGRLVARLKGSVAAHETEHKKARQRRAARQKAERGHPNWSKAFGYLPGPNGPEPDPRTAPLVKQAYADILAGASLGDVCRQWNDAGAFTITGRPWTTTTLSKFLRKPRNAGLRAYKGARYGPVDRDAIVGKAQWGPLVDEATFWAAQAVLDAPGRAPGRKSVRRHLLTGLAGCGKCGNHLAGSYRTDGRVVYVCKTCHGVAILADNIEPILYHTVAERLAMPDAVDLLRSEVHDAAEAETIRLELETLYGELDRLAVERAEGLLTARQVKISTDIVNAKITKLQARQLDQERLRVFDGIPLGTPQVAGMIAELSPDRFRAVLDVLAEVVVQPVGKSSRIFNPERVQVNWR

SEQ ID NO: 1256 - protein, 469 aa, synthetic construct
MSYTTPVRAAVYLRISEDRSGEQLGVARQREDCLKLCGQRKWVPVEYLDNDVSASTGKRRPAYEQMLADITAGKIAAVVAWDLDRLHRRPIELEAFMSLADEKRLALATVAGDVDLATPQGRLVARLKGVVAAHETEHKKARQRRAARQKAERGLPNWSKAFGYLPGPNGPEPDPRTAPLVKQAYADILAGASLGDVCRRWNDVGAFTITGRPWTTTTLSKFLRKPRNAGLRAYKGARYGPVDRDAIVGKAQWSPLVDEATFWAAQAVLDAPGRAPGRKSVRRHLLTGLAGCGKCGNHLAGSYRTDGQVVYVCKACHGVSILADNIEPILYHIVAERLAMPDAVDLLRHEIHDAAEAETIRLELETLYGELDRLAVERAEGLLTARQVKISTDIVNAKITKLQARQLDQERLRVFDGIPLGTPQVAGMIAELSPDRFRAVLDVLAEVIVQPVGKSGRIFNPERVQVNWR

SEQ ID NO: 1257 - protein, 452 aa, synthetic construct
MKAAIYIRVSTQEQVENYSIQAQTEKLTALCRSKDWDVYDIFIDGGYSGSNMNRPALNEMLSKLHEIDAVVVYRLDRLSRSQRDTTTLIEEYFLKNNVEFVSLSETLDTSSPFGRAMIGILSVFAQLERETIRDRMVMGKIKRIEAGLPLTTAKGRTFGYDVIDTKLYINEEEAKQLQLIYDIFEEEQSITFLQKRLKKLGFKVRTYNRYNSWLTNDLYCGYVSYKDKVHVKGIHEPIISEEQFYRVQEIFTRMGKNPNMNRDSASLLNSLVVCSRCGLSFVHRSKDTMSRGKKYHYRYYSCKTYKHTHELEKCGNKTWRADKLEELIINRVNNYSFASRNVGKEDELDSLYEKLKIEHAKKKRLFDLYINGSYEVSELDSMMNDIDAQINYYESRIEANEELKRNKKIQEDLADLATVDFDSLEFREKQLYLKSLINKIYIDGEQVTIEWL

SEQ ID NO: 1258 - protein, 485 aa, synthetic construct
MTKKVAIYTRVSTTNQAEEGFSIDEQVDRLTKYAEAMGWRVSDTYTDAGFSGAKLERPAMQRLINDIENKAFDTVLVYKLDRLSRSVRDTLHLVKDVFTKNKIDFISLSESIDTSSAMGSLFLTILSAINEFERENIKERMTMGKLGRAKSGKSMMWTKTAFGYYHNRKTGILEIVPLQATIVEQIFTDYLSGISLTKLRDKLNESGHIGKDIPWSYRTLRQTLDNPVYCGYIKFKDSLFEGMHKPIIPYETYLKVQKELEERQQQAYERNNNPRPFQAKYMLSGVARCGYCGAPLKIVLGRKRKDGSRTMKYHCANRFPRKTKGVTVYNDNKKCDSGTYDLSNLETTVIDNLIGFQENNDSLLKIINGINQPVLDTSSFKKQISQIDKKIQKYSDLYLNDFITMDELKDRTDSLQAEKKLLKAKISENKFNDSTGVFELVRTLLGSIPINELSYDNKKKIVNNLVSKVDVTADNVDIIFKFQLA

SEQ ID NO: 1259 - protein, 485 aa, synthetic construct
MTRKVAIYTRVSTTNQAEEGFSIDEQVDRLTKYAEAMGWQVSDTYTDAGFSGAKLERPAMQRLINDIEDKAFDTVLVYKLDRLSRSVRDTLYLVKDVFTKNKIDFISLNESIDTSSAMGSLFLTILSAINEFERENIKERMTMGKLGRAKSGKSMMWTKTAFGYYHNRKTGILEIVPLQATIVEQIFTDYLSGISLTKLRDKLNESGHIGKDIPWSYRTLRQTLDNPVYCGYIKFKDSLFEGMHKPIIPYETYLKVQKELEERQQQTYERNNNPRPFQAKYMLSGMARCGYCGAPLRIVLGRRRKDGSRAMKYHCANRFPRKTKGVTVYNDNKKCDSGTYDLSILENTVIDSLIGFQENNDSLLKIINGNNQPILDASSFKKQISQIDKKIQKNSDLYLNDFITMDELKDRTDSLQAEKKLLEAKISENKFNDSTGVFELVKTQLGSIPINELGYDDKKKIVNNLVSKVDVTADNVGIIFKFQLA

SEQ ID NO: 1260 - protein, 469 aa, synthetic construct
MSYTTPVRAAVYLRISEDRSGEQLGVARQREDCLKLCSQRKWVPVEYLDNDVSASTGKRRPAYEQMLADITAGKIAAVVAWDLDRLHRRPMELEAFMSLADEKHLALATVAGDVDLATPQGRLVARLKGSVAAHETEHKKARQRRAARQKAERGYPNWSKAFGYLPGLNGPEPDPRTAPLVKQAYADILAGASLGDVCRQWNDAGAFTITGRPWTTTTLSKFLRKPRNAGLRAYRGARYGPVDRDAIVGKAQWSPLVDEATFWAAQAVLDAPGRAPGRKSVRRHLLTGLAGCGKCGNHLAGSHRTDGRVVYVCKACHGVAILADNIEPILYHIVAERLAMPDAVDLLRREIHDAAEAEAIRLELKTLYGELDRLAVERAEGLLTARQVKISTDIVNAKITKLQAHQLDQERLRVFDGIPLGTPQVAGMIAELSPDRFRAVLDVLAEVVVQPVGKGGRIFNRERVQVNWR

SEQ ID NO: 1261 - protein, 452 aa, synthetic construct
MKAAIYIRVSTQEQVGNYSIQAQTEKLTALCRSKGWDVYDIFIDGGYSGSNMNRPALNEMLSKLHEIDAVVVYRLDRLSRSQRDTTTLIEEYFLKNNVEFVSLSETLDTSSPFGRAMIGILSVFAQLERETIRDRMVMGKIKRIEAGLPLTTAKGRTFGYDVIDTKLYINEEEAKQLQLIYDIFEEEQSITSLQKRLKKLGFKVRTYNRYNNWLTNDLYCGYVSYKDKVHVKGIHEPIISEEQFYRVQEIFTRMGKNPNMNRDRASLLNNLVVCSKCGLGFVHRSKDTMSRGKKYHYRYYSCKTYKHTHELEKCGNKTWRADKLEELIINRVNNYSFASRNVDKEDELDSLNEKLKIEHAKKKRLFDLYINGSYEVSELDSMMNDIDAQINHYESQIGANEKLKKTKKIQENLVDLATVDFDSLEFREKQLYLKSLINKIYIDGEQVTIEWL

SEQ ID NO: 1262 - protein, 485 aa, synthetic construct
MAKKVAIYTRVSTTSQAEEGFSIDEQIDRLAKYAEAMGWQVSDTYTDAGFSGAKLERPAMQRLINDVGSKAFDTVLVYKLDRLSRSVRDTLYLVKDVFTRNKIDFISLNESINTSSAMGSLFLTILSAINEFERENIKERMTMGKLGRAKSGKSMMWTKTAFGYYHNRKTGILEIVPLQATIVEQIFTDYLSGISLTKLRDKLNESGHIGKDIPWSYRTLRQTLDNPVYCGYIKFKDSLFEGMHKPIIPYETYLKVQKELEERQQQTYERNNNPRPFQAKYMLSGMARCGYCGAPLKIVLGHKRKDGSRTMKYHCANRFPRKTKGVTVYNDNKKCDSGTYDLSNLENTVIDNLIGFQENNGSLLRIINGNNQPILDTSSFKEQISQIDKKIQKNSDLYLNDFITLDELKARTDSLQAEKKLLKAKISENKFNDSTDVFELVKTQLGSIPINELSYDNKKKIVNNLVSKVDVTADSVDIIFKFQLA

SEQ ID NO: 1263 - protein, 485 aa, synthetic construct
MTKKVAIYTRVSTTNQAEEGFSIDEQIDRLTKYAEAMGWQVSDTYTDAGFSGAKLERPAMQRLINDIENKAFDTVLVYKLDRLSRSVRDTLYLVKDVFTKNKIDFISLNECIDTSSVMGSLFLTILSAINEFERENIKERMTMGKLGRAKSGKSMMWTKTAFGYYHNRKTGILEIVPLQATIVEQIFTDYLCGISLTKLRDKLNESGHIGKDIPWSYRTLRQTLDNPVYCGYIKFKGSLFEGMHKPIIPYETYLKVQKELEERQQQTYERNNNPRPFQAKYMLSGMARCGYCGAPLRIVLGRRRKDGSRTMKYHCANRFPRKTKGITVYNDNKKCDSGAYDLRNLENTVIDNLVGLQENDDSLLKIINGNNQPILDTCSFKEQISQIDKKIRKNSDLYLNDFITMDELKDRTDSLQAEKKLLKAKISENKFDDSTDVFELVKTQLGSIPINELSYDNKKKIVNNLVSKVDVTADNVDIIFKFQLA

SEQ ID NO: 1264 - protein, 452 aa, synthetic construct
MKAAIYIRVSTQEQVENYSIQAQTEKLTALCRSKDWDVYDIFIDGGYSGSNMNRPALNEMLSKLHEIDAVVVYRLDRLSRSQRDTTTLIEEYFLKNNVEFVSLSETLDTSSPFGRAMIGILSVFAQLERETIRDRMVMGKIKRIEAGLPLTTAKGRTFGYDVIDTKLYINEEEAKQLQLIYDIFEEEQSITSLQKRLKKLGFKVRTYSRYNNWLTNDLYCGYVSYKDKVHVKGIHEPIISEEQFYRVQEIFTRMGKNPNMNRDSASLLNNLVVCSKCGLGFVHRSKDTMCRGKKYHYRYYSCKTYKHTHELEKCGNKTWRADKLEELIINRVSNYSFAGRNADEEDELDSLNEKLKIEHAKKKRLFDLYISGGYEVSELDSMMNDIDAQINYYESQIEASEELKKNKKIQENLADLATVDFDGLEFREKQLYLKSLINKIYIDGEQVTIEWL

SEQ ID NO: 1265 - protein, 469 aa, synthetic construct
MSYTTPVRAAVYLRISEDRSGEQLGVARQREDCLKLCDQRKWVPVEYLDNDVSASTGKRRPAYEQMLADITAGKIAAVVAWDLDRLHRRPIELEAFMSLADEKRLALATVAGDVDLATPQGRLVARLKGSVAAHETEHKKARQRRAARQKAERGHPNWSKAFGYLPGPNGPEPDPRTAPLVKQAYADILAGASLGDVCRRWNDAGAFTITGRPWTATTLSKFLRKPRNAGLRAYKGARYGPVDRDAIVGKAQWSPLVDEATFWAAQAALDAPGRAPGRKSVRRHLLTGLAGCGKCGNRLAGSYRTDGRVVYVCKACHGVAILADNIEPILYNIVAERLAMPDAVDLLRREIHDAAEAETIRLELETLYGELDRLAVERAEGLLTARQVKISTDIVNAKITKLQARQLDQERLRVLDGIPLGTPQVAGMIAELSPNRFRAVLDVLAEVVVQPVGESGRIFNPERVQVNWR

SEQ ID NO: 1266 - protein, 485 aa, synthetic construct
MTKKVAIYTRVSTTNQAEEGFSIDEQIDRLTKYAEAMGWQVSDTYTDAGLSGAKLERPAMQRLINDIENRAFDTVLVYKLDRLSRSVRDTLYLVKDVFTKNKIDFISLNESIDTSSAMGSLFLTILSAINEFERENIKERMTMGKLGRAKSGKSMMWTKTAFGYYHNRKTGILEIVPLQAAIVEQIFTDYLSGTSLTKLRDKLNESGHIGKDIPWSYRTLRQTLDNPVYCGYIKFKDSLFEGMHEPIIPYETYLKVQKELEERQQQTYERNNNPRPFQAKYMLSGMARCGYCGAPLRIVLGHKRKDGSRTMKYHCANRFPRKTKGVTVYNDNKKCDSGAYDLSNLENTVIDTLIGFQENDDGLLKIINGSNRPILDTSSFKKQISQIDKKIQKNSDLYLNDFITMDELKDRTDSLQAERELLKAKISENKFNDNTDVFEQVKTQLGSIPINELSYDSKKKIVNNLVSKVDVTADNVDIIFKFQLA

SEQ ID NO: 1267 - protein, 452 aa, synthetic construct
MKAAIYIRVSTREQVENYSIQAQTEKLTALCRSKGWDVYDIFIDGGYSGSNMNRPALNEMLSKLHEIDAVVVYRLDRLSRSQRDTITLIEEYFLKNNVEFVSLSETLDTSSPFGRAMIGILSVFAQLERETIRDRMVMGKIKRVEAGLPLTTAKGRTFGYDVVDTKLYINEEEAKQLQLIYDIFEEEQSITFLQKRLKELGFKVRTYNRYNNWLTNDLYCGYVSYKDKVHVKGIHEPIISEEQFYRVQEIFARMGKNPNMNRDSASLLNNLVVCSKCGLGFVHRRKDAMSRDKKYHYRYYSCKTYKHIHELEKCGNKIWRADKLEELIIDRVNNYSLASRNVDKEGELDSLNEKLKIEHAKKKRLFDLYLNGSYEVSELDSMMNDIDAQISYYESQIEANEALIKNKRIQESLADLATVDFDSLEFREKQLYLKSLINKIYIDGEQVTIEWL

SEQ ID NO: 1268 - protein, 485 aa, synthetic construct
MTKKVAIYTRVSTANQAEDGFSIDEQIDRLTKYAEAMGWQVSDTYTDAGFSGAKLERPAMQRLVNDIENKAFDTVLVYKLDRLSRSVRDTLYLVKDVFTKNKIDFISLNECIDTSSAMGSLFLTILSAINEFERENIKERMTMGKLGRARSGKSMMWTKTAFGYHHNRKTGILEIVPLQATIVEQIFTDYLSGISLTKLRDKLNESGHIGKDIPWSYRTLRQTLDNPVYCGYIKFKDSLFEGMHKPIIPHETYLRVQKELEERQQQTYERNNNPRPFQAKYMLSGMARCGYCGAPLRIVLGHKRKDGSRTMKYRCANRFPRKTKGVTVYNDNKKCDSGTYDLRNLENTVIDNLIGFQENNDSLLKIINGNNQPVLDTSSFKKQISQIDKKIQKNSDLYLNDFITMDELKERTDSLQAEKKLLKAKISENKFNDSTDVFELVRTQLGSIPINELSYDNKKRIVNNLVSKVDVTADNVDIIFKFQLA

SEQ ID NO: 1269 - protein, 469 aa, synthetic construct
MCYTTPVRAAVYLRISEDRSGEQLGVARQREDCLKLCDQRRWVPVEYLDNDVSASTGIRRPAYEQMLADITAGKIAAVVAWDLDRLHRRPIELEAFMSLADEKRLALATVAGDVDLATPQGRLVARLKGSVAAHETEHKKARQRRAARQKAERGLPNWSKAFGYLPGPNGPEPDPRTAPLVKQAYADILAGASLGDVCRQWNDAGALTITGRPWTTTTLSKFLRKPRNAGLRAYKGVRYGPVDRDAIVGKAQWSPLVDEATFWAAQAVLDAPGRAPGRKSVRRHLLTGLAGCGKCGSHLAGSYRTDGRVVYVCKACHGVAILADNIEPILYHIVAERLAMPDAVDLLRREIHDAAEAETIRLELETLYGELDRLAVERAEGLLTARQVKISTDIVNAKITKLQARQLDQERLRVLDGIPLGTPRVAGTIAELSPDRFRAVLDVLAEVVVQPVGKSGRAFNPERVQVNWR

SEQ ID NO: 1270 - protein, 469 aa, synthetic construct
MSYTTPVRAAVYLRISEDRSGEQLGVARQREDCLKLCGQRKWEPVEYLDNDVSASTGKRRPAYEQMLADITAGKIAAVVAWDLDRLHRRPIELEAFMSLADEKRLALATVAGDVDLATPQGRLVARLKGSVAAHETEHKKARQRRAARQKAERGHPNWSKAFGYLPGPSGPEPDPRTAPLVRQAYADILAGASLGDVCRQWNDAGAFTITGRPWTTTTLSKFLRKPRNAGLRAYKGARYGPVDRDAIVGKAQWSPLVDEATFWAAQAVLDAPGRAPGRKSVRRHLLTGLAGCGKCGNHLAGSYRTDGRVVYVCKTCHGVAILADNIEPILYHIVAERLAMPDAVDLLRREIHDAAEAEAIHLELETLYGELDRLAVERAEGLLTARQVKISTDIMNAKITKLQARQLDQERLRVLDGIPLGTPQVAGMIAELSPDRFRAVLDVLAEVVVQPVGKSGRIFNPERVQVNWR

SEQ ID NO: 1271 - protein, 485 aa, synthetic construct
MTKKVAIYTRVSTTNQAEEGFSIDEQIDRLTKYAEAMGWQVCGTYTDAGLSGAKLERPAMQRLINDIENKAFDTVLVYKLDRLSRSVRDTLYLVKDVFTKNKIDFISLNESIDTSSAMGSLFLTILSAINEFERENIKERMTMGKLGRAKSGKSMMWTKTAFGYYHNRKTGILEIVPLQATIVEQIFTDYLSGISLTKLRDKLNESGHIGKDIPWSYRTLRQTLDNPVYCGYIKFKDSLFEGMHKPIIPYETYLKVQKELEDRQQQTYERNNNPRPFQAKYMLSGMARCGYCGAPLRIVLGHKRKDGSRTMKYHCANRFPRKTKGVTVYNDNRKCDSGTYDLSNLENTVINNLIGFQENSDTLLKIINGNNQPILDTSSFKKQISQIDKKIQKNSDLYLNDFITMDELKDRTDSLQAEKKLLKAKISENKFNDSTDVFELVKTQLGSIPINELSYDNKKKIVNNLVSKVDVTADNVDIIFKFQLA

SEQ ID NO: 1272 - protein, 485 aa, synthetic construct
MTKKVAIYTRVSTTNQAEEGFSIDEQIDRLTKYAEAMGWQVSDTYTDAGSSGAKLERPAMQRLINDIENKTFDTVLVYKLDRLSRNVRDTLYLVKDVFTKNKIDFISLNESIDTSSAMGSLFLTILSAINEFERENIKERMTMGKLGRARSGKSMMWTKTAFGYYHNRKTGILEIVPLQATIVEQIFTDYLSGISLTKLRDKLNESGHIGKDIPWSYRTLRQTLDNPVYCGYIKFKDSLFKGMHKPIIPYETYLKVQKELEERQQQTYERNNNPRPFQAKYMLSGMARCGYCGAPLRIVLGHKRKDGSRTMKYHCANRFPRKTKGITVYNDNKECDSGTYDLSNLENTVIDNLIGFQENNDSLLKIITGNNQPVLDTSSLKKQISLIDKKIQKNSDLYLNDFITMDELKDRTDSLQAERRLLKAKISENKSNDSTDVFELVKTQLGSIPINELSYDNKKKIVNSLVSKVDVTADNVDIIFKFQLA

SEQ ID NO: 1273 - protein, 469 aa, synthetic construct
MCYTTPVRAAVYLRISEDRSGEQLGVARQREDCLKLCDQRKWVPVEYLDNDVSASTGKRRPAYEQMLADITAGKIAAVVAWDLDRLHRRPIELEAFMSLADEKRLALATVAGDVDLATPQGRLVARLKGSVAAHETEHKKARQRRAARQKAERGHPNWSKAFGYLPGPSGPEPDPRTAPLVKQAYADILAGASLGDVCRQWNDAGAFTITGRPWTTTTLSKFLRKPRNAGLRAYKGARYGPVDRDAIVGKAQWSPLVDEATFWAAQAVLDAPGRAPGRKSVRRHLLTGLAGCGKCGNHLAGSHRTDGRVVYVCKACHGVSILADSIEPILYRIVAERLAMPDAVDLLRREIHDAAEAETIRLELETLHGELDRLAVERAEGLLTARQVKISTDIVNAKITKLQARQQDQERLRVLDGIPLGTPQVAGMIAELSPDRFRAVLDVLAEVVVQPVGKSGRIFSPERVQVNWR

SEQ ID NO: 1274 - protein, 469 aa, synthetic construct
MCYTTPVRAAVYLRISEDRSGEQLGVARQREDCLELCDKRKWVPVEYLDNDVSASTGKRRPAYEQMLADITAGKIAAVVAWDLDRLHRRPIELEAFMSLADEKRLALATVAGDVDLATPQGRLVARLKGSVAAHETEHKKARQRRAARQKAERGHPNWSKAFGYLPGPNGPEPDPRTAPLVKQAYADILAGASLGDVCRQWNDAGAFTITGRPWTSVTLSKFLRKPRNAGLRAYKGARYGPVDRDAIVGKAQWSPLVDEATFWAAQAVLDAPGRAPGRKSVRRHLLTGLAGCGKCGNHLAGSYRTDGRVVYVCKACHGVAILADNIEPILYHIVAERLAMPDAVDLLRRETHDAAEAEAIRLELETLYGELDRLAVERAEGLLTARQVKISTDIVNAKITKLQARQLDQGRLRVLEGIPLGTPQVAGVIAELSPDRFRAVLDVLAEVVVQPVGKSGRIFNPERVQVNWR

SEQ ID NO: 1275 - protein, 485 aa, synthetic construct
MTKKVAIYTRVSTTNQAEEGFSIDEQIDRLTKYAEAMGWQVSDTYTDAGFSGAKLERPAMQRLVNDIEDKAFDTVLVYKLDRLSRSVRDTLYLVKDVFTKNKIDFISLNECIDTSSAMGSLFLTILSAINEFERETIKERMTMGKLGRAKSGKSMMWTKTAFGYYHNRKTGILEIVPLQATIVEQIFTDYLNGISLTKLRDKLNESGHIGKDIPWSYRTLRQTLDNPVYCGYIKFKDRLFEGMHKPIIPYETYLKVQKELEVRQQQTYERNNNPRPFQAKYMLSGMARCGYCGAPLRIVLGHKRKDGSRTMKYHCANRFPRKTKGVTVYNDNKKCDSGTYDLGDLENTVIDSLIGFQGNNDSLLKIINGNNQPILDTSSFKKQISQIDKKIQKNSDLYLNDFITMDELKDRTDSLLAEKKLLEAKVSENKSNDSTDVFALVKTQLGSIPINELSYDNKKKIVNNLVSKVDVTADNVDIIFKFQLA

SEQ ID NO: 1276 - protein, 469 aa, synthetic construct
MSYTTPVRAAVYLRISEDRSGEQLGVARQREDCLKLCSQRKWVPVEYLDNDVSASTGIRRPAYEQMLADITAGKIAAVVAWDLDRLHRRPIELEAFMSLADEKRLALATVAGDVDLATPQGRLVARLKGCVAAHETEHKKARQRRAARQKAERGYPNWSKAFGYLPGPNGPEPDPRTAPLVKQAYADILAGASLGDVCRQWNGAGAFTITGRPWTTTTLSKFLRKPRNAGLRAYKGARYGPVDRDAIVGKAQWSPLVDEATFWAAQAVLDAPGRAPGRKSVRRHLLTGLAGCGKCGNHLAGSCRIDGRVVYVCKACHGVAILADNIEPFLYHIVAERLAMPDAVDLLRRKIHDAAEAETIRLELETLYGELDRLAVERAEGLLTARQVKISTDIVNAKITKLQARQLDQERLRVLGGIPLGTPQVAGTIAELSPDRFRAVLDVLAEVVVQPAGKSGRIFNPERVQVSWR

SEQ ID NO: 1277 - protein, 469 aa, synthetic construct
MSYTTRVRAAVYLRISEDRSGEQLGVARQREDCLKLCDQRKWEPVEYLDNDVSASTGKRRPAYEQMLADITAGRIAAVVAWDLDRLHRRPIELEAFMSLADEKRLALATVAGDVDLATPQGRLVARLKGSVAAHETEHKKARQRRAARQKAERGHPNWSKAFGYLPGPNGPEPDPRTAPLVKQAYADILAGASLGDVCRRWNDAGAFTITGRPWTATTLSKFLRKPRNAGLRAYKGARYGPVDRDAIVGKARWSPLVDEATFWAAQAVLDAPGRAPGRKSVRRHLLTGLAGCGKCGNHLAGSYRTDGRVVYVCKACHGVAILADNIEPILYHIVAERLAMPDAVDLLRREIHDAAEAGTIRLELETLYGELDRLAVERAEGLLTARQVKISTDIVNAKITKLQARQLDQERLRVFDGIPLGTQQVAGVIAELSPNRFRAVLDVLAEVVVQPVGKSGRIFNPGRVQVNWR

SEQ ID NO: 1278 - protein, 469 aa, synthetic construct
MSYTTPVRAAVYLRISEDRGGEQLGVARQREDCLKLCGQRRWVPVEYLDNDVSASTGKRRPAYEQMLADITAGKIAAVVAWDLDRLHRRPIELEAFMSLADEKRLALATVAGDIDLATPQGRLVARLKASVAAHETEHKKARQRRAARQKAERGHPNWSKAFGYLPGPNGPEPDPRTAPLVKQAYADILAGASLGDVCRQWNDAGAFTITGRLWTTTTLSKFLRKPRNAGLRAYKGARYGPVDRDAIVGKAQWGPLVDEATFWAAQAVLDAPGRAPGRKSVRRHLLTGLAGCGKCGNHLAGSYRTDGQIVYVCKACHGVSILAVNIEPILYQIVAERLAMPDAVDLLRREIHDAAEAETVRLELETLYGELDRLAVERAEGLLTARQVKISTDIVNAKITKLRAHQLDQERLRVFDGIPLGTPQVAGVIAELSPDRFRAVLDVLAEVVVQPVGKGGRIFNPERVQVNWR

SEQ ID NO: 1279 - protein, 485 aa, synthetic construct
MTKKVAIYTRVSTTNQAEEGFSIDEQIDRLTKYAEAMGWQVSDTYTDAGYSGAKLGRPAMQRLINDIENKAFDTVLVYKLDRLSRSVRDTLYLVKDVFTRNKIDFISLSESIDTSSAMGSLFLTILSAINEFERENIKERMTMGKLGRAKSGKSMMWTKTAFGYYHNRKTGILEIVPLQATIVEQIFTDYLSGISLTKLRDKLNESGHIGKDIPWSYRTLRQTLDNPVYCGYIKFKGSLFEGMHKPIIPYETYLKVQKELEERQQQTYERNNNPRPFQAKYMLSGMARCGYCGAPLKIVLGHKRKDGSRTMKYHCANRFPRKTKGVTVYNDNKKCDSGTYDLSNLENTVIDNLIGLQENNDSLLKIINGNNQPILDTSSFKEQISQIDKKIRKNSDLYLNDFITMGELKDRTDSLQAEKKLLEAKISENKFDDSTDVFELVKTQLGSIPINELSYDNKKKIVNNLVSKVDVTADNVDIIFKFQLA

SEQ ID NO: 1280 - protein, 469 aa, synthetic construct
MSYTTPVRAAVYLRISEDRSGEQLGVARQREDCLKLCDQRKWAPVEYLDNDVSASTGKRRPAYEQMLADITAGKIAAVVAWDLDRLHRRPIELEAFMSLADEKRLALATVAGDVDLATPQGRLVARLKGSVAAHETEHKKARQRRAARQKAERGYPNWSKAFGYLPGPNGPEPDPRTAPLVKQAYADILAGASLGDVCRQWNDAGAFTITGRPWTTTTLSKFLRKPRNAGLRAYKGARYGPVDRDAIVGKAQWSPLVDEATFWAAQAVLDAPGRAPGRKSVRRHLLTGLAGCGKCGNHLAGSYRTDGRVVYVCKACHGVAILADNIEPVLYHIVAERLAMPDAVDLLRREIHDAAEAETTRLELETLYGELDRLAVERAEGLLTARQVKISTDIVNAKITKLQVRQLDQERLRVLDGIPLGTPQVASVIAELSPDRFRAVLDVLAEVVVQPVGKSGRVFNPERVQVNWR

SEQ ID NO: 1281 - protein, 469 aa, synthetic construct
MCYTTPVRAAVYLRISEDRSGEQLGVARQREDCLKLCDQHKWVPVEYLDNDVSASTGKRRPAYEQMLADITAGKIAAVVAWDLDRLHRRPIELEAFMSLADEKRLALATVAGDVDLATPQGRLVARLKGSVAAHETEHKKARQRRAARQKAERGHPNWSKAFGYLPGPNGPEPDPRTAPLVKQAYADILAGASLGDVCRQWNDAGAFTITGRPWTTTTLSKFLRKPRNAGLRAYKGARYGPVDRDAIVGKAQWSPLVDEATFWAAQAVLDAPGRAPGRKSVRRHLLTGLAGCGKCGNHLAGSYRTDGRVVYVCKACHGVAILADNIEPILYHIVAERLAMPDAVNLLRREIHDAAEAETIRLELETLYGELDRLAVERAEGLLTARQVKISTDIVNAKITKLQARQLDQERLRVFDGIPLGTPQVAGVIAELSPDRFRAVLDVLAEVVVQPVGKGSRVFNPERVQVNWR

SEQ ID NO: 1282 - protein, 485 aa, synthetic construct
MTKKVAIYTRVSTTNQAEEGFSIDEQIDRLTKYAEAMGWQVSDTYTDAGISGAKLERPAMQRLVNDIENKAFDTVLVYKLDRLSRSARDTLYLVKDVFTKNKIDFISLNESIDTSSAMGSLFLTILSAINEFERENIKERMTMGKLGRAKSGKSMMWTKTAFGYYHNRKTGILEIVPQQATIVEQIFTDYLSGISLTKLRDKLNESGHIGKDIPWSYRTLRQTLDNPVYCGYIKFKDSLFEGMHKPIIPYETYLKVQKELEERQQQTYERNNNPRPFQAKYMLSGMARCGYCGAPLRIVLGRKRKDGSRTMKYHCANRFPRKTKGVTVYNDNKKCDSGTYDLSNLENTVIDSLIGFQENNDSLLKIINGNNQPILDTSSFKKQISQIDKKIQKNSDLYLNDFITMDELKDRTDSLQAEKKLLEAKISENKFNDSTGVFELVKTQLGSIPINELSYDNKKKIVNNLVSKVDVTADNVDIIFKFQLA

SEQ ID NO: 1283 - protein, 469 aa, synthetic construct
MSYTTPVRAAVYLRISEDRSGEQLGVARQREDCLELCGRRKWVPVEYLDNDVSASTGKRRPAYEQMLADIAAGKIAAVVAWDLDRLHRRPIELEAFMSLADERRLALATVAGDVDLATPQGRLVARLKGSVAAHETEHKKARQRRAARQKAERGHPNWSKAFGYLPGPNGPEPDPRTAPLVKQAYADILAGASLGDVCRQWNGAGAFTITGRPWTTTTLSKFLRKPRNAGLRAYKGARYGPVDRDAIVGKAQWRPLVDEATFWAAQAVLDGPGRAPGRKSVRRHLLTGLADCGKCGNHLAGSYRTDGRVVYVCKACHGVAILADNIEPILYHIVAERLAMPDAVDLLRREIHDAAEAETIRLELETLYGELDRLAVERAEGLLTARQVKISTDIVNAKITKLQARQLDQERLHVFDGIPLGTPQVAGMIAELSPNRFRAVLDVLAEVVVQPVGKSGRIFNPKRVQVNWR

SEQ ID NO: 1284 - protein, 485 aa, synthetic construct
MTKKVAIYTRVSTTNQAEEGFSIDEQVDRLTKYAEAMGWQVSDTYTDAGFSGAKLERPAMQRLINDIENKAFDTVLVYKLDRLSRSVRDTLYLVKDVFTKNKIDFISLNESINTSSAMGSLFLTILSAINEFERENIKERMTMGKLGRAKSGKSMMWTRTAFGYYHNRKTGILEIVPLQATIVEQIFTDYLSGISLTKLRDKLNESGHIGKDIPWSYRTLRQTLDNPVYCGYIKFKDSLFEGMHKPIIPYETYLKVQKELEERQQQAYERSNNPRPFQAKYMLSGMARCGYCGAPLKIVLGHKRKDGSRTMKYHCANRFPRKTKGVTVYNDNKKCDSGTYDLSNLENTVIDNLIGFQENNDSLLKIINGYNQPILDTSSFKEQISQIDKKIQKNSDLYLNDFITMDELKDRTDSLQAEKKLLKAKIRENKFNDSTDVFELVKTQLGSIPINELSYDNKKKIVNNLVSKVDVTADSVDIIFKFQLA

SEQ ID NO: 1285 - protein, 469 aa, synthetic construct
MSYTTPVRAAVYLRISEDRSGEQLGVARQREDCLELCGQRKWEPVEYLDNDVSASTGKRRPAYEQMLADITAGKIAAVVAWDLDRLHRRPTELEAFMSLADEKRLALATVAGDVDLATPQGRLVARLKGSVAAHETEHKKARQRRAARQKAERGHPNWSKAFGYLPGPNGPEPDPRTAPLVKQAYADILAGASLGDVCRQWNDAGAFTITGRPWTTTTLSKFLRKPRNAGLRAYKGARYGPVDRDAIVGRAQWSPLVDEATFWAAQAVLDAPGRAPGRKSVRRHLLTGLAGCGKCGNHLAGSYRTDGRVVYVCKACHGVTILADNIEPILYHIVAERLAMPDAVGLLRREIHDAAEAETIRLELETLYGELDRLAVERAEGLLTARQVKICTDIVSAKITKLQARQLDQERLRVLDGIPLGTPQVAGAIAGLSPDRFRAVLDVLAEVVVQPVGKSGRTFNPERVQVNWR

SEQ ID NO: 1286 - protein, 452 aa, synthetic construct
MKAAIYIRVSTQEQVGNYSIQAQTEKLTALCRSKDWDVYDIFIDGGYSGSNMNRPALNEMLSKLHEIDAVVVYRLDRLSRSQRDTTTLIEEYFLKNNVEFVSLSETLDTSSPFGRAMIGILSVFAQLERETIRDRMVMGKIKRIEAGLPLTTAKGRTFGYDVIDTKLYINEEEAKQLQLIYDIFEEEQSITFLQKRLKKLGFKVRTYNRYNSWLTNDLYCGYVSYKDKVHVKGIHEPIISEEQFYRVQEIFTRMGKNPNMNRDSASLLSNLVVCSKCGLGFVHRSKDTMSRGKKYHYRYYSCKTYKHTHELEKCGNKTWRADKLEELIINRVSNYSFASRNMDKEDELDSLNKKLKIEHAKKKRLFDLYINGSYEMSELDSMMNDIDAQINYYESLIEANEELRRNRKIQENLADLATVDFDGLEFREKQLYLKSLINKIYIDGEQVTIEWL

SEQ ID NO: 1287 - protein, 452 aa, synthetic construct
MKAAIYIRVSTREQVENYSIQAQTEKLTALCRSKDWDVYDIFIDGGYSGSNMNRPALNEMLSKLREIDAVVVYRLDRLSRSQRDTITLIEEYFLKNNVEFVSLSETLDTSSPFGRAMIGILSVFAQLERETIRDRMVMGKIKRIEAGLPLTTAKGRTFGYDVIDTKLYINEEEAKQLQLIYDIFEEEQSITFLQKRLKKLGFKVRTYNRYNNWLTNDLYCGYVSYKDKVHVKGIHEPIISEEQFYRVQEIFTRMGKNPNMNRDSASLLNNLVVCSKCGLGFVHRRKDAMSRDKKYHYRYYSCKTYKHIHELEKCGNKIWRADKLEELIINRVNNYSIASRNADKEDDLDSLNEKLKIEHAKKKRLFDLYINGSYEVSELDSMMNDIDAQINYYESQIEANEELKKNKKIQENLADLATVDFDSLEFREKQLYLKSLINKIYIDGEQVTIEWL

SEQ ID NO: 1288 - protein, 469 aa, synthetic construct
MSYTTPVRAAVYLRISEDRSGEQLGVARQREDCLKLCGQRKWVPVEYLDNDVSASTGKRRPAYEQMLADITAGKIAAVVAWDLDRLHRRPIELEAFMSLADEKRLALATVAGDVDLATPQGRLVARLKGSVAAHETEHKKARQRRAARQKAERGHPNWSKAFGYLPGPNGPEPDPRTAPLVKQAYADILAGASLGDVCRQWNSAGAFTITGRPWTTTTLSKFLRKPRNAGLRAYKGARYGPVDRDAIVGKAQWSPLVDEATFWAAQAVLDAPGRAPGRKSVRRHLLTGLAGCGKCGSHLAGSYRTDGRVVYVCKACHGVAILADNIEPILYHIVVERLAMPDAVDLLRREIQDAAEAETIRLELETLYGELDRLAVERAEGLLTARQVKISTDIVNAKITKLQARQLDQERLRVFDGIPLGTPQVAGMIAELSPDRFRAVLDVLAEVVVQPVGKSGRIFNPERVQVNWR

SEQ ID NO: 1289 - protein, 469 aa, synthetic construct
MSYTTPVRAAVYLRISEDRSGEQLGVARQREDCLKLCGQRNWVPVEYLDNDVSASTGKRRPAYEQMLADITAGKIAAVVAWDLDRLHRRPIELEAFMSLADEKRLALATVAGDVDLATPQGRLVARLKGSVAAHETEHKKERQRRAARQKAERGYPNWSKAFGYLPGPNGPEPDPRTAPLVRRAYADILAGASLGDVCRQWNDAGAFTITGGPWTTTTLSKFLRKPRNAGLRAYKGARYGPVDRDAIVGKAQWSPLVDEATFWAAQAVLDAPGRAPGRKSVRRHLLTGLAGCGKCGNHLAGSYRTDGRVVYVCKACHGVAILADNIEPILYRIVAERLAMPDAVDLLRREVHDAAEAETIRLELETLYGELDRLAVERAEGLLTARQVKISTDIVNAKITRLQAHQLDQERLRVFDGIPLGTPQVAGVIADLSPNRFRAVLDVLTEVVVQPVGKSGRIFNPERVQVNWR

SEQ ID NO: 1290 - protein, 469 aa, synthetic construct
MCHTTPVRAAVYLRISEDRSGEQLGVARQREDCLKLCGQRKWVPVEYLDNDVSASTGKRRPAYEQMLADITAGKIAAVVAWDLDRLHRRPIELEAFMSLADEKRLALATVAGDVDLATPQGRLVARLKGSVAAHETEHKKARQRRAARQKAERGYPNWSKAFGYLPGPNGPEPDPRTAPLVKQAYADILAGASLGDVCRQWNDASAFTITGRPWTTTALSKFLRKPRNAGLRAYKGARYGPVDRDAIVGKAQWSPLVDEATFWAAQAVLDAPGRAPGRKSVRRHLLTGLAGCGKCGNHLAGSHRTDGRVVYVCKACHGVAILADNIVPILYHIVAERLAMPDAVDLLRREVHDAAEAETIRLELETLYGELDCLAVERAEGLLTARQVKVSTDIVNAKITKLQARQQDQERLRVLDGIPLGTPQVAGAIAELSPDRFRAVLDVLAEVVVQPVGKSGRIFNPERVQVNWR

SEQ ID NO: 1291 - protein, 452 aa, synthetic construct
MKAAIYIRVSTREQVENYSIQAQTEKLTALCRSKDWDVYDIFVDGGYSGSNMNRPALNEMLSKLHEIDAVVVYRLDRLSRSQRDTITLIEEYFLKNNVEFVSLSETLDTSSPFGRAMIGILSVFAQLERETIRDRTVMGKIKRIEAGLPLTTAKGRTFGYDVIDTKLYINEEEAKQLQLIYDIFEEEQSITFLQKRLKKLGFKVRSYNRYNNWLTNDLYCGYVSYKDKVHVKGIHEPIISEEQFYRVQEIFARMGKNPNMNRDSASLLNSLVVCSKCGLGFVHRRKDAMSRDKKYHYRYYSCKTYKHIHELEKCGNKIWRADKLEELIINRVNNYSLAGRNVDKEDELDSLNEKLKIEHAKKKRLFDLYINGRYEVSELDSMMSDIDAQINYYESQIEANEELKRNKKIQENLANLATVDFDSLEFREKQLYLKSLINKIYIDGEQVTIEWL

SEQ ID NO: 1292 - protein, 469 aa, synthetic construct
MSYTTPVRAAVYLRISEDRSGEQLGVARQREDCLKLCDQRKWVPVEYLDNDVSASTGRRRPAYEQMLADITAGKIAAVVAWDLDRLHRRPVELEAFMSLADEKHLALATVAGDVDLATPQGRLVARLKGSVAAHETEHKKARQRRAARQKAERGYPNWSKAFGYLPGPNGPEPDPRTAPLVKQAYADILAGASLGDVCRQWNDAGAFTITGRPWTTTTLSKFLRKPRNAGLRAYKGARYGPVDRDAIVGKAQWSPLVDEATFWAAQAVLDAPGRAPGRKSVRRHLLTGLAGCGKCGNHLAGSYRTDGRVVYVCKACHGVAILADNIEPILYRIVAERLAMPDAVDLLRREVHDAAEAETIRLELETLYGELDRLAVERAEGLLTARQVKISTDIVNAKITKLQARQLDQERLRVFESIPLGTPQVAGVIAELSPDRFRAVLDVLAEVVVQPVGKSGRIFNPERVQVNWR

SEQ ID NO: 1293 - protein, 452 aa, synthetic construct
MKAAIYIRVSTREQVENYSIQAQTEKLTALCRSKDWDVYDIFIDGGYSGSDMNRPALNEMLSKLHEIDAVVVYRLDRLSRSQRDTITLIEEYFLKNNVEFVSLSETLDTSSPFGRAMIGILSVFAQLERETIRDRMVMGKIKRIEAGLPLTTAKGRTFGYDVIDTKLYTNEEEAKQLQLIYDIFEEEQSITFLQKRLKELGFKVHTYNRYNNWLTNDLYCGYVSYKDKVHVKGVHEPIISEEQFYRVQEIFARMGKNPNMNRDSASLLNNLVVCSKCGLSFVHRRKDAMSRDKKYHYRYYSCKTYKHIHELEKCGNKIWRADKLEELIINRVNNYSLASRNVDKEDELDSLNEKLEIEHAKKKRLFELYINGSYEVSELDSMMNDINAQINYYESQIEANEGPKKNKKIQENLANLATVDFDSLEFREKQLYLKSLINKIYIDGEQVTIEWL

SEQ ID NO: 1294 - protein, 485 aa, synthetic construct
MTKKVAIYTRVSTTNQAEEGFSIDEQIDRLTKYAEAMGWLVSDTYTDAGLSGAKLERPAMQRLINDIENKAFDTVLVYKLDRLSRSVRDTLYLVKDVFTKNKIDFISLSESIDTSSAMGSLFLTILSAINEFERENIKERMTMGKLGRAKSGKSMMWTKTAFGYHHNRKTGILEIVPLQATIVEQIFTDYLSGISLTKLRDKLNESGHIGKDIPWSYRTLRQTLDNPVYCGYIKFKDSLFEGMHKPIIPYETYLKVQKELEERQQQTYERNNNPRPFQAKYMLSGMARCGYCGAPLKIVLGHKRKDGSRTMKYHCANRFPRKTKGVTVYNDNKKCDSGTYDLSNLENTVIDNLIGLQENDDSLLKIINGSNQPILDTSSFEKQTSQIDKKIRKNSDLYLNDFITMDELKDRTDSLQAEKKLLQAKISENKFNDSADVFELVKSQLGSIPINELSYDDKKKIVNNLVSKVDVTADNVDIIFKFQLA

SEQ ID NO: 1295 - protein, 469 aa, synthetic construct
MSYTTPVRAAVYLRISEDRSGEQLGVARQREDCLKLCGQRKWVPVEYLDNDVSASTGKRRPAYEQMLADITAGKIAAVVAWDLDRLHRRPVELEAFMSLADEKRLALATVAGDVDLATPQGRLVARLKGSVAAHETEHKKARQRRAARQKAERGLPNWSKAFGYLSGPNGPEPDPRTAPLVKQAYADILAGASLGDVRRQWNDAGALTITGRPWTTTTLSKFLRKPRNAGLRAYKGTRYGPVDRDAIVGKAQWSPLVDEGTFWAAQAVLDAPGRAPGRKSVRRHLLTGLAGCGKCGNHLAGSYRTDGRVVYVCKACHGVAILADNIEPILYRIVAERLAMPDAVDLLRREIHDAVEAETIRLELETLYGELDCLAVERAEGLLTARQVKISTDIVNAKITKLQARQLDQERLRVFDGIPLGTPQVAGMIAELSPDRFRAVLDALAEVVVQPVGKSGRIFNPERVQVNWR

SEQ ID NO: 1296 - protein, 452 aa, synthetic construct
MKAAIYIRVSTQEQVGNYSIQAQTEKLTALCRSKDWDVYDIFIDGGYSGSNMNRPALNEMLSKLHEIDAVVVYRLDRLSRSQRDTTTLIEEYFLKNNVEFVSLSETLDTSSPFGRAMIGILSVFAQLERETIRDRMVMGKIKRIEAGLPLTTAKGRTFGYDVIDTKLYINEEEAEQLRLIYDIFEEEQSITFLQKRLKKLGFKVRTYNRYNNWLTNDLYCGYVSYKDEVHVKGIHEPIISEEQFYRVQEIFTRMGKNPNMNRDSASLLNNLVVCSKCGLGFVHRSKDTMSRGKKYHYRYYSCKTYKHTHELEKCGNKTWRADKLEELIINRVNNYSFTSRNVDKEDVLNSLNEKLKIEHAKKKRLFDLYINGSYEVSELDSMMNDIDAQINYYESQIEANEELKKNKKIQENLVDLTTVDFDSLEFREKQLYLKSLISKIYIDGEQVTIEWL

SEQ ID NO: 1297 - protein, 452 aa, synthetic construct
MKAAIYIRVSTREQVENYSIQAQTEKLTALCRSKDWDVYDVFIDGGYSGSNMNRPALNEMLSKLHEIDAVVVYRLDRLSRSQRDTITLIEEYFLKNNVEFVSLSETLDTSSPFGRAMIGILSVFAQLERETIRDRMVMGKIKRIEAGLPLTTAKGRTFGYDVIDAKLYINEEEAKQLQLIYDIFEEEQSITFLQKRLKKLGFKVRTYNRYNNWLTNDLYCGYVSYKDKVHVKGIHEPIISEEQFYRVQEIFTRMGKNPNMNRDSASLLNNLVVCSKCGLGFVHRRKDAMSRDKKYHYRYYSCKTYKHIHELEKCGNKIWRADKLEELVINRVNNYSVASRNVDKEDELDSLNEKLKIEHAKKKRLFDLYISGSYEVSELDSMMNDINAQINYYESQIEANEELKKNKKIQENLAYLATVDFDSLEFREKQLYLKSLISKIYIDGEQVTIEWL

SEQ ID NO: 1298 - protein, 485 aa, synthetic construct
MTKKVAIYTRVSTTNQAEEGFSIDEQIDRLTKYAEAMGWQVSDTYTDAGSSGAKLERPAMQRLIGDIENKAFDTVLVYKLDRLSRSVRDTLYLVKDVFTKNKIDFISLNESIDTSSAMGSLFLTILSAINEFERENIKERMTMGKLGRAKSGKSMMWTKTAFGYYHNRKTGILEIVPLQATIVEQIFTDYLSGISLTKLRDKLNESGHIGKDIPWSYRTLRQTLDNPVYCGYIKFKDSLFKGMHKPIIPYETYLKVQKELEERQQQTYERNNNPRPFQAKYMLSGMARCGYCGAPLRIVLGHKRKDGSRTMKYHCANRFPRKTKGVTVHNDNKKCDSGTYDLSNLEDTVIDNLIGFQENNDSLLKIINGDNQPILDTSSFKEQISQIDKKIQKNSDLYLNDFITMDELKDRTASLQAEKKLLKAKISENKFNDSTDVFELVRTQLGSIPINELSYDNKKKIVNNLVSKVDVTADNVDIIFKFQLA

SEQ ID NO: 1299 - protein, 469 aa, synthetic construct
MSYTTLVRAAVYLRISEDRSGEQLGVARQREDCLKLCGQRKWVPVEYLDNDVSASTGRRRPAYEQMLADITAGKIAAVVAWDLDRLHRRPIELEAFMCLADEKRLALATVAGDVDLATPQGRLVARLKGSVAAHETEHKKARQRRAARQKAERGLPNWSKAFGYLPGPNGPEPDPRTAPLVKQAYADILAGASLGDVCRRWNGAGAFTITGRPWTTTTLSKFLRKPRNAGLRAYKGARYGPVDRDAIVGKAQWSPLVDEATFWAAQAVLDAPGRAPGRKSVRRHLLTGLAGCGKCGNHLAGSYRTDGRVVYVCKACHGVAILADNIEPILYHTVAERLAMPDAADLLRRDIHDAAEAETIRLELETLYGELDRLAVERAEGLLTARQVKISTDIVDAKIAKLQARQLDQERLRVLDGIPLGTPQVAGMIAELSPDRFRAVLDVLAEVVVQPVGKSGRISNPERVQVSWR

SEQ ID NO: 1300 - protein, 452 aa, synthetic construct
MKAAIYIRVSTREQVENYSIQAQTEKLTALCRSKDWDVYDVFIDGGYSGSNMNRPALNEMLSKLHEIDAVVVYRLDRLSRSQRDTITLIEEYFLKNNVEFVSLSETLDTSSPFGRAMIGILSVFAQLERETIRDRMVMGKIKRIEAGLPLTTAKGRTFGYDVIDTKLYINEEEAKQLQLIYDIFEEEQSITFLQKRLKKLGFKVRTYNCYNNWLTNDLYCGYVSYKDKVHVKGIHEPIISEEQFYRVQEIFTRMGKNPNMNRDSASLLNNLVVCSKCGLGFVHRRKDAKSRDKKYHYRYYSCKTYKHIHELEKCGNKIWRADKLEELVINRVNNYSLASRNVDKEDELDSLNVKLKTEHAKKKRLFDLYINGSYEVSELDSMMNDIDARINYYESQIAANEELKKNKKIQGNLADLAAVDFDSLEFRDKQRYLKSLINKIYIDGEQVTIEWL

SEQ ID NO: 1301 - protein, 469 aa, synthetic construct
MSYTTPVRAAVYLRISEDRSGEQLGVARQREDCLKLCDQRKWEPVEYLDNDVSASTGKRRPAYEQMLADITAGKIAAVVAWDLDRLHRRPVELEAFMSLADEKRLALATVAGDVDLATPQGRLVARLKGCVAAHETEHKKARQRRAARQKAERGHPNWSKAFGYLPGPNGPEPDPRTAPLVKQAYADILAGASLGDVCRQWNDAGAFTITGRPWTTTTLSKFLRKPRNAGLRAYKGARYGPVDRDAVVGKAQWSPLVDEATFWAAQAVLDAPGRAPGRKSVRRHLLTGLAGCGKCGNHLAGSYRTDGRVVYVCKACHGVAILADNIEPILYHIVAERLAMPDAVDLLRREIYDAAEAETIRLELESLYGELDRLAVERAEGLLTARQVKISTDIVNAEITKLQACQLDQERLRVFDGIPLGTPQVAGKIAELSPDRFRAVLDVLAEVVVQPVGKSGRIPNPERVQVYWR

SEQ ID NO: 1302 - protein, 452 aa, synthetic construct
MKAAIYIRVSTREQVENYSIQAQTEKLTALCRSKDWDVYDIFVDGGYSGSNMNRPALNEMLSKLHEIDAVVVYRLDRLSRSQRDTITLIEEYFLKNNVEFVSLSETLDTSSPFGRAMIGILSVFAQLERETIRDRMVMGKIKRIEAGLPLTTAKGRTFGYDVIDTKLYINEEEAKQLRLIYDIFEEEQSITFLQKRLKKLGFKVRTYNRYSNWLTNDLYCGYVSYKDKVHVKGIHEPIISEEQFYRVQEIFARMGKNPNMNRGSASLLNNLVVCSKCGLGFVHRRKDIMSRGKKYHYRYYSCKTYKHIHELEKCGNKIWRADKLEELITNRVNNYSLAGRNVDKEDELDGLNEKLKMEHAKKKRLFDLYINGSYEVSELDSMMNDIDAQISHYESQIEANEELRTNKKIQENLAHLATVDFGSLEFREKQLYLKSLINKIYVDGEQVTIEWL

SEQ ID NO: 1303 - protein, 485 aa, synthetic construct
MTRKVAIYTRVSTTNQAEEGFSIDEQIDRLTKYAEAMGWQVSDTYTDAGFSGAELERPAMQRLINDIENKAFDTVLVYKLDRLSRSVRDTLYLVKDVFTKNKIDFISLNESIDTSSAMGSLFLTILSAINEFERENIKERMTMGKLGRAKSGKSMMWAKTAFGYYHNRKTGILEIVPLQATIVEQIFTDYLSGISLTKLRDKLNESGHIGKDIPWSYRTLRQTLDNPVYCGYIKFKDSLFKGMHKPIIPYETYLKVQKELEERQQQTYERNNNPRPFQAKYMLSGMARCGYCGAPLRIVLGHKRKDGSRTMRYHCTNRFPRKTKGVTVYNDNKKCDSGTYDLNNLENIVIDNLIGLQENNDSLLKIINGNNQPILDTSSFKKQISLIDKKIQKNSDLYLNDFITMDELKDRTDSLQAEKKLLKAKISENKLNDSTDVFVLVKTQLGSIPINELSYDNKKRIVNNLVSKVDVTADNVDIIFKFQLA

SEQ ID NO: 1304 - protein, 452 aa, synthetic construct
MKAAIYIRVSTREQVENYSIQAQTEKLTALCRSKDWDVYDIFIDGGYSGSNMNRPALSEMLSKLHEIDAVVVYRLDRLSRSQRDTITLIEEYFLKNNVEFVSLSETLDTSSPFGRAMIGILSVFAQLERETIRDRMVMGKIKRIEAGLPLTTAKGRTFGYDVIDTKLYINEEEAKQLRLIYDIFEEEQSITFLQKRLKKLGFKVRTYNRYNNWLTNDLYCGYVGYKDKVHVKGIHEPIISEEQFYRVQEIFTRMGKNPNMNRDSASLLNNLVVCSKCGLGFVHRRKDAMSRDKKYHYRYYSCKTYKHIHELEKCGNKIWRADKLEELIINRVNSYSLASRNVDKEDELDSLNEKLKIEHAKKKRLFDLYINGSYEVSELDSMMNDIDAQINYYESQIEANEELKKNKKIQENLANLATVDFDSLEFREKQLYLKSLINKIYIDGEQVTIEWL

SEQ ID NO: 1305 - protein, 469 aa, synthetic construct
MSYTTPVRAAVYLRISEDRSGEQLGVARQREDCLKLCGQRKWVPVEYLDNDVSASTGKRRPAYEQMLADITAGKIAAVVAWDLDRLHRRPIELEAFMSLADEKRLALATVAGDVDLATPQGRLVARLKGSVAAHETEHKKARQRRAARQKAERGYPNWSKAFGYLPGPNGPEPDPRTAPLVKQAYADILAGASLGDVCRQWNDAGAFTITGRPWTTTTLSKFLRKPRNAGLRAYKGARYGPVDRDAIVGKAQWSPLVDEATFWAAQAVLDAPGRAPGRKSVRRHLLTGLAGCGKCGNRLAGSYRTDGRVVYVCKACHGVAILADNIEPILYHIVAERLAMPDAVDLLCREIHDAAEAETTRLELETLYGELDRLAVERAEGLLTARQVKISTDIVNAKITKLQTRRLDQERLRVFGGIPLGTPQVAGMVAELSPDRFRAVLDVLVEVVVQPVGKGGRIFNPERVRVNWR

SEQ ID NO: 1306 - protein, 452 aa, synthetic construct
MKAAIYIRVSTREQVENYSIQAQTEKLTALCRSKGWDVYDIFIDGGYSGSNMNRPALNEMLSKLHEIDAVVVYRLDRLSRSQRDTITLIEEYFLKNNVEFVSLSETLDTSSPFGRAMIGILSVFAQLERETIRDRMVMGKIKRIEAGLPLTTAKGRTFGYDVIDTKLYINEEEAKQLRLIYDIFEEEQSITFLQKRLKKLGFKVRSYNRYNNWLTNDLYCGYVSYKDKVHVKGIHEPIISEEQFYRVQEIFARMDKNPNMNRDSASLLNNLVVCSKCGLGFVHRRKDARSRDKKYHYRYYSCKTYKHIHELEKCGNKIWRADKLEELIINRVNNYSLESRNTGKEDELDSLNEKLRIEHAKKKRLFDLYINGSYEVGELDSMMYDIDAQINYYESQIEANEELRINKKIQENLANLATVDFDSLEFREKQLYLKSLINKIYIDGEQVTIEWL

SEQ ID NO: 1307 - protein, 469 aa, synthetic construct
MCYTTPVRAAVYLRISEDRSGEQLGVARQREDCLKLCNQRKWVPVEYLDNDVSASTGKRRPAYEQMLADITAGKIAAVVAWDLDRLHRRPIELEAFMSLADEKRLALATVAGDVDLATPQGRLVARLKGSVAAHETEHKKARQRRAARQKAERGYPNWSRAFGYLPGPNGPEPDPRTAPLVKQAYTDILAGASLGDVCRQWNDAGAFTITGRPWTTSTLSKFLRKPRNAGLRAYKGARYGPVDRDAIVGKALWSPLVDEATFWAAQAVLDAPGRAPGRKSVRRHLLTGLAGCGKCGNHLAGSYRTDGRVVYVCKACHGVAILADNVEPILYRIVAERLAMPDAVDLLRREIHDAVEAETIRQGLGALYGELDRLAVERAEGLLTARQVKISTDIVNAKITKLQARQLDQERLRVFDGIPLGTPQVAGMIAELSPDRFRAVLDVLAEVVVQPVGKSGRIFNPERVQVNWR

SEQ ID NO: 1308 - protein, 469 aa, synthetic construct
MSYTTPVRAAVYLRISEDRSGEQLGVARQREDCLKLCDQRKWVPVEYLDNDVSASTGKRRPAYEQMLADITAGKIAAVVAWDLDRLHRRPIELEAFMSLADEKRLALATVAGDVDLATPQGRLVARLKGSVAAHETEHKKARQRRAARQKAERGHPNWSKAFGYLPGPNGPGPDPRTAPLVKQAYADILAGASLGDVCRQWNDAGAFTITGRPWTTTTLSKFLRKPRNAGLRAYKGARYGPVDRDAIVGKAQWSPLVDEATFWAAQAVLDAPGRAPGRKSVRRHLLTGLAGCGKCGNHLAGSYRTDGRVVYVCKACHGVAILADNIEPILYHIVAERLAMPDAVDLLRREIHDAAEAETIRLELETLYGELDHLAVERAEGLLTARQVKISTDIVNAKIAKLQARQLDQERLRVLDGIPLGTPQVAGMIAELSPDRFRAVLDVLAEVVVQPVGKSGRIFNPERVQVNWR

SEQ ID NO: 1309 - protein, 485 aa, synthetic construct
MTKKVAIYTRVSTTNQAEEGFSVDEQIDRLTKYAEAMGWQVSGTYTDAGFSGAKLGRPAMQRLINDIENKAFDTVLVYKLDRLSRSVRDTLYLVKDVFTKNRIDFISLNESIDTSSAMGSLFLTILSAINEFERENIKERMTMGKLGRAKSGKSMMWTKTAFGYYHNRKTGVLEIVPLQATIVEQIFTDYLSGISLTKLRDKLNESGHIGKDIPWSYRTLRQTLDNPVYCGYIKFKDSLFEGMHKPIIPYETYLKVQKELEERQQQTYERNNNPRPFQAKYMLSGLARCGYCGAPLRIVLGHKRKDGSRTMKYHCANRFPRKTKGVTVYNDNKKCDSGTYDLSNLENTVIDNLIGFQENNDSLLKIINGNNQPILDTSSFKKQISQIDKKIQKNSDLYLNDFITMDELKDRTDSLQAEKKLLKAKIGENKFSDSTDVFEQVKTQLGSIPINELSYDNKKKIVNNLVSKVDVTADNVDIIFKFQLA

SEQ ID NO: 1310 - protein, 452 aa, synthetic construct
MKAAIYIRVSTQEQVGNYSIQAQTEKLTALCRSKDWDVYDIFIDGGYSGSNMNRPALNKMLSKLHEIDAVVVYRLDRLSRSQRDTTTLIEEYFLKNNVEFVSLCETLDTSSPFGRAMIGILSVFAQLERETIRDRMVMGKIKRIEAGLPLTTAKGRTFGYDVIDTKLYINEEEARQLQLIYDIFEEEQSITSLQKRLKKLGFKVRTYNRYNNWLTNDLYCGYVSYKDKVHVKGIHEPIISEEQFYRVQEIFTRMGKNPNMNRDSASLLSNLVVCSKCGLGFVHRSKDTMSRGKKYHYRYYSCKTYKHTHELEKCGNKTWRADKLEELIINRVNNYSFAGRNVDKEDELDSLNEKLKIEHAKKKRLFDLYINGSCEMSELDSMMNDIDAQISYYESQIEANEELKKNKKIQENLANLATVDFDSLEFREKQLYLKSLINKIYIDGEQVTIEWL

SEQ ID NO: 1311 - protein, 452 aa, synthetic construct
MKAAIYIRVSTREQVENYSIQAQTEKLTALCRSKDWDVYDVFVDGGYSGSNMNRPALNEMLSKLHEIDAVVVYRLDRLSRSQRDTITLIEEYFLKNNVEFVSLSETLDTSSPFGRAMIGILSVFAQLERETIRDRMVMGKIKRIEAGLPLTTAKGRTFGYDVIDTKLYVNEEEAKQLQLIYDIFEEEQSITFLQKRLKKLGFKVRTYNRYNNWLTNDLYCGYVSYKDKVHVKGIHKPIISEEQFYRVQEIFARMGKNPNMNRDSASLLNNLVVCSKCGLGFVHRRKDAMSRDKKYHYRYYSCKTYKHIHELEKCGNKIWRADKLEELIINRVNSYSLVSRNVDKEDELDSLNEKLKIEHAKKKRLFDLYINGNYEVCELDSMMNDIDAQINYYESQIEANEELKKSRKIQENLAYLAAVDFDSLEFREKQLYLKSLINKIYIDGEQVTIEWL

SEQ ID NO: 1312 - protein, 452 aa, synthetic construct
MKAAIYIRVSTREQVENYSIQAQTEKLTALCRSKDWDVYDIFIDGGYSGSNMNRPALNEMLSKLHEIDAVVVYRLDRLSRSQRDTITLIEEYFLKNNVEFVSLSETLDTSSPFGRAMIGILSVFAQLERETIRDRMVMGKIKRIEAGLPLTTAKGRTFGYDVIDTKLYINEEEAKQLQLIYDIFEEEQSITFLQKRLKKLGFKVRTYSCYNNWLTNDLYCGYVSYKDKVHVKGIHEPIISEEQFYRVQEIFTRMGKNPNMNRDSASLLNSLVVCSKCGLGFVHRRKDTMSRGKRYHYRYYSCKTYKHTHELEKCGNKIWRADKLEELIINRVNNYSFASRNVDKEDELDSLDEKLKIEHAKKKRLFDLYINGSYEVSELDSMMNDIDAQINYYESQIEANEEPKKNRKIQENLADLATVDFDSLEFREKQLYLRSLINKIYIDGEQVTIEWL

SEQ ID NO: 1313 - protein, 485 aa, synthetic construct
MTKKVAIYTRVSTTNQAEEGFSIDEQTDRLTKYAEAMGWQVGDTYTDAGFSGARLERPAMQRLINDIENKAFDTVLVYKLDRLSRSVRDTLYLVKDVFTKNKIDFISLNESIDTSSAMGSLFLTILSAINEFERENIKERMTMGKLGRAKSGKSMMWTKTAFGYYHNRKTGILEIVPLQATIVEQIFTDYLSGISLTKLRDKLNESGHIGKDIPWSYRTLRQTLDNPVYCGYIKFKDSLFEGMHKPIIPYETYLKVQKELEERQQQAYERNNNPRPFQAKYMLSGMARCGYCGAPLRIVLGHKRKDGSRTMKYHCVNRFPRKTKGVTVYNDNKKCDSGTYDLSNLENTVIDNLIGFQENNDSLLKVINGNNQPILDTSSFKEQISQIDKKIQKNSDLYLNDFITMDELKERTDSLQAEKKLLKAKISENKFNDSTDVFELVKTQLGSIPINELSYDNKKKIVNNLVSKVDVTADNVDIIFKFQLA

SEQ ID NO: 1314 - protein, 452 aa, synthetic construct
MKAAIYIRVSTREQVENYSIQAQTEKLTALCRSKDWDVYDIFIDGGYSGSNMNRPALNEMLSKLHEIDAVVVYRLDRLSRSQRDTITLIEEYFLKNNVEFVSLSETLDTSSPFGRAMIGILSVFAQLERETIRDRMVMGKIKRIEAGLPLTTAKGRTFGYDVIDTKLYINEEEAKQLRLIYDIFEEEQSITFLQKRLKRLGFKVRTYNRYNNWLTNDLYCGYVSYKDKVHVKGIHEPIISEEQFYRVQEIFTRMGKNPNMNRDSASLLNNLVVCGKCGLGFVHRRKDAMSRDKKYHYRYYSCKTYKHIHELEKCGNKIWRADKLEELIINRVNNYSFASRSVDKEDELVSLNEKLKIEHAKKKRLFNLYINGSYEVSELDSMMNDIDAQISYYESQIEANEELKKNKKIQEILAHLATVDFDSLEFREKQLYLKSLINKIYVDGEQVTIEWL

SEQ ID NO: 1315 - protein, 485 aa, synthetic construct
MTRKVAIYTRVSTTNQAEEGFSIDEQVDRLTKYAEAMGWQVSNTYTDAGFSGAKLERPAMLRLINDIENKAFDTVLVYKLDRLSRSVRDTLHLVKDVFTKNKIDFISLNECIDTSSAMGSLFLTILSAINEFERENIKERMTMGKLGRAKSGKSMMWSKTAFGYYHNRKTGILEIVPLQATIVEQIFTDYLSGISLTKLRDKLNESGHIGKDIPWSYRTLRQTLDNPVYCGYIKFKDSLFEGMHKPIIPYETYLKVQKELEERQQQAYERNNNPRPFQAKYMLSGMARCGYCGAPLRIVLGHKRKDGGRTMKYHCTNRFPRKTKGVTVYNDNKKCDSGTYDLSDLEDTVIDNLIGLQENNDSLLKIINGNNKPILDTSSFKKQISQIDKKIQKNSDLYLNDFITMDELRDRTDSLQAEKKLLKAKISENKFNDSTEVFELVKTQLGSIPINELSYDNKKKIVNNLVSKVDVTADNVVIIFKFQLA

SEQ ID NO: 1316 - protein, 452 aa, synthetic construct
MKAAIYIRVSTREQVENYSIQAQTEKLTALCRSKDWDVYDIFVDGGYSGSNMNRPALNEMLSKLHEIDAVVVYRLDRLSRSQRDTITLIEEYFLKNNVEFVSLSETLDTSSPFGRAMIGILSVFAQLERETIRDRMVMGKIKRIEAGLPLTTAKGRTFGYDVIDTKLYINEEEAKQLQLIYDIFEEEQSITSLQKRLKKLGLKVRTYNRYNNWLTNDLYCGYVSYKDKVHVKGIHEPIISEEQFYRVQEIFTRMGKNPNMNRDSASLLNGLVVCSKCGLGFVHRRKDTMSRDKKYHYRYYSCKTYKHIHELEKCGNKVWRADKLEELIINRVNSYSIASRNADKEDELDSLNEKLKIEHAKKERLFDLYINGSYEMSELDSMMSDIDAQISYYESQIEANEGLKRNKKIQENLADLATVDFDSLEFREKQLYLKSLINKIYIDGEQVTIEWL

SEQ ID NO: 1317 - protein, 469 aa, synthetic construct
MSYTTPVRAAVYLRISEDRSGEQLGVARQREDCLELCAQRKWVPVEYLDNDVSASTGRRRPAYEQMLADITAGKIAAVVAWDLDRLHRRPIELEAFMSLADEKRLALATVAGDVDLATPQGRLVARLKGSVAAHETEHKKARQRRAARQKAERGYPNWSKAFGYLPGPNGPEPDPRTAPLVEQAYADILAGASLGDVCRQWNDAGALTITGRPWTTTTLSKFLRKPRNAGLRAYKGARYGPVDRDAIVGKAQWSPLVDEATFWAAQAVLDAPGRAPGRKSVRRHLLTGLAGCGKCGSHLAGSYRTDGQVVYVCKACHGVAILADNIVPILYHIVAERLAMPDAVGLLRREIHDAAEAETIRLELETLYGELDRLAVERAEGLLTARQVKISTDIVNAKITKLQARQLDQERLRVFDGIPLGTPQVAGVIAKLSPDRFRAVLDVLAEVVVQPVGKGGKIFNLERVRVNWR

SEQ ID NO: 1318 - protein, 469 aa, synthetic construct
MSYTTPVRAAVYLRISEDRSGEQLGVARQREDCLKLCDQRKWVPVEYLDNDVSASTGKRRPAYEQMLADITAGKIAAVVAWDLDRLHRRPIELEAFMSLADEKRLALATVAGDVDLATPQGRLVARLKGSVAAHETEHKKARQRRAARQKAERGHPNWSKAFGYLPGPNGPEPDPRTAPLVKQAYADILAGASLGDVCRRWSDAGALTITGRPWTTTTLSKFLRKPRNAGLRAYKGARYGPVDRDAIVGKAQWSPLVDEATFWAAQAVLDAPGRAPGRKSVRRHLLTGLAGCGKCGNHLAGSYRTDGRVVYVCKACHGVAILADNIESILYHTVAERLAMPDAVNLLRREVLDAAEAETIRLELETLYGELDRLAVERAEGLLTARQVKISTDIVNAKITKLQARQQDQERLRVLDGIPLGTPQVAGMIAELSPDRFRAVLDVLAEVVVQPVGKSGRIFNPERVQVNWR

SEQ ID NO: 1319 - protein, 469 aa, synthetic construct
MSYTTPVCAAVYLRISEDRSGEQLGVARQREDCLKLCDQRKWVPVEYLDNDVSASTGKHRPAYEQMLADITAGKIAAVVAWDLDRLHRRPIELEAFMSLADEKRLALATVAGDVDLATPQGRLVARLKGSVAAHETEHKKARQRRAARQKAERGHPNWSKAFGYLPGPDGPEPDPRTAPLVKQAYADILAGASLGDVCRQWNDAGAFTITGRLWTTTTLSKFLRKPRNAGLRAYKGARYGPVDRDAIVGKAQWSPLVDEATFWAAQAVLDAPGRAPGRKSVRRHLLTGLAGCGKCGNHLAGSYRTDGKVAYVCKACHGVAILADNIEPILYHIVAERLAMPDAVDLLRREIHDAAEAEAIRLELETLYGELDRLAVERAEGLLTARQVKISTDIVNAKITELRARQLDQERLRVLDGIPLGTPQVAGAIAELSPDRFRAVLDVLAEVVVQPVGKSGRIFNPERVQVNWR

SEQ ID NO: 1320 - protein, 485 aa, synthetic construct
MTKKVAIYTRVSTTNQAEEGFSIDEQIDRLTKYAEAMGWQVSDTYTDAGLSGAKLERPAMQRLINDIENKAFDTVLVYKLDRLSRSVRDTLYLVKDVFSKNKIDFISLNESIDTSSAMGSLFLTILSAINEFERENIKERMTMGKLGRARSGKSMMWTKTAFGYCHNRKTGILEIVPLQATIVEQIFTDYLSGISLTKLRDKLNESGHIGKDIPWSYRTLRQTLDNPVYCGYIKFKDSLFEGMHKPIIPYETYLKVQKELEERQQQSYERNNNPRPFQAKYMLSGMARCGYCGAPLRIVLGHKRKDGSRTTKYHCANRFPRKTKGVTVYNDNKKCDSGTYDMSDLENTVIDNLVSFQENDDSLLKIINGNNQPILETSSFKKQISQIDKKIQKNSDLYLNDFITMDELKDRTDSLQAEKKLLEAKISENKFNDSTDVFELVKTQLGSIPINELSYDNKKRIVNNLVSKVDVTADNVDIIFKFQLA

SEQ ID NO: 1321 - protein, 452 aa, synthetic construct
MKAAIYIRVSTREQVENYSIQAQTEKLTALCRSKDWDVYDIFIDGGYSGSNMNRPALNEMLSKLHEIDAVVVYRLDRLSRSQRDTITLIEEYFLRNNVEFVSLSETLDTSSPFGRAMIGILSVFAQLERETIRDRMVMGKIKRVEAGLPLTTAKGRTFGYDVIGTKLYINEEEAKQLQLIYDIFEEEQSITLLQKRLKKLGFKVRTYSRYNSWLTNDLYCGYVSYKDKVHVKGIHEPIISEEQFYRVQEIFTRMGKNPNMNRDSASLLNNLVVCGKCGLGFVHRRKDTMSRGKKYHYRYYSCKTYKHTHELEKCGNKIWRADKLEELIINRVNNYSFASRNVDKEDELDSLNEKLRIEHAKRKRLFDLYINGSYEVSELDSMMNDIDAQINYYESQIEANEELKKNKKIQENLADLATVDFDSLEFREKQLYLKGLINKIYIDGEQVTIEWL

SEQ ID NO: 1322 - protein, 485 aa, synthetic construct
MTKKVAIYTRVSTTNQAEEGFSIDEQIARLTKYAEAMGWQVSDTYTDAGLSGAKLERPAMQRLINDIENKAFDTVLVYKLDRLSRSVRDTLYLVKDVFTKNKIDFVSLNESIDTSSAMGSLFLTILSAINEFERENIKERMTMGKLGRAKSGKSMMWTKTAFGYYHNRKTGILEIVPLQATIVEQIFTDYLSGISLTKLRDKLNESGHIGKDIPWSYRTLRQTLDNPVYCGYIKFKDSLFEGMHKPIIPYETYLKVQKELEERQQQTYERNNNPRPFQAKYMLSGMARCGYCGAPLKVVLGHRRKDGSRTMKYHCANRFPRKTKGVTVYNDNKKCDSGTYDLSNLENTVIDYLIGFQENNDSLLKIINDNSPPILDTSSFKKQISQIDKKIQKNSDLYLNDFITMDELKDRTDGLQAEKKLLKAKISENKFNNSTDVFELVKTQLGSIPINELSYDDKKKIVNNLVSKVDVTADNVDIVFKLQLA

SEQ ID NO: 1323 - protein, 452 aa, synthetic construct
MKAAIYIRVSTREQVENYSIQAQAEKLTALCRSKDWDVYDIFIDGGYSGSNMDRPALNEMLNKLHEIDVVVVYRLDRLSRSQRDTITLIEEYFLKNNVEFVSLSETLDTSSPFGRAMIGILSVFAQLERETIRDRMVMGKIKRIEAGLPLTTAKGRTFGYDVVDTKLYINEEEAKQLQLIYDIFEEEQSITFLQKRLKKLGFKVHTYNRYNNWLTNDLYCGYVSYKDKVHVKGIHEPIISEEQFYRVQEIFTRMGKNPNMNRDSASLLNNLVVCSKCGLSFVHRRKDTTSRGKKYHYRYYSCKTYKHIHELEKCGNKIWRADKLEELIINRVNNYSFASRNVDKEDELDSLSEKLKIEHAKKRRLFDLYINGSYEVSELDSMMSDIDAQINYYESQIEANEELKKNKKIRETLAGLAAVDFDSLEFREKQLYLKSLINKIYIDGEQVTIEWL

SEQ ID NO: 1324 - protein, 485 aa, synthetic construct
MTKKVAIYTRVSTTNQAEEGFSIDEQIDRLTKYAEAMGWQVSDTYTDAGLSGAQLERPAMQRLINDIENKAFDTVLVYKLDRLSRSVRDTLYLVKDVFTKNKIDFISLNESIDTSSAMGSLFLTILSAINEFERENIKERMTMGKLGRAKSGKSMMWTKTAFGYYHNRKTGILEIVPLQATIVEQIFTDYLSGISLTKLRDKLNESGHIGKDIPWSYRTLRQTLDNPVYCGYIKFKDSLFEGMHKPIIPFETYLKVQKELEERQQQAYERNNNPRPFQAKYMLSGMARCGYCGAPLRIVLGHKRKDGSRTMKYHCANRFPRKTKGVTVYNDNKKCDSGTYDLSDLENTVIDNLIGFQENNDSLLKIINGNSQPILDTSSFKEQISQIDKKIQKNSDLYLNDFITMDELKDRTDSLQAEKKLLKAKISENKFNGSTDVFELVKTQLGSIPINELSYDNKKKIVNNLVSKVDVTADNVDIIFKFQLA

SEQ ID NO: 1325 - protein, 485 aa, synthetic construct
MTKNVAIYTRVSTTNQAEEGFSIDEQIDRLTKYAEAMGWQVSDTYTDAGFSGAKLERPAMQRLINDIENKAFDTVLVYKLDRLSRSVRDTLYLVKDVFTKNKIDFISLNESIDTSSAMGSLFLTILSAINEFERENIKERMTMGKLGRAKSGKSMMWTKTAFGYYHNRKTGILEIVPLQATIVEQIFTDYLSGISLTKLRDKLNESGHIGKDIPWSYRTLRQTLDNPVYCGYIKFKDSLFEGMHKPIIPYETYLKVQKELEERQQQTYERNNNPRPFQAKYMLSGMARCGYCGAPLKIVLGHKRKDGSRTMKYHCANRFPRKTKGVTVYNDNKKCDSGTYDLSNLENTVIDNLIDFQENDDSLLKIINGNNQPILDTSSFEKQISQIDKRIQKNSDLYLNDFITMDELKVRTDSLQAEKKLLKAKISENKFNDSTDVFELVKTQLGSIPINELSYDNKKKIVNNLVSKVDVTADNVDIIFKFQLA

SEQ ID NO: 1326 - protein, 469 aa, synthetic construct
MSYTTPVRAAVYLRISEDRSGEQLGVARQREDCLKLCGQRKWVPVEYLDNDVSASTGKRRPAYEQMLADITAGKIAAVVAWDLDRLHRRPVELEAFMSLADEKRLALATVAGDVDLATPQGRLVARLKGCVAAHETEHKKARQRRAARQKAERGLPNWSKAFGYLPGPNGPEPDPRTAPLVEQAYADILAGASLGDVCRQWNDAGAFTITGRPWTTTTLSKFLRKPRNAGLRAYKGARYGPVDRDAIVGKARWSPLVDEATFWAAQAVLDAPGRAPGRKSVRRHLLTGLAGCGKCGNHLAGSYRTDGRVVYVCKACHGVAILADNIEPFLYHIVAERLAMPDAADLLRREVHDAAEAETIRLELETLYGELDRLAVERAEGLLTARQVKISTDIVNAKITKLQACQLDQERLRVFDGIPLGTPRVAGTIAELSPDRFRAVLDVLAEVVVQPVGKSGRIFNPERVRVNWR

SEQ ID NO: 1327 - protein, 469 aa, synthetic construct
MSYTTPVRAAVYLRISEDRSGEQLGVARQREDCLKLCGQRKWEPVEYLDNDVSASTGKRRPAYEQMLADITAGKIAAVVAWDLDRLHRRPVELEAFMSLADEKRLALATVAGDVDLATPQGRLVARLKGCVAAHETEHKKARQRRAARQKAERGYPNWSKAFGYLPGPNGPEPDPRTAPLVKQAYADILAGASLGDVCRQWNDAGAFTITGRPWTTTTLSKFLRKPRNAGLRAYKGARYGPVDRDAIVGKAQWSPLVDEATFWAAQAVLDAPGRAPGRKSVRRHLLTGLAGCGKCGNHLAGSYRTDGRVVYVCKACHGVAILADNIVPILYHIVAERLAMPDAVDLLRREIHDVAEAETIRLELETLYGELDRLAVERAEGLLTARQVKISTDVVNAKITKLQACQLDQERLRVFDGIPLGTPQVAGMIAELSPDRFRAVLDVLAEVVVQPVGKSGGIFNPERVQVNWR

SEQ ID NO: 1328 - protein, 469 aa, synthetic construct
MSYTTPVRAAVYLRISEDRSGEQLGVARQREDCLKLCDQRKWVPVEYLDNDVSASTGKRRPAYEQMLADITAGKIAAVVAWDLDRLHRRPVELEAFMSLADEKRLALATVAGDVDLATPQGRLVARLKGSVAAHETEHKKARQRRAARQKAERGHPNWSKAFGYLPGPNGPEPDPRTAPLVKQAYVDILAGASLGDVCRQWNDAGAFTITGRPWTTTTLSKFLRRPRNAGLRAYKGARYGPVDRDAIVGRARWSPLVDEATFWAAQAVLDAPGRAPGRKSVRRHLLTGLAGCGKCGNHLAGSYRTDGRVVYVCKACHGVAILADNIEPILYHIVAERLAMPDAADLLRREIHDAAEAETIRLELETLYGELDCLAVERAEGLLTARQVKISTDIVNAKITKLQARQLDQERLRVFEGIPLGTPQVAGMIAELSPDRFRAVLDVLAEVVVQPVGKSGRIFNPERVQVNWR

SEQ ID NO: 1329 - protein, 485 aa, synthetic construct
MTKKVAIYTRVSTTNQAEEGFSIDEQIDRLTKYAEAMGWQVSDTYTDAGFSGAKLERPAMQRLINDIENKAFDTVLVYKLDRLSRSVRDTLYLVKDVFTKNKIDFISLNESINTSSAMGSLFLTILSAINEFERENIKERMTMGKLGRAKSGKSMMWTKTAFGYHHNRKTGILEIVPLQATIVEQIFTDYLSGISLTKLRDKLNESGHIGKDIPWSYRTLRQTLDNPVYCGYIKFKDSLFEGKHKPIIPYETYLKVQKELEERQQQAYERNNNPRPFQAKYMLSGMARCGYCGAPLRIVLGHKRKDGSRTMKYHCADRFPRKTKGVTVYNDNKKCDSGTYDLSNLENTVIDNLVGFQENDSSLLKIINGNNQPILDTSSFKKQISQIDKRIQKNSDLYLNDFITMDELKDRTDSLQAERKLLEAKISENKFNDSTDVFELVKTQLGSIPINELSYDNKKKIVNNLVSKVDVTADNVDIIFKFQLA

SEQ ID NO: 1330 - protein, 452 aa, synthetic construct
MKAAIYIRVSTQEQVENYSIQAQTEKLTALCRSKDWDVYDIFIDGGYSGSNMNRPALNEMLSKLHEIDAVVVYRLDRLSRSQRDTTTLIEEYFLKNNVEFVSLSETLDTSSPFGRAMIGILSVFAQLERETIRDRMVMGKIKRIEAGLPLTTAKGRTFGYDVIDTKLYINEGEAKQLRLIYDIFEEEQSITFLQKRLKKLGFKVRTYNRYSNWLTNDLYCGYVSYKDKVHVKGIHEPIISEEQFHRVQEIFTRMGKSPNMNRDSASLLSNLVVCSKCGLGFVHRSKDTMSRGKKYHYRYYSCKTYKHAHELEKCGNKTWRADKLEELIINRVNNYSFASHNVDREDELDSLNEKLKIEHAKKKRLFDLYINGSYEVSELDSMMNDINAQINYYESQIEASEELKKNKKIQENLADLATVDFDSLEFREKQLYLKSLINKIYVDGEQVTIEWL

SEQ ID NO: 1331 - protein, 485 aa, synthetic construct
MTKKVAIYTRVSTTNQAEEGFSIDEQIDRLTKYAEAMGWQVSDTYTDAGLSGAKLERPAMQRLINDIENKAFDTVLVYKLDRLSRSVRDTLYLVKDVFTKNKIDFISLNESIDTSSAMGGLFLTILSAINEFERENIKERMTMGKLGRAKSGKSMMWTKTAFGYYHNRETGILEIVPLQATIVEQIFTDYLSGISLTKLRDKLNESGHIGKDIPWSYRTLRQTLDNPVYCGYIKFKDSLFEGMHKPIIPYETYLKVQKELEERQQQTYERNNNPRPFQAKYMLSGMARCGYCGAPLRIVLGHKRKDGSRTMKYHCANRFPRKTKGVTVYNDNKKCDSGTYDLSDLENTVIDILIGLQENNDSLLKIIDGNNQPIQDTCSFEKQISQIDKKIQKNSDLYLNDFITMDELKDRTESLQAEKKLLEAKISENKFNDSTDVFELVKTQLGSIPINELSYDNKKKIVNNLVSKVDVTADNVDIIFKFQLA

SEQ ID NO: 1332 - protein, 452 aa, synthetic construct
MKAAIYIRVSTREQVENYSIQAQTEKLTALCRSKDWDVYDIFIDGGYSGSNMNRPALNEMLSKLHEIDAVVVYRLDRLSRCQRDTITLIEEYFLKNNVEFVSLSETLDTSSPFGRAMIGILSVFAQLERETIRDRMVMGKIKRIEAGLPLTTAKGRTFGYDVIDTKLYINEEEAKQLQLIYDIFEEEQSITFLQKRLKKLGFKVRSYNRYSNWLTNDLYCGYVSYKDKVHVKGIHEPIISEEQFYRVQEIFTRMGKNPNMNRDSASLLNSLVVCSKCGLGFVHRRKDTMSHGRKYHYRYYCCKTYKHIHELEKCGNKIWRADKLEELIISRVNSYSLASRNVDKEDELDSLNEKLKIEHAKKKRLFELYINGSYEVSGLDSMMNDIDAQINYYESQIEANEEQRKNKKIQENLADLATVDFDSLGFREKQLYLKSLINKIYIDGEQVTIEWL

SEQ ID NO: 1333 - protein, 452 aa, synthetic construct
MKAAIYIRVSTQEQVGNYSIQAQTEKLTALCRSKDWDVYDIFVDGGYSGSNMNRPALNEMLSKLHEIDAVVVYRLDRLSRSQRDTTTLIEEYFLKNNVEFVSLSETLDTSSPFGRAMIGILSVFAQLERETIRDRMVMGKIKRIEAGLPLTTAKGRTFGYDVIDTKLYINEEEAKQLRLIYDIFEEEQSITSLQKRLKKLGFKVRTYNRYNNWLTNDLYCGYVSYKDKVHVKGIHEPIISEEQFYRVQEIFTRMGKNPNMNRDSASLLSNLVVCSKCGLGFVHRSKDTMSRGKKYHYRYYSCKTYKHTHELEKCGNKTWRADKLEELIINRVNNYSFASRNVDKEDELDSLNERLKIEHAKKKRLFDLYINGGYEVSELDSMMSDIDAQIGYYESQIGASEELKKNKKFQGNLADLATVDFDSLEFREKQLYLKSLINKIYIDGEQVTIEWL

SEQ ID NO: 1334 - protein, 452 aa, synthetic construct
MKAAIYIRVSTQEQVENYSIQAQTEKLTALCRSKDWDVYDIFIDGGYSGSNMNRPALNEMLSKLHEIDAVVVYRLDRLSRSQRDTTTLIEEYFLKNNVEFVSLSETLDTSSPFGRAMIGILSVFAQLERETIRDRMVMGKIKRIEAGLPLTTAKGRTFGYDVIDTKLYINEEEAKQLRLIYDIFEEEQSITSLQKRLKKLGLKVRTYNRYNNWLTNDLYCGYVSYKDKVHVKGIHEPIISEEQFYRVQEIFTRMGKNPNMNRDSASLLNNLVVCSKCGLSFVHRSKDTMSRGKKYHYRYYSCKTYKHTHELEKCGNKTWRADKLEGLIINRVNNYSFASRDMDKEDELDSLREKLRIEHAKKKRLFDLYINGSYEASELDGMMSDIDAQINYYESQIVANEELKKNKKIQENLADLATVDFDSLEFREKQLYLKSLINKIYIDGEQVTIDWL

SEQ ID NO: 1335 - protein, 452 aa, synthetic construct
MKAAIYIRVSTQEQVENYSIQAQTEKLTALCRSKDWDVYDIFIDGGYSGSNMNRPALNEMLSKLHEIDAVVVYRLDRLSRSQRDTTTLIEEYFLKNNVEFVSLSETLDTSSPFGRAMIGILSVFAQLERETIRDRMVMGKIKRIEAGLPLTTAKGRTFGYDVIDTKLYVNEEEAKQLRLIYDIFEEEQSITSLQKRLKKLGFKVRTYNRYNSWLTNDLYCGYVSYKDKVHVKGVHEPIISEEQFYRVQEIFTRMGKNPNMNRDSASLLSNLVVCSKCGLGFVHRSKDTMSRGKKYHYRYYSCKTYKHTHELEKCGNKTWRADKLEELVINRVNNYSFASRNMVKEDELDSLNEKLKIEHAKKKRLFDLYINGSYEVSELDSMMNDIDAQINYYESQIEANEELKKNKKIQENLADLATVDFDSLEFREKQLYLKSLINKIYIDGEQVTIEWL

SEQ ID NO: 1336 - protein, 452 aa, synthetic construct
MKAAIYIRVSTQEQVGNYSIQAQTEKLTALCRSKDWDVYDIFIDGGYSGSNMNRPALNEMLSKLHEIDAVVVYRLDRLSRSQRDTTTLIEEYFLKNNVEFVSLSETLDTSSPFGRAMIGILSVFAQLERETIRDRMVMGKIKRIEAGLPLTTAKGRTFGYDVIDTKLYINEEEAKQLQLIYDIFEEERSITSLQKRLKKLGFKVRTYNRYNNWLTNDLYCGYVSYKDKVHVKGIHEPIISEEQFYRVQEIFTRMGKNPNMNRDSASLLSNLVVCSKCGLGYVHRSKDTMSRGKKYHYRYYSCKTYKHAHELEKCGNKTWRADKLEELIINRVNNYSFASRNVDKEDELDSLNEKLKIEYARKKRLFDLYINGGYGVSELDSMMSDIDAQINYYESRIEANEELKRNKKIQGNLADLATVDFDSLEFREKQLYLKSLINKIYIDGERVTIEWL

SEQ ID NO: 1337 - protein, 452 aa, synthetic construct
MKAAIYIRVSTREQVENYSIQAQTEKLTALCRSKDWDVYDIFIDGGYSGSNMNRPALNEMLSKLHEIDAVVVYRLDRLSRSQRDTITLIEEYFLKNNVEFVSLSETLDTSSPFGRAMIGILSVFAQLERETIRDRMVMGKIKRIEAGLPLTTAKGRTFGYDVIDTKLYINEEEAKQLRLIYDIFEEEQSITFLQKRLKELGFKVRTYNRYNNWLTNDLYCGYVSYKDKVHVKGIHEPIISEEQFYRVQEIFTRMGKNPNMNRDSASLLNNLVVCSRCGLSFVHRRKDAMSRDKKYHYRYYSCKTYKHIHELEKCGNKIWRADKLEELIINRVNNYSLASRNVDKEDELDSLNEKLKTEHARKKRLFDLYINGSYEASELDSMMKDIDAQINYYESQIEANEELRKNRKIQENLAHLATVDFDSLEFREKQLYLKSLINKIYIDGEQVTIEWL

SEQ ID NO: 1338 - protein, 469 aa, synthetic construct
MSYTTPARAAVYLRISEDRSGEQLGVARQREDCLKLCDQRKWVPVEYLDNDVSASTSKRRPAYEQMLADIAAGKIAAVVAWDLDRLHRRPIELEAFMSLADEKRLALATVAGDVDLATPQGRLVARLKGSVAAHETEHKKARQRRAARQKAERGLPNWSKAFGYLPGPNGPEPDPRTAPLVKQAYADILAGASLGDVCRQWNDAGAFTITGRPWTTTTLSKFLRKPRNAGLRAYKGARYGPVDRDAIIGKAQWSPLVDEATFWASQAILDAPGRAPGRKSVRRHLLTGLAGCGKCGNHLAGSYRTDGRVVYVCKACHGVAILADIIVPMLYHIVAERLAMPDAVDLLRREIHDAAEAETIRLELETLYGELDRLAVERAEGLLTARQVKISTDIVNAKITKLQARQLDQERLRVFDGIPLGTPQVAGMIAELSPDRFRAVLDVLAEVVVQPVGKSGRIFNPERVQVNWR

SEQ ID NO: 1339 - protein, 452 aa, synthetic construct
MKAAIYIRVSTREQVENYSIQAQTEKLTALCRSKDWDVYDVFIDGGYSGSNMNRPALNEMLSKLHEIDAVVVYRLDRLSRSQRDTITLIEEYFLKNNVEFVSLSETLDTSSPFGRAMIGILSVFAQLERETIRDRMVMGKIKRIEAGLPLTTAKGRTFGYDVIDTKLYINEEEAKQLQLIYDIFEEEQSITFLQKRLKKLGFKVRTYNRYNNWLTNDLYCGYVSYKDKVHVKGIHEPIISEEQFYRVQEIFTRMGKNPNMNRDSASLLNNLVVCSKCGLGFVHRRKDAMSRDKKYHYRYYSCKTYKHIHELEKCGNKIWRADKLEELIINRVNNYSFASRNADKEDELDSLNEKLKIEHAKRKRLFDLYINGSYEVSELDSMMNDIDAQINYYESQIEANEELRKNKKIQENLANLATVDFDSLEFREKQLYLKSLINKIYIDGEQVTIEWL

SEQ ID NO: 1340 - protein, 469 aa, synthetic construct
MCYTTPVRAAVYLRISEDRSGEQLGVARQREDCLKLCGQRKWVPVEYLDNDVSASTDRRRPAYEQMLADITAGKIAAVVAWDLDRLHRRPIELEAFMSLADEKRLALATVAGDVDLATPQGRLVARLKGSVAAHETEHKKARQRRAARQKAERGLPNWSKAFGYLPGPNGPEPDPRTAPLVKQAYADILAGASLGDVCRQWNDAGAFTITGRPWTTTTLSKFLRKPRNAGLRAYKGARYGPVDRDAIVGKAQWSPLVDEATFWAAQAVLDAPGRAPGRKRVRRHLLTGLAGCGKCGNHLAGSYRTDGRVVYVCKACHGVAILADNIEPTLYRIVAERLAMPDAVDLLRREIHDAAEAETIRLELETLYGELDRLAVERAEGLLTARQVKISTDIVDAKITKLQARRLDQERLRVFDGIPLGTPQVAGVIAELSPDRFRAVLDVLAEVVVQPVGKGGRIFNPERVQVNWR

SEQ ID NO: 1341 - protein, 485 aa, synthetic construct
MTKKVAIYTRVSTTNQAEEGFSIDEQTDRLTKYAEAMGWQVSDTYTDAGFSGAKLERPAMRRLINDIENKAFDTVLVYKLDRLSRSVRDTLYLVKDVFTKNEIDFISLNESINTSSAMGSLFLTILSAINEFERENIKERMTMGKLGRAKSGKSMMWTKTAFGYYHNRETGVLEIVPLQATIVEQIFTDYLSGISLTKLRDKLNEGGHIGKDIPWSYRTLRQTLDNPVYCGYIKFKDSLFEGMHKPIIPYETYLKVQKELEERQQQTYERNNNPRPFQAKYMLSGMARCGYCGAPLRVVLGHKRKDGSRTMKYHCANRFPRKTKGVTVYNDNEKCDSGTYDLSDLESTVIDNLIGFQENNDSLLKIINGNNQPILDTSSFKKQISQIDKKIQKNSDLYLNDFITMDELKDRTDRLQAEKKLLKAKISENKSSDSTDVFELVKTQLGSIPISELSYDNKKKIVNNLVSKVDVTADNVDIIFKFQLA

SEQ ID NO: 1342 - protein, 485 aa, synthetic construct
MTKKVAIYTRVSTTNQAEEGFSIDEQIDRLTKYAEAMGWQVCDTYTDAGSSGAKLERPAMQRLINDIESKAFDTVLVYKLDRLSRSVRDTLYLVKDVFTKNKIDFISLNESIDTSSAMGSLFLTILSAINEFERENIKERMTMGKLGRAKSGKSMMWTKTAFGYYHNRKTGILEIVPLQATIVEQIFTDYLSGISLTKLRDKLNESGHIGKDIPWSYRTLRQTLDNPVYCGYIKFKNSLFEGMHKPIIPYETYLKVQKELEGRQQQTYERNNNPRPFQAKYMLSGMARCGYCGAPLRIVLGHKRKDGSRTMKYHCANRFPRRTKGVTVYNDNKNCDSGTYDLSNLENTVIDNLIGFQENNESLLKIINGNNKPTLDTSSLKKQIGQIDKKIQKNSDLYLNDFITMDELKERTDSLQAEKKLLQAKISEYKFSDSTDVFELVKTQLGSIPINELSYDNKKKIVNNLVGKVDVTADNVDITFKFQLA

SEQ ID NO: 1343 - protein, 485 aa, synthetic construct
MTKKVAIYTRVSTTNQAEEGFSIDEQIDRLTKYAEAMDWQVSDTYTDAGFSGAKLERPAMQRLINDIENKAFDTVLVYKLDRLSRSVRDTLYLVKDVFTKNKIDFISLNECIDTSSAMGSLFLTILSAINEFERENIKERMTMGKLGRAKSGKSMMWTKTAFGYYHNRKTGILEIVPLQATIVEQIFTDYLSGISLTKLRDKLNESGHIGKDIPWSYRTLRQTLDNPVYCGYIKFKDSLFEGMHKPIIPYETYLKVQKELEERQQQAYERNNNPRPFQAKYMLSGMARCGYCGAPLRIVLGHKRKDGSRTMKYHCANRFPRKTKGVTVYNDNKKCDSGTYDLSDLENTVIDNLIGFQENNDSLLKIINGNNQPILDTSSFKKQISQIDKKIQKNSDLYLNGFITMDELKDRTYSLQAEKKLLKAKISENKFNDSTDVFELVKTQLGSIPINELSYDNKKKIVNNLVSKVDVTADDVDIIFKFQLA

SEQ ID NO: 1344 - protein, 452 aa, synthetic construct
MKAAIYIRVSTQEQVGNYSIQAQTEKLTALCRSKDWDVYDIFVDGGYSGSNMNRPALNEMLSKLHEIDAVVVYRLDRLSRSQRDTTTLIEEYFLKNNVEFVSLSETLDTSSPFGRAMIGILSVFAQLERETIRDRMVMGKIKRIEAGLPLTTAKGRTFGYDVIDTKLYINEEEAKQLQLIYDIFEEEQSITSLQKRLKKLGFKVRTYNRYNNWLTNDLYCGYVSYKDKVHVKGIHEPIISEEQFYRVQEIFTRMGKHPNMNRDSASLLSNLVVCSKCGLGFVHRSKDTMSRGKKYHYRYYSCKTYKHTHELEKCGNKTWRADKLEELIINRVNNYSFAGRNVDKEDELDSLNEKLKIEHAKKKRLFDLYINGSYEVSELDSMMNDIDAQINYYESQIEAKEELRKNKKIQENLADQATVDFDSLEFREKQLHLKSLINKIYIDGEQVTIEWL

SEQ ID NO: 1345 - protein, 469 aa, synthetic construct
MSYTTPVRAAVYLRISEDRSGEQLGVARQREDCLKLCGQRKWVPVEYLDNDVSASTGKRRPAYEQMLADITAGKIAAVVAWDLDRLHRRPVELEAFMSLADEKRLALATVAGDVDLATPQGRLVARLKGCVAAHETEHKKARQRRAARQKAERGHPNWSKAFGYLPGPNGPEPDPRTAPLVKQAYADILAGASLGDVCRQWNDAGAFTITGRPWTTTTLSKFLRKPRNAGLRAYKGARYGPVDRDAIVGKAQWSPLVDEATFWAAQAVLDAPGRAPGRKSVRRHLLTGLAGCGKCGSHLAGSYRTDGRVVYVCKACHGVSILADNIVPILYHIVAERLAMPDVVDLLCRESHDAAGAETIRLELETLYGELDRLAVERAEGLLTARQVKISTDIVNAKITKLQARQQDQERLRVLDGIPLGTPQVAGMIAELSPDRFRAVLDVLVEVVVQPVGRGGRISNPERVQVNWR

SEQ ID NO: 1346 - protein, 485 aa, synthetic construct
MTKKVAIYTRVSTTNQAEEGFSIDEQIDRLTKYAEAMGWQVSDTYTDAGFSGVKLERPAMQRLINDIENKAFDTVLVYKLDRLSRSVRDTLYLVKDVFTENKIDFISLSESIDTSSAMGSLFLTILSAINEFERENIKERMTMGKLGRAKSGKSMMWTKTAFGYYHNRKTGILEIVPLQATIVEQIFTDYLSGISLTKLRDKLNESGHIGKDIPWSYRTLRQTLDNPVYCGYIKFKDSLFEGMHRPIIPYETYLKVQKELEERQQQTYERNNNPRPFQAKYMLSGMARCGYCGAPLRIVLGHKRKDGSRTMKYHCANRFPRKTKGVTVYNDNKKCDSGTYDLSNLENTVIDILVGFQENDDSLLKIINGNNQPILDTSSFRKQISQIDKKIQKNSDLYLNDFITMDELKDRTNSLQAEKKLLKAKISENEFNDSTDVFELVKTQLGSIPINELSYDNKKKIVNNLVSKVDVTTDNVDIIFKFQLA

SEQ ID NO: 1347 - protein, 469 aa, synthetic construct
MCYTTPVRAAVYLRISEDRSGEQLGVARQREDCLKLCVQRKWAPVEYLDNDVSASTGKRRPAYEQMLADITAGKIAAVVAWDLDRLHRRPIELEAFMSLADEKRLALATVAGDVDLATPQGRLVARLKGSVAAHETEHKKARQRRAARQKAERGLPNWSKAFGYLPGPNGPEPDPRTAPLVKQAYADILAGASLGDVCRQWNDAGAFTITGRPWTTTTLSKFLRKPRNAGLRAYRGAPYGPVDRGAIVGKAQWSPLVDEATFWAAQAILDAPGRAPGRKSVRRHLLTGLAGCGKCGNHLAGSYRTDGRIVYVCKACHGVAILADNIEPILYHIVAERLAMPGAVDLLRREIHDVAEAETIRLELETLYGELDRLAVERAEGLLTARQVKISTDIVNAKITKLQARQLDQERLRVFDGIPLGTPRVAGMIAELSPDRFRAVLDVLAEVVVQPVGKGGRIFNPERVQVNWR

SEQ ID NO: 1348 - protein, 452 aa, synthetic construct
MKAAIYIRVSTREQVENYSIQAQTEKLTALCRSKDWDVYDIFIDGGYSGSNMNRPALNEMLSKLHEIDAVVVYRLDRLSRSQRDTITLIEEHFLKNNVEFVSLSETLDTSSPFGRAMIGILSVFAQLERETIRDRMVMGKIKRIEAGLPPTTAKGRTFGYDVIDTKLYINEEEAKQLQLIYDIFEEEQSITFLQKRLKKLGFKVRTYNRYNSWLTNDLYCGYVSYKDKVHVKGIHEPIISEEQFRRVQEIFTRTGKNPNMNRDSASLLNNLVVCSKCGLGFVHRRKDTVSRGKKYHYRYYSCKTYKHTHELEKCGNKIWRADKLEELVINRVNNYSFASRNVDKEDELDSLNEKLKIEHTKKKRLFDLYINGSYEVSELDSMMNDIDAQINYYESQIEANEELKKNKKIQENLADLATVDYDSLEFREKQLYLKSLINKIYIDGEQVTIEWL

SEQ ID NO: 1349 - protein, 469 aa, synthetic construct
MSYTTPVRAAVYLRISEDRSGEQLGVARQREDCLKLCDQRKWVPVEYLDNDVSASTGKRRPAYEQMLADITAGKIAAVVAWDLDRLHRRPIELEVFMSLADEKRLALATVAGDVDLATPQGRLVARLKGSVAAHETEHKKARQRRAARQKAERGYPNWSKAFGYLPGLNGPEPDPRTAPLVRQAYADILAGASLGDVCRQWNGAGAFTITGRQWTTTTLSKFLRKPRNAGLRAYKGARYGPVDRDAIVGKAQWSPLVDEATFWAAQAVLDAPGRAPGRKSVRRHLLTGLAGCGKCGNHLAGSYRADGRVVYVCKACHGVTILADNIEPILYHIVTERLAMPDAVDLLRREIHDAAEAETVRLELETLYGELDHLAVERAEGLLTARQVKISTDIVNAKITKLQARQLDQVRLRVFDGIPLGTPQVAGTIAELSPDRFRAVLDVLAVVVVQPVGKSGRIFNPERVQVNWR

SEQ ID NO: 1350 - protein, 485 aa, synthetic construct
MTKKVAIYTRVSTTNQAEEGFSIDEQIDRLAKYAEAMGWQVSDTYTDAGISGAKLERPAMQRLINDIENKAFDTVLVYKLDRLSRCVRDTLYLVKDVFTKNKIDFISLSESIDTSSAMGSLFLTILSAINEFERENIKERTAMGKLGRAKSGKSMMWTKTAFGYYHNRKTGILEIVPLQATIVEQIFTDYLSGISLTKLRDKLNESGHIGKDIPWSYRTLRQTLDNPVYCGYIKFKDSLFEGMHKPIIPYETYLRVQKELEVRQQQAYERNNNPRPFQAKYMLSGMARCGYCGAPLKIVLGHKRKDGSRTMKYHCANRFPRKTKGVTVYNDNKKCDSGTYDLSNLENTVIDYLIGFQENNDSLLKIINGNNQPILDTSSFKKQISQIDKKIQKNSDLYLNDFITMDELKDRTDTLQAERNLLKAKISENKSSDSTDVFELVKTQLGSIPINELSYDNKKKIVNNLVSKVDVTADNVDIIFKFRLA

SEQ ID NO: 1351 - protein, 452 aa, synthetic construct
MKAAIYIRVSTQEQVGNYSIQAQTEKLTALCRSKDWDVYDIFIDGGYSGSNMNRPALNEMLSKLHEIDAVVVYRLDRLSRSQRDTTTLIEEYFLKNNVEFVSLSETLDTSSPFGRAMIGILSVFAQLERETIRERMVMGKIKRIEAGLPLTTAKGRTFGYDVIDTKLYINEEEAKQLQLIYDIFEEVQSITSLQKRLKKLGFKVRTYNRYSNWLTNDLYCGYVSYKDKVHVKGIHEPIISEEQFYRVQEIFTRMGKSPNMNRDSASLLNNLVVCSKCGLGFVHRSKDTMSRGKKYHYRYYSCKTYKHTHELEKCGNKTWRADKLEELIINRVSNYSFASRNVDKEDELDSLSEKLKIEHAKKRRLFDLYINGSYEVSELDSMMNDIDAQISYYESQIEANEELKKNKKIQENLANLATVDFDSLEFREKQLYLKSLINKIYIDGEQVTIEWL

SEQ ID NO: 1352 - protein, 485 aa, synthetic construct
MTKKVAIYTRVSTTNQAEEGFSIDEQIDRLTKYAEAMGWQVSGTYTDAGFSGAKLERPAMRRLINDIENKAFDTVLVYKLDRLSRSVRDTLYLVKDVFTKNKIDFISLNESIDTSSAMGSLFLTILSAINEFERENIKERMTMGKLGRAKSGKSMMWTKTAFGYYHNRRTGILEIVPLQATIVEQIFTDYLSGVSLTKLRDKLNESGHIGKDIPWSYRTLRQTLDNPVYCGYIKFKGSLFEGMHKPIIPYEIYLKVQKELEERQQQTYERNNNPRPFQAKYMLSGMARCGYCGAPLKIVLGHKRKDGSRTMKYHCANRFPRKTKGVTVYNDNKKCDSGTYDLSNLENTVIDNLIGFQEDNDSLLKIINGNNQPILDTSGFKKQISQIDKKIQKNSDLYLNDLITMDELKDRTDSLQAEKKLLKAKISENKFNDSTDVFELVKTQLGSVPINELSYDDKKKIVNNLVSKVDVTADNVDIIFKFQLA

SEQ ID NO: 1353 - protein, 469 aa, synthetic construct
MSYTTPVRAAVYLRISEDRSGEQLGVARQREDCLKLCDQRKWVPVEYLDNDVSASTGKRRPAYEQMLADITAGKITAVVAWDLDRLHRRPIELEAFMSLADEKRLALATVAGDVDLATPQGRLVARLKGSVAAHETEHKKARQRRAARQKAERGHPNWSKAFGYLPGPNGPEPDPRTAPLVKQAYADILAGASLGEVCRRWNDAGAFTITGRPWTTTTLSKFLRKPRNAGLRAYKGARYGPVDRDAIVGKAQWSPLVDEATFWAAQAVLDAPGRAPGRKSVRRHLLTGLAGCGKCGNHLAGSYRTDGRVVYVCKACHGVAILADNIEPILYRIVAERLAMPDAVDLLRREIHDAAEAETIRLELETLHDELDRLAVERGEGLLTARQVKISTDIVNAKITKLQARQLDQERLRVFDGIPLGTPQVAGMIAELSPNRFRAVLDVLAEVVVQPVGKSGRILNPERVRVNWR

SEQ ID NO: 1354 - protein, 485 aa, synthetic construct
MTKKVAIYTRVSTTNQAEEGFSIDEQIDRLTKYAEAMGWQVSDTYTDAGLSGAKLERPAMQRLINDIENKAFDTVLVYKLDRLSRSVRDTLYLVKDVFTKNKIDFISLNESIDTSSATGSLFLTILSAINEFERENIKERMTMGKLGRAKSGKSMMWTRTAFGYYHNRETGILEIVPPQATIVEQIFTDYLSGISLTKLRDKLNESGHIGKDIPWSYRTLRQTLDNPVYCGYIKFKGSLFEGMHKPIIPYETYLKVQKELEERQQQAYERNNNPRPFQAKYMLSGVARCGYCGAPLKIVLGRKRKDGSRTMKYHCANRFPRKTKGVTVYNDNKKCDSDTYDLSNLENTVIDNLIGLQENNDSLLKIINGNNQPILDTSSFEKQISQIDRKIQKNSDLYLNDFITMDELKERTDSLQAEKRLLKARISENKFNDSTGVFELVKTQLGSIPVNELSYDNKKKIVNNLVSKVDVTADNVDIIFKFQLV

SEQ ID NO: 1355 - protein, 469 aa, synthetic construct
MSYTTPVRAAVYLRISEDRSGEQLGVARQREDCLKLCDQRKWVPVEYLDNDVSASTGKRRPAYEQMLADITAGKIAAVVAWDLDRLHRRPIELEAFMSLADEKRLALATVAGDVDLATPQGRLVARLKGSVAAHETEHKRARQCRAARQKAERGHPNWSKAFGYLPGPNGPEPDPRTAPLVKQAYADILAGASLGDVCRQWNDAGAFTITGRPWTTTTLSKFLRKPRNAGLRAYKGARYGPVDRDAIVGKARWSPLVDEATFWAAQAVLDAPGRAPGRKSVRRHLLTGLAGCGKCGHHLAGSYRTDGRVVYVCKACHGVAILAENIEPILYHIVAERLAMPDAVDLLRREIHDAAEAETIRLELETLYGELDRLAVERAEGLLTARQVKISTDIVNAKITKLQARQLNQERLRVLDGIPLGTPQVAGAIAELSPDRFRAVLDVLAEVVVQPVGKSGRIFNPERVQVNWR

SEQ ID NO: 1356 - protein, 452 aa, synthetic construct
MKAAIYIRVSTQEQVGNYSIQAQTEKLTALCRSKDWDVYDIFIDGGYSGSNMNRPALNEMLSKLHEIDAVVVYRLDRLSRSQRDTTTLIEEYFLKNNVEFVSLSETLDTSSPFGRAMIGILSVFAQLERETIRDRMVMGKIKRIEAGLPLTTAKGRTFGYDVIDTKLYINEEEAKQLQLIYDIFEEERSITSLQKRLKKLGFKVRTYNRYNSWLTNDLYCGYVSYKDKVHVKGIHEPIISEEQFYRVQEIFTRMGKSPNMNRDSASLLNNLVVCGKCGLGFVHRRKDTMCRGKKYHYRYYSCKTYKHAHELEKCGNKTWRADKLEELIISRVNSYSFAGRNVDKEDELDGLNERLKIEHAKKKRLFDLYINGSYEVSELDSMMDDIDAQINYYESQIEANEGLKENRKIQENQADLAAVDFDSLEFREKQQYLKSLINKIYIDGEQVTIEWL

SEQ ID NO: 1357 - protein, 452 aa, synthetic construct
MKAAIYIRVSTREQVENYSIQAQTEKLTALCRSKDWDVYDIFIDGGYSGSNMNRPALNEMLSKLHEIDAVVVYRLDRLSRSQRDTITLIEEYFLKNNVEFVSLSETLDTSSPFGRAMIGILSVFAQLERETIRDRMVMGKIKRIEAGLPLTTAKGRTFGYDVIDTKLYINEEEAKQLQLIYDIFEEEQSITFLQKRLKKLGFKVHTYNRYNNWLTNDLYCGYVSYKDKVHVKGIHEPIISEEQFYRVQEIFTRMGKNPNMNRDSASLLSNLVVCSKCGLGFVHRRKDTMSRGKKYHYRYYSCKTYKHTHELEKCGNKIWRADKLEELITDRVNNYSFAGRSVDKEDELDSLNEKLKIEHAKKRRLFDLYINGGYEMSELVSMMNDIDAQINYYESQIEANEELRKNKKIQENLADLATVDYDSLEFREKQLYLKSLISKIYIDGEQVTIEWL

SEQ ID NO: 1358 - protein, 452 aa, synthetic construct
MKAAIYIRVSTQEQVGNYSIQAQTEKLTALCRSKDWDVYDIFVDGGYSGSNMNRPALNEMLSKLHEIDAVVVYRLDRLSRSQRDTTTLIEEYFLKNNVEFVSLSETLDTSSPFGRAMIGILSVFAQLERETIRDRMVMGKIKRIEAGLPLTTAKGRTFGYDVVDTKLYINEEEAKQLQLIYDIFEEEQSITLLQKRLKKLGFKVRTYNRYNNWLTNDLYCGYVSYKDKVHVKGIHEPIISEEQFYRVQEIFTRMGKNPNMNRDSASLLNSLVVCSKCGLGFVHRSKDTMSRGKKYHYRYYSCKTYKHTHELEKCGNKTWRADKLEELIISRVNNYSFASRRVDKEDELDSLNEKLKIEHAKKKRLFDLYINGSYEVSELDSMMNDIDAQINYYESQIEASEELKENKKIQENLAELATVDFDSLEFREKQLYLKSLINKIYIDGEQVTIEWL

SEQ ID NO: 1359 - protein, 485 aa, synthetic construct
MTKKVAIYTRVSTTNQAEEGFSIDEQIDRLTKYAEAMGWQVSDTYTDAGISGAKLERPAMQRLINDIENKAFDTVLVYKLDRLSRSVRDTLYLVKDVFTKNKIDFISLNESIDTSSAMGSLFLTILSAINEFERENIKERMTMGKLGRAKSGKSMMWTKTAFGYYHNCKTGILEIVPLQATIVEQIFTDYLSGVSLTKLRDKLNESGHIGKDIPWSYRTLRQTLDNPVYCGYIKFKGSLFEGLHKPIIPHETYLKVQKELEERQQQTYERNNNPRPFQAKYMLSGMARCGYCGAPLRIVLGHKRKDGSRTMKYHCANRFPRKTKGVTVYNDNKKCDSGTYDLSNLENTVIDNLIGLQENNDSLLKIINGNNQPILDTSSYKKQISQIDRKIQKNSDLYLNDFITMDELKDRTDSLQAEKKLLKAKISENKSSDSTDVFELVKTQLGSIPINELSYDNKKKIVSNLVSKVDVTADNVDIIFKFQLA

SEQ ID NO: 1360 - protein, 485 aa, synthetic construct
MTKKVAIYTRVSTTNQAEEGFSIDEQTDRLTKYAEAMGWQVGDTYTDAGFSGARLERPAMQRLISDIGNKAFDTVLVYKLDRLSRSVRDTLYLVKDVFTKNKIDFISLNESIDTSSAMGSLFLTILSAINEFERENIKERMTMGKLGRAKSGKSMMWTKTAFGYHHNRKTGILEIVPLQATIVEQIFTDYLSGISLTKLRDKLNESGHIGKDIPWSYRTLRQTLDNPVYCGYTKFRGSLFEGMHKPIIPYETYLKVQKELEERQQQTYERNNNPRPFQAKYMLSGMARCGYCGAPLRIVLGHKRKDGSRTMKYHCANRFPRKTKGVTVYNDNKKCDSGTYDLSNLENTVIDSLISFQEDNDSLLKVINGNNQPILDTSSFKKQISQIDKKIQKNSDLYLNDFITMDELKDRTDSLQAEKELLKAKISENKFNDSTDVFELVKTQLGSIPINELSYDDKKKIVNNLVSKVDVTADNVDIIFKFQLA

SEQ ID NO: 1361 - protein, 469 aa, synthetic construct
MSYTTPVRAAVYLRISEDRSGEQLGVARQREDCLKLCDQRKWVPVEYLDNDVSASTGKRRPAYEQMLADITAGKIAAVVAWDLDRLHRRPIELEAFMGLADEKRLALATVAGDVDLATPQGRLVARLKGSVAAHETEHKKARQRRAARQKAERGYPNWSKAFGYLPGPNGPEPDPRTAPLVKQAYADILAGASLGDVCRQWNDAGALTITGRPWTTTTLSKFLRKPRNAGLRAYKGARYGPVDRDAIVGKALWSPLVDEATFWAAQAVLDAPGRAPGRKSVRRHLLTGLAGCGKCGDRLAGSYRTDGRVVYVCKACHGVAILADNIEPILYHIVAERLAMPNAVDLLRREIHDAAEAETIRLELETLYGELDCLAVERAEGLLTARQVRICTDIVNAKITELQARQLDQERLRVLDGIPLGTPQVAGMIAELSPDRFRAVLDVLAEVVVRPVGKGGRTFSPERVQVNWR

SEQ ID NO: 1362 - protein, 485 aa, synthetic construct
MTKKVAIYTRVSTTNQAEEGFSIDEQIDRLTKYAEAMGWQVSDTYTDAGFSGAKLERPAMQRLINDIENRAFDTVLVYKLDRLSRSVRDTLHLVKDVFTKNKIDFISLNESIDTSSAMGSLFLTILSAINEFERENIKERMTMGKLGRAKSGKSMMWTKTAFGYYHNRKTGILEIVPLQAAIVEQIFTDYLSGISLTKLRDKLNESGHIGKDIPWSYRTLRQTLDNPVYCGYIKFKGSLFEGMHKPIIPYETYLKVQKELEERQQQAYERNNNPRPFRAKYMLSGMARCGYCGAPLRIVLGRKRKDGSRTMKYHCANRFPRKTKGVTVYNDNKKCDSGTYDLSNLENTVIDNLIGFQENSDSLLKIINGNNQPILDTSSFKEQISQIDKKIRKNSDLYLNDFITMDELKDRTDSLQAEKKLLKAKISEDKFNDSTDVFELVKTQLGSIPINELSYDNKKKIVNNLVSKVDVTADSVDIIFKFQLA

SEQ ID NO: 1363 - protein, 452 aa, synthetic construct
MKAAIYIRVSTREQVENYSIQAQTEKLTALCRSKDWDVYDIFIDGGYSGSNMNRPALNEMLSKLHEIDAVVVYRLDRLSRSQRDTITLIEEYFLKNNVEFVSLSETLDTSSPFGRAMIGILSVFAQLERETIRDRMVMGKIKRIEAGLPLTTAKGRTFGYDVIDTKLYINEEEARQLQLIYDIFEEERSITFLQKRLKKLGFKVRTYNCYNNWLTNDLYCGYVSYKDKVRVKGIHEPIISEEQFYRVQEIFTRMGKNPNMNRGSASLLNNLVVCSKCGLGFVHRRKDAMSRDKKYHYRYYSCKTYKHIHELEKCGNKIWRADKLEELIINRVNNYSVASRNVDKEDELDSLNEKLRIEHAKKKRLFDLYINGSYEVSELDSMMSDIDAQINYYESQIEANEELKKSKRIRENLAHLATVDFDSLEFREKQLYLKSLINKIYIDGEQVTIEWL

SEQ ID NO: 1364 - protein, 485 aa, synthetic construct
MTKKVAIYTRVSTTNQAEEGFSIDEQVDRLTKYAEAMGWQVSDTYTDAGVSGAKLERPAMQRLINDIENKAFDTVLVYKLDRLSRSVRDTLYLVKDVFTKNKIDFISLNESIDTSSAMGSLFLTILSAINEFERENIKERMTMGKLGRAKSGRSMMWTRTAFGYYHNRKTGILEIVPLQATIVEQIFSDYLSGISLTKLRDKLNESGHIGKDIPWSYRTLRQTLDNPVYCGYIKFKDSLFEGMHKPIIPYETYLKVQKELEERQQQTYERNNNPRPFQAKYMLSGMARCGYCGAPLKIMLGHKRKDGSRTMKYHCANRFPRKTKGVTVYNDNKKCDSGTYDLSYLEDTVIGNLIGFQESNDSLLKIINGNNQPILDTSSLKKQISQIDKKIQKNSDLYLNDFITMDELRDRTDSLQAEKRLLKAKISENKFNDRTDVFELVKTQLGSIPINELSYDNKKKIVNNLVSKVDVTADNVDIIFKFQLA

SEQ ID NO: 1365 - protein, 452 aa, synthetic construct
MKAAIYIRVSTQEQVENYSIQAQTEKLTALCRSKDWDVYDIFIDGGYSGSNMNRPALNEMLSKLHEIDAVVVYRLDRLSRSQRDTTTLIEEYFLKNNVEFVSLSETLDTSSPFGRAMIGILSVFAQLERETIRDRMVMGKIKRIEAGLPLTTAKGRTFGYDVIDTKLYINEEEAKQLQLIYDIFEEEQSITSLQKRLKKLGFKVRTYNRYNNWLTNDLYCGYVSYKDKVHVKGIHEPIISEEQFYRVQEIFTRMGRNPNMNRDSASLLNNLVVCSKCGLSFVHRSKDTMCRGKKYHYRYYSCKTYKHTHELEKCGNKIWRADKLEELIIDRVNNYSFASRNVGKEDELDSLNEKLKIEHAKKKRLSDLYINGSWEVSELDSKMNDIDAQISYYESQIEANEELKKNKKIQENLANLATVDFDSLEFRGKQLYLRSLINKIYIDGEQVTIEWL

SEQ ID NO: 1366 - protein, 469 aa, synthetic construct
MCYTTPVRAAVYLRISEDRSGEQLGVARQREDCLKLCGQRKWEPVEYLDNDVSASTGKRRPAYEQMLADITAGKIAAVVAWDLDRLHRRPTELEAFMCLADEKRLALATVAGDVDLATPQGRLVARLKGSVAAHETEHKKARQRRAARQKAERGYPNWSKAFGYLPGPNGPEPDPRTAPLVKQAYADILAGASLGDVCRQWNDAGAFTITGRPWTTTALSKFLRKPRNAGLRAYKGARYGPVDRDAIVGKAQWRPLVDEATFWAAQAVLDAPGRAPGRKSVRRHLLTGLAGCGKCGNHLAGSYRTDGRVVYVCKACHGVAILADNIEPILYHIVVERLAMPDAVDLLRREMHDAAEAETTRLELKTLYGELDRLAVERAEGLLTARQVKISTDIVNAKITKLQARQLDQERLRVCDGIPLGTPQVAGMIAELSPDRFRAVLDALAKVVVQPVGKSGRIFNPERVQVNWR

SEQ ID NO: 1367 - protein, 485 aa, synthetic construct
MTKKVAIYTRVSTTNQAEEGFSIDEQIDRLTKYAEAMGWQVSDTYTDAGLSGAKLERPAMQRLINDIENKAFDTVLVYKLDRLSRSVRDTLYLVKDVFTKNKIDFISLNESIDTSSAMGSLFLTILSAINEFERENIKERMTMGKLGRAKSGKSMMWTKTAFGYYHNRKTGILEIVPLQAAIVEQIFTDYLSGISLTKLRDKLNESGHIGKDIPWSYRTLRQTLDNPVYCGYIKFKDSLFEGMHKPIIPYETYLKVQKELEERQQQTYERNNNPRPFQAKYMLSGMARCGYCGAPLRIVLGHKRKDGSRTMKYHCANRFPRKTKGVTVYDDNKKCDSGTYDLSNLENTVIDNLIGFQENNDSLLKIINGNNQPILDTSSFKKQISQIDKKIQKNSDLYLNDFITMDELKDRTDSLQAEKKLLKAKISENKFNDSTDVFELVKTQLGSIPINELSYDNKKKIVNNLVSKVDVTADNVDIIFKFQLA

SEQ ID NO: 1368 - protein, 485 aa, synthetic construct
MTKKVAIYTRVSTTNQAEEGFSIDEQIDRLTKYAEAMGWQVSDTYTDAGFSGAKLERPAMQRLINDIENRAFDTVLVYKLDRLSRSVRDTLYLVKDVFTKNKIDFISLNESINTSSAMGSLFLTILSAINEFERENIKERMTMGKLGRAKSGKSMMWTKTAFGYYHNRNTGILEIVPLQATIVEQIFTDYLSGISLTKLRDKLNESGHIGKDIPWSYRTLRQTLDNPVYCGYIKFKDSLFEGMHKPIIPYETYLKVQRELEERQQQAYERNNNPCPFQAKYMLSGMARCGYCGAPLKIVLGHKRKDGSRTMKYHCANRFPRKTKGVTVYNDNIKCDSGTYDLSSLENTVIDILIGLQENNDSLLKIINGNNQPILDTSSFEEQISQIDKKIQKNSDLYLNDFITMDELKDRTDSLQAEKKLLKAKISENKFNDSTGVFELVKTQLGSIPINELSYDNKKKIVNNLVSKVDVTADNVDIIFKFQLA

SEQ ID NO: 1369 - protein, 485 aa, synthetic construct
MTKKVAIYTRVSTTNQAEEGFSIDEQTDRLTKYAEAMGWQVSDTYTDAGCSGAKLERPAMRRLINDIENKVFDTVLVYKLDRLSRSVRDTLYLVKDVFTRNKIDFISLSESIDTSSAMGSLFLTILSAINEFERENIKERMTMGKLGRAKSGKSMMWTRTAFGYYHNRKTGILEIVPPQATIVEQIFTDYLSGISLTKLRDKLNESGHIGKDIPWSYRTLRQTLDNPVYCGYIKFKDSLFKGMHKPIIPYETYLKVQKELEGRQQQTYKRNNNPRPFQAKYMLSGTARCGYCGAPLRIVLGHKRKDGSRTMKYHCANRFPRKTKGVTVYNDNKKCGSGTYDLNNLENTVIDNLIGLQENNDSLLKIINGNNQPIRDTSSFKNQISQIDKKIQKNSDLYLNDFITMDELKDRTASLQAEKKLLKAKISENKFNDSTDVFELVKTQLGSIPINELSYDNKKKIVNNLVSKVDVTADNVDIIFKFQQA

SEQ ID NO: 1370 - protein, 452 aa, synthetic construct
MKAAIYIRVSTREQVENYSIQAQTEKLTALCRSKDWDVYGIFIDGGYSGSNMNRPALNEMLSKLHEIDAVVVYRLDRLSRSQRDTITLIEEYFLKNNVEFVSLSETLDTSSPFGRAMIGILSVFAQLERETIRDRVVMGKIKRIEAGLPLTTAKGRTFGYDVIDTKLYINEEEAKQLQLIYDIFEEEQSITFLQKRLKKLGFKVRTYNRYNNWLTNDLYCGYVSYKDKVHVKGIHEPIISEEQFYRVQEIFTRMGKNPNMNHDSASLLNNLVVCSKCGLGFVHRRKDTMSRGKKYHYRYYSCKTYKHIHELEKCGNKIWRADKLEELIINRVNNYSIASRNVAKEDELDSLNEKLKAEHAKKKRLFDLYINGSYEVSELDSLMNDIDAQINYYESQIEANEEPKKNKKIQENLADLATVDYDSLEFREKQLYLKSLINKIYIDGEQVTIEWL

SEQ ID NO: 1371 - protein, 469 aa, synthetic construct
MSYTTPVRAAVYLRISEDRSGEQLGVARQREDCLKLCDQRKWVPVEYLDNDVSASTGKRRPAYEQMLADITAGKIAAVVAWDLDRLHRRPIELEAFMSLADEKRLALATVAGDVDLATPQGRLVARLKGSVAAHETEHKKARQRRAARQKAERGHPNWSKAFGYLPGPNGPEPDPRTAPLVKQAYADILAGASLGDVCRQWNAAGAFTITGRPWTTTALSKFLRKPRNAGLRAYKGARYGPVDRDAIVGKAQWSPLVDEATFWAAQAVLDAPGRAPGRKSVRRHLLTGLAGCGKCGNHLAGSYRTDGRVVYVCKACHGVAILADNIEPILYHTVAERLALPDAVDLLRREIHDAAEAETTRLELEILYGELDRLAVERAEGLLTARQVKISTDIVNAKITKLQARQLDQERLRVFDGIPLGTPQVAGTIAELSPNRFRAVLDVLAEVVVQPVGKSGRIFNPERVQVNWR

SEQ ID NO: 1372 - protein, 469 aa, synthetic construct
MSYTTPVRAAVYLRISEDRSGEQLGVARQREDCLKLCGQRKWEPVEYLDNDVSASTGKRRPAYEQMLADITAGKIAAVVAWDLDRLHRRPIELEAFMSLADEKRLALATVAGDVDLATPQGRLVARLKGSVAAHETEHKKARQRRAARQKAERGHPNWSKAFGYLPGPNGPEPDPRTAPLVKQAYADILAGASLGDVCRQWNDAGAFTITGRPWTTTTLSKFLRKPRNAGLRAYKGARYGPVDRDAIVGRAQWSPLVDEATFWAAQAVLDAPGRAPGRKSVRRHLLTGLAGCGKCGNHLAGSYRTDGRVVYVCKACHGVAILADNIEPILYHIVAERLAKPDAVDLLRREIHDAAEAETIRLELETLYGELDRLAVERAEGLLTARQVKISTDIVSAKITKLQARQLDQERLRVFDGIPLGTPQVAGMIAELSPDRFRAVLDVLAEVVVRPVGKGGRIFNPERVQVNWR

SEQ ID NO: 1373 - protein, 452 aa, synthetic construct
MKAAIYIRVSTREQVENYSIQAQTEKLTALCRSKDWDVYDIFVDGGYSGSNMDRPALNEMLSKLHEIDAVVVYRLDRLSRSQRDTITLIEEYFLKNNVEFVSLSETLDTSSPFGRAMIGILSVFAQLERETIRDRMVMGKIKRIEAGLPLTTAKGRTFGYDVIDTKLYINEEEAKQLQLIYDIFEEEQSITFLQKRLKKLGFKVRTYNRYNNWLTNDLYCGYVSYKDKVRVKGIHEPIISEEQFYRVQEIFTRMGRNPNMNRGSASLLNNLVVCGKCGLGFVHRRKDAMSRDKKYHYRYYSCKTYKHIHELEKCGNKIWRADELEELIINRVNNYSLASRNVDKEDELDSLNEKLKTEHAKKKRLFELYINGSYEVSELDSMMKDIGAQINYYESQIEANEELKKSKKIQENLANLATVDFDSLEFREKQLYLKSLINKIYIDGEQVTIEWL

SEQ ID NO: 1374 - protein, 469 aa, synthetic construct
MSYTTPVRAAVYLRISEDRSGEQLGVARQREDCLELCGQRKWEPVEYLDNDVSASTGKRRPAYEQMLADITAGKIAAVVAWDLDRLHRRPIELEAFMSLADEKRLALATVAGDVDLATPQGRLVARLKGSVAAHETEHKKARQRRAARQKAERGHPNWSKAFGYLPGPNGPEPDPRTAPLVKQAYADILAGASLGDVCRRWNDAGAFTITGRLWTTTTLSKFLRKPRNAGLRAYKGARYGPVDRDAIVGKAQWSPLVDEATFWAAQAVLDAPGRAPGRKSVRRHLLTGLAGCGKCGNHLAGSYRTDGRVVYVCKACHGVAILADNIEPILYRIVAERLAMPDAVDLLRREVHDAAEAETIRLELETLYGELDRLAVERAEGLLTARQVKISTDIVNARITKLQARQLDQERLRVLEGIPLGTPQVAGTIAELSPDRFRAVLDVLAEVVVQPVGKSGRIFNPERVQVDWH

SEQ ID NO: 1375 - protein, 485 aa, synthetic construct
MTKKVAIYTRVSTTNQAEEGFSIVEQIDRLTKYAEAMGWQVSGTYTDAGSSGAKLGRPAMQRLISDIEDKAFDTVLVYKLDRLSRSVRDTLYLVKDVFTKNKIDFISLSESIDTSSAMGSLFLTILSAINEFERENIKERMTMGKLGRAKSGKSMMWTKTAFGYYHNRKTGILEIVPLQATIVEQIFTDYLSGISLTKLRDKLNESGHIGKDIPWSYRTLRQTLDNPVYCGYIKFKDSLFEGMHKPIIPYETYLKVQKELEERQQQTYERNNNPRPFQAKYMLSGMARCGYCGAPLKIVLGRKRKDGSRTMKYHCANRFPRKTKGVTVYNDNKKCDSGTYDLSNLENTVIDNLIGFQENNDSLLKIINGNDQPILDTSSFKKRISQIDKKIQKNSDLYLNDFITMDELKDRTDSLQAEKKLLKAKISENKLNDSTDVFELVKTQLGSIPINELSYDNKKKIVSNLVSKVDVTADNVDIIFKFQLA

SEQ ID NO: 1376 - protein, 452 aa, synthetic construct
MKAAIYIRVSTQEQVGNYSIQAQTEKLTALCRSKDWDVYDIFIDGGYSGSNMNRPALNEMLSKLHEIDAVVVYRLDRLSRSQRDTTTLIEEYFLKNNVEFVSLSETLDTSSPFGRAMIGILSVFAQLERETIRDRMVMGKIKRIEAGLPLTTAKGRTFGYDVIDTKLYINEEEAKQLQLIYDIFEEEQSITLLQKRLKKLGFKVRTYNRYSKWLTNDLYCGYVSYKDKVHVKGIHEPIISEEQFYRVQEIFARMGKNPNMNRDSASLLSNLVVCSKCGLGFVHRSKDTMSRGKKYHYRYYSCKTYKHTHELEKCGNKTWRADKLEELIISRVNNYSFAGRNVDKEDELDSLNEKLRTEHAKKKRLFDLYINGSYEVSELDGMMSDIDARINYYENQIEANEELKKNKKIQENLADLAAVDFDSLEFREKQLYLKSLINKIYIDDEQVTIEWL

SEQ ID NO: 1377 - protein, 485 aa, synthetic construct
MTKKVAIYTRVSTTNQAEEGFSIDEQIDRLTKYAEAMGWQVSDTYTDAGFSGAKLERPAMQRLINDIENKAFDTVLVYKLDRLSRSVRDTLYLVKDVFTKNKIDFISLSESIDTSSAMGSLFLTILSAINEFERENIKERMTMGKLGRAKSGKSMMWTKTAFGYYHNRKTGILEIVPPQATIVEQIFTDYLSGISLTKLRDKLNESGHIGKDIPWSYRTLRQTLDNPVYCGYIKFKDSLFEGMHKPIIPYETYLKVQKELEERQQQTYERNNNPRPFQAKYMLSGMARCGYCGAPLKIVLGHKRKDGSRTMKYHCANRFPRKTKGITVYNDNKKCDSGTYDLSNLENIVIDNLIGFQENNDSLLKIINGNNQPILDTSSFKKQISQIDKKIQKNSDLYLNDIITMDELKVRTDSLQAEKKLLKAKISENKFNDSIDVFELVKTQLGSIPINELSYDNKKKIVNNLVSKVDVTADNVDIIFKFQLA

SEQ ID NO: 1378 - protein, 469 aa, synthetic construct
MSYTTLVRAAVYLRVSEDRSGEQLGVARQREDCLKLCDQRKWVPVEYLDNDVSASTGKRRPAYEQMLADITAGKIAAVVAWDLDRLHRRPIELEAFMRLADEKRLALATVAGDVDLATPQGRLVARLKGCVAAHETEHKRARQRRAARQKAERGLPNWSKAFGYLPGPNGPEPDPRTAPLVKQAYADILAGASLGDVCRQWNGAGAFTITGRPWTTTTLSKFLRKPRNAGLRAYKGARYGPVDRNAIVGKAQWSPLVDEATFWAAQAVLDAPGRAPGRKSVRRHLLTGLAGCGKCGYHLAGSYRTDGRVVYVCKACHGVAILAGNIEPMLYHIVAERLAMPDAVDLLRREIHDAAEAETTRLELETLYGELDRLAVERAEGLLTARQVKISTDIVSAKITELQARQLDQERLRAFDGIPLGTPQVAGMIAELSPDRFRAVLDVLAEVVVQPVGKSGRIFNPERVQVNWR

SEQ ID NO: 1379 - protein, 452 aa, synthetic construct
MKAAIYIRVSTREQVENYSIQAQTEKLTALCRSKDWDVYDIFIDGGYSGSNMNRPALNEMLSKLHEIDAVVVYRLDRLSRSQRDTITLIEEYFLKNNVEFVSLSETLDTSSPFGRAMIGILSVFAQLERETIRDRMVMGKIKRIEAGLPLTTAKGRTFGYDVIDTKLYINEEEAKQLQLIYDIFEEEQSITFLQKRLKKLGFRVRTYSCYNSWLTNDLYCGYVSYKDKVHVKGVHEPIISEEQFYRVQEVFTRMGRNPNMNRDSASLLNNLVVCSKCGLGFVHRRKDTMSRGKKYHYRYYSCKTYKHTHELEKCGNKIWRADKLEELIINRVNNYSFASRDVDKEDELDSLNEKLKIEHAKKRRLFDLYINGSYEASELDSMMNDIDAQINYYESQIEANEELKKNKKIQENLADLATVDFDSLEFREKQLYLKSLINKIYIDGEQVTIEWL

SEQ ID NO: 1380 - protein, 485 aa, synthetic construct
MTRKVAIYTRVSTTNQAEEGFSIDEQIDRLTKYAEAMGWQVCDTYTDAGFSGAKLGRPAMQRLINDIENKAFDTVLVYKLDRLSRSVRDTLYLVKEVLTKNKIDFISLNESIDTSSAMGSLFLTILSAINEFERENIKERMTMGKLGRAKSGKSMMWTKTAFGYYHNRKTGILEIVPLQATIVEQIFTDYLSGISLTKLRDKLNESGHIGKDIPWSYRTLRQTLDNPVYCGYIKFKGSLFEGMHKPIIPYETYQKVQKELKERQQQTYERNNNPRPFQAKYMLSGMARCGYCGAPLRIVLGHKRKDGSRTMKYHCANRFPRKTKGVTVYNDNKKCDSGTYDLSNLENTVIGNLIGLQENNDSLLKIINGNNQPILDTSSIKQQISQIDKKIQKNSDLYLNDFITMDELKDRTDSLQAEKRLLKAKISENKCNDSTDVFELVKTQLGSVPINELSYENKKKIVNNLVSKVDVTADDVDIIFKFQLA

SEQ ID NO: 1381 - protein, 452 aa, synthetic construct
MKAAIYIRVSTQEQVENYSIQAQTEKLTALCRSKGWDVYDIFIDGGYSGSNMNRPALNEMLSKLHEIDAVVVYRLDRLSRSQRDTTTLIEEYFLKNNVEFVSLSETLDTSSPFGRAMIGILSVFAQLERETIRDRMVMGKIKRIEAGLPLTTAKGRTFGYDVIDTKLYINEEEAKQLQLIYDIFEEEQSITSLQKRLKKLGFKVRTYNRYNNWLTNDLYCGYVSYKDKVHVKGIHEPIISEEQFYRVQEIFTRMGKNPNMNRDSASLLNNLVVCSKCGLGFVHRSKDTMSRGKKYHYRYYSCKTYKHTHELEKCGNKTWRADKLEELILNRVNNYSFASRNVDREDELDSLNEKLKIEHARKKRLFDLYINGSYEVSELDSMMNDIDAQINYYESQIEANEELKKNKKIQENLADLATVDFDSLEFHEKQLYLKSLINKIYIDGEQVTIEWL

SEQ ID NO: 1382 - protein, 485 aa, synthetic construct
MTKKVAIYTRVSTTNQAEEGFSIDEQIDRLTKYAEAMGWQVSDTYTDAGFSGAKLERPAMQRLINDIENKAFDTVLVYKLDRLSRSVRDTLYLVKDVFTKNKIDFISLNECIDTSSAMGSLFLTILSAINEFERENIKERMTMGKLGRAKSGKSMMWTRTAFGYYHNRETGVLEIVPLQATIVEQIFTDYLSGISLTKLRDKLNESGHIGKDIPWSYRTLRQTLDNPVYCGYIKFKGSLFEGMHKPIIPYETYLKVQKELEERQQQTYERNNNPRPFQAKYMLSGMARCGYCGAPLRIVLGRKRKDGSRTMKYHCANRFPRKTKGVTVYNDNKKCDSGTYDLSNLENTVIDNLIGFQENNDSLLKIINGNNQPILDTSSFKKQISQIDKKIQKNSDLYLNDFITMDELKDRTDSLQAEKKLLKAKISENKFNGSTDVFELVKTQLGSIPINELSYDNKKKIVNNLVSKVDVTADSVDIIFKFQLA

SEQ ID NO: 1383 - protein, 452 aa, synthetic construct
MKAAIYIRVSTQEQVGNYSIQAQTEKLTALCRSKDWDVYDIFIDGGYSGSNMNRPALNEMLSKLHEIDAVVVYRLDRLSRSQRDTTTLIEEYFLKNNVEFVSLSETLDTSSPFGRAMIGILSVFAQLERETIRDRMVMGKIKRIEAGLPLTTAKGRTFGYDVIDTKLYINEEEARQLQLIYDIFEEEQSITSLQKRLKKLGFKVRTYNRYSNWLTNDLYCGYVSYKDKVHVKGIHEPIISEEQFYRVQEIFTRMGKNPNMNRDSASLLNNLVVCSRCGLGFVHRSKDTVSRGKKYHYRYYSCKTYKHTHELEKCGNKTWRADKLEELIINRVNNYSFASRNADKEDELDSLNEKLKIEHAKKKRLFDLYINGSYEVSELDSMMNDIDAQINYYESQIGASEELRKNKKVQENLADLATVDFDSLEFREKQLYLKSLINKIYIDDEQVTIEWL

SEQ ID NO: 1384 - protein, 469 aa, synthetic construct
MSYTTPVRAAVYLRISEDRSGEQLGVARQREDCLELCDQHKWVPVEYLDNDVSASTGKRRPAYEQMLEDITAGKIAAVVAWDLDRLHRRPIELEAFMSLADEKRLALATVAGDVDLATPQGRLVARLKGSVAAHETEHKKARQRRAARQKAERGHPNWSKAFGYLPGPNGPELDPRTAPLVKQAYADILAGASLGDVCRQWNDAGAFTITGRPWTTTALSKFLRKPRNAGLRAYKGARYGPVDRDAIVGKAQWSPLVDEATFWAAQAVLDAPGRAPGRKSVRRHLLTGLAGCGKCGNHLAGSYRTDGRVVYVCKACHGVAILADNIEPILYHIVAERLAMPDAVDLLRREIHDAAEAETIRLELETLYDELDRLAAERAEGLLTARQVKISTDIVNAKITKLRARQQDQERLRVLDGIPLGTPQVAGMIAELSPNRFRAVLDVLAEVVVKPVGKSGRIFNPERVQVNWR

SEQ ID NO: 1385 - protein, 452 aa, synthetic construct
MKAAIYIRVSTQEQVENYSIQAQTERLTALCRSKDWDVYDIFIDGGYSGSNMNRPALNEMLSKLHEIDAVVVYRLDRLSRSQRDTTTLIEEYFLKNNVEFVSLSETLDTSSPFGRAMIGILSVFAQLERETIRDRMVMGKIKRIEAGLPLTTAKGRTFGYDVIDTKLYINEEEAKQLRLIYDIFEEEQSITSLQKRLKKLGFKVRTYNRYSNWLTNDLYCGYVSYKDKVHVKGIHEPIISEEQFYRVQEIFTRMGKNPNMNRDSASLLNNLVVCSKCGLGFVHRSKDTMSRGKKYHYRYYSCKTYKHTHELEKCGNKTWRADKLEELIINRVSNYSFASRNVDKEDELDCLNEKLKIEHAKKKRLFDLYINGSYEVSELDSMMNDIDAQIGYYESQIEANEELKKNKKIQENLADLATVDFDSLEFREKQLYLKSLINKIYIDGEQVTIEWL

SEQ ID NO: 1386 - protein, 452 aa, synthetic construct
MKAAIYIRVSTREQVENYSIQAQTEKLTALCRSKDWDVYDIFIDGGYSGSNMNRPALNEMLSKLHEIDAVVVYRLDRLSRSQRDTITLIEEYFLKNNVEFVSLSETLDTSSPFGRAMIGILSVFAQLERETIRDRMVMGKIKRIEAGLPLTTAKGRTFGYDVIDTKLYINEEEAKQLRLIYDIFEEEQSITFLQKRLKKLGFKVRTYNRYNNWLTNDLYRGYVSYKDKVHVKGIHEPIISEEQFYRVQEIFTRMGKNPNMNRDSASLLNNLVVCSKCGRGFVHRRKDAKSRDKKYHYRYYSCKTYKHIHELEKCGNKIWRADKLEELIINRVNNYSLASRNADKEDELDSLNEKLKAEHAKKKRLFDLYINGSYEVSELDSMMNDIDAQIDYYESQVEANEELKKNKKIQENLAHLATVDFDSLEFREKQLYLKSLINKIYIDGEQVTIEWL

SEQ ID NO: 1387 - protein, 485 aa, synthetic construct
MTKKVAIYTRVSTTNQAEEGFSIDEQIDRLTKYAEAMGWQVSDTYTDAGFSGAKLERPAMQRLINDIENKAFDTVLVYKLDRLSRSVRDTLYLVKDVFTKNKIDFISLNESINTSSAMGSLFLTILSAINEFERENIKERMTMGKLGRAKSGKSMMWTKTAFGYYHNRKTGILEIVPLQATIVEQIFTDYLSGISLTKLRDKLNESGHIGKDIPWSYRTLRQTLDNPVYCGYIKFKDRLFEGMHKPIIPYETYLKVQKELEERQQQTYERNNNPRPFQAKYMLSGMARCGYCGAPLRIVLGHKRKDGSRTMKYHCANRFPRKTKGVTVYNDNKKCDSGTYDLRNLENTVIDNLIGLQEDDDSLLKIINGNNQPILDTSSFEEQISQIDKKIQKNSDLYLNDFITMDELKDRTDSLQAEKKLLKAKISENKFNDSTDVFELVKTQLGSIPINELSYDNKKKIVSNLVSKVDVTADNVDIIFKFQLA

SEQ ID NO: 1388 - protein, 469 aa, synthetic construct
MCYTTPVRAAVYLRISEDRSGEQLGAARQREDCLELCGQRKWVPVEYLDNDVSASTGKRRPAYEQMLADITAGKIAAVVAWDLDRLHRRPIELEAFMSLADEKRLALATVAGDVDLATPQGRLVARLKGSVAAHETEHKKARQRRAARQKAERGLPNWSKAFGYLPGPNGPEPDPRTAPLVKQAYADILAGASLGDVCRQWNDAGAFTITGRPWTTTTLSKFLRKPRNAGLRAYKGARYGPVDRDAIVGKAQWNPLVDEATFWAAQAVLDAPGRAPGRKSVRRHLLTGLAGCGKCGNRLAGSYRTDGRVVYVCKACHGVAILADNIEPILYHIVAERLAMPDAVDLLRREIHDAAEAEAIRLELETLYGELDRLAVERAEGLLTARQVKISTDIVNAKITKLRARQLDQERLRVLDGIPLGTPQVAGMIAELSPDRFRAVLDVLAEVVVRPVGKGGRIFNPERVQVNWR

SEQ ID NO: 1389 - protein, 484 aa, synthetic construct
MTKKVAIYTRVSTTNQAEEGFSIDEQIDRLTKYAEAMGWQVSDTYTDAGFSGAKLERPAMQRLINDIENRVFDTVLVYRLDRLSRSVRDTLYLVKEVFTKNKIDFISLIESIDTSSAMGSLFLTILSAINEFERENIKERMTMGKLGRAKSGKSMMWTKTAFGYYHNRKTGILEIVPLQATIVEQIFTDYLSGISLTKLRDKLNESGHIGKDIPWSYRTLRQTLDNPVYCGYIKFKDSLFEGMHKPIIPYETYLKVQKELEERQQQTYKRNNNPRPFQAKYMLSGVARCGYCGAPLRIVLGRKRRDGNRTMKYHCANRFPRKTKGVTVYNDNKKCDSGTYDLRNLENTVIDNLTGFQENNDSLLKIINGNNQPILDTSSLKKQISQIDKKIQKNSDLYLNDFITMDELKGRTDSLQAEKKLLIAKISENKFNDSTDVFELVKTQLGSIPINELSYDNKKKIVNSLVSKVDVTADNVYITFKFLA

SEQ ID NO: 1390 - protein, 452 aa, synthetic construct
MKAAIYIRVSTQEQVGNYSIQAQTEKLTALCRSKDWDVYDIFIDGGYSGSNMNRPALNEMLSKLHEIDAVVVYRLDRLSRSQRDTTTLIEEYFLKNDVEFVSLSETLDTSSPFGRAMIGILSVFAQLERETIRDRMVMGKIKRIEAGLPLTTAKGRTFGYDVIDTKLYINEEEAKQLQLIYDIFEEEQSITFLQKRLKKLGFKVRTYNRYNNWLTNDLYCGYVSYKDKVHVKGIHEPIISEEQFYRVQEIFTRMGKNPNMNRDSASLLNNLVVCSKCGLGFVHRSKDTMCRGKKYHYRYYSCKTYKHTHELEKCGNKTWRADKLEELIINRVNNYSFASRNVDKEDELDSLNEKLKIEHAKKKRLFDLYINGSYEVSELDSMMNDIDAQINYYESQIEANEELKKNRKVQENLADLATVDFDSLEFREKQLYLKSLINKIYIDGEQVTIEWL

SEQ ID NO: 1391 - protein, 469 aa, synthetic construct
MCYTTPVRAAVYLRISEDRSGEQLGVARQREDCLKLCDQRKWEPVEYLDNDVSASTGKRRPAYEQMLADITAGKIMAVVAWDLDRLHRRPIELEAFMSLADEKRLALATVAGDVDLATPQGRLVARLKGCVAAHETEHKKARQRRAARQKAERGYPNWSKAFGYLPGPNGPEPDPRTAPLVKQAYADILAGASLGDVCRQWNDAGAFTITGRPWTITTLSKFLRKPRNAGLRAYKGARYGPVDRDAIVGKAQWSPLVDEATFWAAQAVLDAPGRAPGRKSVRRHLLTGLAGCGKCGNHLAGSYRTDGRVVYVCKVCHGVAILADNIEPILYHVVAERLAMPDAVGLLRREIHDAAEAETIRLELETLYGELDRLAVERAEGLLTARQVKISTDIVNAKITKLQARQLDQERLRVFDGIPLGTPQVAGMIAELSPDRFRAVLDVLAEVVVQPVGKSGRIFNPERVQVNWR

SEQ ID NO: 1392 - protein, 469 aa, synthetic construct
MGYTTPVRAAVYLRISEDRSGEQLGVARQREDCLKLCDQRKWVPVEYLDNDVSASTGKRRPAYEQMLADITAGKIAAVVAWDLDRLHRRPIELEAFMSLADEKRLALATVAGDVDLATPQGRLVARLKGSVAAHETEHKKARQRRAARQKAERGHPNWSKAFGYLPGPNGPEPDPRTAPLVKQAYADILAGASLGDVCRQWNDAGAFTITGRPWTTTTLSKFLRKPRNAGLRAYKGARYGPVDRDAIVGKAQWSPLVDEATFWAAQAVLDAPGRAPGRKSVRRHLLTGLAGCGKCGNHLAGSYRIDGRVVYVCKACHGVAILADNIEPILYHIVAERLAMPDAVDLLRREIHDAAEAETIRLELEALYGELDRLAVERAEGLLTARQVKISTDIVNAKITKLQARQLDQERLRVFDGIPLGTPQVAGMIAELSPDRFRAALDVLAEVVVQPVGKGGRIFNPERVQVNWR

SEQ ID NO: 1393 - protein, 485 aa, synthetic construct
MTKKVAIYTRVSTTNQAEEGFSIDEQIDRLTKYAEAMGWQVSDTYTDAGFSGAKLERPAMQRLINDIENKVFDTVLVYKLDRLSRSVRDTLYLVKDVFTKNKIDFISLNESIDTSSAMGSLFLTILSAINEFERENIKERMTMGKLGRAKSGKSMMWTKTAFGYYHNRKTGILEVVPLQATIVEQIFTDYLSGISLTKLRDKLNESGHIGKDIPWSYRTLRQTLDNPVYCGYIKFKDSLFEGMHKPIIPYETYLKVQKELEERQQQTYERNNNPRPFQAKYMLSGMARCGYCGAPLRIVLGHKRKDGSRTMKYHCANRFPRKTKGVTVYNDNKRCDSGTYDLSNLENTVIDNLIGFQENNDGLLKIINGNNQSILDTSSFKEQISQIDKKIQKNSDLYLNDFITMDELRDRTDSLRAEKKLLKAKISENKFNDSTDVFELVRTQLGSIPINELSYDDKKKIVNNLVSKVDVTADNVDIIFKFQLA

SEQ ID NO: 1394 - protein, 469 aa, synthetic construct
MSYTTPVRAAVYLRISEDRSGEQLGVARQREDCLKLCDQRKWVPVEYLDNDVSASTGKRRPAYEQMLADITAGKIAAVVAWDLDRLHRRPIELEAFMSLADEKRLALATVAGDVDLATPQGRLVARLKGCVAAHETEHKKARQRRAARQKAERGLPNWSKAFGYLPGPNGPGPDPRTAPLVKQAYADILAGASLGDVCRQWNDAGAFTVTGRPWTTTTLSKFLRKPRNAGLRAYKGARYGPVDRDAIVGKAQWSPLVDEATFWAAQAVLDAPGRAPGRKSVRRHLLTGLAGCGKCGNHLAGSYRTDGRVVYVCKACHGVAILADNIEPILYHTVAERLAMPDAVDLLRREIHDAAEAETIRLELETLHGELDCLAVERAEGLLTARQVKISTDIVNAKIAKLQARQLDQERLRVFDGIPLGTPQVAGMIAELSPDRFRAVLDVLAEVVVQPVGKSGRTFNPERVQVNWR

SEQ ID NO: 1395 - protein, 452 aa, synthetic construct
MKAAIYIRVSTREQVENYSIQAQTEKLTALCRSKDWDVYDIFIDGGYSGSNMNRPALNEMLSKLHEIDAVVVYRLDRLSRSQRDTITLIEEYFLKNNVEFVSLSETLDTSSPFGRAMIGILSVFAQLERETIRDRMVMGKIKRIEAGLPLTTAKGRTFGYDVIDTKLYINEEEAKQLQLIYDIFEEERSITSLQKRLKKLGFKVHTYNRYNNWLTNDLYCGYVSYKDKVHVKGIHEPIISEEQFYRVQEIFARMGKNPNMNRDSASLLNNLVVCSKCGLGYVHRRKDIMGRDKKYHYRYYSCKTYKHIHELEKCGNKIWRADKLEELIINRVNNYSFASRNVDKEDELDSLNEKLKAERAKRKRLFDLYINGSYEVSELDSMMNDIDAQINYYESQIEANEELRKNKKIQENLAYLATVDFDSLEFREKQLYLKSLINKIYIDGEQVTIEWL

SEQ ID NO: 1396 - protein, 452 aa, synthetic construct
MKAAIYIRVSTREQVENYSIQAQTEKLTALCRSKDWDVYDIFIDGGYSGSNMNRPALNEMLSKLREIDAVVVYRLDRLSRSQRDTITLIEEYFLKNNVEFVSLSETLDTSSPFGRAMIGILSVFAQLERETIRDRMVMGKIKRIEAGLPLTTAKGRTFGYDVIDTKLYINEEEAKQLRLIYDIFEEEQSITFLQKRLKKLGFKVHTYNRYNNWLTNDLYCGYVSYKDKVHVKGIHEPIISEEQFYRVQEIFARMGKNPNMNRDSASLLNNLVVCSKCGLGFVHRRKDAMSRDKKYHYRYYSCKTYKHIHELEKCGNKIWRADKLEELVINRVNNYSLASRNMDKEDELDSLNEKLKIEHAKKKRLFELYINGSYEVSELDSMMNDIDAQINYYESQIEANEELGKNKKIQENLANLATVDFDSLEFREKQLYLKSLINKIYIDGEQVTIEWL

SEQ ID NO: 1397 - protein, 452 aa, synthetic construct
MKAAIYIRVSTREQVENYSIQAQTEKLTALCRSKDWDVYDIFIDGGYSGSNMNRPALNEMLSKLHEIDAVVVHRLDRLSRSQRDTITLIEEYFLKNNVEFVSLSETLDTSTPFGRAMIGILSVFAQLERETIRDRMVMGKIKRIEAGLPLTTAKGRTFGYDVIDTKLYINEEEAKQLRLIYDIFEEERSITFLQKRLKKLGFKVRTYNRYNNWLTNDLYCGYVSYKDKVHVKGIHEPIISEEQFYRVQEIFARMGKNPNMNRDSASLLNNLVVCSKCGLGFVHRRKDAMSRDKKYHYRYYSCKTYKHIHELEKCGNKIWRADKLEELIIDRVNSYSLASRNADKEDELDGLNEKLKIEHAKKKRLFDLYINGSYEVSELDSVMSDIDAQINYYESQIEANEELNKNKKIQENLADLATVDFDSLEFREKQLYLKSLISKIYIDGEQVTIEWL

SEQ ID NO: 1398 - protein, 452 aa, synthetic construct
MKAAIYIRVSTREQVENYSIQAQTEKLTALCRSKDWDVYDIFIDGGYSGSNMNRPALNEMLNKLHEVDAVVVYRLDRLSRSQRDTITLIEEYFLKNNVEFVSLSETLDTSSPFGRAMIGILSVFAQLERETIRDRMVMGKIKRIEAGLPLTTAKGRTFGYDVIDTKLYINEEEARQLQLIYDIFEEEQSITFLQKRLKKLGFKVCTYNRYNNWLTNDLYCGYVSYKDKVHVKGIHEPIISEEQFYRVQEIFTRMGKNPNMNRDCASLLSNLVVCSKCGLGFVHRRKDTTSRGKKYHYRYYSCKTYKHIHELEKCGNKIWRADKLEELIINRVNNYSLASRNVDKEDELDSLSEKLKVEHAKKKRLFDLYVNGSCEVSELDSMMSDIDAQINYYESQIEANEELRKNKKIQENLADLATVDYDSLEFREKQLYLKSLINKIYIDGEQVTIEWL

SEQ ID NO: 1399 - protein, 485 aa, synthetic construct
MTKKVAIYTRVSTTNQAEEGFSIDEQIDRLTKYAEAMGWQVSDTYTDAGLSGAKLERPAMQRLINDIENKAFDTVLVYKLDRLSRSVRDTLYLVKDVFTKNKIDFISLNESIDTSSAMGSLFLTILSAINEFERENIKERMTMGKLGRAKSGKSMMWTKTAFGYYHNRKTGILEIVPLQATIVEQIFTDYLSGISLTKLRDKLNESGHIGKDIPWSYRTLRQTLDNPVYCGYIKFKDSLFEGMHKPIIPYETYLKVQRELKERQQQTYERNNNPRPFQAKYMLSGMARCGYCGAPLRIVLGHKRKDGSRTMKYHCANRSPRKTKGVTVYNDNKKCDSGTYDLSSLENTVIDNLVGFQENNDSLLKIINGNNQPILDTSGLKKQISQIDKKIQKHSDLYLNDFITMDELKDRTDSLQAEKKLLEAKISENKFNDSTDVFELVKTQLGSIPINELSYDDKKKIVNNLVSKVDVTADNVDIIFKFQLA

SEQ ID NO: 1400 - protein, 452 aa, synthetic construct
MKAAIYIRVSTREQVENYSIQAQTEKLTALCRSKDWDVYDIFIDGGYSGSNMNRPALNEMLSKLHEIDAVVVYRLDRLSRSQRDTITLIEEYFLKNNVEFVSLSETLDTSSPFGRAMIGILSVFAQLERETIRDRMVMGKIKRIEAGLPLTTAKGRTFGYDVIDTKLYINEEEAKQLQLIYDIFEEERSITFLQKRLKKLGLKVRTYNCYNNWLTNDLYCGYVSYKDKVHVKGIHEPIISEEQFYRVQEIFARMGKNPNMNRGSASLLNNLVVCSKCGLGFVHRRKDIVSRGKKYHYRYYSCKTYKHIHELEKCGNKIWRADKLEELIISRVSNYSLASRNVGKEDELDGLNEKLKIEHAKKKRLFGLYINGSYEVSELDSLMNDIDAQINYYESQIEANEELKKNKKIQENLAYLATVDFDSLEFREKQLYLKSLINKIYIDGEQVTIEWL

SEQ ID NO: 1401 - protein, 485 aa, synthetic construct
MTKKVAIYTRVSTTNQAEEGFSIDEQTDRLTKYAEAMGWQVSDTYTDAGFSGAKLERPAMQRLINDIENRAFDTVLVYKLDRLSRSVRDTLYLVKDVFTKNKIDFISLNECIDTSSAMGSLFLTILSAISEFERENIKERMTMGKLGRAKSGKSMMWTKTAFGYYHNRKTGILEIVPLQATIVEQIFTDYLSGISLTKLRDKLNESGHIGKDIPWSYRTLRQTLDNPVYCGYIKFKDSLFEGMHKPIIPYETYLKVQKELEERQRQTHERNNNPRPFQAKYMLSGMARCGYCGAPLRIVLGHKRKDGSRTMKYHCANRFPRKTKGVTVYNDNKKCDSGTYDLSNLENTVIDNLIGFQENNDSLLKIINGNNQPTLDTSSFEKQISQIDKKIQKNSDLYLNDFITMDELKDRTDSLQAEKKLLKAKISENKFNDSIDVFELVKTQLGSIPINELSYDNKKKIVNNLVSKVDVTADNVDIIFKFQLA

SEQ ID NO: 1402 - protein, 485 aa, synthetic construct
MTKKVAIYTRVSTTNQAEEGFSIDEQVDRLTKYAEAMGWQVSDTYTDAGLSGAKLERPAMQRLINDIENKAFDTVLVYKLDRLSRSVRDTLYLVKDVFTKNKIDFISLNESIDTSSAMGSLFLTILSAINEFERENIKERMTMGKLGRAKSGKSMMWTKTAFGYYHNRKTGILEVVPLQATIVEQIFTDYLSGISLTKLRDKLNESGHIGKDIPWSYRTLRQTLDNPVYCGYIKFKDSLFEGMHKPIIPYEAYLKVQKELEERQQQAYERNNNPRPFQAKYMLSGMARCGYCGAPLRIVLGHKRKDGSRTMKYHCANRFPRKTKGVTVYNDNKKCDSGTYDLSNLENTVIDNLIGFQENNDSLLKIINGNHQPILDTSSFKKQISQIDKKIQKNGDLYLNDFITMDELKDRTDSLQAEKKLLKVKISENKFNDSTDVLELVKTQLGSIPINELSYDNKKKIVNNLVSKVDVTANNVDIIFKFQLA

SEQ ID NO: 1403 - protein, 469 aa, synthetic construct
MSYTTPVHAAVYLRISEDRSGEQLGVARQREDCLKLCDQRKWVPVEYLDNDVSASTGKRRPAYEQMLADITTGKIAAVVAWDLDRLHRRPIELEAFMCLADEKRLALATVAGDVDLATPQGRLVARLKGSVAAHETEHKKARQRRAARQKAERGHPNWSKAFGYQPGPNGPEPDPRTAPLVKQAYADILAGASLGDVCRQWNGAGAFTITGRPWTTTTLSKFLRKPRNAGLRAYKGARYGPVDRDAIVGKAQWCPLVDEATFWAAQAVLDAPGRAPGRKSVRRHLLTGLAGCGKCGNHLAGSYRTDGRVVYVCKACHGVAILADNIEPILYHIVAERLAKPDAVDLLRREIHDAAEAETIRLELETLYGELDRLAVERAEGLLTARQVKISTDIVNAKITKLQARQLDQERLRVFDGIPLGTPQVAGMIAELSPDRFRAVLDVLAEVVVQPVGKSGRIFNPERVQVNWR

SEQ ID NO: 1404 - protein, 469 aa, synthetic construct
MSYTTPVRAAVYLRISEDRSGEQLGVARQREDCLKLCGQRKWVPVEYLDNDVSASTGKRRPAYEQMLADIAAGKIAAVVAWDLDRLHRRPMELEAFMSLADEKRLALATVAGDVDLATPQGRLVARLKGSVAAHETEHKKARQRRAARQKAERGLPNWSKAFGYLPGPSGPEPDPRTAPLVEQAYADILAGASLGDVCRQWNDAGAFTITGRPWTTTTLSKFLRKPRNAGLRAYKGARYGPVDRDAIVGKARWSPLVDEATFWAAQAVLDAPGRAPGRKSVRRHLLTGLAGCGKCGNHLAGSYRTDGKVVYVCKACHGVAILADNIEPILYHIVAERLAMPDAVDLLRREIHDAAEAEGIRLELETLYGELDRLAVERAEGLLTARQVKISTDIVNAKITKLQARQLDQERLRVFDGIPLGTPQVAGTIAELSPDRFRAVLDVLAEVVVQPVGKSGRIFNPERVQVNWR

SEQ ID NO: 1405 - protein, 469 aa, synthetic construct
MNYTTPVRAAVYLRISEDRSGEQLGVARQREDCLELCSQRKWVPVEYLDNDVSASTGKRRPAYEQMLADITAGKIAAVVAWDLDRLHRRPIELEAFMSLADEKRLALATVAGDVDLATPQGRLVARLKGCVAAHETEHKKARQRRAARQKAERGLPNWSKAFGYLPGPNGPEPDPRTAPLVKQAYADILAGASLGDVCRQWNDAGAFTITGRPWTTTTLSKFLRKPRNAGLREYKGARYGPVNRDAIVGKAQWSPLVDEATFWAAQAVLDAPGRAPGRKSVRRHLLTGLAGCGKCGNHLAGSYRTDGQVVYVCKACHGVSILADNIEPILYHIVAERLAMPDAVDLLRREIHDVAEAGTIRLELETLYGELDRLAVERAEGLLTARQVKISTDIVNAKITRLQARQLDQERLRVFDGIPLGTPQVAGMIAELSPDRFRAVLDVLAEVVVQPVGKSGRIFSPERVQVNWR

SEQ ID NO: 1406 - protein, 452 aa, synthetic construct
MKAAIYIRVSTREQVENYSIQAQTEKLTALCRSRDWDVYDIFIDGGYSGSNMNRPALNEMLGKLHEIGAVVVYRLDRLSRSQRDTITLIEEYFLKNNVEFVSLSETLDTSSPFGRAMIGILSVFAQLERETIRDRMVMGKIKRIEAGLPLTTAKGRTFGYDVIDTKLYINEEEAKQLQLIYDIFEEEQSITFLQKRLKELGFKVRTYNCYNNWLTNDLYCGYVSYKDKVHVKGIHEPIISEEQFYRVQEIFTRMGKNPNMNRDSASLLNNLVVCSKCGLGFVHRRKDAMSRDKKYHYRYYSCKTYKHIHELEKCGNKIWRADELEELVINRVNSYSVASRNVDKEDELGSLNEKLKIEHAKKKRLFDLYINGNYEVSELDSMMNDIDVQINYYESQIEANEELKKNKKIRENLAYLATVDFDSLEFREKQLYLKSLINKIYIDGEQVTIEWL

SEQ ID NO: 1407 - protein, 485 aa, synthetic construct
MTKKVAIYTRVSTTNQAEEGFSIDEQIDRLTKYAEAMGWQVSDTYTDAGLSGAKLERPAMQRLINDIENKAFDTVLVHKLDRLSRSVRDTLYLVKDVFTKNKIDFISLNESIDTSSAMGSLFLTILSAINEFERENIKERMTMGKLGRAKSGKSMMWTKTAFGYYHNRKTGILEIVPLQATIVEQIFTDYLSGISLTKLRDKLNESGHIGKDIPWSYRTLRQTLNNPVYCGYIKFKGSLFEGMHKPIIPYETYLKVQKELEERQQQTYERNNNPRPFQAKYMLSGMARCGYCGAPLRIVLGHKRKDGSRTMKYHCANRFPRKTKGVTVYNDNKKCDSGTYDLSNLENTVIDNLIGLQENNDSLLRIINGNNQPILDTSSFKRQISQIDKKIQKNSDLYLNDFITMDELKVRTDSLQAEKKLLKAKIGENKFSDGTDVFELVKTQLGSIPINELSYDNKKRIVNNLVSKVDVTADNVGIIFKFQLA

SEQ ID NO: 1408 - protein, 469 aa, synthetic construct
MSYTTPVRAAVYLRISEDRSGEQLGVARQREDCLKLCGQRKWEPVEYLDNDVSASTGKRRPAYEQMLADITAGKIAAVVAWDLDRLHRRPIELEAFMSLADEKRLALATVAGDVDLATPQGRLVARLKGSVAAHETEHKKARQRRAARQKAERGYPNWSKAFGYLPGPNGPEPDPRTAPLVKQAYADILAGASLGDVCRQWNDAGAFTITGRPWTTTTLSKFLRKPRNAGLRAYKGARYGPVDRDAIVGKAQWSPLVDEATFWAAQAVLDAPGRAPGRKSVRRHLLTGLAGCGKCGNHLAGSYRTDGRVVYVCKACHGVAILADNIVPILYRIVAERLAMPDAVNLLRREIRDAAEAETIRLGLETLYGELDRLAVERAEGLLSARQVKISTDIVNAKITKLQTRQLDQERLRVLDGIPLGTPQVAGMVAELSPDRFRAVLDVLAEVVVQPVGKSGRIFNPERVQVNWR

SEQ ID NO: 1409 - protein, 485 aa, synthetic construct
MTKKVAIYTRVSTTNQAEEGFSIDEQIDRLTKYAEAMGWQVSDTYTDAGFSGAKLERPAMQRLINDIENKAFDTVLVYKLDRLSRSVRDTLHLVKDVFTKNKIDFISLNESIDTSSAMGSLFLTILSAINEFERENIKERMTMGKLGRAKSGKSMMWTKTAFGYYHNRKTGILEIVPLQATIVEQIFTDYLSGISLTKLRDKLNESGHIGKDIPWSYRTLRQTLDNPVYCGYIKFKGSLFEGMHKPIIPYETYLKVQKELEERQQQTYERNNNPRPFQAKYMLSGMARCGYCGAPLRIVLGHKRKDGSRAMKYHCANRFPRKTKGITVYNDNKKCDSGTYDLSNLEDTVIDNLIGFQENNDSLLKIINGNNRPILDTSSFKKQISQIDKKIQKYSDLYLNDFITMDELKDRTDSLQAEKKLLKAKISENKFNDGTDVFELVKTQLGSIPINELSYDNKKKIVNNLVSKVDVTADNVDIIFKFQLA

SEQ ID NO: 1410 - protein, 452 aa, synthetic construct
MKAAIYIRVSTREQVENYSIQAQTEKLTALCRSKDWDVYDIFVDGGYSGSNMNRPALNEMLSKLHEIDAVVVYRLDRLSRSQRDTITLIEEYFLKNNVEFVSLSETLDTSSPFGRAMIGILSVFAQLERETIRDRMVMGKIKRIEAGLPLTTAKGRTFGYDVIDTKLYINEEEAKQLQLIYDIFEEEQSITFLQKRLKKLGFKVRSYNRYNNWLTNDLYCGYVSYKDKVHVKGIHEPIISEEQFYRVQEIFTRMGKNPNMNRDSASLLNNLVVCSKCGLGFVHRRKDAMSRDKKYHYRYYSCKTYKHIHELEKCGNKIWRADKLEELVINRVNSYSVASRNVDKEDELGSLNEKLKIEHAKKKRLFELYINGSYEVSELDSMMNDIDAQIGYYESQIEANKGLRKNKKIQENLANLATVDFGSLEFREKQLYLKSLINKIYIDGEQVTIEWL

SEQ ID NO: 1411 - protein, 452 aa, synthetic construct
MKAAIYIRVSTQEQVGNYSIQAQTERLTALCRSKDWDVYDIFIDGGYSGSNMNRPALNEMLSKLHEIDAVVVYRLDRLSRSQRDTTTLIEEYFLKNNVEFVSLSETLDTSSPFGRAMIGILSVFAQLERETIRDRMVMGKIKRIEAGLPLTTAKGRTFGYDVIDTKLYINEEEAKQLRLIYDIFEEVQSITSLQKRLKKLGFKVRTYNRYNNWLTNDLYCGYVSYKDKVHVKGIHEPIISEEQFYRVQEIFTRMGKNPNMNRDSASLLNNLVVCSKCGLGFVHRSKDTMCRGKKYHYRYYSCKTYKHTYELEKCGNKTWRADKLEELIISRVNNYSFASRNVDREDELDSLNEKLRIEHAKKKRLFDLYINGSYEVSELDSMMSDIDAQINHYESQIEANEKLKKNKKIQENLADLATMDFDSLEFREKQLYLKSLINKIYIDGEQVTIEWL

SEQ ID NO: 1412 - protein, 485 aa, synthetic construct
MTKKVAIYTRVSTTSQAEEGFSIDEQIDRLTKYAEAMGWQVSDTYTDAGLSGAKLERPAMQRLINDIENKAFDTVLVYKLDRLSRSVRDTLYLVKDVFTKNKIDFISLNESIDTSSAMGSLFLTILSAINEFERENIKERMTMGKLGRAKSGKSMMWTKTAFGYYHNRKTGILEIVPLQATIVEQIFTDYLSGISLTKLRDKLNESGHIGKDIPWSYRTLRQTLDNPVYCGYIKFKDSLFEGMHKPIIPYETYLRVQKELEERQQRTYERNNNPRPFQAKYMLSGMARCGYCGAPLRIVLGHKRKDGSRTMKYHCANRFPRKTKGVTVYNDNKKCDSGTYDLSNLENTVIDNLIDFQENNDSLLKIINGNNQPILDTSSFKEQISQIDKKIQKNSDLYLNDFITMDELRDRTDSLQAEKELLKAKISGNKFNDSTDVFELVKTQLGSIPINELSYDNKKKIVNNLVSKVDVTADNVDITFKFQPA

SEQ ID NO: 1413 - protein, 485 aa, synthetic construct
MTKKVAIYTRVSTTNQAEEGFSIDEQIDRLTKYAEAMGWQVSDTYSDAGFSGAKLERPAMRRLINDIENRAFDTVLVHKLDRLSRSVRDTLYLVKDVFTKNKIDFISLSESIDTSSAMGSLFLTILSAINEFERENIKERMTMGKLGRARSGKSMMWTKTAFGYYHNRKTGILEVVPLQATIVEQIFTDYLSGISLTKLRDKLNESGHIGKDIPWSYRTLRQTLDNPVYCGYIKFKDSLFKGMHKPIIPYETYLEVQKELEERQQQTYERNNNPRPFQAKYMLSGMARCGYCGAPLRIVLGHKRKDGSRTMKYHCANRFPRKTKGVTVYNDNKKCDSGTYDLSNLENTVIDNLIGFQENNDSLLKIINGNNQPILDTGSLEKQISQIDKKIQKNSDLYLNDFITMDELRERTDSLQAEKKLLKAKISKNKFNDSTDVFELVKTQLGSIPINELSYDNKKKIVNNLVSKVDVTADNVDIIFKFQLA

SEQ ID NO: 1414 - protein, 452 aa, synthetic construct
MKAAIYIRVSTQEQVGNYSIQAQTEKLTALCRSKDWDVYDIFVDGGYSGSNMNRPALNEMLSKLHEIDAVVVYRLDRLSRSQRDTTTLIEEYFLKNNVEFVSLSETLDTSSPFGRAMIGILSVFAQLERETIRDRMVMGKIKRTEAGLPLTTAKGRTFGYDVIDTKLYINEEEAKQLQLIYDIFEEEQSITSLQKRLKKLGFKVRSYNRYNNWLTNDLYCGYVSYKDEVHVKGIHEPIISEEQFYRVQEIFTRMGKNPNMNRDSASLLNNLVVCSKCGLGFVHRSKDTMSRGKKYHYRYYSCKTYKHTHELEKCGNKTWRADKLEELVINRVNSYSLASRDVDKEDELDSLNEKLKIEHAKKKRLFDLYINGSYEVSELDSMMNDIDAQINHYESQIEAKEELRKNKKIQGNLADLATVDFDSLEFREKQLYLKSLINKIYIDGEQVTIEWL

SEQ ID NO: 1415 - protein, 452 aa, synthetic construct
MKAAIYIRVSTREQVENYSIQAQTEKLTALCRSKDWDVYDIFIDGGYSGSNMNRPALNEMLSKLHEIDAVVVYRLDRLSRSQRDTITLIEEHFLKNNVEFVSLSETLDTSSPFGRAMIGILSVFAQLERETIRDRMVMGKIKRIEAGLPLTTAKGRTFGYDVIDTKLYINEEEAKQLQLIYDIFEEEQSITFLQKRLKKLGFKVRTYNRYNNWLTNDLYCGYVSYKDKVHVKGIHEPIISEEQFYRVQEIFTRMGKNPNMNRDSASLLNNLVVCGKCGLGFVHRRKDAMSRDKKYHYRYYSCKTYKHIHELEKCGNKIWRADKLEELIINRVNNYSLANRNVDKEDELDSLNEKLKMEHAKKKRLFDLYINGSYEVSELDSMMNDIDAQISYYESQIEANEELKKNKEIRENLAHLATVDFDSLEFREKQLYLKSLINKIYIDGEQVTIEWL

SEQ ID NO: 1416 - protein, 485 aa, synthetic construct
MTKKVAIYTRVSTTNQAEEGFSIDEQIDRLTKYAEAMGWQVSDTYTDAGFSGAKLERPAMQRLISDIENKTFDTVLVYKLDRLSRSVRDTLYLVKDVLTKNKIDFISLNESIDTSSAMGSLFLTILSAINEFERENIKERMTMGKLGRARSGKSMMWAKTAFGYYHNRKTGILEIVPLQATIVEQIFTDYLSGISLTKLRDKLNESGHIGKDIPWSYRTLRQTLDNPVYCGYIRFKDSLFEGMHKPIIPYETYLKVQKELEVRQQRTYERNNNPRPFQAKYMLSGMARCGYCGAPLRIVLGRKRKDGSRTMKYHCANRFPRKTKGVTVYNDNKKCDSGTYDLSNLENTVIDNLIGFQENNDSLLKIINGINQPILDTGSFKEQISQIDKKIQKISDLYLNDFITMDELKDRTDSLQAEKELLKAKISENKFNDSTDVFELVKTQLGSIPINELSYDSKKKIVNNLVSKVDVTADSVDIIFKFQLA

SEQ ID NO: 1417 - protein, 469 aa, synthetic construct
MSYTTPVRAAVYLRISEDRSGEQLGVARQREDCLKLCSQRNWVPVEYLDNDVSASTGKRRPAYEQMLADITAGKIAAVVAWDLDRLHRRPIELEAFMSLADEKRLALATVAGDVDLATPQGRLVARLKGSVAAHETEHKKARQRRAARQKAERGHPNWSKAFGYLPGPSGPEPDPRTAPLVKQAYADILAGASLGDVCRQWNDAGALTVTGRPWTTTTLSKFLRKPRNAGLRAYKGARYGPVDRDAIVGKAQWSPLVDEATFWAAQAVLDAPGRAPGRKSVRRHLLTGLAGCGKCGNHLAGSYRTDGRVVYVCKACHGVAILADNIEPTLYHIVAERLARPDAVDLLRREIHDAAEAETIRLELETLYGELDRLAVERAEGLLTARQVKISTDIVNAKVTKLQARQLDQERLRVFDGIPLGTPQVASMIAELSPDRFRAVLDVLAEVVVQPVGKSGRIFNPERVQVNWR

SEQ ID NO: 1418 - protein, 485 aa, synthetic construct
MTRKVAIYTRVSTTNQAEEGFSIDEQIDRLTKYAEAMGWQVSDTYTDAGFSGAKLERPAMQRLINDIENKAYDTVLVYKLDRLSRSVRDTLYLVKEVFTKNKIDFISLNESIDTSSAMGSLFLTILSAINEFERENIKERMTMGKLGRAKSGKSMMWTKTAFGYYHNRKTGILEIVPLQATIVEQIFTDYLSGISLTKLRDKLNESGHIGKDIPWSYRTLRQTLDNPVYCGYIKFKDSLFEGMHKPIIPYETYLRVQKELEERQQQTYERNNNPRPFQAKYMLSGMARCGYCGAPLRIVLGHKRKDGSRTMKYHCANRFPRKTKGVTVYSDNKKCDSGTYDLSNLEDTVIDSLIGFQENNDSLLKIINGNDRPILDTSSLKKQISRIDKKIQKISDLYLNDFITMDELKDRTDSLQAEKKLLKAKISENKFNDSTDVFELVKTQLGSIPINELSYDNKKKIVNNLVSKVDVTADNVDIIFKFQLA

SEQ ID NO: 1419 - protein, 469 aa, synthetic construct
MSYTTPVRAAVYLRISEDRSGEQLGVARQREDCLKLCDQRKWVPVEYLDNDVSASTGKRRPAYEQMLVDITAGKIAAVVAWDLDRLHRRPIELEAFMSLADEKRLALATVAGDVDLATPQGRLVARLKGSVAAHETEHKKARQRRAARQKAERGLPNWSRAFGYLPGPNGPEPDPRTAPLVKQAYADILAGASLGDVCKQWNDAGAFTITGRPWTTTTLSKFLRKPRNAGLRAYKGARYGPVDRDAIVGKAQWSPLVDDATFWAAQAVLDAPGRAPGRKSVRRHLLTGLAGCGKCGNHLAGSYRTDGRVVYVCKACHGVAILADNIEPFLYHTVAGRLAMPDAVDLLRCEIHDAAEAETIRLELETLYGELDRLAVERAEGLLTARQVKISTDVVNAKITELQARQLDQERLRVFDGIPLGTPQVAGVIAELSPDRFRAVLDVLAEVVVQPVGKSGRTFNPERVQVNWR

SEQ ID NO: 1420 - protein, 469 aa, synthetic construct
MSYTTPVCAAVYLRISEDRSGEQLGVARQREDCLKLCDQRKWVPVEYLDNDVSASTGKRRPAYEQMLADITAGKIAAVVAWDLDRLHRRPIELEAFMNLADEKRLALATVAGDIDLATPQGRLVARLKGSVAAHETEHKKARQRRAARQKAERGYPNWSKAFGYLPGPNGPEPDPRTAPLVKQAYADILAGASLGDVCRQWNDAGAFTITGRPWTTTALSKFLRKPRNAGLRAYKGARYGPVDRDAIVGKAQWSPLVDEATFWAAQAVLDAPGRAPGRKSVRRHLLTGLAGCGKCGNHLAGSYRTDGRVVYVCKACHGVAILADNIEPILYRIVAERLAMPDAVNLLRREIHDAAEAETIRLELETLNGELDRLAVERAEGLLTARQVKISSDIVNAKITKLQARQLDQERLRVFDGIPLGTPQVAGMIAELGPNRFRAVLDVLAEVVVQPVGKSGRIFNPERVQVNWR

SEQ ID NO: 1421 - protein, 485 aa, synthetic construct
MTKKVAIYTRVSTTNQAEEGFSIDEQIDRLTKYAEAMGWQVSDTYTDAGFSGAKLERPAMQRLINDIENKAFDTVLVYKLDRLSRSVRDTLYLVKDVFTKNKIDFISLNESINTSSAMGSLFLTILSAINEFERENIKERMTMGKLGRAKSGKSMMWAKTAFGYYHNRKTGILEIVPLQATIVEQIFTDYLSGISLTKLRDKLNESGHIGKDIPWSYRTLRQTLDNPVYCGYIKFKDSLFEGMHKPIIPYETYLKVQKELEERQQQTYERNNNPRPFQAKYMLSGVARCGYCGAPLKIVLGHKRKDGSRTMKYHCANRLPRKTKGVTVYNDNKKCDSGTYDLSNLENTVIDNLIGFQENNDSLLKIINGNSQPILDTSSFKKQISQIDKKIQRNSDLYLNDFITMDELKDRTDSLQAEKKLLKAKVSENKFNDSADVFELVKTQLGSIPINELSYDNKKKIVNNLVSKVDVTADNVDIIFKFQLA

SEQ ID NO: 1422 - protein, 452 aa, synthetic construct
MKAAIYIRVSTREQVENYSIQAQTEKLTALCRSKDWDVYDIFIDGGYSGSNMNRPALNEMLSKLHEIDAVVVYRLDRLSRSQRDTITLIEEYLLKNNVEFVSLSETLDTSSPFGRAMIGILSVFAQLERETIRDRMVMGKIKRIEAGLPLTTAKGRTFGYDVIDTKLYINEEEAKQLQLIYDIFEEEQSITFLQKRLKKLGFKVHTYSRYNNWLTNDLYCGYVSYKDKVHVKGIHEPIISEEQFYRVQEIFTRMGKNPNTNRDSASLLNNLVVCGKCGLGFVHRRKDTTSHGKKYHYRYYSCKTYKHTHELEKCGNKIWRADKLEELIISRVNNHSLASRNVDKEVELDSLNEKLKIEHAKRRRLFDLYINGSYNVSELDSMMNDIDAQINYYVSQIEVNEELKKNKKIQENLAGLATVDFDSLEFREKQLYLKSLINKIYIDGEQVTIEWL

SEQ ID NO: 1423 - protein, 485 aa, synthetic construct
MTKKVAIYTRVSTTNQAEEGFSIDEQIDRLTKYAEAMGWQVSDTYTDAGSSGAKLERPAMQRLINDIESKAFDTVLVYKLDRLSRSVRDTLYLVKDVFTKNKIDFISLNESIDTSSAMGSLFLTILSAINEFERENIKERMTMGKLGRAKSGKSMMWTKTAFGYHHNRKTGILEIVPLQATIVEQIFTDYLSGISLTKLRDKLNESGHIGKDIPWSYRTLRQTLDNPVYCGYIKFKDRLFEGMHKPIIPYETYLKVQRELEERQQQTYERNNNPRPFQAKYMLSGMARCGYCGAPLKIVLGHKRKDGSRTMKYHCANRFPRKTKGITVYNDNKKCDSGTYDLSNLENTVIDNLIGFQENNDSLLKIINGNNQPILDTSSLKKQISQIDKKIQKNSDLYLNDFITMDELKDRTDSLQAEKKLLKAKISENKFNDSTDVFELVKTQLGSIPINELSYDNKKEIVNNLVSKVDVTADNVDIIFKFQLA

SEQ ID NO: 1424 - protein, 452 aa, synthetic construct
MKAAIYIRVSTREQVENYSIQAQTEKLTALCRSKDWDVYDIFIDGGYSGSNMNRPALNEMLSQLHEIDAVVVYRLDRLSRSQRDTITLIEEYFLKNNVEFVSLSETLDTSSPFGRAMIGILSVFAQLERETIRDRTVMGKIKRIEAGLPLTTAKGRTFGYDVIDTKLYINEEEAKQLRLIYDIFEEEQSITLLQKRLKKLGLKVRSYNRYNNWLTNDLYCGYVSYKDKVHVKGIHEPIISEEQFYRVQEIFARMGKNPNMNRGCASLLNNLVVCSKCGLGFVHRRKDTTSRGKKYHYRYYSCKTYKHPHELEKCGNKIWRADKLEELIINRVNNYSFASRNVDKEDELDGLSEKLKIEHAKKKRLFDLYINGSYEVSELDSMMSDIDAQINYYESQIEANEELKKNKKIQESLANLATVDYDSLEFRERQLYLKSLINKIYIDGEQVTIEWL

SEQ ID NO: 1425 - protein, 452 aa, synthetic construct
MKAAIYIRVSTQEQVENYSIQAQAEKLTALCRSKDWDVYDIFIDGGYSGSNMNRPALNEMLSKLHEIDAVVVYRLDRLSRSQRDTTTLIEEYFLKNNVEFVSLSETLDTSSPFGRAMIGILSVFAQLERETIRDRMVMGKIKRVEAGLPLTTAKGRTFGYDVIDTKLYINEEEAKQLRLIYDIFEEEQSITSLQKRLKKLGFKVRTYNRYNNWLTNDLYCGYVSYKDKVHVKGIHEPIISEEQFYRVQEIFTRMGKNPNMNRDSASLLSNLVVCSKCGLGFVHRSKDTMSRGKKYHYRYYSCKTYKHTHELEKCGNKTWRADKLEELIISRVNDYSFASRSVDKEDELDSLNEKLKIEHAKKKRLFDLYINGSYEVSELDSMMNDIDAQINYYESQIEANEGLKKNKKIQENLADLAAVDFDSLEFREKQLYLKSLINKIYIDGEQVTIEWL

SEQ ID NO: 1426 - protein, 452 aa, synthetic construct
MKAAIYIRVSTREQVENYSIQAQTEKLTALCRSKDWDVYDIFIDGGYSGSNMNRPALNEMLGKLHEIDAVVVYRLDRLSRSQRDTITLIEEYFLKNNVEFVSLSETLDTSSPFGRAMIGILSVFAQLERETIRDRMVMGKIKRIEAGLPLTTAKGRTFGYDVIDTKLYINEEEAKQLRLIYDIFEEEQSITFLQKRLKKLGFKVRTYNRYNNWLTNDLYCGYVSYKDKVHVKGIHEPIISEEQFYRVQEIFARMGKNPNMNRDSASLLNNLVVCSKCGLGFVHRRKDAMSRDKKYHYRYYSCKTYKHIHELEKCGNKIWRADKLEELIISRVNNYSFASRNADKEDELDSLSEKLKIEYAKKKRLFDLYINGSYEVSELDSMMNDIDAQINYYESQIEANEELKKNKKIQEDLADLATVDFDSLEFREKQRYLKSLINKIYIDGEQVTIEWL

SEQ ID NO: 1427 - protein, 452 aa, synthetic construct
MKAAIYIRVSTREQVENYSIQAQTEKLTALCRSKDWDVYDIFIDGGYSGSNMNRPALNEMLSKLHEIDAVVVYRLDRLSRSQRDTITLIEEYFLKNNVEFVSLSETLDTSSPFGRAMIGILSVFAQLERETIRDRMVMGKIKRVEAGLPLTTAKGRTFGYDVIDTKLYINEEEAKQLQLIYDIFEEEQSITFLQKRLKKLGFKVRTYNRYNSWLTNDLYCGYVSYKDKVHVRGIHEPIISEEQFYRVQEIFTRMGKNPNMNRDSASLLNNLVVCSKCGLGFVHRRKDTTSRGKKYHYRYYSCKTYKHTHELEKCGNKIWRADKLEELIINRVNNYSFASRNADKEDELDSLNEKLKVGHAKKKRLFDLYISGSYEVSELDGMMNDIDAQINYYESQIEANEELKKNKKIQENLANLATVDYDSLEFREKQLYLKSLINKIYIDGEQVTIEWL

SEQ ID NO: 1428 - protein, 485 aa, synthetic construct
MTKKVAIYTRVSTTNQAEEGFSIDEQTDRLTKYAEAMGWKVSDTYTDAGFSGAKLERPAMQRLVNDIESKAFDTVLVYKLDRLSRSVRDTLYLVKDVFTKSKIDFISLNESIDTSSAMGSLFLTILSAINEFERENIKERMTMGKLGRAKSGKSMMWTKTAFGYYHNRKTGILEIVPLQATIVEQIFTDYLSGISLTKLRDRLNESGHIGKDIPWSYRTLRQTLDNPVYCGYIKFKDSLFKGMHKPIIPYETYLKVQKELEERQQQTYERNSNPRPFQAKYMLSGMARCGYCGAPLRIVLGHKRKDGSRTMKYHCTNRFPRKTKGVTVYNDNKKCDSGTYDLSDLENTVIDNLIGFQENNDSLLKIINGNHQPILDTSSFKEQISQIDKKIQKNSDLYLNDFITMDELKDRTDSLRAEKELLKAKISENKLNDSTDVLELVKTQLGSIPINELSYDNKKKIVNNLVSKVDVTADNVDIIFKFQLA

SEQ ID NO: 1429 - protein, 452 aa, synthetic construct
MKAAIYIRVSTREQVENYSIQAQTEKLTALCRSKDWDVYDIFIDGGYSGSNMNRPALNEMLSKLHEIDAVVVYRLDRLSRSQRDTITLIEEYFLRNNVEFVSLSEALDTSSPFGRAMIGILSVFAQLERETIRDRMVMGKIKRIEAGLPLTTAKGRTFGYDVIDTKLSINEEEAKQLQLIYDIFEEEQSITFLQKRLKKLGFKVRTYSCYNSWLTNDLYCGYVSYKDKVHVKGIHEPIISEEQFYRVQAIFTRMGKNPNMNRDSASLLNNLVVCSKCGLGFVHRRKDTMSRGKKYHYRYYSCKTYKHIHELEKCGNKIWRADKLEELIINRVNNYSFASRSVDKEGELDSLNEKLKIEHAKRERLFDLYINGSYEVSELDNMMNDIDAQISYYEGQIEENEELKKNKKIQENLADLATVDFDGLEFREKQLYLKSLINRIYIDGEQVTIEWL

SEQ ID NO: 1430 - protein, 452 aa, synthetic construct
MKAAIYIRVSTREQVENYSIQAQTEKLTALCRSRDWDVYDIFIDGGYSGSNMNRPALNEMLSKLHEIDAVVVYRLDRLSRSQRDTITLIEEYFLKNNVEFVSLSETLDTSSPFGRAMIGILSVFAQLERETIRDRMVMGKIKRIEAGLPLTTAKGRTFGYDVIDTKLYINEEEAKQLRLIYDIFEEEQSITFLQRRLKELGFKVRTYNRYNNWLTNDLYCGYVSYKDKVHVKGIHEPIISEEQFYRVQEIFTRMGKNPNMNRDSASLLNNLVVCGKCGLGFVHRRKDAMSRDKKYHYRYYSCKTYKHIHELEKCGNKIWRADELEELVINRVNSYSVASRNVDKEDELDSLNEKLKIEHAKKRRLFDLYINGSYEVSELDSMMNDIDAQINYYEGQIEANEELKKNKKIQENLAYLATVDFDSLEFREKQLYLKSLISKIYIDGEQVTIEWL

SEQ ID NO: 1431 - protein, 485 aa, synthetic construct
MTKKVAIYTRVSTTNQAEEGFSIDEQIYRLTKYAEAMGWQVSDTYTDAGFSGAKLERPAMQRLINDIENKAFDTVLVYKLDRLSRSVRDTLYLVKDVFTKNKIDFISLNESIDTSSAMGSLFLTILSAINEFERENIKERMTMGKLGRAKSGKSMMWTKTAFGYYHNRKTGILEIVPLQATIVEQIFTDYLSGISLTKLRDKLNESGHIGKDIPWSYRTLRQTLDNPVYCGYIKFKDSLFEGMHKPIISYETYLKVQKELEERQQQTYEHNNNPRPFQAKYMLSGMARCGYCGAPLRIVLGHKRKDGSRTMKYHCANRFPRKTRGVTVYNDNKKCDSGTYDLSNLENTVIDNLIGFQENNDSLLKIINGNNLPILDTSSFEKQISQIDKKIQKNSDLYLNDFITMDELKDRTDSLQAEKKLLKARISEDKFNDSTDVFELVKTQLGSIPINELSYDNKKKIVNNLVSKVDVTADNVDIIFKFQLA

SEQ ID NO: 1432 - protein, 485 aa, synthetic construct
MTKKVAIYTRVSTTNQAEEGFSIDEQTDRLTKYAEAMGWQVSDTYTDAGFSGAKLGRPAMQRLINDIENKAFDTVLVYKLDRLSRSVRDTLYLVKDVFTKNKIDFISLNESIDTSSAMGSLFLTILSAINEFERENIKERMTMGKLGRAKSGKSMMWTKTAFGYYHNRKTGILEIVPQQATIVEQIFTDYLSGISLTKLRDRLNEGGHIGKDIPWSYRTLRQTLDNPVYCGYIKFKDSLFEGMHKPIIPYETYLKVQKELKERQQQTYERNNNPRPFQAKYMLSGMARCGYCGAPLRVVLGHKRKDGSRTMKYHCANRFPRKTKGVTVYNDNKKCDSGTYDLSNLENTVIDNLIGFQENNDSLLKIINGNNQPILDTSGFKRQISQIDKKIQKISDLYLNDFITMDELKDRTDSLQAEKKLLKAKISENKFNDNTDVFELVKTQLGSIPINELSYDNKKIIVNNLVSKVDVTADNVDIIFKFQLA

SEQ ID NO: 1433 - protein, 452 aa, synthetic construct
MKAAIYIRVSTREQVENYSIQAQTEKLTALCRSKDWGVYDIFIDGGYSGSNMNRPALNEMLSKLHEIDAVVVYRLDRLSRSQRDTITLIEEYFLRNNVEFVSLSETLDTSSPFGRAMIGILSVFAQLERETIRDRMVMGKIKRIEAGLPLTTARGRTFGYDVIDTKLYINEEEAKQLQLIYDIFEEEQSITFLQKRLKKLGFKVRTYNCYNNWLTNDLYCGYVSYKDKVHVKGIHEPIISEEQFYRVQEIFTRVGKNPNMNRDSASLLNNLVVCSKCGLGFVHRRKDATSRDKKYHYRYYSCKTYKHIHELEKCGNKIWRADELEELIIDRVNNYSLANRNVDKADELDSLNEKLKVEHAKKRRLFDLYINGSYEVSELDSMMNDIDAQINYYESQIEANEELKKNKKIQENLAELATVDFDSLEFREKQLYLKSLISKIYIDGEQVTIEWL

SEQ ID NO: 1434 - protein, 452 aa, synthetic construct
MKAAIYIRVSTREQVENYSIQAQTEKLTALCRSKDWDVYDIFIDGGYSGSNMNRPALNEMLSKLHEIDAVVVYRLDRLSRSQRDTITLIEEYFLKNNVEFVSLSETLDTSSPFGRAMIGILSVFAQLERETIRDRMVMGKIKRIEAGLPLTTAKGRTFGYDVIDTKLYINEEEARQLQLIYDIFEEEQSITSLQKRLKELGFKVRTYNRYNNWLTNDLYCGYVSYKDKVHVKGIHEPIISEEQFYRVQEIFTRMGRNPNMNRDSASLLNNLVVCSKCGLGFVHRRKDAMSRDKKYHYRYYSCKTYKHIHELEKCGNKIWRADKLEALIIDRVNNYSLASRDADKEDELGNLNEKLKIEHAKRKRLFELYISGSYEVSELDSMMSDIDAQISYYESQIKANEELKKNKKIQEDLADLATVDFDSLEFREKQLYLKSLINKIYIDGEQVTIEWL

SEQ ID NO: 1435 - protein, 469 aa, synthetic construct
MSYATPVRAAVYLRISEDRSGEQLGVARQREDCLKLCGQRKWEPVEYLDNDVSASTDKRRPAYEQMLADITAGKIAAVVAWDLDRLHRRPVELEAFMCLADEKRLALATVAGDVDLATPQGRLVARLKGSVAAHETEHKKARQRRAARQKAERGYPNWSKAFGYLPGPNGPEPDPRTAPLVKQAYADILAGASLGDVCRQWNDAGAFTITGRPWTSTTLSKFLRKPRNAGLRAYKGARYGPVDRGAIVGKARWSPLVDEATFWAAQAVLDAPGRAPGRKSVRRHLLTGLAGCGKCGNHLAGSYRTDGRVVYVCRACHGVAILADNIEPILYHIVAERLAMPDAVDLLRREIHDAAEAETIRLELETLYGELDRLAVERAEGLLTARQVKISTDIVSAKITKLQARQLDQERLRVFDGIPLGTPQVAGVIAELSPDRFRAVLDVLAEVVVQPVGKSGRTFNPERVQVNWR

SEQ ID NO: 1436 - protein, 485 aa, synthetic construct
MTKKVAIYTRVSTTNQAEEGFSIDEQIDRLTKYAEAMGWQVSDTYTDAGFSGAKLERPAMQRLISDIENKAFDTVLVYKLDRLSRSVRDTLYLVKDVFTKNKIDFISLNESIDTSSAMGSLFLTILSAINEFERENIKERMTMGKLGRAKSGKSMMWTKTAFGYYHNRKTGILEIVPLQATIVEQIFTDYLSGISLTKLRDKLNESGHIGKDIPWSYRTLRQTLDNPVYCGYIKFKDSLFEGMHKPIIPYETYLKVQKELVERQQQTYERNNNPRPFQAKYMLSGMARCGYCGAPLKIVLGHKRKDGSRTMKYHCANRFPRKTKGVTVYNDNKKCDSGTYDLSNLENIVIDNLIGFQENNDSLLKIINGNNQPILDTSSFKEQISQIDKKIQKNSDLYLNDFITMDELKDRTDGLQAEKKLLKAKISENRFSDSTDVFELVKTQLGSIPINELSYDNKKKIVNNLVSKVDVTADNVDIIFKFQLA

SEQ ID NO: 1437 - protein, 485 aa, synthetic construct
MTKKVAIYTRVSTTNQAEEGFSIDEQIDRLTKYAEAMGWQVSDTYTDAGVSGAKLERPAMQRLINDIENKAFDTVLVYKLDRLSRSVRDTLYLVKDVFTKNKIDFISLNESIDTSSAMGSLFLTILSAINEFERENIKERMTMGKLGRAKSGKSMMWTKTAFGYYHNRKTGILEIVPLQATIVEQIFTDYLSGISLTKLRDKLNESGHIGKGIPWSYRTLRQTLDNPVYCGYIKFKDSLFEGMHKPIIPYETYLKVQKELEERQQQTYERNNNPRPFQAKYMLSGMARCGYCGAPLKIVLGHKRKDGSRTMKYHCANRFPRKAEGVTVYNDNKKCDSGTYDLSNLENTVIDNLIGFQENNDSLLKIINGNNQPTLDTSSFKKQISQIDKKIQKNSDLYLNDFITMDELKDRTDSLQAEKKLLKAKISENKFDDSTDVFELVKTQLGSIPINELSYDNKKKIVNNLVSKVDVTADNVDIIFKFQLA

SEQ ID NO: 1438 - protein, 485 aa, synthetic construct
MTKKVAIYTRVSTTNQAEEGFSIDEQIDRLTKYVEAMGWQVSDTYTDAGLSGAKLERPAMQRLINDIENKAFDTVLVYKLDRLSRSVRDTLYLVKDVFTKNKIDFISLNESIDTSSAMGSLFLTILSAINEFERENIKERMTMGKLGRAKSGKSMMWTKTAFGYYHNRETGILEIVPLQATIVEQIFTDYLSGISLTKLRDKLNESGHVGKDIPWSYRTLRQTLDNPVYCGYIKFKDSLFEGMHKPIIPYETYLKVQKELEERQQQTYERNNNPRPFQAKYMLSGMARCGYCGAPLKIVLGHKRKDGSRTKRYHCANRFPRKTKGVTVYNNNKKCDSGTYDLSDLENTVIDNLIGFQENNDSLLKIINGNNQPILDTSSFKKQISQIDKKIQRNSDLYLNDFITMDELRDRTDSLQAEKKLLKAKISENKFNDSTDVFELVKTQLGSIPINELSYDNKKKIVNNLVSKVDVTADNVDIIFKFQLA

SEQ ID NO: 1439 - protein, 485 aa, synthetic construct
MTKKVAIYTRVSTTNQAEEGFSIDEQVDRLTKYAEAMGWQVGDTYTDAGFSGAKLERPAMQRLISDIEDRAFDTVLVYKLDRLSRSVRDTLYLVKDVFTKNKIDFISLNESIDTSSAMGSLFLTILSAINEFERENIKERMTMGKLGRAKSGKSMMWTKTAFGYYHNRKTGILEIVPLQATIVEQIFTDYLSGISLTKLRDKLNESGHIGKDIPWSYRTLRQTLDNPVYCGYIKFKGSLFEGMHKPIIPYETYLKVQKGLEERQQQTYERNNNPRPFQAKYMLSGMARCGYCGAPLRIVLGHKRKDGSRTMKYHCANRFPRKTKGVTVYNDNKKCDSGTYDLSNLENTVIDNLIGFQENNDSLLKIINGNNQPTLDTGSLEEQISQIDKKIQKNSDLYLNDFITMDELKDRTDSLQAEKKLLKAKISENRFNDSTDVFELVKTQLGSIPINELSYDSKKKIVNNLVSKVDVTADNVDIIFKFQLA

SEQ ID NO: 1440 - protein, 452 aa, synthetic construct
MKAAIYIRVSTREQVENYSIQAQTEKLTALCRSKDWDVYDIFIDGGYSGSNMNRPALNEMLSKLHEIDAVVVYRLDRLSRSQRDTITLIEEYFLKNNVEFVSLSETLDTSSPFGRAMIGILSVFAQLERETIRDRMVMGKIKRIEAGLPLTTAKGRTFGYDVIDTKLYINEEEAKQLQLIYDIFEEERSITFLQKRLKKLGFKVRTYNRYSNWLTNDLYCGYVSYKDKVHVKGIHEPIISEEQFYRVQEIFTRMGKNPNMNRGSASLLNNLVVCGKCGLGFVHRRKDAMSRDKKYHYRYYSCKTYKHIHELEKCGNKIWRADELEELIINRVNNYSLASRNVGKEDELDSLNEKLKIEHAKKKRLFDLYINGSYEVSELDSMMNDINAQINYYESQIEANEELKKSKKIQENLADLATADFDSLEFREKQLYLKSLINKIYIDGEQVTIEWL

SEQ ID NO: 1441 - protein, 452 aa, synthetic construct
MKAAIYIRVSTREQVENYSIQAQTEKLTALCRSKDWDVYDIFIDGGHSGSNMNRPALNEMLSKLHEIDAVVVYRLDRLSRSQRDTITLIEEYFLKNNVEFVSLSETLDTSSPFGRAMIGILSVFAQLERETIRDRMVMGKIKRIEAGLPLTTAKGRTFGYDVIDARLYINEEEAKQLQLIYDIFEEEQSITFLQKRLKKLGFKVHTYNRYNNWLTNDLYCGYVSYKDKVHVKGIHEPIISEEQFYRVQEIFTRMGKNPNMNRDSASLLNNLVVCGKCGLGFVHRRKDAMSRDKKYHYRYYSCKTYKHIHELEKCGNKIWRADKLEELIINRVNNYSLASRNVDKEDELDSLNEKLKIEHAKKRRLFDLYINGSYEVSELDSMMNDIDAQIDYYESQIEANEELKKNKKIQENLAYLATVDFDSLEFREKQLYLKSLINKIYIDGEQVTIEWL

SEQ ID NO: 1442 - protein, 485 aa, synthetic construct
MTKKVAIYTRVSTTNQAEEGFSIDEQIDRLTKYAEAMGWQVSDTYTDAGLSGAKLERPAMQRLINDIENKAFDTVLVYKLDRLSRSVRDTLYLVKDVFTKNKIDFISLNESIDTSSAMGSLFLTILSAINEFERENIKERMTMGKLGRAKSGKSMMWTKTAFGYYHNRKTGILEIVPLQATIVEQIFTDYLSGISLTKLRDKLNESGHIGKDIPWSYRTLRQTLDNPVYCGYIKFKDSLFEGMHKPIIPYETYLKVQEELEKRQQQTYERNNNPRPFQAKYMLSGMARCGYCGAPLKIVLGHKRKDGSRTMKYHCANRFPRKTKGVTAYNDNKKCDSGTYDLSNLENTVIDNLVGFQENSDSLLEIINGNNQPILDTSSFKKQISQIDKKIQKNSDLYLNDFITMDELKDRTDSLQAEKKLLKAKISENKFNDSTDVFELVKIQLGSIPINELSYDNKKKIVNNLVSKVDVTADNVDIIFKFQLA

SEQ ID NO: 1443 - protein, 469 aa, synthetic construct
MSYTIPVRAAVYLRISEDRSGEQLGVARQREDCLKLCDQRKWVPVEYLDNDVSASTGKRRPAYEQMLADITAGKIAAVVAWDLDRLHRRPIELEAFMSLADEKRLALATVAGDVDLSTPQGRLVARLKGSVAAHETEHKKARQRRAARQKAERGYPNWSKAFGYLPGPNGPEPDPRTAPLVKQAYADILAGASLGDVCRQWNTAGAFTITGRPWTTTTLSKFLRKPRNAGLRAYKGACYGPVDRDAIVGKAQWSPLVDEATFWAAQAVLDAPGRAPGRKSVRRHLLTGLAGCGKCGNHLAGSYRTDGRVVYVCKACYGVAILADNIEPILYHIVAERLAMPDAVGLLRREIHDAAEAETIRLELETLYGELDRLAVERAEGLLTARQVKISTDIVNAKITKLQACQQDQERLRVFDGIPLGTPRVAGMIAKLSPDRFRAVLDVLAEVVVQPVGKSGRIFNPERVRVNWR

SEQ ID NO: 1444 - protein, 452 aa, synthetic construct
MKAAIYIRVSTQEQVENYSIQAQTEKLTALCRSKDWDVYDIFIDGGYSGSNMNRPALNEMLSKLHEIDAVVVYRLDRLSRSQRDTTTLIEEYFLKNNVEFVSLSETLDTSSPFGRAMIGILSVFAQLERETIRDRMVMGKIKRIEAGLPLTTAKGRTFGYDVIDTKLYINEEEAKQLRLIYDIFEEEQSITLLQKRLKKLGFKVRTYNRYNNWLTNDLYCGYVSYKDKVHVKGIHEPIISEEQFYRVQEIFTRMGKNPNMNRDSASLLSNLVVCSKCGLGFVHRSKDTMSRGKKYHYRYYSCKTYKHTHELEKCGNKIWRADKLEELIINHVNNHSFASRNVDKEDELDSLNEKLKIEHAKKRRLFDLYINGSYEVSELDSMMNDIDAQINYYESQIGASEELRKNKKIQENLADLATVDFDSLEFREKQLYLKSVINKIYIDGEQVTIEWL

SEQ ID NO: 1445 - protein, 485 aa, synthetic construct
MTKKVAIYTRVSTTNQAEEGFSIDEQIDRLTKYAEAMGWQVSDTYTDAGFSGAKLERPAMQRLINDIENKAFDTVLVYKLDRLSRSVRDTLYLVKDVFTKNKIDFISLNESINTSSAMGSLFLTILSAINEFERENIKERMTMGKLGRAKSGKSMMWTKTAFGYYHNRKTGILEIVPLQATIVEQIFTDYLSGISLTKLRDKLNESGHIGKDIPWSYRTLRQTLDNPVYCGYIKFKDSLFEGMHKPIIPYETYLKVQKELEERQQQTYGRNNNPRPFQAKYMLSGMARCGYCGAPLKIVLGRKRKDGSRTMKYHCTNRFPRKTKGITVYNDNKKCDSGAYDLSNLENTVIDNLIGFQENNDSLLKIINGNNQPILDTISFKEQISQIDKKIQKNSDLYLNDFITMDELKARTDSLQAEKKLLKAKISENKSNDSTDVIELVKTQLGSIPINELSYDNKKKIVNNLVSKVDVTADNVDIIFKFQLA

SEQ ID NO: 1446 - protein, 469 aa, synthetic construct
MSYTTPVRAAVYLRISEDRSGEQLGVARQREDCLKLCGRHKWEPVEYLDNDVSASTGRRRPAYEQMLADITAGKIAAVVAWDLDRLHRRPLELEAFMSLADEKRLALATVAGDVDLATPQGRLVARLKGSVAAHETEHKKARQRRAARQKAERGLPNWGKAFGYLPGPNGPEPDPRTAPLVKQAYADILAGASLGDVCRRWNNADAFTITGRPWTTTTLSKFLRKPRNAGLRAYKGARYGPVDRDAIVGKAQWSPLVDEATFWAAQAVLDAPGRAPGRKSVRRHLLTGLVGCGKCGNHLAGSYRTDGRIVYVCKTCHGVTILADNIEPILYHIVAERLAMPDAVDLLRREIHDATEAETIRLELETLYGELDRLAVERAEGLLTARQVKIGTDIVNAKITKLQARQLDQERLRVFDGIPLGTPQVAGIIAELSPDRFRAVLDVLAEVVVQPVGKSGRIFNPERVQVNWR

SEQ ID NO: 1447 - protein, 485 aa, synthetic construct
MTKKVAIYTRVSTTNQAEEGFSIDEQIDRLTKYAEAMGWQVSDTYTDAGFSGAKLERPAMQRLINDIENRAFDTVLVYKLDRLSRSVRDTLYLVKDVFTKNKIDFISLNESINTSSAMGSLFLTILSAINEFERENIKERMTMGKLGRAKSGKSMMWAKTAFGYHHNRKTGILEIVPLQATIVEQIFTDYLSGISLTKLRDKLNESGHIGKDIPWSYRTLRQTLDNPVYCGYIKFKDGLFEGMHKPIIPYETYLKVQKELEERQQQTYERNNNPRPFQAKYMLSGMARCGYCGAPLKIVLGHKRKDGSRTMKYHCANRFPRKTKGVTVYNDNEKCDSGTYDLSNLENTVIDSLIGFQESDNSLLKIINGNNQPILDTSSFKEQISQIDKKIQKNSDLYLNDFITMDEQKDRTDSLQAEKKLLRAKISENKFNDSTDVFELVKTQLGSIPINELSYDNKKKIVNNLVSKVDVTADNVDIIFKFQLA

SEQ ID NO: 1448 - protein, 452 aa, synthetic construct
MKAAIYIRVSTQEQVENYSIQAQTEKLTALCRSKDWDVYDIFIDGGYSGSNMNRPALNEMLSKLHEIDAVVVYRLDRLSRSQRDTTTLIEEYFLKNNVEFVSLSETLDTSSPFGRAMIGILSVFAQLERETIRDRMVMGKIKRIEAGLPLTTAKGRTFGYDVIDTKLYINEEEAKQLRLIYDIFEEEQSITFLQKRLKKLGFKVRTYNRYNNWLTNDLYCGYVSYKDEVHVKGIHEPIISEDQFYRVQEIFTRMGKNPNMNRDSASLLSNLVVCSKCGLSFVHRSKDTMSRGKKYHYRYYSCKTYKHTHELEKCGNKTWRADKLEELIINRVSNYSFASRNLDKEDELDSLNEKLKIEHARKKRLFDLYINGSYEVSELDSMMNDIDAQINYYESQIEANEELKKNKKIQENLADLATVDFDSLEFREKQLYLKSLINKIYIDGEQVTIEWL

SEQ ID NO: 1449 - protein, 485 aa, synthetic construct
MTKKVAIYTRVSTTNQAEEGFSIDEQVDRLTKYAEAMGWQVSDTYTDAGLSGAKLERPAMQRLINDVENKAFDTVLVYKLDRLSRSVRDTLYLVKDVFTKNRIDFISLNESIDTSSAMGSLFLTILSAINEFERENIKERMTMGKLGRAKSGKSMMWAKTAFGYYHNRKTGILEIVPLQATIVEQIFTDYLSGISLTKLRDKLNESGHIGKDIPWSYRTLRQTLDNPVYCGYIKFKGSLFEGMHKPIIPYETYLKVQKELEERQQQTYERNNNPRPFQAKYMLSGMARCGYCGAPLKIVLGHKRKDGSRTMKYHCANRFPRKTKGVTMYNDNKKCDSGTYDLSDLENTVVDYLIDLQENNDSLLKIINGNNQPILDTSSFKKQISQIDRKIQRISDLYLNDFITMDELKDRTDSLQAEKKLLKAKISENKLNDSTDVLELVKTQLGSIPINELSYDNKKKIVNNLVSKVDVTADNVDIIFKFQLA

SEQ ID NO: 1450 - protein, 452 aa, synthetic construct
MKAAIYIRVSTREQVENYSIQAQTEKLTALCRSKDWDVYDIFIDGGYSGSNMNRPALNEMLSKLHEIDAVVVYRLDRLSRSQRDTITLIEEYFLKNNVEFVSLSETLDTSSPFGRAMIGILSVFAQLERETIRDRMVMGKIKRIEAGLPLTTAKGRTFGYDVIDAKLYINEEEAKQLQLIYDIFEEEQSITFLQKRLKKLGFKVRTYSCYNNWLTNDLYCGYVSYKDKVHVKGIHEPIISEEQFYRVQEIFTRTGKNPNMNRDSASLLNNLVVCGKCGLGFVHRRKDAMSRDKKYHYRYYSCKTYKHIHELEKCGNKIWRADVLEELIINRVNDYSVASRNVDKEDELDSLNEKLKIEHAKKRRLFDLYINGSYEVSELDSMMNDIDAQINYYESQIEANEELKKNKKIQENLADLATVDFDSLEFREKQLYLKSLINKIYIDGEQVTIEWL

SEQ ID NO: 1451 - protein, 485 aa, synthetic construct
MTKKVAIYTRVSTTNQAEEGFSIDEQVDRLTKYAEAMGWQVSDTYTDAGFSGAKLERPAMQRLISDIENKAFDTVLVYKLDRLSRGVRDTLYLVKDVFTKNKIDFISLNESIDTSSAMGSLFLTILSAINEFERENIKERMTMGKLGRAKSGKSMMWTKTAFGYYHNRKTGILEIVPQQATIVEQIFIDYLSGISLTKLRDKLNESGHIGKDIPWSYRTLRQTLDNPVYCGYIKFKDSLFEGMHKPIISYETYLRVQKELEERQQQTYERNNNPRPFRAKYMLSGMARCGYCGAPLRIVLGHKRKDGSRTMKYHCANRFPRKTKGITVYNDNKKCDSGTYDLSNLENTVIGNLIGFQENNDSLLKIINGNNQPILDTSSFKEQISQIDKKIQKNSDLYLNDFITMDELKDRTDSLQAEKKLLKAKISENKFNDSTDVFELVKAQLGSIPINELSYDNKKKIVNNLVSKVDVTADNVDIIFKFQLA

SEQ ID NO: 1452 - protein, 485 aa, synthetic construct
MTKKVAIYARVSTANQAGEGFSIDEQIDRLTKYAEAMGWQVSDTYTDAGFSGAKLERPAMQRLINDIENKAFDTVLVYRLDRLSRSVRDTLYLVKDVFTKNKIDFISLNESIDTSSAMGSLFLTILSAINEFERENIKERMTMGKLGRAKSGKSMMWTKTAFGYYHNRKTGILEIVPLQATIVEQIFTDYLSGISLTKLRDKLNESGHIGKDIPWSYRTLRQTLDNPVYCGYIKFKDSLFEGMHKPIIPYETYLKVQKELEERQQQTYERNNNPRPFQAKYMLSGMARCGYCGAPLRIVLGHKRKDGSRTMKYHCANRFPRKTKGVTVYNDNKKCDSGTYDLSNLENTVIDNLIGFQENNDSLLKIINGNNQPILDTSSFKKQISQIDKKIQKNSDLYLNDFITVDELKDRTDSLQAEKKLLKAKISENKFNDSTDVFVLVKTQLGSIPINELSYDNKKKIVNNLVSKVDVTADNVDIIFKFQLA

SEQ ID NO: 1453 - protein, 469 aa, synthetic construct
MSYTTPVRAAVYLRISEDRSGEQLGVARQREDCLKLCGQRKWVPVEYLDNDVSASTDKRRPAYEQMLADITAGKIAAVVAWDLDRLHRRPIELEAFMSLADEKRLALATVAGDVDLATPQGRLVARLKGSVAAHETEHKKARQRRAARQKAERGHPNWSKAFGYLPGPNGPEPDPRTAPLVKQAYADILAGASLGDVCRQWNDAGAFTITGRPWTTTTLSKFLRKPRNAGLRAYKGARYGPVDRDAIVGKAQWSSLVDEATFWAAQAVLDAPGRAPGRKSVRRHLLTGLAGCGKCGNHLAGSYRTDGRVVYVCKACHGVAILADNIEPILYHIVAERLAMPDAVDLLRREIHDAAEADTIRLELETLYGELDRLAVERAEGLLTARQVKISTDIVNAKITKLQARQLDQERLRVLDGIPLGTPQVAGMIAELSPDRFRAVLDVLAEVVVQPMGKSGRIFNPERVQVNWR

SEQ ID NO: 1454 - protein, 485 aa, synthetic construct
MTKKVAIYTRVSTTNQAEEGFSIDEQIDRLTKYAEAMGWQVSDTYTDPGFSGAKLERPAMQRLINDIENKAFDTVLVYKLDRLSRSVRDTLYLVKDVFTKNKIDFISLNESIDTSSAMGSLFLTILSAINEFERENIKERMTMGKLGRARSGKSMMWTKTAFGYYHNRKTGILEIVPLQATIVEQIFTDYLSGISLTKLRDKLNESGHIGKDIPWSYRTLRQTLDNPVYCGYIKFKDTLFEGMHKPIIPYETYLKVQKELEERQQQTYERNNNPRPFQAKYMLSGMARCGYCGAPLRIVLGHKRKDGSRTMKYHCANRFPRKTKGITVYNDDKKCDSGTYDLSNLENTVIDNLIGFQENNDSLLKIINGNNQPILDVSSLKKQISQIDKKIQKNSDLYLNDFITMDELKDRTDSLQAEKKLLKAKICKNKINDSTDVFELVKTQLGSIPINELSYDNKKKIVNNLVSKVDVTADNVDIIFKFQLA

SEQ ID NO: 1455 - protein, 452 aa, synthetic construct
MKAAIYIRVSTREQVENYSIQAQTEKLTALCRSKDWDVYDIFVDGGYSGSNMNRPALNEMLSKLHEIDAVVVYRLDRLSRSQRDTITLIEEYFLKNNVEFVSLSETLDTSSPFGRAMIGILSVFAQLERETIRDRMVMGKIKRIEAGLPLTTAKGRTFGYDVIDTKLYINEDEAKQLQLIYDIFEEEQSITFLQKRLKKLGFKVRTYNRYNNWLTNDLYCGYVSYKDKVHVKGIHEPIISEEQFYRVQEIFARMGKNPNMNRDSASLLNNLVVCSKCGLGFVHRRKDAMSRDKKYHYRYYSCKTYKHVHELEKCGNKIWRADKLEELIINRVINYSLASRNVDKEDELDSLNEKLKIEHAKKKRLFDLYLNGSYEVSELDSMMNDIDAQISYYEGQIEANEELKNNKKIQENLANLATVDFDSLEFREKQLYLKSLINKIYIDGEQVTIEWL

SEQ ID NO: 1456 - protein, 469 aa, synthetic construct
MSYTTPVRAAVYLRISEDRSGEQLGVARQREDCLKLCDQRKWVPVEYLDNDVSASTGKRRPAYEQMLADITAGKIAAVVAWDLDRLHRRPIELEAFMSLADEKRLALATVAGDVDLATPQGRLVARLKGSVAAHETEHKKARQRRAARQKAERGHPNWSKAFGYLPGPNGPEPDSRTASLVKQAYADILAGASLGDVCRQWNGAGAFTITGRPWTTTTLSKFLRKPRNAGLRAYKGARYGPVDRDAIVGKAQWSPLVDETTFWAAQAVLDAPGRAPGRKSVRRHLLTGLAGCGKCGNHLAGSYRTDGRVVYVCKACHGVAILADNIEPILYHIVAERLAMPDAVDLLRREIHDAGEAETIRLELETLYGELDRLAVERAEGLLTARQVKISTDIVNAKITKLQARQLDQERLRVFDGIPLGTPQVAGMIAELSPDRFRAVLDVLAEVVVQPVGKSGRIFNPERVQVNWR

SEQ ID NO: 1457 - protein, 485 aa, synthetic construct
MTRKVAIYTRVSTTNQAEEGFSIDEQIDRLTKYAEAMGWQVCDTYTDAGFSGAKLERPAMQRLINDIENKAFDTVLVYKLDRLSRSVRDTLHLVKDVFTKNKIDFISLNESIDTSSAMGSLFLTILSAINEFERENIKERMTMGKLGRAKSGKSMMWTKTAFGYRHNRKTGILEIVPLQATIVEQIFTDYLSGISLTKLRDKLNESGHIGKDIPWSYRTLRQTLDNPVYCGYIKFKDSLFEGMHKPIIPYETYLKVQKELEERQQQAYERNNNPRPFQAKYMLSGMARCGYCGAPLRIVLGHKRKDGSRTMKYHCANRFPRKTKGVTVYNDNKKCDSGTYDLSNLENTVIDNLIGFQENNDSLLKIINGNNQPILDTSSLKKQISQIDKKIQKNSDLYLNDFITMDELKDRTDSLLAEKELLKAKISETKFNDSTDVFELVKAQLGSIPINELSYDNKKRIVNNLVSKVDVTADNVDIIFKFQLA

SEQ ID NO: 1458 - protein, 469 aa, synthetic construct
MSYTTPVRAAVYLRISEDRSGEQLGVARQREDCLKLCDQRKWVPVEYLDNDVSASTGKRRPAYEQMLADITAGKIAAVVAWDLDRLHRRPIELEAFMSLADEKRLALATVAGDVDLATPQGRLVARLKGSVAAHETEHKRARQRRAARQKAERGHPNWSKAFGYLPGPNGPEPDPRTAPLVKQAYTDILAGASLGDVCRRWNDAGALTITGRPWTTTTLSKFLRKPRNAGLRAYNGARYGPVDRDAIVGKAQWSPLVDEATFWAVQAVLDAPGRAPGRKSVRRHLLTGLASCGKCGNHLAGSYRTDGRVVYVCKACHGVAILADNIVPILYHIVAERLAMPDAVDMLRREIHDAAEAETVRLELETLYGELDRLAVERAEGLLTARQVKISTDIVNAKITELQARQLDQERLRVLDGIPLGTPQVAGMIAELSPDRFRAVLDVLAEVVVQPVGKSGRIFNPERVQVNWR

SEQ ID NO: 1459 - protein, 469 aa, synthetic construct
MSYTTPVRAAVYLRISEDRSGEQLGVARQREDCLKLCDQRKWEPVEYLDNDVSASTGKRRPAYEQMLADITAGKIAAVVAWDLDRLHRRPIELEAFMCLADEKRLALATVAGDVDLATPQGRLVARLKGSVAAHETEHKKARQRRAARQKAERGLPNWSKAFGYLPGPNGPEPDPRTAPLVEQAYADILAGASLGDVCRQWNDAGAFTITGRPWTTATLSKFLRKPRNAGLRAYKGARYGPVDRDAIVGKAQWSPLVDEATFWAAQAVLDAPGRAPGRKSVRRHLLTGLAGCGKCGNHLAGSYRTDGRVVYVCKACHGVAILADNIEPILYHIVAERLAMPDAVDLLRREIHDAAEAETIRLELETLNGELDRLAVERAEGLLTARQVKISTDIVNAKITKLQAHQQDQERLRVFEGIPLGTPQVAGMIAALSPDRFRAVLDVLAEVVVQPVGKSGRIFNPERVQVNWR

SEQ ID NO: 1460 - protein, 469 aa, synthetic construct
MSYTTLVRAAVYLRISEDRSGEQLGVARQREDCLRLCDQRKWVPVEYLDNDVSASTGKRRPAYEQMLADITAGKIAAVVAWDLDRLHRRPIELEAFMSLADEKRLALATVAGDVDLATPQGRLVARLKGSVAAHETEHKKARQRRAARQKAELGHPNWSKAFGYRPGPNGPEPDPRTAPLVKQAYADILAGASLGDVCRQWNDAGASTITGRPWTATTLSKFLRKPRNAGLRAYKGARYGPVDRDAIVGKAQWSPLVDEATFWAAQAVLDAPGRAPGRKSVRRHLLTGLASCGKCGNHLAGSYRTDGKVVYVCKACHGVAIRADNIEPILYHIVAERLAMPDAVDLLRRGIHDAAEAETIRLELETLYGELDRLAVERAEGLLTARQVKISTDIVNAKITKLQACQLDQERLRVFDGIPLGTPQVAGMIAELSPDRFRAVLDVLAEVVVQPVGKSGRIFNPERVQVNWR

SEQ ID NO: 1461 - protein, 452 aa, synthetic construct
MKAAIYIRVSTQEQVENYSIRAQTEKLTALCRSKDWDVYDIFIDGGYSGSNMNRPALNEMLSKLHEIDAVVVYRLDRLSRSQRDTTTLIEEYFLKNNVEFVSLSETLDTSSPFGRAMIGILSVFAQLERETIRDRMVMGKIKRIEAGLPLTTAKGRTFGYDVIDTKLYINEEEAKQLQLIYDIFEEEQSITSLQKRLKKLGLKVRTYNRYNNWLTNDLYCGYVSYKDKVHVKGIHEPIISEEQFYRVQEIFTRMGKNPNMNRDSASLLNNLVVCGKCGLSFVHRSKDTMSRGKKYHYRYYSCKTYKHTHELEKCGNKTWRADKLEELIINRVNNYSFASRDVDKEDELDGLNEKLKIEHAKKKRLFDLYINGSCEMSELDSMMNDVDAQINYYESQIEANEELKRNKKIQENLAGLATVDFDSLEFREKQLYLKSLINKIYIDGEQVTIEWL

SEQ ID NO: 1462 - protein, 485 aa, synthetic construct
MTKKVAIYTRVSTTNQAEEGFSIDEQIDRLTKYAEAMGWQVSDTYTDAGLSGAKLERPAMQRLINDIENKAFDTVLVYKLDRLSRSVRDTLYLVKDVFTKNKIDFISLNESIDTSSAMGSLFLTILSAINEFERENIKERMTMGKLGRAKSGKSMMWTKTAFGYYHNRKTGILEIVPLQATIVEQIFTDYLSGISLTKLRDKLNESGHIGKDIPWSYRTLRQTLDNPVYCGYIKFKDSLFEGMHKPIIPYETYLKVQKELEERQQQTYERNNNPRPFQAKYMLSGMARCGYCGAPLRIVLGHKRKDGGRTMKYHCANRFPRKTKGVTVYNDNKKCDSGTYDLSDLENTVIDNLIGLQENNDSLLSIINGNNQPILDTSSFKKQISQIDKKIQKNSDLYLNDFITMDELKGRTDSLQAEKKLLKAKVSENKFNDSTDVFGLVKTQLGSIPINELSYDDKKKIVNNLVSKVDVTADNVDIIFKFQLA

SEQ ID NO: 1463 - protein, 485 aa, synthetic construct
MTKKVAIYTRVSTTNQAEEGFSIDEQIDRLTKYAEAMGWQVGGTYTDAGVSGAKLERPAMQRLINDIEDKAFDTVLVYKLDRLSRSVRDTLYLVKDVFTKNKIDFISLNESIDTSSAMGSLFLTILSAINEFERENIKERMTMGKLGRAKSGKSMMWTKTAFGYYHNRKTGILEIVPLQATIVEQIFTDYLSGISLTKLRDKLNESGHIGKDIPWSYRTLRQTLDNPVYCGYIKFKGSLFEGMHKPIIPYETYLKVQKELEERQQQAYERNNNPRPFQAKYMLSGMARCGYCGAPLRIVLGHKRKDGSRTMKYHCANRFPRKTKGVTVYNDNKKCDSGAYDLSDLENTVIDNLIGFQENNDSLLKIINGNNQPILDTSSFKEQISQIDKKIQKNSDLYLNDFITMDELKDRTDSLQAEKKLLEAKISENKFNDSTGVLELVKAQLGSIPINELSYDNKKKIVNNLVSKVDVTADNVDIIFKFQLA

SEQ ID NO: 1464 - protein, 469 aa, synthetic construct
MSYTTPVRAAVYLRISEDRSGEQLGVARQREDCLELCGQRKWEPVEYLDNDVSASTGKRRPAYEQMLADITAGKIAAVVAWDLDRLHRRPIELEAFMSLADEKRLALATVAGDVDLATPQGRLVARLRGSVAAHETEHKKARQRRAARQKAERGHPNWSKAFGYLPGPNGPEPDPRTAPLVEQAYADILAGASLGDVCRQWNDAGALTITGRPWTTTTLSKFLRKPRNAGLRAYKGARYGPVDRDAIVGKAQWSPLVDEATFWAAQAVLDAPGRAPGRKSVRRHLLTGLAGCGKCGNHLAGSYRTDGRVVYVCKACHGVAILADNIEPILYHIVAERLAMPDAVDLLRREIHDAAEAETIRLELETLYDELDRLAVERAEGLLTARQVKISTDIVNAKITELQARQLDQERLRVLGGIPLGTPQVAGMIAELSPDRFRAVLDVLAEVVVQPVGKSGRIFNSERVQVNWR

SEQ ID NO: 1465 - protein, 485 aa, synthetic construct
MTKKVAIYTRVSTTNQAEEGFSIDEQIDRLTKYAEAMGWQVSDTYTDAGYSGAKLERPAMQRLINDIENKAFDTVLVYKLDRLSRSVRDTLYLVKEVFTKNKIDFISLNESIDTSSAMGSLFLTILSAINEFERENIKERMTMGKLGRAKSGKSMMWTKTAFGYYHNRKTGILEIVPLQAAIVEQIFTDYLSGVSLTKLRDKLNESGHIGKDIPWSYRTLRQTLDNPVYCGYIKFKDSLFEGMHKPIIPYETYLKVQKELEERQQQTYERNNNPRPFQAKYMLSGMARCGYCGAPLRIVLGHKRKDGSRTMKYHCANRFPRKTKGVTVYNDNKKCDSGTYDLSNLENTVIDNLIGFQENNDSLLKIINGNNQPILDTSNFKKQISQIDKKIQKNSDLYLNDFITMDELKDRTDSLQAEKKLLKAKISENKFNDSTDVFELVKTQLGSIPINELSYDNKKKIVNNLVSKVDVTADNVDIIFKFQLA

SEQ ID NO: 1466 - protein, 485 aa, synthetic construct
MTKKVAIYTRVSTTNQAEEGFSIDEQIDRLTKYAEAMGWQVSDTYTDAGFSGAKLERPAMQRLINDIENKAFDTVLVYKLDRLSRSVRDTLYLVKDVFTKNKIDFISLNESINTSSAMGSLFLTILSAINEFERENIKERMTMGKLGRAKSGKSMMWTKTAFGYYHNRKTGILEIVPLQATIVKQIFTDYLSGISLTKLRDKLNESGHIGKDIPWSYRTLRQTLDNPVYCGYIKFKDSLFEGMHKPIIPYETYLKVQKELEERQQQTYERNNNPRPFQAKYMLSGMARCGYCGAPLRIVLGHKRKDGSRTMKYHCANRFPRKTKGVTVYNDNKKCDSGTYDLRNLENTVIDILIGFQENNDSLLKIINGNNLPILDTSSFKEQISQIDKKIQKNSDLYLNDLITMDELKDRTDSLRAEKKLLKAKISENRFNDSTVVFELVKTQLGSIPINELSYDDKKKIVNNLVSKVDVTADNVDIIFKFQLA

SEQ ID NO: 1467 - protein, 469 aa, synthetic construct
MSYTTPVRAAVYLRISEDRSGEQLGVARQREDCLKLCDQRKWVPVEYLDNDVSASTGKRRPAYEQMLADITAGNIAAVVAWDLDRLHRRPIELEAFMSLADEKRLALATVAGDVDLATPQGRLVARLKGSVAAHETEHKKARQRRAARQKAERGHPNWSKAFGYLPGPNGPEPDPRTAPLVKQAYADILAGASLGDVCRRWNAAGAFTITGRPWTTTTLSKFLRKPRNAGLRAYKGARYGPVDRDAIVGRARWSPLVDEATFWAAQAVLDAPGRTPGRKSVRRHLLTGLAGCGKCGNHLAGSYRTDGRVVYVCKACHGVAILADNIEPILYHIVAERLAMPDAVDLLHREINDAAEAEAIHLELETLYGELDRLAVERAEGLLTARQVKISTDIVNAKIAKLQARQLDQERLRVFNGIPLGTPRVAGMIAELSPDRFRAVLDVLAEVVVQPVGKSGRIFNPERVQVNWR

SEQ ID NO: 1468 - protein, 452 aa, synthetic construct
MKAAIYIRVSTREQVENYSIQAQTEKLTALCRSKDWDVYDIFIDGGYSGSNMNRPALNEMLSKLREIDAVVVYRLDRLSRSQRDTITLIEEYFLKNNVEFVSLSETLDTSSPFGRAMIGILSVFAQLERETIRDRMVMGKIKRIEAGLPLTTAKGRTFGYDVIDTKLYINEEEAKQLQLIYDIFEEEQSITSLQKRLKKLGFKVHTYNRYNNWLTNDLYCGYVSYKDKVHVKGIHEPIISEEQFYRVQEIFTRMGKNPNMNRDSASLLNNLVVCSRCGLGFVHRRKDAMSRDKKYHYRYYSCKTYKHIHELEKCGNKIWRADKLEELIINRVNNYSLASRNVDKEDELDSLNEKLKTEHAKKKRLFDLYINGRYEVSELDSMMNDIDAQINYYESQIEANEELKKDKKIQENLAYLATVDFDSLEFREKQLYLKSLINKIYIDGEQVTIEWL

SEQ ID NO: 1469 - protein, 469 aa, synthetic construct
MCYTTPVRAAVYLRISEDRSGEQLGVARQREDCLKLCGQRKWEPVEYLDNDVSASTGRRRPAYEQMLADITAGKITAVVAWDLDRLHRRPIELEAFMSLADEKRLALATVAGDVDLATPQGRLVARLKGSVAAHETEHKKARQRRAARQKAERGYPNWSKAFGYLPGPNGPEPDPRTAPLVKQAYADILAGASLGDVCRRWNDAGAFTITGRPWTTTTLSKFLRKPRNAGLRTYKGARCGPVDRDAIVSKAQWSPLVDEATFWAAQVVLDAPGRAPGRKSVRRHLLTGLAGCGKCGNHLAGSYRTDGRVVYVCKACHGVAILADNIEPILYRIVAERLAMPDAVDLLRREIHDAAEAETIRLELETLYGELDRLAVERAEGLLTARQVKICTDIVNAKITKLQAHQLDQERLRVLDGIPLGTPQVAGKIAELSPDRFRAVLGVLAEVVVQPVGKSGRIFNPERVQVNWR

SEQ ID NO: 1470 - protein, 452 aa, synthetic construct
MKAAIYIRVSTQEQVENYSIQAQTEKLTALCRSKDWDVYDIFIDGGYSGSNMNRPALNEMLSKLHEIDVVVVYRLDRLSRSQRDTITLIEEYFLKNNVEFVSLSETLDTSSPFGRAMIGILSVFAQLERETIRDRMVMGKVKRVEAGLPLTTAKGRTFGYDVIDTKLHINEEEAKQLQLIYDIFEEEQSITFLQKRLKKLGLKVRTYNRYNSWLTNDLYCGYVSYKDKVHVKGIHEPIISEEQFYRVQEIFTRMGKNPSINRDSASLLNNLVVCGKCGLSFVHRRKDTMSRGKKYHYRYYSCKTYKHVHELEKCGNKIWRADKLEELIIDRVNNYSLASRNVDKEDELDSLSEKLKVEHAKKKRLFELYINGSYEMGELDSMMNDIDAQINYYESQIEANEGLKRNKKFQENPAELATVDFDSLEFREKQLYLKSLINKIYIDGEQVTIEWL

SEQ ID NO: 1471 - protein, 485 aa, synthetic construct
MTKKVAIYTRVSTTNQAEEGFSIDEQTDRLTKYAEAMGWQVSDTYTDAGFSGAKLERPAMQRLINDIENKAFDTVLVYKLDRLSRSVRDTLYLVKDVFTKNKIDFISLNESIDTSSAMGSLFLTILSAINEFERENIKERMTMGKLGRAKSGKSMMWTKTAFGYYHNRKTGILEIVPLQATIVEQIFTDYLSGISLTKLRDKLNESGHIGKDIPWSYRTLRQTLDNPVYCGYIKFKGSLFEGMHKPIIPYETYLKVQKELEERQQQTYERNNNPRPFQAKYMLSGMARCGYCGAPLRIVLGHKRKDGSRTMKYHCANRFPRKTKGVTVYNDNKKCDSGTYDLSNLEDTVIDNLIGFQENNDSLLKIINSNNKPILDTSSFKEQISQIDKKIQKNSDLYLNDFITMDELKDRTDSLQAEKKLLKAKISENKSNDSTDVFELVKAQLGSIPINELSYDNKKKIVNNLVSKVDVTADNVDIIFKFQLA

SEQ ID NO: 1472 - protein, 469 aa, synthetic construct
MCYTTPVRAAVYLRISEDRSGEQLGVARQREDCLQLCDQRKWVPVEYLDNDVSASAGRRRPAYEQMLADITAGKIAAVVAWDLDRLHRRPIELEAFMSLADEKRLALATVAGDVDLATPQGRLVARLKGSVAAHETEHKKARQRRAARQKAERGYPNWSKAFGYLPGPNGPEPDPRTAPLVKQAYADILAGASLGGVCRQWNDAGAFTITGRPWTTTTLSKFLRKPRNAGLRAYKGARYGPVDRNAIVGKAQWSPLVDEATFWAAQAVLDAPGRAPGRKSVRRHLLTGLAGCGKCGNHLAGSYRTDGRVVYVCKACHGVAILADNIEPILYHIVAERLAKPDAVDLLRREIHDAAEAETIRLELETLYGELDRLAVERAEGLLTARQVKISTDIVNAKITKLQARQLDRERLRVLGGIPLGTPQVAGMIAELSPDRFRAVLDVLAEVVVQPVGKSGRIFNPGRVQVNWR

SEQ ID NO: 1473 - protein, 485 aa, synthetic construct
MTKKVAIYTRVSTTNQAEEGFSIDEQIDRLTKYAEAMGWQVSGTYTDAGFSGAKLERPAMQRLINDIENKAFDTVLVYKLDRLTRSVRDTLYLVKDVFTKNKIDFISLNESIDTSSAMGSLFLTILSAINEFERENIKERMTMGKLGRAKSGKSMMWTKTAFGYYHNRKTGILEIVPLQATIVEQIFTDYLSGISLTKLRDKLNESGHIGKDIPWSYRTLRQTLDNPVYCGYIKFKGSLFEGMHKPIIPYETYLEVQKELEERQQQTYERNNNPRPFQAKYMLSGMARCGYCGAPLRIVLGHKRKDGSRAMKYHCANRFPRKTKGVTVYNDNKKCDSGTYDLSNLENTVIDNLIGFQENNDSLLKIINGNSQPIQDTSSFEKQISQIDKKIQKNSDLYLNDLITMDELKDRTDSLQAEKKLLEAKISENKFNDSTDVFELVKTQLGSIPINELSYDNKKKIVNNLVSKVDVTADNVDIIFKFQLA

SEQ ID NO: 1474 - protein, 485 aa, synthetic construct
MTKKVAIYTRVSTTNQAEEGFSIDEQIDRLTKYAEAMGWQVSDTYTDAGFSGAKLERPAMQRLINDIENKAFDTVLVYKLDRLSRSVRDTLYLVKGVFTKNKIDFISLNESIDTSSAMGSLFLTILSAINEFERENIKERMTMGKLGRAKSGKSMMWTKTAFGYYHNRKTGILEIVPLQATIVEQIFTDYLSGISLTKLRDKLNESGHIGKDIPWSYRTLRQTLDNPVYCGYIKFKDSLFEGMHKPIIPYETYLKVQKELEERQQQTYEHNNNPRPFQAKYMLSGMARCGYCGAPLKIVLGHKRKDGNRTMKYHCANRFPRKTKGVTVYNDNKKCDSGTYDLSYLENTVIDNLIGFQEDNDSLLKIINGNNQPILDSSSFKKQISQIDKKIQKNSDLYLNDFITMDELKGRTDSLQAEKKLLEAKISENKFNDSTDVFELVKTQLGSIPINELSYDDKKKIVNNLVSKVDVTADNVDIIFKFQLA

SEQ ID NO: 1475 - protein, 452 aa, synthetic construct
MKAAIYIRVSTREQVENYSIQAQTEKLTALCRSKDWDVYDIFVDGGYSGSNMNRPALNEMLSKLHEIDAVVVYRLDRLSRSQRDTITLIEEYFLKNNVEFVSLSETLDTSSPFGRAMIGILSVFAQLERETIRDRMVMGKIKRIEAGLPLTTAKGRTFGYDVIDTKLYINEEEAKQLQLIYDIFEEEQSITFLQKRLKKLGFKVRTYNRYNNWLTNDLYCGYVSYKDKVHVKGVHEPIISEEQFYRVQEIFTRMGKNPNMNRDSASLLNNLVVCSKCGLGFVHRRKDAMSRDKKYHYRYYSCKTYKHIHELEKCGNKIWRADKLEELIINRVNDYSLASRNVDKEDELDSLNEKLKIEHAKKRRLFDLYINGSYEVSELDSMMNGIDAQINYYESQIEANEELKKNKKIQENLAHLATVDFDSLEFREKQQYLKSLINKIYIDGEQVTIEWL

SEQ ID NO: 1476 - protein, 452 aa, synthetic construct
MKAAIYIRVSTQEQVENYSIQAQTEKLTALCRSKDWDVYDIFIDGGYSGSNMNRPALNEMLSKLHEIDAVVVYRLDRLSRSQRDTTTLIEEYFLKNNVEFVSLSETLDTSSPFGRAMIGILSVFAQLERETIRDRMVMGKIKRIEAGLPLTTAKGRTFGYDVIDTKLYINEEEAKQLQLIYDIFEEEQSITFLQKRLKNLGFKVRTYNRYNSWLTNDLYCGYVSYKDKVHVKGIHEPIISEEQFYRVQEIFTRMGKNPNMNRDSASLLSNLVVCSKCGLGFVHRSKDTMSRGKKYHYRYYSCKTYKHTHELEKCGNKTWRADKLEELIISRVNNYSSASRSVDKEDELDSLNEKLKTEHAKKKRLFDLYINGSYEVSELDSMMNDIDAQINYYESQIEANEELRKNKKIQENLADLATVDFDSLEFRDKRLYLKSLINKIYIDGEQVTIEWL

SEQ ID NO: 1477 - protein, 469 aa, synthetic construct
MSFTTPVRAAVYLRISEDRSGEQLGVARQREDCLKLCDQRKWVPVEYLDNDVSASAGKRRPAYEQMLADITAGKIAAVVAWDLDRLHRRPIELEAFMSLADEKRLALATVAGDVDLATPQGRLVARLKGSVAAHETEHKKARQRRAARQKAERGYPNWSKAFGYLPGPDGPEPDPRTAPLVKQAYADILAGASLGDVCRQWNDAGAFTITGRPWTTTALSKFLRRPRNAGLRAYKGARYGPVDRNAIVGKAQWSPLVDEATFWAAQAVLDAPGRAPGRKSVRRHLLTGLAGCGKCGNHLAGSYRTDGRVVYVCKACHGVAILADYIEPILYHIVAERLAMPDAVDLLRREIHDAAEAETIRLELETLYGELDRLAVERAEGLLTARQVKISTDIVNAKITKLQACQLDQERLRVLDGIPLGTPQVAGMIAELSPDRFRAVLDVLAEVVVQPVGKSGRIFNPERVQVNWR

SEQ ID NO: 1478 - protein, 469 aa, synthetic construct
MSYTTPVRAAVYLRISEDRSGEQLGVARQREDCLKLCGQRKWEPVEYLDNDVSASTGKRRPAYEQMLADITAGKIAAVVAWDLDRLHRRPIELEAFMSLADEKRLALATVAGDVDLATPQGRLVARLKGSVAAHETEHKKARQRRAARQKAERGHPNWSKAFGYLPGPNGPEPDPRTAPLVKQAYADILAGASLGDVCRRWNDAGASTITGRPWTTTALSKFLRKPRNAGLRAYKGARYGPVDRDAIVGKAQWSPLVDEATFWAAQAVLDAPGRSPGRKSVRRHLLTGLAGCGKCGNHLAGSYRTDGRVVYVCKACHGVAILADNIEPILYRTVAERLAMPDAVDLLRREIHDAAEAETIRLELETLYGELDCLAVERAEGLLTARQVKISTDIVNAKITKLQAHQQDQERLRVLDGIPLGTPQVAGVIAELSPNRFRAVLDVLAEVVVQPVGKSGRIFNPGRVQVNWR

SEQ ID NO: 1479 - protein, 485 aa, synthetic construct
MTKKVAIYTRVSTTNQAEEGFSIDEQIGRLTKYAEAMGWQVSDTYTDAGFSGAKLGRPAMQRLINDIENKAFDTVLVYKLDRLSRSVRDTLYLVKDVFTKNKIDFISLNESIDTSSAMGSLFLTILSAINEFERENIKERMTMGKLGRAKSGKSMMWTKTAFGYYHNRKTGILEIVPLQATIVEQIFTDYLSGISLTKLRDKLNESGHIGKDIPWSYRTLRQTLDNPVYCGYIKFKDSLFEGMHKPIIPYETYLKVQKELEERQQQTYERNNNPRPFQAKYMLSGMARCGYCGAPLKVVLGHRRKDGSRTMKYHCANRFPRKTKGVTVYNDNKKCDSGTYDLSNLENTVIDYLVGFQENNDSLLKIINGNNQPILDTSSFKEQISQIDKKIQKNSDLYLNDFITMDELKDRTDSLRAEKKLLKAKISEDKFNDSTDVFELVKTQLGSIPINELSYDNKKKIVNNLVSKVDVTADNVDIIFKFQLA

SEQ ID NO: 1480 - protein, 469 aa, synthetic construct; identical to SEQ ID NO: 1361

SEQ ID NO: 1481 - protein, 485 aa, synthetic construct
MTKKVAIYTRVSTTNQAEEGFSIDEQIDRLTKYAEAMGWQVSDTYTDAGFSGAKLKRPAMQRLINDIENKAFDTVLVYKLDRLSRSVRDTLYLVKDVFTKNKIDFISLSESIDTSSAMGSLFLTILSAINEFERENIKERMTMGKLGRAKSGKSMMWTKTAFGYYHNRKTGILEIVPLQATIVEQIFTDYLSGISLTKLRDKLNESGHIGKDIPWSYRTLRQTLDNPVYCGYIKFKDSLFEGMHKPIIPYETFLKVQKELEVRQQQTYERNNSPRPFQAKYMLSGMARCGYCGAPLRIVLGHKRKDGSRTMKYHCANRFPRKTEGVTVYNDNKKCDSGTYDLSDLENTVIDNLIGFQENNDSLLKVINGNNQPIPDTSSFEKQISQIDKKIQKNSDLYLNDFITMDELRDRTDSLQAEKKLLKAKISENKFNDSTDVFELVKTQLGSIPINELSYDNKKKIVNNLVSKVDVTADNVDIIFKFQLA

SEQ ID NO: 1482 - protein, 485 aa, synthetic construct
MTKKVAIYTRVSTTNQAEEGFSIDEQIDRLTKYAEAMGWQVSDTYTDAGFSGAKLERPAMQRLIDDIENKAFDTVLVYKLDRLTRSVRDTLYLVKDVFTKNKIDFISLNESIDTSSAMGSLFLTILSAINEFERENIKERMTMGKLGRAKSGKSMMWTKTAFGYYHNRKTGILEIVPLQATIVEQIFADYLSGISLTKLRDKLNENGHIGKDIPWSYRTLRQTLDNPVYCGYIKFKDSLFVGMHKPIIPYETYLKVQKELEERQQQTYERNNNPRPFQAKYMLSGMARCGYCGAPLRIVLGHKRKDGSRTMKYHCANRLPRKTKGVTVYNDNKKCDSGTYDLSNLENTVIGNLIGFQENNDSLLKIINGNNQPIPDTSSFKKQISQIDKKIQKNSDLYLNDFITMDELKDRTDSLQAEKKLLKAKISENKFNGSTDVFELVKTQLGSIPINELSYDNKKKIVNNLVSKVDVTADNVDIIFKFQLA

SEQ ID NO: 1483 - protein, 469 aa, synthetic construct
MSYTTPVRAAVYLRISEDRSGEQLGVARQREDCLKLCGQRKWVPVEYLDNDVSASTGKRRPAYEQMLADITAGKIAAVVAWDLDRLHRRPIELEAFMSLADEKRLALATVAGDVDLATPQGRLVARLKGSVAAHETEHKKARQRRAARQKAERGHPNWSKAFGYLPGPNGPEPDPRTAPLVKQAYADILAGASLGDVCRQWNDAGAYTITGRPWTTTTLSKFLRKPRNAGLRAYKGARYGPVDRDAIVGKAQWSPLVDEATFWAAQAVLDAPGRAPGRKSVRRHLLTGLAGCGKCGNHLAGSYRTDGRVVYVCKACHGVAILADNIEPILYHIVAERLAMPDAADLLRREIHDAAEAEAIRLELETLYGELDRLAVERAEGLLTARQVKISTDIVNAKITKLQARQLDQERLRVFDGIPLGTPQVAGTIAELSPDRFRAVLDVLAEVVVQPVGKGGRIFNPERVQVNWR

SEQ ID NO: 1484 - protein, 485 aa, synthetic construct
MTKKVAIYTRVSTTNQAEEGFSIDEQIDRLTKYAEAMGWQVSDTYTDAGFSGAKLERPAMQRLINDIENKAFDTVLVYKLDRLSRSVRDTLHLVKDVFTKNKIDFISLSESIDTSSAMGSLFLTILSAINEFERENIKERMTMGKLGRAKSGKSMMWTKTAFGYYHNCKTGILEIVPLQAAIVEQIFTDYLSGISLTRLRDKLNENGHIGKDIPWSYRTLRQTLDNPVYCGYIKFKGSLFEGMHKPIIPYETYLKVQKELEERQQQTYERNNNPRPFQTKYMLSGMARCGYCGAPLKIVLGHKRKDGSRTMKYHCANRFPRKTKGVTVYNDNKKCDSGTYDLRNLENTVIDNLIGFQESNDSLLKIINGNNQPILDTSSFKKQISQIDKKIQKNSDLYLNDFITMDELKDRTNSLQAEKKLLKAKISENKFIDGTDVFEQVKTQLGSIPINELSYDDKKKIVNNLVSKVDVTADNVDIIFKFQLA

SEQ ID NO: 1485 - protein, 452 aa, synthetic construct
MKAAIYIRVSTREQVENYSIQAQTEKLTALCRSKDWDVYDIFIDGGYSGSNMNRPALNEMLNKLHEIDAVVVYRLDRLSRSQRDTITLIEEYFLKNNVEFVSLSETLDTSSPFGRAMIGILSVFAQLERETIRDRMVMGKIKRIEAGLPLTTAKGRTFGYDVIGAKLYINEEEARQLQLIYDIFEEEQSITLLQKRLKKLGFKVHTYNRYNNWLTNDLYCGYVSYKDKVHVKGIHEPIISEEQFYRVQEIFTRMGKNPNMNRASASLLNNLVVCSKCGLGFVHRRKDAVSRDKKYHYRYYSCKTYKHIHELEKCGNKIWRADKLEELIINRVNNYSLASRNVDKDDELDSLNERLKMEHAKKKRLFDLYINGGYEVSELDSMMNDIDAQINYYESQIEANEELKKNKKIQENLAHLATVDFDSLEFREKQLYLKSLINKIYIDGERVTIEWL

SEQ ID NO: 1486 - protein, 452 aa, synthetic construct
MKAAIYIRVSTREQVENYSIQAQTEKLTALCRSKDWDVYDIFIDGGYSGSNINRPALNEMLSKLHEIDAVVVYRLDRLSRSQRDTITLIEEYFLKNNVEFVSLSETLDTSSPFGRAMIGILSVFAQLERETIRDRMVMGKIKRIEAGLPLTTAKGRTFGYDVIDTKLYINEEEAKQLRLIYDIFEEERSITSLQKRLKKLGFKVHTYNRYNNWLTNDLYCGYVSYKDKVHVKGIHEPIISEEQFYRVQEIFARMGKNPNMNRDSASLLNNLVVCSKCGLGFVHRRKDAKSRDKRYHYRYYSCKTHKHIHELEKCGNKIWRADELEELIVNRVNNYSLASRNVDKEDKLDSLNEKLKTEHAKKKRLFDLYINGSYEVSELDSMMNDIDAQINYYESQIKANEELKKNKKIQENLAHLATVDFDSLEFREKQLYLKSLINKIYIDGEQVTIEWL

SEQ ID NO: 1487 - protein, 452 aa, synthetic construct
MKAAIYIRVSTQEQVGNYSIQAQTEKLTALCRSKDWDVYDIFIDGGYSGSNMNRPALNEMLSKLHEIDAVVVYRLDRLSRSQRDTTTLIEEYFLKNNVEFVSLSETLDTSSPFGRAMIGILSVFAQLERETIRDRMVMGKIKRIEAGLPLTTAKGRTFGYDVIDTKLYINEEEAKQLQLIYDIFEEEQSITFLQKRLKKLGFKVRTYNRYNSWLTNDLYCGYVSYKDKVHVKGIHEPIISEEQFYRVQEIFTRMGKNPNMNRDSASLLNSLVVCSKCGLSFVHRSKDTMSRGKKYHYRYYSCKTYKHTHELEKCGNKTWRADKLEELIINRVNNYSFASRNVGKEDELDSLYEKLKIEHAKKKRLFDLYINGSYEVSELDSMMSDIDVQINYYESQIEANEELKKNKKIQEHLAELATVDFDSLEFREKQLYLKSLINKIYIDGEQVTIEWL

SEQ ID NO: 1488 - protein, 452 aa, synthetic construct
MKAAIYIRVSTREQVENYSIQAQTEKLTALCRSKDWDVYDIFIDGGYSGSNMNRPALNEMLSRLHEIDAVVVYRLDRLSRSQRDTITLIEEYFLKNNVEFVSLSETLDTSSPFGRAMIGILSVFAQLERETIRDRMVMGKIKRIEAGLPLTTAKGRTFGYDVIDTKLYINEEEAKQLQLIYDIFEEEQSITFLQKRLKELGFKVRTYNRYINWLTNDLYCGYVSYKDKVHVKGIHEPIISEEQFYRVQEIFTRMGKNPNMNRDSASLLNNLVVCSKCGLGFVHRRKDAMSRDKKYHYRYYSCKTYKHIHELEKCGNKIWRADKLEELIIDRVNNYSLASRNVDKEDELDSLNEKLKIEHAKKKRLFDLYINGNYEVSELDSMMNDIDAQINYYESQIEANEELKKNKKIQENLAYLATVDFDSLEFREKQLYLKSLISKIYIDGEQVTIEWL

SEQ ID NO: 1489 - protein, 469 aa, synthetic construct
MSYTTPVRAAVYLRISEDRSGEQLGVARQREDCLKLCDQRKWVPVEYLDNDVSASTGKRRPAYEQMLADITAGKIAAVVAWDLDRLHRRPIELEAFMSLADEKRLALATVAGDVDLATPQGRLVARLKGSVAAHETEHKKARQRRAARQKAERGHPNWSKAFGYLPGPNGPEPDPRTAPLVKQAYADILAGASLGDVCRQWNNAGAFTITGRPWTTTTLSKFLRKPRNAGLRAYKGARYGPVDRDAIVGKAQWSPLVDEATFWAAQAVLDAPGRAPGRKSVRRHLLTGLAGCGKCGNHLAGSYRTDGRVVYVCKACHGVAILADNIEPILYHIVAERLAMPDAVDLLRREIHDAAEAETIRLELETLYGELDRLAVERAEGLLTARQVKISTDIVSAKITKLQACQLDQERLHVFNGIPLGTPQVAGMIAELSPDRFRAVLDVLAEVVVQPVGKSGRIFNPERVQVNWR

SEQ ID NO: 1490 - protein, 469 aa, synthetic construct
MSYTTPVRAAVYLRISEDRSGEQLGVARQREDCLKLCGQRKWVPVEYLDNDVSASTGKRRPAYEQMLADIAAGKIAAVVAWDLDRLHRRPIELEAFMSLADEKRLALATVAGDVDLATPQGRLVARLKGSVAAHETEHKKARQRRAARQKAERGYPNWSKAFGYLPGPNGPEPDPRTAPLVKQAYADILAGASLGDVCRQWNDAGAFTITGRPWATTTLSRFLRKPRNAGLRAYKGARYGPVDRDAIVGKAQWSPLVEEATFWAAQAVLDAPGRAPGRKSVRRHLLTGLAGCGKCGNHLAGSYRTDGRVVYVCKACHGVAILADNIVPILYHIVAERLAMPDAVDLLRREIHDAAGAETIRLELEALYGELDRLAVERAEGLLTARQVKISTDIVNAKITKLQARQLDQERLRVFDGIPLGTPQVAGMIAELSPNRFRAVLDVLAEVVVQPVGKSGRIFNPERVQVNWR

SEQ ID NO: 1491 - protein, 452 aa, synthetic construct
MKAAIYIRVSTREQVENYSIQAQTEKLTALCRSKDWDVYDIFIDGGYSGSNMNRPALNEMLSKLHEIDAVVVYRLDRLSRSQRDTITLIEEYFLKNNVEFVSLSETLDTSSPFGRAMIGILSVFAQLERETIRDRMVMGKIKRIEAGLPLTTAKGRTFGYDVIDTKLYINEEEAKQLQLIYDIFEEEQSITSLQKRLKKLGFKVRTYSRYNSWLTNDLYCGYVSYKDKVHVRGIHEPIISEEQFYRVQEIFARMGKNPNMNRDSASLLSNLVVCGKCGLGFVHRRKDTMNRGKKYHYRYYSCKTYKHIHELEKCGNKIWRADKLEELIISRVNNYSFASRSVDKEDELDSLDEKLKTEHAKKKRLFDLCINGSYEVSELDSMMNDIDAQINYYESQIEANEELKKNKKIQENLANLATMDYDSLEFREKQLYLKSLINKIYIDGEQVTIEWL

SEQ ID NO: 1492 - protein, 452 aa, synthetic construct
MKAAIYIRVSTREQVENYSIQAQTEKLTALCRSKDWYVYDIFVDGGYSGSNMNRPALNEMLSKLHEIDAVVVYRLDRLSRSQRDTITLIEEYFLKNNVEFVSLSETLDTSSPFGRAMIGILSVFAQLERETIRDRMVMGKIKRIEAGLPLTTAKGRTFGYDVIDTKLYINEEEAKQLQLIYDIFEEEQSITFLQKRLKKLGFKVRTYNRYNNWLTNDLYCGYVSYKDKVRVKGIHEPIISEEQFYRVQEIFTRMGKNPNMNRDSASLLNNLVVCSKCGLGFVHRRKDAMSRDKKYHYRYYSCKTYKHIHELEKCGNKIWRADKLEELIISRVNNYSLAGRNVDKEDELDSLNERLKIEHAKKKRLFDLYINGSYKVGELDSMMKDIDAQINYYESQIEANEELRKNKKIQENLAHLATVDFDSLEFREKQLYLKSLINKIYIDGEQVTIEWL

SEQ ID NO: 1493 - protein, 485 aa, synthetic construct
MTKKVAIYTRVSTTNQAEEGFSIDEQIDRLTKYAEAMGWQVSDTYTDAGISGAKLERPAMQRLINDIENKAFDTVLVYKLDRLSRSARDTLYLVKDVFTKNKIDFISLNESIDTSSAMGSLFLTILSAINEFERENIKERMTMGKLGRAKSGKSMMWTKTAFGYYHNRKTGILEIVPLQATIVEQIFTDYLSGISLTKLRDKLNESGHIGKDIPWSYRTLRQTLDNPVYCGYIKFKDSLFEGMHKPIIPYETYLKVQKELEERQQQTYERNSNPRPFQAKYMLSGMARCGYCGAPLKIVLGHKRKDGSRTLKYHCANRFPRKTRGVTVYNDNKKCDSGTYDLRNLENTVIDNLIGFQENNDSLLKIINGNNQPILDTSSFKEQISQIDKKIQKSSDLYLNDFITMDELKGRTDSLQAEKKLLKAKISENKFNDSTDVFELVKTQLGSIPINELSYDDKKKIVNNLVSKVDVTADNVDIIFKFQLA

SEQ ID NO: 1494 - protein, 469 aa, synthetic construct
MSYTTPVRAAVYLRISEDRSGEQLGVARQREDCLKLCGQRKWVPVEYLDNDVSASAGKRRPAYEQMLADITAGKIAAVVAWDLDRLHRRPIELEAFMSLADEKRLALATVAGDVDLATPQGRLVARLKGCVAAHETEHKKARQRRAARQKAERGYPNWSKAFGYLPGPNGPEPDPRTAPLVKQAYADILAGASLGDVCRQWNDTGAFTITGRPWTTTTLSKFLRKPRNAGLRAYRGARYGPVDRDAIVGKAQWSPLVDEATFWAAQAVLDAPGRAPGRKSVRRHLLTGLASCGKCGYHLAGSYRTDGRVVYVCKACHGVAILADNIEPILYHIVAERLAMPDAVDLLRREIHDAAEAETIRLELETLYGELDRLAAERAEGLLTARQVKISTDIVNAKITKLQARQLDQERLRVFNGIPLGTPQVAGVIAELSPDRFRAVLDELADVVVQPVGKSGRILNPERVQVNWR

SEQ ID NO: 1495 - protein, 485 aa, synthetic construct
MTKKVAIYTRVSTTNQAEEGFSIDEQIDRLTKYAEAMGWQVSDTYTDAGSSGAKLERPAMQRLINDIETKAFDTVLVYKLDRLSRSVRDTLYLVKDVFAKNKIDFISLNECIDTSSAMGSLFLTILSAINEFERENIKERMTMGKLGRAKSGKSMMWTKTAFGYYHNRKTGILEIVPLQATIVEQIFTDYLSGISLTKLRDKLNESGHIGKDIPWSYRTLRQTLDNPVYCGYIKFKDSLFEGMHKPIIPYETYLKVQKELEERQQQTYERNNNPRPFQAKYMLSGMARCGYCGAPLKVVLGHKRKDGSRTMKYHCANRSPRKTKGVTVYNDNKKCDSGTYDLSNLENTVIDNLIGFQEDNDSLLKIINGNNQPILDTSSFKKQISQIDKKIQKNSDLYLNDFITMDELKDRTDSLQAERKLLKAKISENKFNDSTDVFELVKTQLGSIPINELSYDNKKKIVNNLVSKVDVTADNVDIIFKFQLA

SEQ ID NO: 1496 - protein, 452 aa, synthetic construct
MKAAIYIRVSTQEQVGNYSIQAQTEKLTALCRSKDWDVYDIFIDGGYSGSNMNRPALNEMLSKLHEIDAVVVYRLDRLSRSQRDTTTLIEEYFLKNNVEFVSLSETLDTSSPFGRAMIGILSVFAQLERETIRDRMVMGKIKRIEAGLPLTTAKGRTFGYDVIDTKLYINEEEAKQLQLIYDIFEEEQSITSLQKRLKKLGFKVRTYNRYNNWLTNDLYCGYVSYKDKVHVKGIHEPIISEEQFYRVQEIFTRMGKNPNMNRDSASLLNNLVVCSKCGLGFVHRSKDTMSRGKKYHYRYYSCKTYKHTHELEKCGNKIWRADKLEELIINRVNNYSFVSRNADKEDELDSLNEKLKIEHAKKKRLFDLYINGSYEVSELDSMMSDIDARIDYYESQIEANEELKKNKKIQENLADLATVDFDSLEFREKQLYLRSLIDKIYIDGEQVTIEWL

SEQ ID NO: 1497 - protein, 452 aa, synthetic construct
MKAAIYIRVSTQEQVGNYSIQAQTEKLTALCRSKDWDVYDIFVDGGYSGSNMNRPALNEMLSKLHEIDAVVVYRLDRLSRSQRDTTTLIEEYFLKNNVEFVSLSETLDTSSPFGRAMIGILSVFAQLERETIRDRMVMGKIKRIEAGLPLTTAKGRTFGYDVIDTKLYINEEEAKQLQLIYDIFEEEQSITSLQRRLKKLGFKVRTYNRYNNWLTNDLYCGYVSYKDKVHVKGIHEPIISEEQFYRVQKIFTRMGKNPNMNRDSASLLSNLVVCSKCGLGFVHRSKDTMSRGKKYHYRYYSCKTYKHTHELEKCGNKTWRADKLEELIINRVNKYSFASRNVDKEDELDSLNEKLRIEHAKKKRLFDLYINGSYEVSELDSMMNDIDAQINYYESQIEASEELKKNKKIQGNLADLATVDFDSLEFREKQLYLKSLINKIYIDGEQVTIEWL

SEQ ID NO: 1498 - protein, 469 aa, synthetic construct
MSYTTPVRAAVYLRISEDRSGEQLGVARQREDCLKLCDQRKWVPVEYLDNDVSASTGKRRPAYEQMLADITAGKVAAVVAWDLDRLHRRPIELEAFMSLADEKRLALATVAGDVDLATPQGRLVARLKGSVAAHETEHKRARQRRAARQKAERGRPNWSKAFGYLPGPSGPEPDPRTAPLVKQAYADILAGASLGDVCRQWNGAGAHTITGRPWTTTTLSKFLRKPRNAGLRAYKGARYGPVDRDAIVGKAQWSPLVDEATFWAAQAVLDAPGRAPGRKSVRRHLLTGLAGCGKCGNHLAGSYRTDGRVVYVCKACHGVAILADNIEPILYHIVAERLAMPDAVDLLRREIHDAAEAETIRLELETLDGELDRLAVERAEGLLTARQVKISTDIVNAKITKLQARQLDQERLRVFDGIPLGTPQVAGMIAELSPDRFRAVLDVLAEVVVQPVGKGGRIFNPERVQVNWR

SEQ ID NO: 1499 - protein, 469 aa, synthetic construct
MSYTTPVRAAVYLRISEDRSGEQLGVARQREDCLKLCDQRRWVPVEYLDNDVSASTGKRRPAYEQMLADITAGKIAAVVAWDLDRLHRRPVELEAFMSLADEKRLALATVAGDVDLATPQGRLVARLKGCVAAHETEHKKARQRRAARQKAERGLPNWSKAFGYLPGPNGPEPDPRTAPLVKQAYADILAGASLGDVCRRWNDAGAFTITGRPWTTTTLSKFLRKPRNAGLRAYKGARYGPVDRDAIVGKAQWSPLVDEATFWAAQAVLDAPGRAPGRKSVRRHLLTGLAGCGKCGNHLAGSYRTDGRVVYVCKACHGVSILAVNIVPILYHIVAERLAMPDAVDLLCREIHDAAGAETIRLELEALYGELDRLAVERAEGLLTARQVKISTDIVNAKITKLQARRLDQERLRVFDGIPLGTPQVAGMIAGLSPDRFRAVLDVLVEVVVQPVGKSGRIFNPERVQVNWR

SEQ ID NO: 1500 - protein, 452 aa, synthetic construct
MKAAIYIRVSTQEQVGNYSIQAQTEKLTALCRSKDWDVYDIFIDGGYSGSNMNRPALNEMLSKLHEIDAVVVYRLDRLSRSQRDTTTLIEEYFLKNNVEFVSLSETLDTSSPFGRAMIGILSVFAQLERETIRDRMVMGKIKRIEAGLPLTTAKGRTFGYDVIDTKLYINEEEARQLRLIYDIFEEEQSITSLQKRLKKLGYKVRTYNRYNNWLTNDLYCGYVSYKDKVHVKGIHEPIISEEQFYRVQEIFTRTGKNPNMNRDRASLLNNLVVCSKCGLGFVHRSKDTVSRGKKYHYRYYSCKTYKHTHELEKCGNKTWRADKLEELIINRVNNYSSASRNADKEDELDSLNEKLKIEHARKKRLFDLYINGSYEVSELGSMMNDIDAQINHYESQIEANKGLKKNKKIQESLADLATVDFDSLEFREKQLYLKSLINKIYIDGEQVTIEWL

SEQ ID NO: 1501 - protein, 452 aa, synthetic construct
MKAAIYIRVSTQEQVGNYSIQAQTEKLTALCRSKDWDVYDIFIDGGYSGSNMNRPALNEMLSKLHEIDAVVVYRLDRLSRSQRDTTTLIEEYFLKNNVEFVSLSETLDTSSPFGRAMIGILSVFAQLERETIRDRMVMGKIKRIEAGLPLTTAKGRTFGYDVIDTKLYINEEEAKQLQLIYDIFEEEQSITFLQKRLKKLGFKVRTYNRYNNWLTNDLYCGYVSYKDKVHVKGIHEPIISEEQFYRVQEIFTRMGKKPNMNRDSASLLSNLVVCSKCGLGFVHRSKDTMSRGKKYHYRYYSCKTYKHTHELERCGNKIWRADKLEELIINRVNSYSFASRNVDKEDDLDSLNEKLKIEHAKRKRLFDLYINGSYEVSELDSVMNDIDAQINYYESQIEANEELKKNKKIQENLADLATVDFDSLEFREKQLYLKSLINKIYIDGEQVTIEWL

SEQ ID NO: 1502 - protein, 485 aa, synthetic construct
MTKKVAIYTRVSTTNQAEEGFSIDEQIDRLTKYAEAMGWQVGDTYTDAGFSGAKLERPAMQRLINDIENKAFDTVLVYKLDRLSRSARDTLYLVKDVFTKNKIDFISLNESIDTSSAMGSLFLTILSAINEFERENIKERMTMGKLGRAKSGKSMMWTKTAFGYYHNRETGILEIVPLQATIVEQIFTDYLSGISLTKLRDKLNESGHIGKDIPWSYRTLRQTLGNPVYCGYIKFKDSLFEGMHKPIIPYETYLKVQKELEERQQQTYERNNNPRPFQAKYMLSGMARCGYCGAPLRIVLGHKRKDGSRTMKYHCANRLPRKTKGITVYNDNKKCDSGTYDLSILENTVIGNLIGFQENNDSLLQIINGDNQPILDTSSLKEQISQIDKKIQKNSDLYLNDFITMDELRDRTDSLQAEKKLLKAKISENKFNDSTDVFELVKTQLGSIPINELSYDNKKKIVNNLVSKVDVTADNVDIIFKFQLA

SEQ ID NO: 1503 - protein, 452 aa, synthetic construct
MKAAIYIRVSTREQVENYSIQAQTEKLTALCRSKDWDVYDIFIDGGYSGSNMNRPALNEMLSKLHEIDAVVVYRLDRLSRSQRDTITLIEEYFLKNNVEFVSLSETLDTSSPFGRAMIGILSVFAQLERETIRDRMVMGKIKRIEAGLPLTTAKGRTFGYDVIDTKLYINEEEAKQLQLIYDIFEEEQSITFLQKRLKKLGFKVRTYNRYNNWLTNDLYCGYVSYKDKVHVKGIHEPIISEEQFYRVQEIFARVGKNPNMNRDSASLLNNLVVCSKCGLGFVHRRKDITSCGKKYHYRYYSCKTYKHIHELEKCGNKIWRADKLEELIINRVNSYSLASRNVDKEDELDSLNEKLKIEHAKKKRLFELYINGGYEVSELDSMMNDIDAQINYYESQIEANKELKKNKKIQENLADLATVDFDSLEFREKQLYLKSLINKIYIDGEQVTIEWL

SEQ ID NO: 1504 - protein, 452 aa, synthetic construct
MKAAIYIRVSTQEQVENYSIQAQTEKLTALCRSKDWDVYDIFIDGGYSGSNMNRPALNEMLSKLHEIDAVVVYRLDRLSRSQRDTTTLIEEYFLKNNVEFVSLSETLDTSSPFGRAMIGILSVFAQLERETIRDRMVMGKIKRIEAGLPLTTAKGRTFGYDVIDTKLYINEEEAKQLQLIYDIFEEEQSITSLQKRLKKLGFKVRTYNRYNNWLTNDLYCGYVSYKDKVHVKGIHEPIISEEQFYRVQEIFTRMGKKPNMNRDSASLLNNLVVCSKCGLGFVHRSKDTMSRGKKYHYRYYSCKTYKHTHELEKCGNKTWRADKLEELIINRVSNYSFASRNVDKEDELDSLNKKLKIEHAKKKRLFDLYINGSYEVSELDSMMDDIDAQINYYESQIEANEELKKNKKIQENLAGLATVDFDSLGFREKQLYLKSLINKIYIDGEQVTIEWL

SEQ ID NO: 1505 - protein, 469 aa, synthetic construct
MCYTTPVRAAVYLRISEDRSGEQLGVARQREDCLKLCGQRNWVPVEYLDNDVSASTGKRRPAYEQMLADITAGKIAAVVAWDLDRLHRRPIELEAFMSLADEKRLALATVAGDVDLATPQGRLVARLKGSVAAHETEHKKARQRRAARQKAERGYPNWSKAFGYLPGPNGPEPDPRTAPLVKQAYADILAGASLGDVCRQWNGAGAFTITGRPWTTTTLSKFLRKPRNAGLRAYKGARYGPVDRDAIVGKAQWSPLVDEATFWAAQAVLDAPGRAPGRKSVRRHLLTGLAGCGRCSNHLAGSYRTDGKVVYVCKACHGVAILADNIEPILYHIVAERLAMPDAVDLLRREIHDAEEAEAIRLELETLYGELDRLAVERAEGLLTARQVKISTDIVNAKITKLQACRLDQERLRVFDGIPLGTPQVAGIIAELSPDRFRAVLDVLAEVIVQPVGKSGRVFNPERVQVNWR

SEQ ID NO: 1506 - protein, 485 aa, synthetic construct
MTKKVAIYTRVSTTNQAEVGFSVDEQIDRLTKYAEAMGWQVSDTYTDAGFSGAKLERPAMQRLINDIENKAFDTVLVYKLDRLSRSVRDTLYLVKDVFTKNKIDFISLNESIDTSSAMGSLFLTILSAINEFERENIKERMTMGKLGRAKSGKSMMWTKTAFGYYHNRKTGILEVVPLQATIVEQIFTDYLSGISLTKLRDKLNESGHIGKDIPWSYRTLRQTLDNPVYCGYIKFKDSLFEGMHKPIIPYETYLKVQKELEERQQQTYERNNNPRPFQAKYMLSGMARCGYCGAPLRIVLGHKRKDGSRTMKYHCANRFPRKAKGVAVYNDGRKCDSGTYDLSNLENIVIDNLIGFQENNDSLLRIINGNNQPILDTSSFKEQIDQIDKKIQKNSDLYLSDFITMDELKERTDSLQAEKRLLKAKISETKFNDSTDVFDLVKTQLGSIPINELSYDNKKKIVNSLVSKVDVTADNVDIIFKFQLA

SEQ ID NO: 1507 - protein, 469 aa, synthetic construct
MSYTTPVRAAVYLRISEDRSGEQLGVARQREDCLKLCDQRRWVPVEYLDNDVSASTGKRRPAYEQMLADITAGKIAAVVAWDLDRLHRRPVELEAFMSLADEKRLALATVAGDVDLATPQGRLVARLKGCVAAHETEHKKARQRRAARQKAERGLPNWSKAFGYLPGPNGPEPDPRTAPLVKQAYADILAGASLGDVCRQWNDAGAFTITGRPWTTTTLSKFLRKPRNAGLRAYKGARYGPVDRDAIVGKAQWSPLVDEATFWAAQAVLDAPGRAPGRKSVRRHLLTGLAGCGKCGNHLAGSYRTDGRVVYACKACHGVTILADNIEPILYHIVAERLAMPDAVDLLRREIHDAAEAETIRLELETLYGELDRLAVERAEGLLTARQVKISTDIVNAKITKLQARQLDQERLRVFDGIPLGTPQVAGMIAELSPDRFRAVLDVLAEVVVQPVGKGGRIFNPERVQVNWR

SEQ ID NO: 1508 - protein, 452 aa, synthetic construct
MKAAIYIRVSTQEQVGNYSIQAQTEKLTALCRSKDWDVYDIFIDGGYSGSNMNRPALNEMLSKLHEIDAVVVYRLDRLSRSQRDTTTLIEEYFLKNNVEFVSLSETLDTSSPFGRAMIGILSVFAQLERETIRDRMVMGKIKRIESGLPLTTAKGRTFGYDVIDTKLYINEEEAKQLQLIYDIFEEEQSITSLQKRLKKLGFKVRTYSRYSNWLTNDLYCGYVSYKDKVHVKGIHEPIISEEQFYRVQEIFTRMGKNPNMNRDGASLLNNLVVCGKCGLSFVHRSKDTMSRGKKYHYRYYSCKTYKHTHELEKCGNKTWRADKLEELVINRVNNYSFASRNVGKEDELDSLNEKLKIEHARKKRLFDLYINGSYEVSELDSMMSDIDAQINYYESQIKANGELKRDKKIRENLVDLTTMDFDSLEFREKQLYLKSLINKIYIDGEQVTIDWL

SEQ ID NO: 1509 - protein, 469 aa, synthetic construct
MSYTTPVRAAVYLRISEDRSGEQLGVARQREDCLKLCDQRKWVPVEYLDNDVSASTGKRRPAYEQMLADITAGKIAAVVAWDLDRLHRRPVELEAFMSLADEKRLALATVAGDVDLATPQGRLVARLKGCVAAHETEHKKARQRRAARQKAERGHPNWSKAFGYLPGPNGPEPDPRTAPLVRQAYADILAGASLGDVCRRWNDAGAFTITGRPWTTTTLSKFLRKPRNAGLRAYKGARYGPVDRDAIVGKAQWSPLVDEATFWAAQAVLDAPGRAPGRKSVRRHLLTGLAGCGKCGNHLAGSYRTDGRVVYVCKACHGVAILADNIEPILYHIVAERLAMPNAVDLLRREVHDATEAETTRLELETLYGELDRLAVERAEGLLTARQVKISTDIVNAKITKLQARQLDQERLRVFDGIPLGTPQVAGMIADLSPDRFRAVLDVLAEVVVQPVGKSGRTFNPERVQVNWR

SEQ ID NO: 1510 - protein, 469 aa, synthetic construct
MSYTTPVRAAVYLRISEDRSGEQLGVARQREDCLKLCDQRNWVPVEYLDNDVSASTGKRRPAYEQMLADITAGKIAAVVAWDLDRLHRRPIELEAFMSLADEKRLALATVAGDVDLATPQGRLVARLKGSVAAHETEHKKARQRRAARQKAERGHPNWSKAFGYLPGPNGPEPDPRTAPLVKQAYANILAGASLGDVCRQWNDAGAFTITGRPWTTTTLSKFLRKPRNAGLRAYKGARYGPVDRDAIVGKAQWSPLVDEATFWAAQAVLDAPGRAPGRKSVRRHLLTGLAGCGKCGNHLAGSYRTDGRVVYVCKACHGVAILADNIEPILYHIVAERLAMPDAVDLLRREIHDAAEAETIRMGLETLYGELDRLAVERAEGLLTARQVKISTDIVGAKITKLQTRQLDQERLRVLDGIPLGTPQVAGMIAELSPDRFRAVLGVLAEVVVQPVGKGGRIFNPERVQVNWR

SEQ ID NO: 1511 - protein, 485 aa, synthetic construct
MTKKVAIYTRVSTTNQAEEGFSIDEQIDRLTKYAEAMGWQVSGTYTDAGFSGAKLERPAMQRLINDIENKAFDTVLVYKLDRLSRSVRDTLYLVKDVFTKNKIDFISLNESIDTSSAMGSLFLTILSAINEFERENIKERMTMGKLGRAKSGKSMMWTKTAFGYYHNRKTGILEIVPLQATIVEQIFTDYLSGISLTKLRDKLNESGHIGKDIPWSYRTLRQTLDNPVYCGYIKFKGSLFEGMHKPIIPYETYLKVQKELEERQRQTYERNNNPRPFQAKYMLSGMARCGYCGAPLKIVLGHKRKDGSRTMKYHCANRSPRKTKGVTVYNDNEKCDSGTYDLSNLENTVIDNLIGFQENNDSLLKVINGNNQPTLDTSSFRKQISQIDKKIQKNSDLYLNDFITMDELKDRTDSLQAEKKLLKAKISENKFNDSTDVFEQVKTQLGSIPINELSYDDKKKIVNNLVSKVDVTADNVDIIFKFQLA

SEQ ID NO: 1512 - protein, 485 aa, synthetic construct
MTKKVAIYTRVSTTNQAEEGFSIDEQIDRLTKYAEAMGWQVSDTYTDAGFSGAKLERPALQRLVNDIENKAFDTVLVYKLDRLSRSVRDTLYLVKDVFTQNKIDFISLSESIDTSSAMGSLFLTILSAINEFERENIKERMAMGKLGRAKSGKSMMWTKTAFGYYHNRKTGILEIVPLQATIVEQIFTDYLSGISLTKLRDKLNESGHIGKDIPWSYRTLRQTLDNPVYCGYIKFKDSLFEGKHKPIIPYETYLRVQKELEERQQQTYERNNNPRPFQAKYMLSGMARCGYCGAPLRIVLGHKRKDGSRTMKYHCANRFPRKTKGITVYNDNKKCDSGAYDRNNLENTVIDNLVGFQENNDSLLKIINGNNQPILDTSSFKKQISQIDKKIQRNSDLYLNDFITMDELKVRTDGLQAEKKLLKAKISENKFNDSTDVFEQVKTQLGSIPINELSYDNKKKIVNNLVSKVDVTADNVDIIFKFQLA

SEQ ID NO: 1513 - protein, 485 aa, synthetic construct
MTKKVAIYTRVSTTNQAEEGFSIDEQVDRLTKYAEAMGWQVSDTYTDAGISGAKLERPAMQRLINDIENKAFDTVLVYKLDRLSRSVRDTLYLVKDVFTKNKIDFISLNESIDTSSAMGSLFLTILSAINEFERENIKERMAMGKLGRARSGKSMMWTKTAFGYYHNRKTGILEIVPLQATIVEQIFTDYLSGISLTKLRDKLNESGHIGKDIPWSYRTLRQTLDNPVYCGYIKFKDSLFEGMHKPIIPYGTYLKVQKELEERQRQTYERNNNPRPFQAKYMLSGKARCGYCGAPLRIVLGHRRKDGSRTMKYHCANRYPRKTKGITVYNDNKKCDSGTYDLSDLENTVIDNLIGFQENNDSLLKIINGNNQPILDTSSLKKQISQIDKKIQKNSDLYLNDFITMDELKDRTDSLRAEKKLLKAKISENKFNDSTDVFELVKTQLGSIPINELSYDNKKKIVNNLVSKVDVTADNVDIIFKFQLA

SEQ ID NO: 1514 - protein, 469 aa, synthetic construct
MSYTTPVRAAVYLRISEDRSGEQLGVARQREDCLKLCGQRKWVPVEYLDNDVSASTGKRRPAYEQMLADITAGKIAAVVAWDLDRLHRRPIELEAFMSLADEKRLALATVAGDVDLATPQGRLVARLKGCVAAHETEHKKARQRRAARQKAERGLPNWSKAFGYLPGPNGPEPDPRTAPLVKQAYADILAGASLGDVCRQWNAAGAFTITGRPWTTTALSKFLRKPRNAGLRAYKGARYGPVNRDAIVGKAQWSPLVDEATFWAAQAVLDAPGRAPGRKSVRRHLLTGLAGCGKCGNRLAGSYRTDGRVVYVCKACHGVAILADNIEPILYRIVVERLAMPDAVDLLRREIHDAAEAETIRLELETLYGELDRLAVERAEGLLTARQVKISTDIVNAKITNLQARQLDQERLRVFDGIPLGTPQVAGMIAELSPDRFRAVLDVLAEVVVQPVGKSGRIFNPERVQVNWR

SEQ ID NO: 1515 - protein, 469 aa, synthetic construct
MSYTTPVRAAVYLRISEDRSGEQLGVARQREDCLKLCGQRKWVPVEYLDNDVSASTGKRRPAYEQMLADITAGKIAAVVAWDLDRLHRRPIELEAFMSLADEKRLALATVAGDVDLATPQGRLVARLKGCVAAHETEHKKARQRRAARQKAERGLPNWSKAFGYLPGPNGPEPDPRTAPLVKQAYADILAGASLGDVCRRWNGAGAFTITGRPWTTTTLSKFLRKPRNAGLRAYKGARYGPVDRGAIVGKAQWSPLVDEATFWVAQAVLDAPGRAPGRKSVRRHLLTGLAGCGKCGNHLAGSYRTDGRVVYVCRACHGVAILADNIEPVLYRIVVERLAMPDAVDLLRHEIHDAAEAETIRLELETLYGELDRLAVERAEGLLTARQVKISTDIVNAKITKLRARRLDQERLRVFDGIPLGTPQVAGVIAELSPDRFRAVLDVLAEVVVQPVGKRGRIFNPERVQVNWR

SEQ ID NO: 1516 - protein, 485 aa, synthetic construct
MTKKVAIYTRVSTTNQAEEGFSIDEQTDRLTKYAEAMGWQVSDTYTDAGLSGAKLERPAMQRLINDIENKAFDTVLVYKLDRLSRNVRDTLYLVKDVFTKNKIDFISLNESIDTSSAMGSLFLTILSAINEFERENIKERMTMGKLGRAKSGKSMMWTKTAFGYYHNRRTGILEIVPLQATIVEQIFTDYLSGISLTKLRDKLNESGHVGKDIPWSYRTLRQTLDNPVYCGYIKFKDSLFEGMHKPIIPYETYLKVQKELEERQQQTYERNNNPRPFQAKYMLSGTARCGYCGAPLKIVLGHKRKDGSRTMRYHCTNRFPRKTKGVTVYNDNKKCDSGTYDLSNLEDTVIDRLVDFQENNDSLLKIINGDNQPILDTSSFEKQISQIDKKIQKNSDLYLNDFITMDELKDRTDSLQAEKKLLKAKISENKFNDSTDVFELVKTQLGSIPINELSYDNKKKIVNSLVSKVDVTADSVDIIFKFQLA

SEQ ID NO: 1517 - protein, 452 aa, synthetic construct
MKAAIYIRVSTREQVENYSIQAQTEKLTALCRSKDWDVYDTFIDGGYSGSNMNRPALNEMLSKLHEIDAVVVYRLDRLSRSQRDTITLIEEYFLRNNVEFVSLSETLDTSSPFGRAMIGILSVFAQLERETIRDRMVMGKIKRIEAGLPLTTAKGRTFGYDVIGTKLYINEEEAKQLQLIYDIFEEEQSITFLQKRLKKLGLKVRTYNRYNNWLTNDLYCGYVSYKDKVHVKGIHEPIISEEQFYRVQEIFARMGKNPNMNRDSASLLNNLVVCGKCGLGFVHRRKDVMSRGKKYHYRYYSCKTYKHIHELEKCGNKIWRADKLEELIINRVNNYSLASRNVDKEDELGSLNEKLRIEHAKKKRLFDLYINGRYEVSELDSMMNDIDAQINYYESQIEANEELKGNKKIQENLAYLATVDFDGLEFREKQLYLKSLINKIYIDGEQVTIEWL

SEQ ID NO: 1518 - protein, 469 aa, synthetic construct
MSYTTPVRAAVYLRISEDRSGEQLGVARQREDCLELCEQRKWVPVEYLDNDVSASTGKRRPAYEQMLADITAGKIAAVVAWDLDRLHRRPIELEAFMSLADEKRLALATVAGDVDLATPQGRLVARLKGSVAAHETEHKKARQRRAARQKAERGHPNWSRAFGYLPGPNGPEPDPRTAPLVKQAYADILAGASLGDVCRRWNDAGAFTITGRPWTTTTLSKFLRKPRNAGLRAYKGARYGPVDRDAIVGKAQWSPLVDEATYWAAQAVLDAPGRAPGRKSVRRHLLTGLAGCGKCGNHLAGSYRTDGRVVYVCKACHGVAILADNIEPILYHIVAERLAMPDAVDLLRREIRDVAEAEAIRLELETLYGELDRLAVERAEGLLTARQVKISTDIVNAKITRLQARQLDQERLRVFDGIPLGTPQVAGMIAELSPNRFRAVLDVLAEVVVQPVGKGGRIFNPERVQVTWR

SEQ ID NO: 1519 - protein, 452 aa, synthetic construct
MKAAIYIRVSTREQVENYSIQAQTEKLTALCRSKDWDVYDIFIDGGYSGSNMNRPALNEMLSKLHEIDAVVVYRLDRLSRSQRDTITLIEEYFLKNNVEFVSLSETLDTSSPFGRAMIGILSVFAQLERETIRDRMVMGKIKRIEAGLPLTTAKGRTFGYDVIDTKLYINEEEAKQLQLIYDIFEEEQSITFLQKRLKKLGFKVRTYNRYNNWLTNDLYCGYVSYKDKVHVKGIHEPIISEEQFYRVQEIFARMGKNPNMNRDSASLLNNLVVCGKCGLSFVHRRKDAMSRDKKYHYRYYSCKTYKHIHELEKCGNKIWRADKLEELIINRVNNYSLAGRNVDKGDELDSLNEKLKIEHAKKKRLFDLYINGSYEVSELDSMMNDIDAQINYYESQIEANGELKKNKKIQENLAYLATVDYDCLEFREKQLYLKSLINKIYIDGEQVTIEWL

SEQ ID NO: 1520 - protein, 485 aa, synthetic construct
MTKKVAIYTRVSTTNQAEEGFSIDEQIDRLTKYAEAMGWQVSDTYTDAGFSGAKLVRPAMQRLIDDIENKAFDTVLVYKLDRLSRSVRDTLYLVKDVFTKNKIDFISLNESIDTSSAMGSLFLTILSAINEFERENIKERMTMGKLGRAKSGKSMMWTKTAFGYYHNRKTGILEIVPLQATVVEQIFTDYLSGISLTKLRDKLNESGHIGKDIPWSYRTLRQTLDNPVYCGYIKFKDSLFEGMHKPIIPYETYLKVQRELEVRQQQTYERNNNPRPFQAKYMLSGMARCGYCGAPLKIVLGHKRKDGSRTMKYHCANRFPRKTRGVTVYNDNKKCDSGTYDLRDLENTVIDNLIGFQENNDSLLKIIIGNNQPILDTSSFKKQISRIDKKIQKNSDLYLNDFITMDELRDRTDSLQAEKKLLKARISGIKFNDSTDVLELVKTQLGSIPINELSYDNKKKIVNNLVSKVDVTADNVDIIFKFQLA

SEQ ID NO: 1521 - protein, 452 aa, synthetic construct
MKAAIYIRVSTQEQVGNYSIQAQTEKLTALCRSKDWDVYDIFIDGGYSGSNMNRPALNEMLSKLHEIDAVVVYRLDRLSRSQRDTTTLIEEYFLKNNVEFVSLSETLDTSSPFGRAMIGILSVFAQLERETIRDRMVMGKIKRIEAGLPLTTAKGRTFGYDVINTKLYINEEEARQLQLIYDIFEEEQSITSLQKRLKKLGFKVRTYNRYSNWLTNDLYCGYVSYKDKVHVKGIHEPIISEEQFYRVQEIFTRMGKNPNMNRDSASLLNGLVVCSKCGLSFVHRSKDTMSRGKKYHYRYYSCKTYKHAHELEKCGNKTWRADKLEELIINRVNNYSFAGRNVDKEDELDSLNEKLKIEHAKKKRLFDLYINGSYEVSELDSMMNDIDAQINYYESQIEANEELKKDKKIQENLADLAAVDFDSLEFREKQLYLKSLINKIYIDGEQVTIEWL

SEQ ID NO: 1522 - protein, 452 aa, synthetic construct
MKAAIYIRVSTREQVENYSIQAQTEKLTALCRSKDWDVYDIFIDGGYSGSNMNRPALNEMLSKLHEIDAVVVYRLDRLSRSQRDTITLIEEYFLKNNVEFVSLSETLDTSSPFGRAMIGILSVFAQLERETIRDRMVMGKIKRIEAGLPLTTAKGRTFGYDVIDTRLYINEEEAKQLRLIYDIFEEEQSITFLQKRLKKLGFKVRTYNRYNNWLTNDLYCGYVSYKDKVHVKGIHEPIISEEQFYRVQEIFARMGKNPNMNRDSASLLNNLVVCSKCGLGFVHRRKDVMSRDKKYHYRYYSCKTYKHIHELEKCGNKIWRADKLEELIINRVNNYSLASRNVDKEDELDSLNEKLKIEHAKKKRLFDLYINGSYDVNELDSMMNDIDAQINYYESQIEANEELKKDKKIQENLAYLAAVDFASLEFREKQLYLKSLINKIYIDGEQVTIEWL

SEQ ID NO: 1523 - protein, 452 aa, synthetic construct
MKAAIYIRVSTREQVENYSIQAQTEKLTALCHSKDWDVYDIFIDGGYSGSNMNRPALNEMLSKLHEIDAVVVYRLDRLSRSQRDTITLIEEYFLKNNVEFVSLSEALDTSSPFGRAMIGILSVFAQLERETIRDRMVMGKIKRIEAGLPLTTAKGRTFGYDVIDTKLYINEEEAKQLRLIYDIFEEEQSITFLQRRLKELGFKVRTYNRYNNWLTNDLYCGYVSYKDKVHVKGIHEPIISEEQFNRVQEIFTRMGKNPNMNRDSASLLNNLVVCSKCGLGFVHRRKDAVSRDKKYHYRYYSCKTYKHIHELEKCGNKIWRADKLEELVINRVNNYSLAGRNVDREDELDSLNEKLKIEHAKKKRLFDLYINGSYEVSELDSMMNDIDAQINYYESQIEANEELKKNKKIQDNLAELATVDFDSLEFREKQRYLKSLINKIYIDGEQVTIEWL

SEQ ID NO: 1524 - protein, 469 aa, synthetic construct
MSYTTPVRAAVYLRISEDRSGEQLGVARQREDCLKLCDQRKWVPVEYLDNDVSASTGKRRPAYEQMLADITAGKIAAVVAWDLDRLHRRPIELEAFMSLADGKRLALATVAGDVDLATPQGRLVARLKGSVAAHETEHKKARQRRAARQKAERGHPNWSKAFGYLPGPNGPEPDPRTAPLVKQAYADILAGASLGDVCRRWNGAGALTITGRPWTTTTLSKFLRKPRNAGLRTYKGARYGPVDRDAIVGKAQWSPLVDEATFWAAQAVLDAPGRAPGRKSVRRHLLTGLAGCGKCGNHLAGNYRTDGQVVYVCKACHGVSILADNIEPILYHIVAERLAMPDAVDLLHREIRDAAEAETIRLELETLYGELDRLAVERAEGLLTARQVKISTDIVNAKITELRARRLDQERQRVFDGIPLGTPQVAGVIAELSPGRFRAVLDVLAEVVVRPVGKSGRVFNPERVQVNWR

SEQ ID NO: 1525 - protein, 485 aa, synthetic construct
MTKKVAIYTRVSTTNQAEEGFSIDEQIDRLTKYAEAMGWQVSDTYTDAGSSGAKLERPAMQRLINDIENKAFDTVLVYKLDRLSRSVRDTLYLVKDVFTKNKIDFISLSESIDTSSAMGSLFLTILSAINEFERENIKERMTMGKLGRAKSGKSMMWTKTAFGYYHNRKTGILEIVPLQATIVEQIFADYLSGISLTKLRDKLNESGHIGKDIPWSYRTLRQTLDNPVYCGYIKFKDSLFEGMHKPIIPYETYLKVQKELEERQQQTYERNNNPRPFQAKYMLSGVARCGYCGAPLRIVLGHKRKDGSRTMKYHCANRFPRKTKGITVYNDNKKCDSGTYDLSNLENTVIDNLIGFQENNDSLLKIINGNNQPILDTSSFKKQISQIDKKIQKNSDLYLNGFITMDELKDRTDSLQAEKKLLKAKISENKFNDSTDVFELVKTQLGSIPINELSYDNKKKIVNNLVSKVDVTADNVDIIFKFQLA

SEQ ID NO: 1526 - protein, 485 aa, synthetic construct
MTKKVAIYTRVSTTNQAEDGFSIDEQIDRLTKYAEAMGWQVSDTYTDAGFSGAKLERPAMQRLINDIENKAFDTVLVYKLDRLSRSVRDTLYLVKDVFTKNRIDFISLNESINTSSAMGSLFLTILSAINEFERENIKERMTMGKLGRAKSGKSMMWTKTAFGYYHNRKTGILEIVPLQATIVEQIFTDYLSGISLTKLRDKLNESGHIGKDIPWSYRTLRQTLDNPVYCGYIKFKDSLFEGMHKPIIPYETYLKVQKELEKRQQQTYERNNNPRPFQAKYMLSGIDTMSRGGAPLRIVLGHKRKDGSRTTKYHCANRFPRKAKGITVYNDNRKCDSGAYDLSNLENTVIDNLIGFQENNDSLLKIINGNNQPILDTSSFEKQISQIDKEIQKNYDLYLNDFITMDELKDRTDSLQAEKKLLKAKISENKFNDSTDAFELVKAQLGSIPINKLSYDDKKKIVNNLVSKVDVTADNVDIIFKFQLA

SEQ ID NO: 1527 - protein, 485 aa, synthetic construct
MTKKVAIYTRVSTTNQAEEGFSIDEQIDRLTKYAEAMGWQVSDTYTDAGFSGAKLERPAMQRLINDIENKAFDTVLVYKLDRLSRSVRDTLYLVKDVFTKNRIDFISLNESIDTSSAMGSLFLTILSAINEFERENIKERMTMGKLGRAKSGKSMMWTKTAFGYYHNRKTGILEIVPPQATIVEQIFTDYLSGISLTKLRDKLNESGHIGKDIPWSYRALRQTLDNPVYCGYIKFRGSLFEGMHKPIIPYETYLKVQKELEERQQQTYERNNNPRPFQAKYMLSGMARCGYCGAPLRIVLGRKRKDGSRTMRYHCANRFPRKTKGVTVYNDNKKCDSGTYDLSNLENTVIDNLIGFQENNDSLLKIINGNNQPILDTSSLKEQISQIDKKIQKNSDLYLNDFITMDELRDRTDSLQAEKKLLKAEISENKFNDSTDVFELVKTQLGSIPINELSYDNKKKIVNNLVSKVDVTADSVDIIFKFQLA

SEQ ID NO: 1528 - protein, 452 aa, synthetic construct
MKAAIYIRVSTREQVENYSIQAQTERLTALCRSKDWDVYDIFIDGGYSGSNMNRPALSEMLSKLHEIDAVVVYRLDRLSRSQRDTITLIEEYFLKNNVEFVSLSETLDTSSPFGRAMIGILSVFAQLERETIRDRMVMGKIKRIEAGLPLTTAKGRTFGYDVIDTKLYINEEEARQLQLIYDIFEEEQSITFLQKRLKKLGFKVRTYNRYNNWLTNDLYCGYVSYKDKVHVKGIHEPIISEEQFNRVQEIFARMGKNPNMNRDSASLLNNLVVCSKCGLGFVHRRKDAMSRDKKYHYRYYSCKTYKHIHELEKCGNKIWRADRLEELIINRVNNYSLAGRNVDKEDELDSLNEKLKIEHAKKKRLFDLYVNGSYKVSELDGMMNDIDAQINYYESQIEANEELKKNKKIQENLAHLAAVDFDSLEFREKQLYLKSLINKIYIDGEQVTIEWL

SEQ ID NO: 1529 - protein, 485 aa, synthetic construct
MTKKVAIYTRVSTTNQAEEGFSIDEQIDRLTKYAEAMGWQVSDTYTDAGFSGAKLERPAMQRLINDIENKAFDTVLVYKLDRLSRSVRDTLYLVKDVFTKNKIDFISLNESIDTSSAMGSLFLTILSAINEFERENIKERMTMGKLGRAKSGKSMMWTKTAFGYYHNRKTGILEIVPLQATIVEQIFTDYLSGISLTKLRDKLNESGHIGKDIPWSYRTLRQTLDNPVYCGYIKFKGSLFEGMHKPIIPYETYLKVQKELEERQQQTYERNNNPRPFQAKYMLSGVARCGYCGAPLRIVLGHKRKDGSRTMKYHCVNRFPRKAKGVTVNNDNRKCDSGAYDLSNLESTVIDNLIGLQENNDSLLKIINGNNQPILDTSSLEKQISQIDKKIQKNSDLYLNDFIAMDELKDRTDSLQAERKLLRAKISENKFNDSTDVFELVRTQLGSTPINELSYDNKKKIVNNLVSKVDVTADNVDIIFKFQLA

SEQ ID NO: 1530 - protein, 485 aa, synthetic construct
MTKKVAIYTRVSTTNQAEEGFSIDEQTDRLTKYAEAMGWQVSDTYTDAGFSGAKLERPAMQRLINDIENKAFDTVLVYRLDRLSRSVRDTLYLVKDVFTKNKIDFISLNESIDTSSAMGSLFLTILSAINEFERENIKERMTMGKLGRAKSGKSMMWTKTAFGYYHNRETGILEIVPLQATIVEQIFTDYLSGISLTKLRDKLNESGHIGKDIPWSYRTLRQTLDNPVYCGYIKFKDSLFEGMHKPIIPYETFLKVQKELEERQRQTYERNNNPRPFQAKYMLSGMARCGYCGAPLRIVLGHKRKDGSRTMKYHCTNRFPRKTKGITVYNDNKKCDSGTYDLSNLENTVIGSLIGFQENNDSLLKIINGNNQPIQDTSSLKKQISQIDEKIQKNSDLYLNDFITMDELKERTDSLQAEKKLLKAKISENKFNDSTDVFELVKTQLGSIPINELSYDDKKKIVNNLVSKVDVTADNVDIIFKFQLA

SEQ ID NO: 1531 - protein, 469 aa, synthetic construct
MSYTTPVRAAVYLRISEDRSGEQLGVARQREDCLKLCDQRKWVPVEYLDNDVSASTGKRRPAYEQMLADITAGKIAAVVAWDLDRLHRRPIELEAFMSLADERRLALATVAGDVDLATPQGRLVARLKGSVAAHETEHKKARQRRAARQKAERGYPNWSKAFGYLPGPNGPEPDPRTAPLVKQAYADILAGASLGDVCRQWNDAGAFTITGRPWITTTLSKFLRKPRNAGLRAYKGARYGPVDRDAIVGKAQWSPLVDEATFWAAQAVLDAPGRAPGRKSVRRHLLTGLAGCGKCGNHLAGSYRTDGRVVYVCKACHGVAILADNIEPILYHIVAERLAMPDAVDLLRREIRDAAEAETIRLELETLYGELDRLAVERAEGLLTARQVKISTDIVNAKITKLQARQLDQERLRVLDGIPLGTPQVAGMIAELSPDRFRAVLDVLAEVVVQPVGKSGRSFNPERVQVSWR

SEQ ID NO: 1532 - protein, 469 aa, synthetic construct
MSYTTPVRAAVYLRISEDRSGEQLGVARQREDCLKLCDQRKWVPVEYLDNDVSASTGKRRPAYEQMLADIAAGKIAAVVAWDLDRLHRRPIELEAFMSLADEKRLALATVAGDVDLATPQGRLVARLKASVAAHETEHKKARQRRAARQKAERGHPNWSKAFGYLPGPDGPEPDPRTAPLVKQAYADILAGASLGDVCRQWNDAGAFTTTGRPWTTTTLSKFLRKPRNAGLRAYKGARYGPVDRDAIVGKAQWSPLVDEATFWAAQAVLDAPGRAPGRKSVRRHLLTGLASCGKCGNRLAGSYRTDGRIVYVCKACHGVSILAVNIVPILYHIVAERLAMPDAVDLLRRETHDAAEAETICLELETLCGELDRLAVERAEGLLTARQVKISTDIVNAKITKLRARQLNQERLRVFDGIPLGTPQVAGMVAELSPDRFRAVLDVLAEVVVQPVGKSGRIFNPERVQVNWR

SEQ ID NO: 1533 - protein, 485 aa, synthetic construct
MTKKVAIYTRVSTTNQAEEGFSIDEQTDRLTKYAEAMGWQVSDTYTDAGFSGAKLVRPAMQRLINDIENKAFDTVLVYKLDRLSRSVRDTLYLVKDVFTKNKIDFISLNESIDTSSAMGSLFLTILSAINEFERENIKERMTMGKLGRAKSGKSMMWTKTAFGYYHNRKTGILEIVPLQAAIVEQIFTDYLSGISLTKLRDKLNESGHIGKDIPWSYRTLRQTLDNPVYCGYIKFKDSLFEGMHKPIIPYETYLRVQKELEERQQQTYERNNNPRPFQAKYMLSGMARCGYCGAPLKIVLGHKRKDGSRTMKYHCANRFPRKTKGVTVYNDNKKCDSGTYDLSNLENTVIDNLIGFQENNDSLLKIINGDNQPILDTSSLKKQISQIDKKIQKNSDLYLNDFITMDELKGRTDSLQAEKKLLKAKISEDKFNDSTDVFELVKAQLGSIPINELSYDNKKRIVNNLVSKVDVTADNVDIIFKFQLT

SEQ ID NO: 1534 - protein, 452 aa, synthetic construct
MKAAIYIRVSTQEQVGNYSIQAQTEKLTALCRSKDWDVYDIFIDGGYSGSNMNRPALNEMLSKLHEIDAVVVYRLDRLSRSQRDTTTLIEEYFLKNNVEFVSLSETLDTSSPFGRAMIGILSVFAQLERETIRDRMVMGKIKRIEAGLPLTTAKGRTFGYDVIDTKLYINEEEAKQLQLIYDIFEEVQSITLLQKRLKKLGFKVRTYNRYNNWLTNDLYCGYVSYKDKVHVKGIHEPIISEEQFYRVQEIFTRMGKNPNMNRDSASLLSNLVVCSKCGLGFVHRSKDTMSRGKKYHYRYYSCKTYKHTHELEKCGNKTWRADKLEELIINRVNNYSFASRNVGKEDELDSLNEKLKIEHAKKKRLFDLYINGSYEVSELDSMMNDIDAQINYYESQIEANEELRRNKKIQESLAGLATLDFDSLEFREKQLYLKSLINRIYIDGEQVTIEWL

SEQ ID NO: 1535 - protein, 452 aa, synthetic construct
MKAAIYIRVSTQEQVENYSIQAQTEKLTALCRSKDWDVYDIFIDGGYSGSNMNRPALNEMLSKLHEIDAVVVYRLDRLSRSQRDTTTLIEEYFLKNNVEFVSLSETLDTSSPFGRAMIGILSVFAQLERETIRDRMVMGKIKRIEAGLPLTTAKGRTFGYDVIDTKLYINEEEAKQLRLIYDIFEEEQSITFLQKRLKKLGFKVRTYNRYNSWLTNDLYCGYVSYKDKVHVKGIHEPIISEEQFYRVQEIFTRMGKNPNMNRDSASLLSNLVVCSKCGLGFVHRSKDTMSRGKKYHYRYYSCKTYKHTHELEKCGNKTWRADKLEELIINRVNKYSFASRNVDKEDELDSLNEKLKIEHAKKKRLFDLYVNGSYGVSELDSMMNDIDAQINYYESQIEANEELKKSKKIQENLADLATVDFDSLEFREKQLYLKSLINKIYIDGEQVTIEWL

SEQ ID NO: 1536 - protein, 469 aa, synthetic construct
MSYTTPVRAAVYLRISEDRSGEQLGVARQREDCLKLCDQRKWVPVEYLDNDVSASTGKRRPAYERMLADITAGKIAAVVAWDLDRLHRRPIELEAFMCLADEKRLALATVAGDVDLATPQGRLVARLKGSVAAHETEHKKARQRRAARQKAERGYPNWSKAFGYLPGPNGPEPDPRTAPLVKQAYADILAGASLGDVCRQWNDAGAFTITGRPWTTTTLSKFLRKPRNAGLRAYKGARYGPVDRDAIVGKARWSPLVDEATFWAAQAVLDAPGRAPGRKSVRRHLLTGLAGCGKCGNHLAGSYRTDGKVVYVCKACHGVAILADNIEPILYHVVAERLARPDAVDLLRREIHDAAEAETVRLELETLYGELDRLAVERAEGLLTARQVKISTDIVNAKITKLQAHQLDQERLRVFDGIPLGTPQVAGKIAELSPDRFRAVLDVLAEVVVQPVGKSGRISSPERVQVNWR

SEQ ID NO: 1537 - protein, 452 aa, synthetic construct
MKAAIYIRVSTQEQVGNYSIQAQTEKLTALCRSKDWDVYDIFVDGGYSGSNMNRPALNEMLSKLHEIDAVVVYRLDRLSRSQRDTTTLIEEYFLKNNVEFVSLSETLDTSSPFGRAMIGILSVFAQLERETIRDRMVMGKIKRIEAGLPLTTAKGRTFGYDVVDTKLYINEEEAKQLRLIYDIFEEEQSITFLQKRLKKLGFKVRTYNRYNNWLTNDLYCGYVSYKDKVHVKGIHEPIISEEQFYRVQEIFTRMGKNPNMNRDSASLLSNLVVCSKCGLGFVHRSKDTMSRGKKYHYRYYSCKTYKHTHELEKCGNKTWRADKLEELIINRVNNYSFASRNGDEEDELDSPNEKLRIEHAKKKRLFDLYINGSYEVSELDSMMSDIDAQINHYESQIEANEKLKKNKKIQENLADLATMDFDSLEFREKQLYLKSLINKIYIDGEQVTIEWL

SEQ ID NO: 1538 - protein, 485 aa, synthetic construct
MTRKVAIYTRVSTTNQAEEGFSIDEQIDRLTKYAEAMGWQVSDTYTDAGLSGAKLERPAMQRLINDIENKAFDTVLVYKLDRLSRSVRDTLYLVKDVFTKNKIDFISLNENIDTSSAMGSLFLTILSAINEFERENIKERMTMGKLGRAKSGKSMMWTKTAFGYYHNRKTGILEVVPLQATIVEQIFTDYLSGISLTKLRDKLNESGHIGKDIPWSYRTLRQTLDNPVYCGYIKFKDSLFEGMHKPIIPYETYLKVQKELEERQQQTYERNNNPRPFQAKYMLSGMARCGYCGAPLKIVLGHKRKDGSRTMKYHCANRFPRKTKGVTVYNDNKKCDSGTYDLSNLENTVIDNLIGFQENNDSLLKIINGNNQPTLDTSSLKKQISQIDKKIQKNSDLYLNDFITMDELKDRTDSLQAEKKLLKAKISENEFNDSTDVFELVKTQLGSIPINELSYDNKKKIVNNLVSKVDVTADNVDIIFKFQLA

SEQ ID NO: 1539 - protein, 469 aa, synthetic construct
MSYTTPVRAAVYLRISEDRSGEQLGVARQREDCLKLCDQRKWVPVEYLDNDVSASAGKRRPAYEQMLADITAGKIAAVVAWDLDRLHRRPIELEAFMSLADEKRLALATVAGDVDLATPQGRLVARLKGSVAAHETEHKKARQRRAARQKAERGHPNWSKAFGYLPGPNGPEPDPRTAPLVKQAYADILAGASLGDVCRQWNDAGAFTITGRPWTTTTLSKFLRKPRNAGLRAYKGARYGPVDRDAIVGKAQWSPLVDEATFWAAQAVLDAPGRAPGRKSVRRHLLTGLAGCGKCGNHLAGSYRTDGRVVYVCKACHGIAILADNIEPILYHIVAERLAMPDAVDLLCREIHDAAEAETIRLELETLYGELDCLAVERAEGLLTARQVKISTDIVNAKIAKLQARQLDQERLRVFDGVPLGTPQVAGVIAELSPDRFRAVLDVLAEVVVQPVGKSGRIFNPERVQVNWR

SEQ ID NO: 1540 - protein, 469 aa, synthetic construct
MSYTTPVRAAVYLRISEDRSGEQLGAARQREDCLKLCDQRKWVPVEYLDNDVSASTGKRRPAYEQMLADITAGKITAVVAWDLDRLHRRPIELEAFMSLADEKRLALATVAGDVDLATPQGRLVARLKGSVAAHETEHKKARQRRAARQKAERGYPNWSKAFGYLPGPNGPEPDPRTAPLVKQAYADILAGASLGDVCRQWNDAGAFTITGRPWATTTLSKFLRKPRNAGLRAYKGARYGPVDRDAIVGKARWGPLVDEATFWAVQAVLDAPGRAPGRRSVRRHLLTGLAGCGKCGNHLAGSYRTDGRVVYVCKACHGVAILADNIEPILYRIVAERLAMPDAVDLLRREIHDAAEAETIRLELETLYGELDRLAVERAEGLLTARQVKISTDIVNAKITKLRVRQLDQERLRVLDSIPLGTPQVAGMIAELSPDRFRAVLDVLAEVVVQPVGKSGRIFNPERVQVNWR

SEQ ID NO: 1541 - protein, 485 aa, synthetic construct
MTKKVAIYTRVSTTNQAEEGFSIDEQVDRLTKYAEAMGWQVSDTYTDAGLSGAKLDRPAMRRLINDIENKAFDTVLVYKLDRLSRSVRDTLYLVKDVFTKNKIDFISLNESIDTSSAMGSLFLTILSAINEFERENIKERMTMGKLGRAKSGKSMMWAKTAFGYYHNRQTGILEIVPLQATIVEQIFTDYLSGISLTKLRDKLNESGHIGKDIPWSYRTLRQTLDNPVYCGYIKFKDSLFEGMHRPIIPYETYLKVQKELEERQQQTYERNNNPRPFQAKYMLSGMARCGYCGAPLRIVLGHKRKDGSRTMRYHCANRFPRKTRGVTVYNDNKKCDSGTYDLSNLENTVINHLIGFQENNDSLLKIINGNNQPILDTSSFKKQISQVDKKIQKNSDLYLNDLITMDELKDRTDSLQAEKRLLEAKISENKFNDSTDVFELVKTQLGSIPINELSYDNKKRIVNNLVSKVDVTADNVDIIFKFQLA

SEQ ID NO: 1542 - protein, 469 aa, synthetic construct
MSYTTPVRAAVYLRISEDRSGEQLGVARQREDCLKLCDQRKWVPVEYLDNDVSASTGKRRPAYEQMLADITAGKIAAVVAWDLDRLHRRPIELEAFMSLADEKRLALATVAGDVDLSTPQGRLVARLKGCVAAHETEHKKARQRRAARQKAERGYPNWSKAFGYLPGPNGPEPDPRTAPLVKQAYADILAGASLGDVCRQWNGAGAFTITGRPWTTTALSKFLRKPRNAGLRAYKGARYGPVDRDAIVGKAQWSPLVDEATFWAAQAVLDAPGRAPGRKSVRRHLLTGLAGCGKCGHHLAGSYRTDGRVVYVCKACHGVAILAENIEPILYHVVAERLAMPDAVDLLRREIHDTAEAETIRLELDTLYGELDRLAVERAEGLLTARQVKISTDIVNAKIAKLQARQLDQERLRVFDGIPLGTPQVAGMIAELSPDRFRAVLDALAVVVVQPVGKSGRTFNPERVQVNWR

SEQ ID NO: 1543 - protein, 485 aa, synthetic construct
MTKKVAIYTRVSTTNQAEEGFSIDEQIDRLTKYAEAMGWQVSDTYTDAGFSGAKLERPAMQRLINGIENKAFDTVLVYKLDRLSRSVRDTLYLVKDVFTKNKIDFISLNESIDTSSAMGSLFLTILSAINEFERENIKERMTMGKLGRAKSGKSMMWTKTAFGYYHNRKTGILEIVPLQATIVEQIFTDYLSGISLTKLRDKLNESGHIGKDIPWSYRTLRQTLDNPVYCGYIKFKGSLFEGMHKPIIPYETYLKVQKELEERQQQTYERNNNPRPFQAKYMLSGMARCGYCGAPLKIVLGHKRKDGSRTMKYHCANRFPRKTKDVTVYNDNKKCDSGTYDLSNLENTVIDNLIGLQENNDSLLKIINGNNQPTLDTSSFRKQISQVDKKIQKNSDLYLNDFITMDELKERTDSLQAEKKLLKAKISENKFNDSTDVFELVKTQLGSIPINELSYDNKKKIVSNLVSKVDVTADNVDIIFKFQLA

SEQ ID NO: 1544 - protein, 485 aa, synthetic construct
MTKKVAIYTRVSTTNQAEEGFSIDEQIDRLTKYAEAMGWQVSDTYTDAGFSGAKLERPAMQRLINDIENKAFDTVLVYKLDRLSRSVRDTLHLVKDVFTKNKIDFISLNESIDTSSAMGSLFLTILSAINEFERENIKERMTMGKLGRAKSGKSMMWTKTAFGYYHNRETGILEIVPLQATIVEQIFTDYLSGISLTKLRDKLNESGHIGKDIPWSYRTLRQTLDNPVYCGYIKFKDNLFEGMHKPIIPYETYLKVQKELEERQQQTYERNNNPRPFQAKYMLSGMARCGYCGAPLKIVLGHKRKDGSRTMKYHCANRFPRKTKGVTVYNDNKKCDSGTYDLSNLENTVIDSLAGFQENNDSLLKIINGNNQPVPDTSSIKKQISQIDKKIQKNSDLYLNDLITMDELRDRTDSLQAEKKLLKAKISENKFNDSTDVFELVKTQLGSIPINELSYDNKKKIVNNLVSKVDVTADSVDIIFKFQLA

SEQ ID NO: 1545 - protein, 469 aa, synthetic construct
MSYTTPVRAAVYLRISEDRSGEQLGVARQREDCLKLCGQRNWVPVEYLDNDVSASTGKRRPAYEQMLADITAGKIAAVVAWDLDRLHRRPIELEAFMSLADEKRLALATVAGDVDLATPQGRLVARLKGSVAAHETEHKKARQRRAARQKAERGLPNWSKAFGYLPGPNGPEPDPRTAPLVKQAYANILAGASLGDVCRQWNGAGAFTITGRPWTTTTLSKFLRKPRNAGLRAYKGARYGPVDRDAIVGKAQWSPLVDEATFWAAQAVLDAPGRAPGRKSVRRHLLTGLAGCGKCGNHLAGSYRTDGQVAYVCKVCHGVSILAVNIEPILYHIVAERLAMPDAVGLLRRESHDAAEAETIRLELETLYGELDRLAVERAEGLLTARQVKISTDIVNAKITKLQARQLDQERLRVFDGIPLGTPQVAGVIAELSPDRFRAVLDVLAGVVVQSVGKRGRIFNPERVQVNWR

SEQ ID NO: 1546 - protein, 469 aa, synthetic construct
MCYTTPVRAAVYLRISEDRSGEQLGVARQREDCLKLCDQRKWVPVEYLDNDVSASTGKRRPAYEQMLADITAGKIAAVVAWDLDRLHRRPIELEAFMSLADEKRLALATVAGDVDLATPQGRLVARLKGSVAAHETEHKKARQRRAARQKAERGHPNWSKAFGYLPGPNGPEPDPRTAPLVKQAYADILAGASLGDVCRQWNDAGAFTITGRPWTTTTLSKFLRKPRNAGLRAYKGARYGPVDRDAIVGKAQWSPLVDEATFWAAQAVLDAPGRAPGRKSVRRHLLTGLAGCGKCGNHLAGSYRTDGRVVYVCKACHGVAILADNIEPILYHIVAERLAMPDAVDLLRREIHDAAEAETIRLELETLYGELDRLAVERAEGLLTARQVKISTDIVNAKITKLQARQLDQERLHVFDGIPLGTPQVAGVIAELSPNRFRAVLDVLAEVVVQPVGKSGRIFNPERVQVNWR

SEQ ID NO: 1547 - protein, 485 aa, synthetic construct
MTKKVAIYTRVSTTNQAEEGFSIDEQIDRLTKYAEAMGWQVSDTYTDAGFSGAKLERPAMQRLINDIANKAFDTVLVYKLDRLSRSVRDTLYLVKDVFTKNKIDFISLNESIDTSSAMGSLFLTILSAINEFERENIKERMTMGKLGRAKSGKSMMWTKTAFGYYHNRKTGILEIVPLQATIVEQIFTDYLSGISLTKLRDKLNESGHIGKDIPWSYRTLRQTLDNPVYCGYIKFKDSLFEGMHKPIIPYETYLKVQKELEERQQQTYERNNNPRPFQAKYMLSGMARCGHCGAPLKIVLGHKRKDGSRTMKYHCANRFPRKTKGVTVYNDNKKCDSGTYDLSNLENTVIDNLIGFQENNDSLLKIINGNNQPILDTSSFKEQISQIDKKIQKNSDLYLNDFITMDELKDRTDSLQAEKKLLKAKISENKFNDSTVVFELVKTQLGSIPINELSYDNKKKIVNNLVSKVDVTADNVDIIFKFQLA

SEQ ID NO: 1548 - protein, 469 aa, synthetic construct
MSYTTPVRAAVYLRISEDRSGEQLGVARQREDCLELCGQRKWVPVEYLDNDVSASTGKRRPAYEQMLADITAGKIAAVVAWDLDRLHRRPIELEAFMSLADEKRLALATVAGDVDLATPQGRLVARLKGSVAAHETEHKKARQRRAARQKAERGHPNWSKAFGYLPGPNGPEPDPRTAPLVKQAYADILAGASLGDVCRQWNDAGAFTITGRPWTTTTLSKFLRKPRNAGLRTYKGARYGPVDRDSIVGKAQWSPLVDEATFWAAQAVLDAPGRAPGRKSVRRHLLTGLAGCGKCGNRLAGSYRTDGRVVYVCKACHGVAVLADNIEPILYHVVAERLAMPNAVDLLRREIQDAAEAETIRLELETLYGELDRLAVERAEGLLTARQVKICTDIVNAKITRLQARQLDQERLRVLDGIPLGTPQVAGMVAELSPDRFRAVLDVLAEVVVQPVGKSGRTFNPERVQVNWR

SEQ ID NO: 1549 - protein, 469 aa, synthetic construct
MSYTTPVRAAVYLRISEDRSGEQLGVARQREDCLKLCGQRKWVPVEYLDNDVSASTGKRRPAYEQMLADITAGKIAAVVAWDLDRLHRRPIELEAFMSLADEKRLALATVAGDVDLATPQGRLVARLKGSVAAHETEHKKARQRRAARQKAERGLPNWSKAFGYLPGPNGPEPDPRAAPLVKQAYADILAGASLGDVCRQWNDAGAFTITGRPWTTTTLSKFLRKPRNAGLRAYKGARYGPVDRDAIVGKAQWSPLVDEATFWAAQAVLDAPGRAPGRKSVRRHLLTGLAGCGKCGNHLAGSYRTDGRVAYVCKTCHGVAILADNIEPILYHIVAERLAMPDAVDLLRREIYDAAEAETIRLELEALYGELDRLAVERAEGLLTARQVKISTDIVNARITKLQACQLDQERLRVFDGIPLGTPQVAGMIAELSPDRFRAVLDVLAEVVVRPVGKSGRIFNPERVQVNWR

SEQ ID NO: 1550 - protein, 485 aa, synthetic construct
MTKKVAIYTRVSTTNQAEEGFSIDEQVDRLTKYAEAMGWRVSDTYTDAGFSGAKLERPAMQRLINDIENKAFDTVLVYKLDRLSRSVRDTLYLVKDVFTKNKIDFISLSESINTSSAMGSLFLTILSAINEFERENIKERMTMGKLGRAKSGKSMMWTKTAFGYYHNRETGILEIVPLQATIVEQIFTDYLSGISLTKLRDKLNESGHIGKDIPWSYRTLRQTLDNPVYCGYIKFKDCLFEGMHKPIIPYETYLKVQKELGERQQQTYERNNNPRPFQAKYMLSGVARCGYCGAPLKIVLGHKRKDGSRTMKYHCANRFPRKTKGVTVYNDNKKCDSGTYDLNNLENTVIGILIGFQENNDSLLKIINGNNQPTLDTSSFKKQISQIDKKIQKNSDLYLNDLITMDELKDRTNSLQAERKLLKAKISENKLNDGTDVFELVKTQLGSIPINELSYDNKKKIVNNLVSKVDVTADNVDIIFKFQLA

SEQ ID NO: 1551 - protein, 452 aa, synthetic construct
MKAAIYIRVSTQEQVGNYSIQAQTEKLTALCRSKDWDVYDIFIDGGYSGSNMNRPALNEMLSKLHEIDAVVVYRLDRLSRSQRDTTTLIEEYFLKNNVEFVSLSETLDTSSPFGRAMIGILSVFAQLERETIRDRMVMGKIKRIEAGLPLTTAKGRTFGYDVIDTKLYINEEEAKQLQLIYDIFEEEQSITSLQKRLKELGFKVRSYNRYNNWLTNDLYCGYVSYKDKVHVKGIHEPIISEEQFYRVQEIFTRMGKNPNMNRDSASLLSNLVVCSKCGLGFVHRSKDTMSRGKKYHYRYYSCKTYKHTHELEKCGNKTWRADKLEELIVNRVSNYSFASRNVDKEDELDSLNEKLKVEHAKKKRLFDLYINGGYEVSELDSMMNDIDAQINYYESQIEANEELKRDKKIQENLAELATVDFDSLEFREKQLYLKSLINKIYIDGEQVTIEWL

SEQ ID NO: 1552 - protein, 452 aa, synthetic construct
MKAAIYIRVSTREQVENYSIQAQTEKLAALCRSKDWDVYDIFVDGGYSGSNMNRPALNEMLSKLHEIDAVVVYRLDRLSRSQRDTITLIEEYFLKNNVEFVSLSETLDTSSPFGRAMIGILSVFAQLERETIRDRMVMGKIKRIEAGLPLTTAKGRTFGYDVIDTKLYINEEEARQLRLIYDIFEEEQSITFLQKRLKKLGYKVRTYNRYNNWLTNDLYCGYVSYKDKVHVKGIHEPIISEEQFYRVQEIFTRMGKNPNMNRDSASLLNNLVVCGKCGLGFVHRRKDAMSRSKKYHYRYYSCKTYKHIHELEKCGNKIWRADKLEELIINRVNNYSSAGRNADKEDELDSLNEKLKIEHAKKKRLFELYINGSYEVSELDSMMNDIDAQINYYESQIEANEELKKNQKIQENLAGLATVDFDSLEFREKQLYLKSLINKIYIDDEQVTIEWL

SEQ ID NO: 1553 - protein, 452 aa, synthetic construct
MKAAIYIRVSTREQVENYSIQAQTEKLTALCRSKDWDVYDIFIDGGYSGSSMNRPALNEMLSKLHEIDAVVVYRLDRLSRSQRDTITLIEEYFLKNNVEFVSLSETLDTSSPFGRAMIGILSVFAQLERETIRDRMVMGKIKRIEAGLPLTTAKGRTFGYDVIDTKLYINEEEAKQLQLIYDIFEEERSITSLQKRLKKLGFKVRTYSCYNNWLTNDLYCGYVSYKDKVHVKGIHEPIISEEQFYRVQEIFTRMGKNPNMNRGSASLLNNLVVCSKCGLGFVHRRKDIVSRGKKYHYRYYSCKTYKHIHELEKCGNKIWRADKLEELIIDRVNNYSFASRNADKEDELDSLNEKLKIEHAKKKRLFDLYVNGSYEVSELDSMMNDIDAQINYYESQIEANEELRKNKKIQENLANLATVDFDSLEFREKQRYLKGLINRIYIDGEQVTIEWL

SEQ ID NO: 1554 - protein, 452 aa, synthetic construct
MKAAIYIRVSTREQVENYSIQAQTEKLTALCRSKDWDVYDIFIDGGYSGSNMNRPALNEMLSKLHEIDAVVVYRLDRLSRSQRDTITLIEEYFLKNDVEFVSLSETLDTSSPFGRAMIGILSVFAQLERETIRDRMVMGKIKRIEAGLPLTTAKGRTFGYDVIDTKLYINEEEAKQLQLIYDIFEEEQSITFLQKRLKKLGFKVRTYSRYNNWLTNDLYCGYVSYKDKVHVKGIHEPIISEEQFYRVQEIFTRMGKNPNMNRDSASLLNNLVVCSKCGLGFVHRRKDTMSRGKKYHYRYYSCKTYKHIHELEKCGNKIWRADKLEELIINRVNSYSLASRNVDKGDELDSLSEKLKIEHVKKKRLFDLYINGSYEVSELDSIMSDIEAQINYYESQIEANVELKKSKKIQENLAYLATVDYDSLEFREKQLYLKSLINKIYIDGEQVTIEWL

SEQ ID NO: 1555 - protein, 485 aa, synthetic construct
MTKKVAIYTRVSTTNQAEEGFSIDEQIDRLTKYAEAMGWQVSDTYTDAGSSGAKLERPAMRRLINDIESKAFDTVLVYKLDRLSRSVRDTLYLVKDVFTKNKIDFISLNESIDTSSAMGSLFLTILSAINEFERENIKERMTMGKLGRAKSGKSMMWTKTAFGYYHNRETGILEIVPLQATIVEQIFTDYLSGISLTKLRDKLNESGHIGKDIPWSYRTLRQTLDNPVYCGYIKFKGSLFEGMHKPIIPYETYLKVQKELGERQQQTYERNNNPRPFQAKYMLSGMARCGYCGAPLRIVLGHKRKDGSRTMKYHCANRFPRKTKGVTVYNDNKKCDSGTYDLSNLESTVIDNLIGFQENNDSLLKIINGNNQPVLDTSSFKKQISQIDKKIQKNSDLYLNDLITMDELKDRTDSLQAEKELLKAKISENKFSDSTDVFELVKTQLGSIPINELSYDDKKKIVNNLVSKVDVTADNVDIIFRFQLA

SEQ ID NO: 1556 - protein, 469 aa, synthetic construct
MSYTTPVRAAVYLRISEDRSGEQLGVARQREDCLKLCGQHKWVPVEYLDNDVSASTGKRRPAYEQMLADITAGKIAAVVAWDLDRLHRRPVELEAFMSLADEKRLALATVAGDVDLATPQGRLVARLKGCVAAHETEHKKARQRRAARQKAERGHPNWSKAFGYLPGPNGPEPDPRTAPLVKQAYADILAGASLGDVCRQWNDAGAFTITGRPWTSTTLSKFLRKPRNAGLRAYKGARYGPVDRDAIVGKAQWSPLVDEATFWAAQAVLDAPGRAPGRKSVRRHLLTGLAGCGKCGNHLAGSYRTDGQVVYVCKACHGVSILAVNIEPILYHVVAERLAMPDAVDLLRREIHDAAEAETIRLELETLYGELDRLAVERAEGLLTARQVKISTDIVNAKITKLQARQLDQERLRVLDGIPLGTPQVAGMIAELSPDRFRAVLDVLAEVVVQPVGKSGRIFNPGRVQVNWR

SEQ ID NO: 1557 - protein, 485 aa, synthetic construct
MTKKVAIYTRVSTTNQAEEGFSTDEQIDRLTKYAEAMGWQVSDTYTDAGFSGAKLERPAMQRLINDIENKAFDTVLVYKLDRLSRSVRDTLYLVKDVFTKNKIDFISLNESIDTSSAMGSLFLTILSAINEFERENIKERMTMGKLGRAKSGKSMMWTKTAFGYYHNRKTGILEIVPLQATIVEQIFTDYLSGISLTKLRDKLNEGGHIGKDIPWSYRTLRQTLDNPVYCGYIKFKGSLFEGVHKPIIPYETYLKVQEELEERQRQTYERNNNPRPFQAKYMLSGMARCGYCGAPLRIVLGRKRKDGSRTMKYHCANRFPRKTKGVTVYNDNKKCDSGAYDLSNLENTVIDNLISFQENNDSLLKIINGNNQPILDTSSFKRQISQIDKKIQKNSDLYLNDFITMDELKERTDSLQAEKKLLKAKISENKFNDCAEVFELVKTQLGSIPINELSYDNKKKIVNNLVSKVDVTADNVDIVFKFQLA

SEQ ID NO: 1558 - protein, 469 aa, synthetic construct
MSYTTPVRAAVYLRISEDRSGEQLGAARQREDCLKLCDQRKWVPVEYLDNDVSASSGKRRPAYEQMLADITAGKIAAVVAWDLDRLHRRPIELEAFMSLADEKRLALATVAGDVDLATPQGRLVARLKGSVAAHETEHKKARQRRAARQKAERGHPNWSKAFGYLPGPNGPEPDPRTAPLVRQAYADILAGASLGDVCRRWNAAGAFTITGRPWTTTTLSKFLRKPRNAGLRAYRGARYGPVDRDAIVGRAQWSPLVDEATFWAAQAVLDAPGRAPGRKSVRRHLLTGLAGCGKCGNHLAGSYRTDGKVVYVCKACHGVAILADNIEPILYHIVAERLAMPNAVDLLCREIHDAAEAETIRLELETLYGELDRLAVERAEGLLTARQVKISTDIVNAKVTELQARQLDQERLRVFGGIPLGTPQVAGMIAELSPDRFRAVLDMLAEVVVRPVGKSGRIFNPERVQVNWR

SEQ ID NO: 1559 - protein, 469 aa, synthetic construct
MSYTTPVRAAVYLRISEDRSGEQLGVARQREDCLKLCGQRKWVPVEYLDNDVSASTGKRRPAYEQMLADITAGKIAAVVAWDLDRLHRRPIELEAFMSLADEKRLALATVAGDVDLATPQGRLVARLKGSVAAHETEHKKARQRRAARQKAERGLPNWSEAFGYLPGPNGPEPDPRTAPLVKQAYADILAGASLGDVCRQWNDAGAFTITGRPWTTTTLSKFLRKPRNAGLRAYKGARYGPVDRDAIVGKAQWSPLVDEATFWAAQAVLDAPGRAPGRKSVRRHLLTGLAGCGKCGNHLAGSHRTDGRVVYVCKACHGVAILADNIEPILYHIVAERLAMPDAVDLLRREIHDAAEAETIRLELETLYGELDRLAVERAEGLLTARQVKICTDIVNAKITKLQARQLDRERLRVLDGIPLGTPQVAGVIAELSPDRFRAVLDVLAEVVVQPVGRSGRIFNPERVQVNWR

SEQ ID NO: 1560 - protein, 452 aa, synthetic construct
MKAAIYIRVSTREQVENYSIQAQTEKLTALCRSKDWDVYDIFIDGGYSGSNMNRPALNEMLSRLREIDAVVVYRLDRLSRSQRDTITLIEEYFLKNNVEFVSLSETLDTSSPFGRAMIGILSVFAQLERETIRDRMVMGKVKRIEAGLPLTTAKGRTFGYDVIDAKLYINEEEAKQLQLIYDIFEEEQSITFLQKRLKELGFKVRTYSRYNNWLTNDLYCGYVSYKDKVHVKGIHEPIISEEQFYRVQEIFTRMGKNPNMNRDSASLLNNLVVCSKCGLGFVHRRKGIMSRGKKYHYRYYSCKTYKHIHELEKCGNKIWRADKLEELIINRVNDYSLASRNVDKEDELDSLNEKLKIEHAKKKRLFDLYINGSYEVSELDSMMNDIDAQINYYESQIEANEELKKNKKIQENLAHLATVDFDSLEFREKQLYLKSLINKIYIDGEQVTIEWL

SEQ ID NO: 1561 - protein, 485 aa, synthetic construct
MTKKVAIYTRVSTTNQAEEGFSIDEQTDRLTKYAEAMGWQVSDTYTDAGFSGAKLERPAMQRLINDIENKAFDTVLVYKLDRLSRSVRDTLYLVKDVFTKNKIDFISLNESIDTSSAMGSLFLTILSAINEFERENIKERMTMGKLGRAKSGKSMMWTKTAFGYYHNRKTGILEIVPLQATIVEQIFTDYLSGVSLTKLRDKLNESGHIGKDIPWSYRTLRQTLDNPVYCGYIKFKDSLFEGMHKPIIPYETYLKVQKELEERQQQTYERNNNPRPFQAKYMLSGMARCGYCGAPLRIVLGHKRKDGSRTMKYHCANRFPRRTKGVTVYNDNKKCDSGTYDLSNLENTVIDNLIGFQENSDSLLKIINGNNQPILDTSSFKKQISQIDKKIQKNSDLYLNDFITMDELKNRTDSLQAEKKLLEAKISENKFNDRTDVLELVKTQLGSIPINELSYVNKKKIVNDLVSKVDVTADNVDIIFKFQLA

SEQ ID NO: 1562 - protein, 485 aa, synthetic construct
MTKKVAIYTRVSTTSQAEEGFSIDEQIDRLTKYAEAMGWQVSDTYTDAGLSGAKLERPAMQRLINDVENRAFDTVLVYKLDRLSRSVRDTLYLVKDVFTKNKIDFISLNESIDTSSAMGSLFLTILSAINEFERENIKERMTMGKLGRAKSGKSMMWTKTAFGYYHNRKTGILEIVPLQATIVEQIFTDYLSGISLTKLRDRLNESGHIGKDIPWSYRTLRQTLDNPVYCGYIKFKDSLFEGMHKPIIPYETYLKVQKELEERQQQTYERNNNPRPFQAKYMLSGMARCGYCGAPLRIVLGHRRKDGGRTMKYHCANRFPRKTKGITVYNDNKKCDSGTYDLSNLENAVIDNLIGFQENNGSLLKIINGNNQPILDISSFKKQISQIDKKIQKYSDLYLNDFITMDELKDRTDSLQAEKKLLKAKISESKLNDSTDVFELVKTQLGSTPINELSYDDKKKIVNNLVSKVDVTADNVDIIFKFQLA

SEQ ID NO: 1563 - protein, 485 aa, synthetic construct
MTKKVAIYTRVSTTNQAEEGFSIDEQIDRLTKYAEAMGWQVSDTYTDAGLSGAKLERPAMQRLINDIENKAFDTVLVYKLDRLSRSVRDTLYLVKDVFTKNKIDFISLSESIDTSSAMGSLFLTILSAINEFERENIKERMTMGKLGRAKSGKSMMWTKTAFGYYHNRKTGILEIVPLQATIVEQIFTDYLSGVSLTKLRDKLNESGHIGKDIPWSYRTLRQTLDNPVYCGYIKFKDSLFEGMHKPIIPHETYLKVQKELEERQQQTYERNNNPRPFQAKYMLSGMARCGYCGAPLRIVLGHKRKDGSRTMKYHCANRFPRKTKGVTVYNDNKKCDSGTYDLSSLENTVIDNLIGFQENNDSLLKIINGNNLPILDTSSLEKQISQIDKKIQKNSDLYLNDFITMDELKDRTDSLQAEKKLLKAKISENKFNDSTDVFELVKTQLGSIPINELSYDNKKKIVNNLVSKVDVTADNVDIIFKFQLA

SEQ ID NO: 1564 - protein, 469 aa, synthetic construct
MSYTTPVRAAVYLRISEDRSGEQLGVARQREDCLKLCDQRKWVPVEYLDNDVSASTGKRRPAYEQMLADITAGKIAAVVAWDLDRLHRRPIELEAFVSLADEKRLALATVAGDVDLATPQGRLVARLKGCVAAHETEHKKARQRRAARQKAERGYPNWSKAFGYLPGPNGPEPDPRTAPLVKQAYADILAGASLGDVCRQWNDAGAFTITGRPWTTTTLSKFLRKPRNAGLRAYKGARYGPVDRDAIVGKAQWSPLVDEATFWAAQAVLDAPGRAPGRKSVRRHLLTGLAGCGKCGNHLAGSYRTDGRVVYVCKTCHGVAILADNIEPILYHIVAERLAMPDAVDLLRREIHDAAEAEAIHLELETLYGELDRLAVERAEGLLTARQVKISTDIVNAKITKLQAHQQDQERLRVLDGIPLGTPQVAGVIAELSPNRFRAVLDVLAEVVVQPVGKSGRIFNPERVQVNWR

SEQ ID NO: 1565 - protein, 452 aa, synthetic construct
MKAAIYIRVSTREQVENYSVQAQTEKLTALCRSKDWDVYDIFIDGGYSGSNMNRPALNEMLSKLHEIDAVVVHRLDRLSRSQRDTITLIEEYFLKNNVEFVSLSETLDTSSPFGRAMIGILSVFAQLERETIRERMVMGKIKRIEAGLPLTTAKGRTFGYDVIDTKLYINEEEAKQLQLIYDIFEEEQSITSLQKRLKKLGYKVRTYNRYNNWLTNDLYCGYVSYKDKVHVKGIHEPIISEEQFHRVQEIFTRMGKNPNMNRDSASLLNNLVVCSKCGLGFVHRRKDTTSRGKKYHYRYYSCKTYKHIHELEKCGNKIWRADKLEELIINRVNNYSLASRNVDKEDELDSLNEKLRIEHAKKKRLFDLYINGSYEVSELDCMMNDIDTQINYYESQIEANEELKKDKKIQESLANLATVDYDSLEFREKQLYLKSLINKIYIDGEQVTIEWL

SEQ ID NO: 1566 - protein, 452 aa, synthetic construct
MKAAIYIRVSTQEQVGNYSIQAQTEKLTALCRSKDWDVYDIFIDGGYSGSNMNRPALNEMLSKLHEIDAVVVYRLDRLSRSQRDTTTLIEEYFLKNNVEFVSLSETLDTSSPFGRAMIGILSVFAQLERETIRDRMVMGKIKRIEAGLPLTTAKGRTFGYDVIDTKLYINEEEAKQLQLIYDIFEEVQSITFLQKRLKELGFKVRTYNRYSNWLTNDLYCGYVSYKDKVHVKGIHEPIISEEQFYRVQEIFTRMGKNPNMSRDSASLLNNLVVCSKCGLGFVHRSKDTMNRGKKYHYRYYSCKTYKHTHELEKCGNKTWRADKLEELIINRVNNYSFVSRNADKEDELDSLNEKLKIEHAKKRRLFDLYIHGSYEVSELDSMMSDIDAQIDYYESQIEANEELKKNKKIQENLADLATVDFDSLEFREKRLYLKSLINKIYIDGEQVTIEWL

SEQ ID NO: 1567 - protein, 469 aa, synthetic construct
MSYTTPVRAAVYLRISEDRSGEQLGVARQREDCLKLCDQRKWVPVEYLDNDVSASTGKRRPAYEQMLADITAGIIAAVVAWDLDRLHRRPIELEAFMSLADEKRLALATVAGDVDLATPQGRLVARLKGCVAAHETEHKKARQRRAARQKAERGHPNWSKAFGYLPGPNGPEPDPRTAPLVKQAYADILAGASLGDVCRQWNGAGAFTITGRPWTTTTLSKFLRKPRNAGLRAYKGARYGPVDRDAIVGKAQWSPLVDEASFWAAQAVLDAPGRAPGRKSVRRHLLTGLAGCGKCGNHLAGSYRTDGRVVYVCKACHGVAILADNIEPILYHIVAERLAMPDAADLLRRDIHDAAEAETIRLELETLYGELDRLAVERAEGLLTARQVKISTDIVNAKITELQARQLDQERLRVFDGIPLGTPQVAGVIAELSPNRFRAVLDVLAEVVVQPVGKSGRIFNPERVQVNWR

SEQ ID NO: 1568 - protein, 485 aa, synthetic construct
MTKKVAIYTRVSTTSQAEEGFSIDEQIDRLTKYAEAMGWQVSDAYTDAGVSGAKLERPAMQRLINDIENKAFDTVLVYKLDRLSRSVRDTLYLVKDVFTKNKIDFISLSESIDTSSAMGSLFLTILSAINEFERENIKERMTMGKLGRAKSGKSMMWTKTAFGYYHNRKTGILEIVPLQATIVEQIFTDYLSGISLTKLRDKLNESGHIGKDIPWSYRALRQTLDNPVYCGYIKFKDSLFEGMHKPIIPYEIYLKVQKELEGRQQQTYERNNNPRPFQAKYMLSGMARCGYCGAPLRIVLGHKRKDGSRTMKYHCANRYPRKTKGVTVYNGNKKCDSGTYDLSNLENTVIDNLIGFQENNDSLLKIISGNNQPILDASSFEKQISQIDKKIQKNSDLYLNDFITMDELKGRTDSLQAEKKLLKAKISENKFNDSADVLELVKSQLGSIPINELSYDDKKKIVNNLVSKVDVTADNVDIIFKFQLA

SEQ ID NO: 1569 - protein, 485 aa, synthetic construct
MTKKVAIYTRVSTTNQAEEGFSIDEQIDRLTKYAEAMGWQVSDTYTDAGSSGAKLERPAMQRLINDIEDKAFDTVLVYKLDRLSRSVRDTLYLVKDVFTKNKIDFISLNESIDTSSAMGSLFLTILSAINEFERESIKERMTMGKLGRAKSGKSMMWTKTAFGYYHNRKTGILEIVPLQATIVEQIFTDYLSGISLTKLRDKLNESGHIGKDIPWSYRTLRQTLDNPVYCGYIKFKDSLFEGMHKPIIPYETYLRVQKELEERQQQTYERNNNPRPFQAKYMLSGMARCGYCGAPLRIVLGHKRKDGSRTMRYHCANRFPRKTKGVTVYNDNKKCDSGTYDLSNLENTVIDSLIGFQENDDSLLKIINGNNQPILDTSSFKEQISQIDKKIQKNSDLYLNDFITMDELKDRTDSLQAEKKLLRAKISENKFNGSTDVFELVRTQLGSIPINELSYDNKKKIVNNLVSKVDVTADNVDIIFKFQLA

SEQ ID NO: 1570 - protein, 469 aa, synthetic construct
MSYTTPVCAAVYLRISEDRSGEQLGVARQREDCLKLCDQRKWVPVEYLDNDVSASTGKRRPAYEQMLADITAGKIAAVVAWDLDRLHRRPVELEAFMSLADEKRLALATVAGDVDLATPQGRLVARLKGSVAAHETEHKRARQRRAARQKAERGHPNWSKAFGYLPGPNGPEPDPRTAPLVKQAYADILAGASLGDVCRQWNNAGAFTITGRPWTTTTLSKFLRRPRNAGLRAYKGARYGPVDRDAIVGKAQWSPLVDEATFWAAQAVLDAPGRAPGRKSVRRHLLTGLAGCGKCGNHLAGSYRTDGRVVYVCKACHGVAILADNIEPILYHIVAERLAMPDAVDLLRREIHDAAEAETIRQELETLYGELDRLAVERAEGLLTARQVKISTDIVNAEITKLQARQLDQERLRVFNGIPLGTPQVAGKIAELSPDRFRAVLDVLAEVVVQPVGKSGRVFNPERVQVNWR

SEQ ID NO: 1571 - protein, 485 aa, synthetic construct
MTKKVAIYTRVSTTNQAEEGFSIDEQIDRLTKYAEAMGWQVSGTYTDAGLSGAKLERPAMQRLINDIENKAFDTVLVYKLDRLSRSVRDTLYLVKDVFTKNKIDFISLSESIDTSSAMGSLFLTILSAINEFERENIKERMTMGKLGRAKSGKSMMWTKTAFGYYHNRKTGILEIVPLQATIVEQIFTDYLSGISLTKLRDKLNESGHIGKDIPWSYRTLRQTLDNPVYCGYIKFKDSLFEGMHKPIIPYETYLKVQKELEERQQQTYERNNNPRPFQAKYMLSGMARCGYCGAPLRIVLGHKRKDGSRTMKYHCANRSPRKTKGITVYNDNKKCDSGTYDLSNLENTVIDNLIGFQENSDSLLKIINGNNQPILDTSSFEEQISQIDKKIQKNSDLYLNDFITMDELKDRTDSLQAEKKLLRAKISENKFNDSTDVFDLVKTQLGSIPINELSYDDKKKIVNNLVSKVDVTADNVDIIFKFQLA

SEQ ID NO: 1572 - protein, 485 aa, synthetic construct
MTKKVAIYTRVSTTNQAEEGFSIDEQIDRLTKYAEAMGWQVSDTYTDAGSSGAKLERPAMQRLINDIENKAFDTVLVYKLDRLSRSVRDTLYLVKDVFTKNKIDFISLNESIDTSSAMGSLFLTILSAINEFERENIKERMTMGKLGRAKSGKSMMWTKTAFGYYHNRKTGILEIVPLQATIVEQIFTDYLSGISLTKLRDKLNENGHIGKDIPWSYRTLRQTLDNPVYCGYIKFKDSLFEGMHKPIIPYETYLRVQKELGERQQQTYERNNNPRPFQAKYMLSGMARCGYCGAPLRIVLGHKRKDGSRTMKYHCANRFPRKTKGVTVYSDNKKCDSGTYDLSNLENAVIDNLIGLQENNDSLLKIINGNNQPILDTSSFKKQISQIDKKIQKNSDLYLNDFITMDELKDRTDSLQAEKKLLEAKISENKFNDSTDVFELVKTQLGSIPINELSYDNKKRIVNNLVSKVDVTADNVDIIFKFQLV

SEQ ID NO: 1573 - protein, 485 aa, synthetic construct
MTKKVAIYTRVSTTNQAEEGFSIDEQIDRLTKYAEAMGWQVSDTYTDAGLSGAKLERPAMQRLINDIENKAFDTVLVYKLDRLSRSVRDTLYLVKDVFTKNKIDFISLNESIDTSSAMGSLFLTILSAINEFERENIKERMTMGKLGRAKSGKSMMWTKTAFGYYHNRKTGILEIVPLQATIVEQIFTDYLSGISLTKLRDKLNECGHIGKDIPWSYRTLRQTLDNPVYCGYIKFKDSLFEGMHKPIIPYETYLKVQKELEERQQQTYERNNNPRPFQAKYMLSGMARCGYCGAPLRIVLGHKRKDGSRAMKYHCANRFPRKAKGITVYNDNKKCDSGTYDLSSLENTVIDILTGFQENNDSLLKIINGNNLPILDTSSFEKQISQIDKKIQKNSDLYLNDFITMNELKGRTDSLQAEKKLLKARISENKFNVSTDVFELVKIQLGSIPINELSYDNKKKIVNNLVSKVDVTADNVDIIFKFQLA

SEQ ID NO: 1574 - protein, 485 aa, synthetic construct
MTKKVAIYTRVSTTNQAEEGFSIDEQIDRLTKYAEAMGWQVGDTYTDAGFSGAKLERPAMQRLINGIENKAFDTVLVYKLDRLSRSVRDTLYLVKEVFTKNKIDFISLSESIDTSSAMGSLFLTILSAINEFERENIKERMAMGKLGRAKSGKSMMWTKTAFGYYHNRKTGILEIVPLQAAIVEQIFTDYLSGISLTKLRDKLNESGHIGKDIPWSYRTLRQTLDNPVYCGYIKFKDSLFEGMHKPIIPYETYLKVQKELEERQQQTYERNNNPRPFQAKYMLSGMARCGYCGAPLKIVLGHKRKDGSRTMKYHCANRFPRKTKGVTVYNDNKKCDSGTYDLSNLEDTVVDTLIGFQENNDSLLKIINGNNQPILDTSSFKKQISQTDKKIQKNSDLYLNDFITMDELKDRTDSLQAEKKLLKAKISENKFNDSTDVFELVKTQLGSIPINELSYDNKKKIVNNLVSKVDVTADNVDIIFKFRLA

SEQ ID NO: 1575 - protein, 485 aa, synthetic construct
MTKKVAIYTRVSTTNQAEEGFSIDEQIDRLTKYAEAMGWQVSDTYTDAGLSGAKLERPAMQRLINDIENKAFDTVLVYKLDRLSRSVRDTLYLVKDVFTKNKIDFISLNESIDTSSAMGSLFLTILSAINEFERENIKERMTMGKLGRAKSGKSMMWTRTAFGYYHNRKTGILEIVPLQATIVEQIFTDYLSGISLTKLRDKLNESGHIGKDIPWSHRTLRQTLDNPVYCGYIKFKDSLFEGMHKPIIPYETYLKVQKELEERQQQTYERNNNPRPFQAKYMLSGMARCGYCGAPLRIVLGHKRKDGSRTMKYHCANRFPRKTKGVTVYNDNKKCDSGTYDLSNLENTVIDNLIGFQEDNDSLLRIINGNNQPILDTSSLKKQISQIDKKIQKNSDLYLNDFITMDELKDRTDSLQAEKKLLRAKISENKFNDSTDVFELVKTQLGSIPINELSYDNKKKIVNNLVSKVDVTADNVDIIFKFQLA

SEQ ID NO: 1576 - protein, 452 aa, synthetic construct
MKAAIYIRVSTREQVENYSIQAQTEKLTALCRSKDWDVYDIFIDGGYSGSNMNRPALSEMLSKLHEIDAVVVYRLDRLSRSQRDTITLIEEYFLKNNVEFVSLSETLDTSSPFGRAMIGILSVFAQLERETIRDRMVMGKIKRIEAGLPLTTAKGRTFGYDVIDTKLYINEEEAKQLQLIYDIFEEEQSITSLQKRLKKLGFKVRTYSRYNNWLTNDLYCGYVSYRDIVHVKGIHEPIISEEQFYRVQEIFTRMGKNPNMNRDSASLLNNLVVCSKCGLGFVHRRKDTMSRGKKYHYRYYSCKTYKHTHELEKCGNKIWRADKLEELIINRVNNYSLASRNVDKEDELDSLYEKLKIEHAKKKRLFDLYINGSYEESELDSMMNDIDAQINYYESQIEANEELKKSKKIQENLASLATVDFDSLELREKQLYLKSLINKIYIDGEQVTIEWL

SEQ ID NO: 1577 - protein, 452 aa, synthetic construct
MKAAIYIRVSTQEQVGNYSIQAQTEKLTALCRSKDWDVYDIFIDGGYSGSNMNRPALNEMLSKLHEIDAVVVYRLDRLSRSQRDTTTLIEEYFLKNNVEFVSLSETLDTSSPFGRAMIGILSVFAQLERETIRDRMVMGKIKRIEAGLPLTTAKGRTFGYDVIDTKLYVNEEEARQLRLIYDIFEEEQSITFLQKRLKKLGFKVRTYSRYNNWLTNDLYCGYVSYKDKVHVKGIHEPIISEEQFYRVQEIFTRMGKNPNMNRDSASLLNNLVVCSKCGLSFVHRSKDTMSRGKKYHYRYYSCKTYKHTHELEKCGNKTWRADKLEELIINRVNNYSFASRNVGREDELDSLYEKLKIEHAKKKRLFDLYINGSCEVSELDSMMNDVDAQINYYESQIEANEELKKTKKIQENLANLATVDFDSLEFREKQLYLRSLINKIYIDGEQVTIEWL

SEQ ID NO: 1578 - protein, 485 aa, synthetic construct
MTKKVAIYTRVSTTNQAEEGFSIDEQVDRLTKYAEAMGWQVSDTYTDAGFSGAKLERPAMQRLINDIENKAFDTVLVYKLDRLSRSVRDTLYLVKEVFTKNEIDFISLSESINTSSAMGSLFLTILSAINEFERENIKERMTMGKLGRAKSGKSMMWTKTAFGYYHNRKTGVLEIVPLQATIVEQIFTDYLSGISLTKLRDKLNESGHIGKDIPWSYRTLRQTLDNPVYCGYIKFKDSLFEGMHKPIIPYETYLKVQKELEERQQQAYERNNNPRPFQAKYMLSGMARCGYCGAPLRIVLGHKRKDGSRTMKYHCANRFPRKTKGVTEYNDNKKCDSGTYDLSNLENTVIDGLIGFQENNDSLLKIINGNNQPILDTSGFKEQISQIDKKIQKNSDLYLNDFITMDELKDRTDSLQAEKKLLKAKISENKLNDSTDVFEQVKTQLGSIPINELSYDDKKKIVNNLVSKVDVTADNVDIIFKFQLA

SEQ ID NO: 1579 - protein, 485 aa, synthetic construct
MTKKVAIYTRVSTTNQAEEGFSIDEQVDRLTKYAEAMGWQVSDTYTDAGFSGAKLERPAMQRLINDIENKAFDTVLVYKLDRLSRSVRDTLYLVKDVFTENKIDFISLNECIDTSSAMGSLFLTILSAINEFERENIKERMTMGKLGRAKSGKSMMWTKTAFGYYHNRKTGILEIVPLQATIVEQIFTDYLSGISLTKLRDKLNESGHIGKDIPWSYRTLRQTLDNPVYCGYIKFKGSLFEGMHKPIIPYETYLKVQKELEERQQQTYERNNNPRPFQAKYMLSGMARCGYCGAPLRIVLGHKRKDGSRTMKYHCANRFPRKTKGVTVYNDNKKCDSGTYDLSNLESTVIDNLIGFQENNDSLLKIINGNNQPILDTSSFKEQISQIDKKIQKNSDLYLNGFITMDELKDRTDSLQAKKKLLKAKISENKCNDSTDVFELVKTQLGSIPINELSYDNKKKIVNNLVSKVDVTADNVDIIFKFQPA

SEQ ID NO: 1580 - protein, 485 aa, synthetic construct
MSKKVAIYTRVSTTNQAEEGFSIDEQIDRLTKYAEAMGWQVSDTYTDAGISGAKLERPAMQRLINDIENKAFDTVLVYKLDRLSRSVRDTLYLVKDVFTKNKIDFISLNESIDTSSAMGSLFLTILSAINEFERENIKERMAMGKLGRAKSGKSMMWTKTAFGYHHNRKTGILEIVPLQATIVEQIFTDYLSGISLTKLRDRLNESGHIGKDIPWSYRTLRQTLDNPVYCGYIKFKDSLFEGVHKPIIPYETYLKVQKELEERQQQTYERNNNPRPFQAKYMLSGMARCGYCGAPLRIVLGHKRKDGSRTMKYHCANRFPRKTKGVTVYNDNRKCDSGTYDLSNLENTVIDNLIGFQENNDSLLKIINGNNQPIQDTSSFKKQISQIDKKIQKNSDLYLNDFITMDELKDRTDSLQAEKKLLNAKISENKFNDSTDVFELVKTQLGSIPINELSYDNKKKIVNNLVSKVDVTADNVDIIFKFQLA

SEQ ID NO: 1581 - protein, 452 aa, synthetic construct
MKAAIYIRVSTREQVENYSIQAQTEKLTALCRSKDWDVYDIFIDGGYSGSNMNRPALNEMLSKLHEIDAVVVYRLDRLSRSQRDTITLIEEYFLKNNVEFVSLSETLDTSSPFGRAMIGILSVFAQLERETIRDRMVMGKIKRVEAGLPLTTAKGRTFGYDVIDTKLYINEEEAKQLQLVYDIFEEEQSITSLQKRLKELGLKVRTYNRYNNWLTNDLYCGYVSYKDKVHVKGIHEPIISEEQFYRVQEIFTRMGKSPNMNRDSASLLNNLVVCSKCGLSFVHRRKDTMSRDKKYHYRYYSCKTYKHIHELEKCGNKIWRADKLEELVINRVNNYSLAGRNVDKEDELDSLNEKLKIEHAKKKRLFNLYINGNYEVSELDSMMNDIDAQINYYESQIEANEELRRSRKIQENLAHLATVDFDSLEFREKQLYLKSLINKIYIDGEQVTIEWL

SEQ ID NO: 1582 - protein, 452 aa, synthetic construct
MKAAIYIRVSTQEQVENYSIQAQTEKLTALCRSKDWDVYDIFIDGGYSGSNMNRPALNEMLSKLHEIDAVVVYRLDRLSRSQRDTTTLIEEHFLKNNVEFVSLSETLDTSSPFGRAMIGILSVFAQLERETIRDRMVMGKIKRIEAGLPLTTAKGRTFGYDVIDTKLYINEEEAKQLQLIYDIFEEEQSITSLQKRLKKLGFKVRTYNRYNNWLTNDLYCGYVSYKDKVHVKGIHEPIISEEQFYRVQEIFARMGKNPNMNRDSASLLSNLVVCSKCGLSFVHRRKDTMSRGKKYHYRYYSCKTYKHTHELEKCGNKTWRADKLEELIINRVNDYSFASRNVDKEDELDSLNEKLKIEHAKKKRLFDLYINGSYEVSELDSMMNGIDAQINYYESQIEANEELKKNKKIQENLADLATVGFDSLEFREKQLYLKSLINKIYIDGEQVTIEWL

SEQ ID NO: 1583 - protein, 485 aa, synthetic construct
MTKKVAIYTRVSTANQAEEGFSIDEQIDRLTKYAEAMGWQVSDTYTDAGFSGAKLERPAMQRLINDIENEAFDAVLVYKLDRLSRSVRDTLYLVKDVFTKNKIDFISLNESIDTSSAMGSLFLTILSAINEFERENIKERMAMGKLGRAKSGKSMMWTKTAFGYYHNRKTGILEIVPLQATIVEQIFTDYLSGISLTKLRDKLNESGHIGKDIPWSYRTLRQTLDNPVYCGYIKFKDSLFEGMHKPIIPYETYLKVQKELEERQQQTYERNNNPRPFQAKYMLSGMARCGYCGAPLRIVLGHKRKDGSRTMKYHCANRFPRKTKGVTVYNENKKCDSGTYDLSSLENTVIDNLIGFQENNDSLLEIINGNNLPIPDTSSFKKQISQIDKKIQKNSDLYLNDFITMDELKDRTDSLQAEKKLLEAKINENKFNDSTDVFELVKTQLGSIPINELSYDNKKKIVNNLVSKVDVTADNVDIIFKFQLA

SEQ ID NO: 1584 - protein, 485 aa, synthetic construct
MTRKVVIYTRVSTTNQAEEGFSIDEQIDRLTKYAEAMGWQVSDTYTDAGFSGAKLKRPAMQRLINDIENKAFDTVLVYKLDRLSRSVRDTLYLVKDVFTKNKIDFISLSESIDTSSAMGSLFLTILSAINEFERENIKERMTMGKLGRAKSGKSMMWTKTAFGYYHNRKTGILEIVPLQATIVEQIFTDYLSGISLTKLRDKLNEGGHIGKDIPWSYRTLRQTLDNPVYCGYIKFKGSLFEGMHKPIIPYETYLKVQKELEERQQQTYERNNNPRPFQAKYMLSGMARCGYCGAPLRIVLGHKRKDGSRAMKYHCANRFPRRTKGVTVYNDNKRCDSGAYDLSNLENTVIDSLIGFQENNDSLLKIINGNNQPILDTGSLKNQISQIDKKIQKNSDLYLNDFITMDELKDRTDSLQAERELLKAKISENKFNDSTDVFELVKTQLGSIPINELSYDNKKKIVNNLVSKVDVTADNVDIVFKFQLA

SEQ ID NO: 1585 - protein, 469 aa, synthetic construct
MSYTTPVRAAVYLRISEDRSGEQLGAARQREDCLKLCDQRKWVPVEYLDNDVSASTGKRRPAYEQMLADITAGKIAAVVAWDLDRLHRRPTELEAFMCLADEKRLALATVAGDVDLATPQGRLVARLKGSVAAHETEHKKARQRRAAKQKAERGYPNWSRAFGYLPGPNGPEPDPRTAPLVKQAYADILAGASLGDVCRQWNDAGAFTITGRPWTTTTLSKFLRKPRNAGLRAYKGARYGPVDRDAIVGKAQWSPLVDEATFWAAQAVLDAPGRAPGRKSVRRHLLTGLAGCGKCGNHLAGSYRTDGRVVYVCKACHGVAILADNIEPILYRIVAERLAMPDAVDLLRREIHDAAEAETIRLELETLYGELDRLAVERAEGLLTARQVKISTDIVNARITKLQARQLDQERLRVLDGIPLGTPRVAGMIAELSPDRFRAVLDVLAEVVVRPVGKGGRIFNPERVQVNWR

SEQ ID NO: 1586 - protein, 485 aa, synthetic construct
MTKKVAIYTRVSTTNQAEEGFSIDEQIDRLTKYAEAMGWQVSDTYTDAGCSGAKLERPAMQRLINDIENKAFDTVLVYKLDRLSRSVRDTLYLVKDVFTKNKIDFISLNESIDTSSAMGSLFLTILSAINEFERENIKERMTMGKLGRAKSGKSMMWTKTAFGYYHNRKTGILEIVPLQATIVEQIFTDYLSGISLTKLRDKLNESGHIGKDIPWSYRALRQTLDNPVYCGYIKFKDSLFEGMHKPIIPYETYLRVQKELEERQQQTYERNNNPRPFQAKYMLSGMARCGYCGAPLRIVLGHKRKDGSRTMKYHCANRFPRKTKGVTVYNDNKKCDSGTYDLSNLENTVIDNLIGFQENNDSLLKIINSNNQPILDTSSFKKQISQIDKKIQKNSDLYLNDFITMEELKDRTDSLQAEKKLLKAKISENKFNDSTDVFELVKTQLGSIPINELSYDDKKKIVNNLVSKVDVTAGNVDIIFKFQLA

SEQ ID NO: 1587 - protein, 485 aa, synthetic construct
MTKKVAIYTRVSTTNQAEEGFSIDEQIDRLTRYAEAMGWQVSDTYTDAGLSGAKLERPAMQRLINDIENKAFDTVLVYKLDRLSRSVRDTLYLVKDVFTKNKIDFISLSESIDTSSAMGSLFLTILSAINEFERENIKERMTMGKLGRAKSGKSMMWTKTAFGYYHNRETGILEIVPLQATIVEQIFTDYLSGISLTKLRDKLNESGHIGKDIPWSYRTLRQTLDNPVYCGYIKFKDSLFEGMHKPIIPYETYLKVQKELEERQRQTYERNNNPRPFQAKYMLSGMARCGYCGAPLRIVLGHKRKDGSRTMKYHCANRFPRKTRGVTVYNDNKKCDSGTYDLSNLENTVIDSLIGFQENNDSLLKIINGNNQPILDTSSFKKRISQIDKEIQKSSDLYLNDFITMDELKDRTDSLQAEKKLLKAKISENKFNDNTEVFELVKTQLGSIPISELSYDNKKKIVNNLVSKVDVTADNVDIIFKFQLA

SEQ ID NO: 1588 - protein, 485 aa, synthetic construct
MTKKVAIYTRVSTTNQAEEGFSIDEQIDRLTKYAEAMGWQVSDTYTDAGLSGAKLERPAMQRLINDIENKAFDTVLVYKLDRLSRSVRDTLYLVKDVFTKNKIDFISLNESIDTSSAMGSLFLTILSAINEFERENIKERMTMGKLGRAKSGKSMMWTKTAFGYYHNRKTGILEIVPLQATIVEQIFTDYLSGISLSKLRDKLNESGHIGKDIPWSYRTLRQTLDNPVYCGYIRFKDSLFEGMHKPIIPYETYLKVQKELEERQQQTYERNNNPRPFQAKYMLSSMARCGYCGAPLRIVLGHKRKDGSRTMKYHCANRFPRKTKGVTVYNDNRKCDSGTYDLSNLENAVIDKLIGFQENNDSLLKIINGNNQPIPDTSSFKKQISQIDKKIQKNSDLYLNDFITMDELKDRTDSLQAEKKLLKAKISENKFNDSTDVFELVRTQLGSIPINELSYDNKKKIVNNLVSKVDVTADNVDIIFKFQLA

SEQ ID NO: 1589 - protein, 452 aa, synthetic construct
MKAAIYIRVSTREQVENYSIQAQTEKLTALCRSKGWDVYDIFIDGGYSGSNMNRPALNEMLSKLHEIDAVVVYRLDRLSRSQRDTITLIEEYFLKNNVEFVSLSETLDTSSPFGRAMIGILSVFAQLERETIRDRMVMGKIKRIEAGLPLTTAKGRTFGYDVIDTKLYVNEEEAKQLQLIYDIFEEEQSITFLQKRLKELGFKVRTYNRYNNWLTNDLYCGYVSYKDKVHVKGIHEPIISEEQFYRVQEIFTRMGKNPNMNRDSASLLNNLVVCSKCGLGFVHRRKDIMSRGKKYHYRYYYCKTYKHIHELEKCGNKIWRADKLEELIINRVNNYSFASRNADKEDELNSLNEKLKMEHAKKKRLFDLYINGSYEVGELDSMMSDIDAQINYYESQIEANEELKRNKKIQENLADLATVDFDSLEFREKQLYLKSLINKIYIDGEQVTIEWL

SEQ ID NO: 1590 - protein, 452 aa, synthetic construct
MKAAIYIRVSTREQVENYSIQAQTEKLTALCRSKDWDVYDTFVDGGYSGSNMNRPALNEMLSKLHEIDAVVVYRLDRLSRSQRDTITLIEEYFLKNNVEFVSLSETLDTSSPFGRAMIGILSVFAQLERETIRDRMVMGKIKRIEAGLPLTTAKGRTFGYDVIDTKLYINEEEAKQLRLIYDIFEEEQSITFLQKRLKKLGFKVRSYNRYNNWLTNDLYCGYVSYEDKVHVKGIHEPIISEEQFYRVQEIFARMGKNPNMNRDSASLLNNLVVCSKCGLGFVHRRKDAMSRDKKYHYRYYSCKTYKHIHELEKCGNKIWRADELEELVINRVNSYSVASRNVDKEDELDSLNEKLKIEHAKKKRLFDLYVNGSYEVSELDSMMNDIDAQINYYESQIEANEELKKNKKIQENLAYLATVDFDSLEFREKQLYLKSLINKIYIDGEQVTIEWL

SEQ ID NO: 1591 - protein, 469 aa, synthetic construct
MSYTTPVRAAVYLRISEDRSGEQLGVARQREDCLKLCDQRKWVPVEYLDNDVSASTGKRRPAYEQMLADITAGKIAAVVAWDLDRLHRRPIELEAFMSLADEKRLALATVAGDVDLATPQGRLVARLKGSVAAHETEHKKARQRRAARQKAERGYPNWSKAFGYLPGPNGPEPDPRTAPLVKQAYADILAGASLGDVCRRWNDAGAFTITGRQWTTTALSKFLRKPRNAGLRAYKGARYGPVDRDAIVGKAQWSPLVDEATFWAAQAVLDAPGRAPGKKSVRRHLLTGLAGCGKCGSHLAGSYRTDGRVVYVCKACHGVAILADNIEPILYHIVAERLAMPDAVDLLRREIHDAAEAETIRLELETLYGELDRLAVERAEGLLTARQVKISTDIVSAKITKLQARQLDQERLRVLEGIPLGTPQVAGVIAELSPDRFRAVLDVLAEVVVQPVGKSGRIFNPERVQVSWR

SEQ ID NO: 1592 - protein, 452 aa, synthetic construct
MKAAIYIRVSTREQVENYSIQAQTEKLTALCRSKDWDVYDIFIDGGYSGSNMNRPALNEMLSKLHEIDAVVVYRLDRLSRSQRDTITLIEEYFLKNNVEFVSLSETLDTSSPFGRAMIGILSVFAQLERETIRDRMVMGKIKRVEAGLPLTTAKGRTFGYDVIDTKLYINEEEAKQLQLIYDIFEEEQSITLLQKRLKKLGFKVRTYSRYTNWLTNDLYCGYVSYKDKVHVKGIHEPIISEEQFYRVQEIFTRMGKNPNMNRDSASMLNNLVVCSKCGLGFVHRRKDIMSRGKKYHYRYYSCKTYKHIHELEKCGNKIWRADKLEELIINRVNNYSFASRNVDKEDELDSLNEKLKIEHAKKKRLFDLYLNGSYEVSELDSMMNDIDAQINYYESRIEANEELKKDKKIQENLAYLATVDFDSLEFREKQLYLKSLINKIYIDGEQVTIEWL

SEQ ID NO: 1593 - protein, 485 aa, synthetic construct
MTKKVAIYTRVSTTSQAEEGFSIDEQTDRLTKYAEAMGWQVSGTYTDAGFSGAKLERPALQRLINDIENNAFDTVLVYKLDRLSRSVRDTLYLVKDVFTKNKIDFISLNESIDTSSTMGSLFLTILSAINEFERENIKERMTMGKLGRAKSGKSMMWTKTAFGYYHNRKTGILEIVPLQATIVEQIFTDYLSGISLTKLRDKLNESGHIGKDIPWSYRTLRQTLDNPVYCGYIKFKDSLFEGMHKPIIPYETYLKVQKELAERQQQTYERNNNPRPFQAKYMLSGMARCGYCGAPLRIVLGHKRKDGSRAMKYHCANRFPRKTKGVTVYNDSKKCDSGTYDLSNLENTVIDNLIGLQENNDSLLKIINGNNQPILDTSSFKKQISQIDKKIQKNSDLYLNDFITMDELKDRTDSLQAEKKLLKAKISENKFNDSTDVFELVKTQLGSIPINELSYDNKKKIVNNLVSKVDVTADNVDIIFKFQLA

SEQ ID NO: 1594 - protein, 485 aa, synthetic construct
MTRKVAIYTRVSTTNQAEEGFSIDEQTDRLTKYAEAMGWQVSDTYTDAGISGAKLERPAMQRLINDIENKAFDTVLVYKLDRLSRSVRDTLYLVKDVFTKNKIDFISLNEGIDTSSAMGSLFLTILSAINEFERENIKERMTMGKLGRAKSGKSMMWTKTAFGYYHNRKTGILEIVPLQASIVEQIFTDYLSGISLTKLRDKLNERGHIGKDIPWSYRTLRQTLDNPVYCGYIKFKDSLFEGMHKPIIPYETYLKVQKELEERQQQTYERNNNPRPFQAKYMLSGMARCGYCGAPLRIVLGHKRKDGSRTMKYHCTNRFPRKTKGITVYNDNKRCDSGTYDLSNLESTVIDTLIGFQENNDSLLKIINGNNQPVLDTSSFKKRISQIDKKIQKNSDLYLNDFITMDELKDRTNSLQAEKKLLKAKISENKFNDSTDVFELVIARLGSIPINELSYDNKKKIVNNLVSKVDVTADNVDIIFKFQLA

SEQ ID NO: 1595 - protein, 485 aa, synthetic construct
MTKKVAIYTRVSTTNQAEEGFSIDEQVDRLTKYAEAMGWQVSDTYTDAGFSGAKLERPAMQRLINDIENKAFDTVLVYKLDRLSRSVRDTLYLVKDVFTKNKIDFISLNESIDTSSAMGSLFLTILSAINEFERENIKERMTMGKLGRAKSGKSMMWAKTAFGYYHNRKTGVLEIVPLQATIVEQIFTDYLSGISLTKLRDKLNESGHIGKDIPWSYRTLRQTLDNPVYCGYIKFKDSLFEGMHKPIIPYETYLKVQKELEERQQQTYERNNNPRPFQAKYMLSGMARCGYCGAPLRIVLGHKRKDGSRTMKYHCANRFPRKTKGVTVYNDNKKCDSGTYDLSNLENTVIDILIGFQENNDSLLRIINGNNQPILDTSSFEKQISQIDKKIQRNSDLYLNDFITMDELKDRTDSLQAEKKLLKAKISENKLNDSTDVFELAKTQLGSIPINELSYDDKKKIVNNLVSKVDVTADNVGIIFKFQLA

SEQ ID NO: 1596 - protein, 452 aa, synthetic construct
MKAAIYIRVSTREQVENYSIQAQTEKLTALCRSKDWDVYDIFIDGGYSGSNMNRPALNEMLSKLHEIDAVVVYRLDRLSRSQRDTITLIEEYFLKNSVEFVSLSETLDTSSPFGRAMIGILSVFAQLERETIRDRMVMGKIKRIEAGLPLTTAKGRTFGYDVIDTKLYINEEEAKQLRLIYDIFEEEQSITLLQKRLKKLGFKVRSYNRYNNWLTNDLYCGYVSYKDKVHVKGIHEPIISEEQFNRVQEIFTRMGKNPNMNRDSASLLNNLVVCSKCGLGFVHRRKDAMSRDKKYHYRYYSCKTYKHIHELEKCGNKIWRADKLEELIINRVNNYSLASRNVDKEDELDSLNEKLKIEHAKKKRLFDLYINGSYEVSELDSMMNDIDAQINYYESQIEANEELKKDKKIRENLAYLATVDFDSLEFREKQLYLKSLINKIYIDGEQVTIEWL

SEQ ID NO: 1597 - protein, 469 aa, synthetic construct
MSYTTPVRAAVYLRISEDRSGEQLGVARQREDCLKLCGQRKWVPVEYLDNDVSASTGKRRPAYEQMLADITAGKIAAVVAWDLDRLHRRPIELEAFMSLADEKRLALATVAGDVDLATPQGRLVARLKGSVAAHETEHKRARQRRAARQKAERGHPNWSKAFGYLPGPNGPEPDPRTAPLVKQAYADILAGASLGDVCRQWNEAGAFTITGRPWTTTALSKFLRKPRNAGLRAYKGARYGPVDRDAIVGKAQWSPLVDEATFWAAQAVLDAPGRAPGRKSVRRHLLTGLAGCGKCGHHLAGSYRTDGRVVYVCKACHGVAILADSIEPILYHIVAERLAMPDAVDLLRREIHDAAEAETIRLELETLYGELDRLAVERAEGLLTARQVKISTDIVNAKITKLQTRQLDQERLRVFDGIPLGTPQVAGTIAELSPDRFRAVLDVLAEVVVQPVGKGGRIFNPERVQVNWR

SEQ ID NO: 1598 - protein, 452 aa, synthetic construct
MKAAIYIRVSTQEQVGNYSIQAQTEKLTALCRSKGWDVYDIFIDGGYSGSNMNRPALNEMLSKLHEIDAVVVYRLDRLSRSQRDTTTLIEEYFLKNNVEFVSLSETLDTSSPFGRAMIGILSVFAQLERETIRDRMVMGKIKRIEAGLPLTTAKGRTFGYDVIDTKLYINEEEAKQLRLIYDIFEEVQSITFLQKRLKELGLKVRSYNRYNSWLTNDLYCGYVSYKDKVHVKGIHEPIISEEQFYRVQEIFTRMGKNPNMNRDSASLLSNLVVCSKCGLGFVHRSKDTVSRGKKYHYRYYSCKTYKHTHELEKCGNKIWRADKLEELIIDRVNNYSFASRNVGKEDELDSLNEKLRIEHVKKKRLFDLYINGSYEVSELDSMMSDIDAQINYYESQIEANEELRKNKKIQENLADLAAVDFDSLEFREKQLYLKSLINKIYIDGEQVTIEWL

SEQ ID NO: 1599 - protein, 485 aa, synthetic construct
MTKKVAIYTRVSTTNQAEEGFSIDEQIDRLTKYAEAMGWQVSDTYTDAGFSGAKLERPAMRRLINDIETKAFDTVLVYKLDRLSRSVRDTLYLVKDVFTKNKVDFISLNESIDTSSAMGSLFLTILSAINEFERENIKERMTMGKLGRAKSGKSMMWTKTAFGYYHNRKTGILEIVPLQATIVEQIFTDYLSGISLTKLRDKLNESGHIGKDIPWSYRTLRQTLGNPVYCGYIKFKDSLFEGMHKPIIPYEAYLKVQKELEERQQQAYERNNNPRPFQAKYMLSGMARCGYCGAPLRIVLGHKRKDGSRTMKYHCANRFPRKTKGVTVYNDNKKCDSGTYDLSNLENTVIDILIGFQENNDSLLKIISGNNQPILDTSSFKEQISQIDKKIQKNSDLYLNDFITMDELKDRTDSLQAEKKLLKAKISENEFNDSTDVFELVKTQLGSIPISELSYDNKKKVVNNLMSKVDVTADNVNIIFKFQLA

SEQ ID NO: 1600 - protein, 452 aa, synthetic construct
MKAAIYIRVSTREQVENYSIQAQTEKLTALCRSKDWDVYDVFIDGGYSGSNMNRPALNEMLGKLHEIDAVVVYRLDRLSRSQRDTITLIEEYFLKNNVEFVSLSETLDTSSPFGRAMIGILSVFAQLERETIRDRMVMGKIKRIEAGLPLTTAKGRTFGYDVIDTKLYVNEEEAKQLRLIYDIFEEEQSITLLQKRLKKLGFKVRTYNRYNNWLTNDLYCGYVSYKDKVHVKGIHEPIISEEQFYRVQEIFTRMGKNPNMNRDSASLLNNLVVCSKCGLGFVHRRKDITSRGKEYHYRYYSCKTYKHIHELEKCGNKIWRADKLEELIINRVNNYSFASRNVDKEDELGSLNEKLKIEHAKKKRLFDLYLNGSYEVSELDSMMNDIDAQINYYESQIGANEALIKNKKIQENLAYLATVDFDSLEFREKQLYLKSLINKIYIDGEQVTIEWL

SEQ ID NO: 1601 - protein, 469 aa, synthetic construct
MSYTTPVRAAVYLRISEDRSGEQLGVARQREDCLKLCGQRKWVPVEYLDNDVSASTGKRRPAYEQMLADITAGKIAAVVAWDLDRLHRRPVELEAFMSLADEKRLALATVAGDVDLATPQGRLVARLKGCVAAHETEHKKARQRRAARQKAERGHPNWSKAFGYLPGPNGPEPDPRTAPLVKQAYADILAGASLGDVCGRWNGAGALTITGRPWTPTTLSKFLRKPRNAGLRTYNGARYGPVDRDAIVGKAQWSPLVDEATFWAAQAVLDAPGRAPGRKSVRRHLLTGLAGCGKCGSHLAGSYRTDGRVVYVCKACHGVAILADNIEPILYRIVAERLAMPDAVDLLRREVHDAAEAETIRLELETLHGELDRLAVERAEGLLTARQVKISTDIVNAKITKLQARQLDQERLRVLDGIPLGTPQVAGVIAELSPDRFRAVLDVLAEVVVQPVGKSGRILNPERVQVNWR

SEQ ID NO: 1602 - protein, 452 aa, synthetic construct
MKAAIYIRVSTREQVENYSIQAQTEKLTALCRSKDWDVYDVFIDGGYSGSNMNRPALNEMLSKLHEIDAVVVYRLDRLSRSQRDTITLIEEYFLKNNVEFVSLSETLDTSSPFGRAMIGILSVFAQLERETIRDRMVMGKIKRIEAGLPLTTAKGRTFGYDVVDTRLYINEEEARQLQLIYDIFEEEQSITFLQKRLKKLGFKVHTYNRYNNWLTNDLYCGYVSYKDKVHVKGIHEPIISEEQFYRVQEIFTRMGKNPNMNRDSASLLNNLVVCGKCGLGFVHRRKDAMSRDKKYHYRYYSCKTYKHIHELEKCGNKIWRADKLEELIINRVNNYSLAGRNVDKEDELDGLNEKLKIEHAKKKRLFDLYINGSYEVSELDSMMNDIDAQINYYESQVEANEELKKNKKIQENLAYLATVDFDSLEFREKQLYLKSLINKIYIDGEQVTIEWL

SEQ ID NO: 1603 - protein, 485 aa, synthetic construct
MTKKVAIYTRVSTTNQAEEGFSIDEQIDRLTKYAEAMGWQVSDTYTDAGFSGAKLERPAMQRLINDIENKAFDTVLVYKLDRLSRSVRDTLYLVKHVFTKNKIDFISLNESIDTSSAMGSLFLTILSAINEFERENIKERMTMGKLGRAKSGKSMMWTKTAFGYYHNRKTGILEIVPLQATIVEQIFTDYLSGISLTKLRDKLNESGHIGKDIPWSYRTLRQTLDNPVYCGYIKFKGSLFEGMHKPIIPYETYLKVQKELEERQQQTYERNNNPRPFQAKYMLSGMARCGYCGAPLKIVLGHKRKDGSRTMKYHCANRFPRKTKGVTVYNDNKKCDSGTYDLSSLENTVIDSLIGFQENNDSLLKIINGNNQSILDTSSFKKQISQIDKKIQKNSDLYLNDFIAMDELKDRTDSLQAEKKLLKAKISENKFNDSTDVFELVKAQLGRIPINELSYDDKKKIVNNLVSKVNVTADNVDIIFKFQLA

SEQ ID NO: 1604 - protein, 485 aa, synthetic construct
MTRKVAIYTRVSTTNQAEEGFSIDEQIDRLTKYAEAMGWQVSGTYTDAGFSGAKLERPAMRRLINDIENKTFDTVLVYKLDRLSRSAHDTLYLVKDVFTKNKIDFVSLNESIDTSSAMGSLFLTILSAINEFERENIKERMTMGKLGRAKSGKSMMWTKTAFGYYHNRKTGILEIVPLQATIVEQIFTDYLSGVSLTKLRDKLNESGHIGKDIPWSYRTLRQTLDNPVYCGYIKFKDSLFEGMHKPIIPYETYLKVQKELEERQQQTYERNNNPRPFQAKYMLSGMARCGYCGAPLRIVLGHKRKDGSRTMKYHCANRFPRRTRGVTVYNDNKKCDSGTYDLSDLENAVIDNLIGFQENNDSLLKIINGNSQPILDTCGLKKQISQIDKKIQKNSELYLNDFITMDELKDRTDSLQAEKKLLKAKISENKFNDSTDVFELVKTQLGSIPINELSYDNKKKIVNNLVSKVDVTADNVDIIFKFQLA

SEQ ID NO: 1605 - protein, 469 aa, synthetic construct
MSYTIPVRAAVYLRISEDRSGEQLGVARQREDCLKLCGQRKWVPVEYLDNDVSASTGKRRPAYEQMLADITAGKIAAVVAWDLDRLHRRPIELEAFMSLADEKRLALATVAGDVDLATPQGRLVARLKGSVAAHETEHKKARQRRAARQKAERGLPNWSKAFGYLPGPDGPEPDPRTAPLVKQAYADILAGASLGDVCRQWNDAGAFTITGRPWTTTTLSKFLRKPRNAGLRAYRGARYGPVDRDAIVGKAQWSPLVDEATFWAAQAVLDAPGRAPGRKSVRRHLLTGLAGCGKCGNHLAGSYRTDGRVVYVCKACHGVSILADNIEPILYHTVVERLAMPDAVDLLRREIHDGAEAETIRLELGTLYGELDRLAVERAEGLLTARQVKISTNIVNAKISKLQARQLDQERLRVFDGIPLGTPQVAGIIAELSPDRFRAVLDVLAEVVVQPVGKSGRVLNPERVQVNWR

SEQ ID NO: 1606 - protein, 485 aa, synthetic construct
MTKKVAIYTRVSTTNQAEEGFSIDEQIDRLTKYAEAMGWQVSDTYTDAGFSGAKLERPAMQRLINDIENKAFDTVLVYKLDRLSRSVRDTLYLVKDVFTRNKIDFISLNESIDTSSAMGSLFLTILSAINEFERENIKERMTMGKLGRAKSGKSMMWTKTAFGYYHNRKTGILEIVPLQATIVEQIFTDYLSGISLTKLRDKLNERGHIGRDIPWSYRTLRQTLDNPVYCGYIKFKGNLFEGMHKPIIPYETYLKVQKELEERQQQTYERNNNPRPFQAKYMLSGMARCGYCGAPLRIVLGHKRKDGSRTMKYHCANRFPRKTKGVIVYNDNKKCDSGTYDLSNLENTVIDNLIGFQKDNDSLLKVINGNNQPILDTSSFKEQISQIDKKIQKNSDLYLNDFITMDELKDRTDSLQAEKKLLKAKISEDKFNDSTDVFELVKTQLGSIPINELSYDNKKRIVNSLVSKVDVTADNVDIIFKFQLA

SEQ ID NO: 1607 - protein, 469 aa, synthetic construct
MSYTTPVRAAVYLRISEDRSGEQLGVARQREDCLELCGQRRWVPVEYLDNDVSASTGKRRPAYEQMLADITAGKIAAVVAWDLDRLHRRPIELEAFMSLADEKRLALATVAGDVDLATPQGRLVARLKGSVAAHETEHKKARQRRAARQKAERGHPNWSKAFGYLPGPNGPEPDPRTAPLVKQAYADILAGASLGDVCRQWNDAGAYTITGRPWTTTALSKFLRKPRNAGLREYKGARYGPVDRDAIVGKAQWSPLVDEATFWAAQAVLDAPGRAPGRKSVRRHLLTGLAGCGKCGNHLAGSYRTDGRVVYVCKTCHGVAILAGNIEPILYHIVAERLAMPDAEDLLRREIHDAAEAEIIRLELETLYGELDRLAVERAEGLLTARQVKISTDIVNAKITELRARQLDQERLRVLDGIPLGTPQVAGMIAELSPDRFRAVLDVLAEVVVQPVGKSGRIYNPERVQVNWR

SEQ ID NO: 1608 - protein, 485 aa, synthetic construct
MTKKVAIYTRVSTTNQAEEGFSIDEQIDRLTKYAEAMGWQVSDTYTDAGSSGAKLERPAMQRLINDIENKAFDTVLVYKLDRLSRSVRDTLYLVKDVFTNNKIDFISLNESIDTSSAMGSLFLTILSAINEFERENIKERMTMGKLGRAKSGKSMMWTKTAFGYYHNRKTGILEIVPLQATIVEQIFTDYLSGISLTKLRDKLNESGHIGKDIPWSYRTLRQILDNPVYCGYIKFKDSLFEGMHKPIIPYETYLKVQKELEERQQQTYERNNNPRPFQAKYMLSGMARCGYCGAPLRIVLGHKRKDGSRTMKYHCANRFPRKTKGVTVYNDNKKCDSGTYDLSDLENTVIDNLIGFQEDNDSLLKIINGNNQPVLDTSSFKKQISQIDKKIQKNSDLYLNDFITMDELKDRTDSLQAEKKLLKAKISENKFNDSADVFELVKTQLGSIPINELSYDDKKKIVNNLVSKVDVTADNVDIILKFQLA

SEQ ID NO: 1609 - protein, 469 aa, synthetic construct
MSYTTPVRAAVYLRISEDRSGEQLGVARQREDCLKLCGQRKWVPVEYLDNDVSASTGKRRPAYEQMLADITAGKIAAVVAWDLDRLHRHPLELEAFMSLADEKRLALATVAGDVDLATPQGRLVARLKGCVAAHETEHKKARQRRAARQKAERGLPNWSKAFGYLPGPNGPEPNPRTAPLVKQAYADILAGASLGDVCRQWNDAGAFTITGRPWTTTTLSKFLRKPRNAGLRAYKGARYGPVDREAIVGKAQWSPLVDEATFWAAQAVLDAPGRAPGRKSVRRHLLTGLAGCGKCGNHLAGSYRTDGRVVYVCKACHGIAILADNIEPILYRIVAERLAMPGAVDLLRRETHDAAEAETIRLELETLYGELDCLAVERAEGLLTARQVKISTDIVNAKITKLQARQQDQERLRVLDGIPLGTPQVVGVIAELSPDRFRAVLDVLAEVVVQPVGKSGRIPNPERVQVNWR

SEQ ID NO: 1610 - protein, 485 aa, synthetic construct
MTKKVAIYTRVSTTNQAEEGFSIDEQIDRLTKYAEAMGWQVSDTYTDAGFSGAKLERPAMQRLINDIENKAFDTVLVYKLDRLSRSVRDTLYLVKDVFTKNRIDFISLNEGINTSSAMGSLFLTILSAINEFERENIKERMTMGKLGRAKSGKSMMWTKTAFGYHHNRETGILEIVPLQATIVEQIFTDYLSGISLTKLRDKLNESGHIGKDIPWSYRTLRQTLDNPVYCGYIKFKDSLFEGMHKPIIPYETYLRVQKELEGRQQQTYERNNNPRPFQAKYMLSGMARCGYCGAPLKIVLGHKRKDGSRTMRYHCANRFPRRTKGVTVYNDNKKCDSGTYDLSNLENTVIDNLIGFQENNDSLLKIINGNNQPILDTSSFKEQISQIDKKIRKNSDLYLNDFITMGELKDRTDSLQAEKKLLKAKISENEFNDSTDVFELVKAQLGSIPINELSYDNKKKIVNNLVSKVDVTADNVDIIFKFQLA

SEQ ID NO: 1611 - protein, 452 aa, synthetic construct
MKAAIYIRVSTREQVENYSIQAQTEKLTALCRSKDWDVYDIFIDGGYSGSNMNRPALNEMLSKLHEIDAVVVYRLDRLSRSQRDTITLIEEYFLKNNVEFVSLSETLDTSSPFGRAMIGILSVFAQLERETIRDRMVMGKIKRIEAGLPLTTAKGRTFGYDVIDTKLYINEEEARQLQLIYDIFEEEQSITFLQKRLKKLGFKVRTYSCYNNWLTNDLYCGYVSYKDKVHVKGIHEPIISEEQFYRVQEIFTRMGKNPNMNRDSASLLNSLVVCSKCGLGFVHRRKDTMSSGKKYHYRYYSCKTYKHIHELEKCGNKIWRADKLEELIISRVNNYSLASRNVDKEDELDSLNEKLKIEHAKKKRLFDLYIDGSYEVSELDSMMSDIDAQIDYYESQIEANEELKKNKKIRENLADLATVDFDSLEFREKQLYLKSLINKIYIDGEQVTIEWL

SEQ ID NO: 1612 - protein, 469 aa, synthetic construct
MSYTTPVRAAVYLRISEDRSGEQLGVARQREDCLKLCVQRKWVPVEYLDNDVSASTGKRRPAYEQMLADITAGRIAAVVAWDLDRLHRRPIELEAFMSLADEKRLALATVAGDVDLATPQGRLVARLKGCVAAHETEHKKARQRRAARQKAERGLPNWSKAFGYLPGPNGPEPDPRTAPLVKQAYADILAGASLGDVCRQWNGAGAFTITGRPWTTTTLSKFLRKPRNAGLRAYKGARYGPVDRDAIVGKAQWSPLVDEATFWAAQAVLDAPGRAPGRKSVRRHLLTGLAGCGKCGNHLAGSYRTDGRVVYVCKACHGVAILADNIEPILYHIVAERLAMLDAVDLLRREIRDAAEAETIRLELETLYGELDRLAVERAEGLLTARQVKISTDIVNAKITKLQACQQDQERLRVFDGIPLGTPQVAGVIAELSPDRFRAVLAVLAEVVVQPVGKSSRIFNPERVQVNWR

SEQ ID NO: 1613 - protein, 485 aa, synthetic construct
MTKKVAIYTRVSTTNQAEEGFSIDEQIDRLTKYAEAMGWQVSDTYTDAGFSGAKLERPAMQRLINDIENKAFDTVLVYKLDRLSRSVRDTLYLVKDVFTKNKIDFISLNESIDTSSAMGSLFLTILSAINEFERENIKERMTMGKLGRAKSGKSMMWTKTAFGYYHNRRTGILEIVPLQATIVEQIFTDYLSGISLTKLRDKLNESGHIGKDIPWSYRTLRQTLDNPVYCGYIKFKGSLFEGMHKPIIPYETYLKVQKELGERQQQTYERNNNPRPFQAKYMLSGMARCGYCGAPLKIVLGHKRKDGSRTMKYHCANRFPRKTKGVTVYNDNKKCDSGTYDLSNLENTVIDNLIGFQENNDSLLKIINGNNQPILDTSSFKKQISQIDKKIQKNGDLYLNDFITMDELKVRTDSLQAERKLLKAKISENKFNDSTDVFELVKTQLGSIPINELSYDNKKKIVNNLVSKVDVTADNVDIIFKFQLA

SEQ ID NO: 1614 - protein, 485 aa, synthetic construct
MTRKVAIYTRVSTTNQAEEGFSIDEQIDRLTKYAEAMGWQVSDTYTDAGSSGAKLERPAMQRLINDIENKAFDTVLVYKLDRLSRSVRDTLYLVKDVFTKNKIDFISLNESIDTSSAMGSLFLTILSAINEFERENIKERMTMGKLGRAKSGKSMMWTKTAFGYYHNRKTGILEIVPLQATIVEQIFTDYLSGISLTKLRDKLNESGHIGKNIPWSYRTLRQTLDNPVYCGYIKFKDSLFEGMHKPIIPYETYLKVQKELEERQQQTYERNNNPRPFQAKYMLSGMARCGYCGAPLKIVLGHKRKDGSRTMKYHCANRFLRKTKGVTVYNDNKKCDSGTYDLSNLENTVIDNLIGFQENNDSLLKIINGNNPPTLDTSSFKKRISQIDKKIQKNSDLYLNDFITMNELKDRTDSLQAEKKLLKAKISENKFNDSTDVFELVKTQLGSIPINELSYDDKKRIVNNLVSKVDVTADNVDIIFKFQLA

SEQ ID NO: 1615 - protein, 485 aa, synthetic construct
MTKKVAIYTRVSTINQAEEGFSIDEQIDRLTKYAEAMGWQVGDTYTDAGFSGAKLERPAMQRLINDIENKAFDTVLVYKLDRLSRSVRDTLYLVKDVFTKNKIDFISLSESIDTSSAMGSLFLTILSAINEFERENIKERMTMGKLGRAKSGKSMMWTKTAFGYYHNRKTGILEIVPLQATIVEQIFTDYLSGISLTKLRDKLNESGHIGKDIPWSYRTLRQTLDNPVYCGYIKFKDSLFEGMHKPIIPYETYLKVQKELEVRQQQTYERNNNPRPFQAKYMLSGMARCGYCGAPLKIVLGHKRKDGSRTVKYHCANRFPRKTKGVTVYNDNKRCDSGTYDLSNLENTVIDNLIGFQENNDSLLKIINGNNQPMLDTSSFKKQISQIDKKIQKSSDLYLNDFITMDELKDRTDSLQAEKKLLEAKISENKFNDSTDVFELMKTQLGSIPINELSYDNKKRIVNNLVSKVDVTADNVDIIFKFQLA

SEQ ID NO: 1616 - protein, 469 aa, synthetic construct
MSYTTLVRAAVYLRISEDRSGEQLGVARQREDCLKLCGQRKWVPVEYLDNDVSASTGKRRPAYEQMLADITAGKIAAVVAWDLDRLHRRPVELEAFMSLADEKRLALATVAGDVDLATPQGRLVARLKGSVAAHETEHKRARQRRAARQKAERGLPNWSKAFGYLPGPNGPEPDPRTAPLVKQAYADILAGASLGDVCRQWNGAGAFTITGRPWTTTTLSKFLRKPRNAGLRAYKGARYGPVDRDAIVGKAQWSPLVDEATFWAAQAVLDAPGRAPGRKSVRRHLLTGLAGCGKCGNHLAGSYRTDGKVVYVCKACHGVAILADNIEPILYHIVAERLAMPDAVDLLRREIPDAAEAGTIRLELETLYGELDRLAVERAEGLLTARQVKISTDIVNAKITKLQARQLDQERLRVFDGIPLGTPQVAGMIAELSPDRFRAVLDVLAEVVVQPVGKSGRIFNPERVQVNWR

SEQ ID NO: 1617 - protein, 452 aa, synthetic construct
MKAAIYIRVSTREQVENYSIQAQTEKLTALCRSKDWDVYDIFIDGGYSGSNMNRPALNEMLGKLHEIDAVVVYRLDRLSRSQRDTLTLIEEYFLKNNVEFVSLSETLDTSSPFGRAMIGILSVFAQLERETIRDRMVMGKIKRIEAGLPLTTAKGRTFGYDVIDTKLYINEEEAKQLQLIYDIFEEEQSITFLQKRLKKLGFKVRTYNRYNNWLTNDLYCGYVSYKDKVHVKGIHEPIISEEQFYRVQEIFTRMGKNPNMNRDSASLLNNLVVCSKCGLGFVHRRKDIVSRGKKYHYRYYSCKTYKHIHELEKCGNKIWRADKLEELIIDRVNSYSLASRNMDKEDELDSLNEKLKIEHAKKRRLFELYINGSYEVSELDSMMNDIDAQINYYESQIEANKERKKNKKIQENLMHLATVDFDSLEFREKQLYLKSLINKIYIDGEQVTIEWL

SEQ ID NO: 1618 - protein, 469 aa, synthetic construct
MSYTTPVRAAVYLRISEDRSGEQLGVARQREDCLKLCGQRKWVPVEYLDNDVSASTGKRRPAYEQMLADITAGKIAAVVAWDLDRLHRRPIELEAFMSLADEKRLALATVAGDVDLATPQGRLVARLKGSVAAHETEHKKARQRRAARQKAERGHPNWSKAFGYLPGPNGPEPDPRTAPLVKQAYADILAGASLGDVCRRWNGAGAFTITGRPWTTTTMSKFLRKPRNAGLRAYKGARYGPVDRDAIVGKAQWSPLVDEATFWAAQAVLDAPGRAPGRRSVRRHLLTGLAGCGKCGNHLAGSYRTDGRVVYVCKACHGVAILADNIVPILYHIVAERLAMPDAVDLLRREIHDAAEAETIRLELETLYGELDCLAVERAEGLLTARQVKISTDIVNAKITKLQARQLDQERLRVLDGIPLGTPQVAGMIAELSPDRFRAVLDVLAEVVVQPVGKGGRIFNPERVQVNWR

SEQ ID NO: 1619 - protein, 485 aa, synthetic construct
MTRKVAIYTRVSTTNQAEEGFSIDEQIDRLTKYAEAMGWQVSDTYTDAGLSGAKLERPAMQRLINDIEDKAFDTVLVYKLDRLSRSVRDTLYLVKDVFTKNKIDFISLNESIDTSSAMGSLFLTILSAINEFERENIKERMTMGKLGRAKSGKSMMWTKTAFGYYHNRRTGILEIVPPQATIVEQIFTDYLSGISLTKLRDKLNESGHIGKDIPWSYRALRQTLDNPVYCGYIKFKDSLFEGMHEPIIPYETYLKVQKELEERQQQTYERNNNPRPFQAKYMLSGMARCGYCGAPLRIVLGHKRKDGSRTMKYHCANRFPRKTKGVTVYNDNKKCDSGTYDLSNLENTVIDYLIGLQENNDSLLKIINGNNQPIPDTSSFKKQISQIDKKIQKNSDLYLNDFITMDELKDRTDSLQAEKKLLKAKISESKFNDSTDVFELVKTQLGSIPINELSYDNKKKIVNNLVSKVDVTADNVDIIFKFQLA

SEQ ID NO: 1620 - protein, 485 aa, synthetic construct
MTKKVAIYTRVSTTNQAEEGFSIDEQVDRLTKYAEAMGWQVSDTYTDAGLSGAKLERPAMQRLINDIENKAFDTVLVYKLDRLSRSVRDTLYLVKDVFTKNKIDFISLNESIDTSSAMGSLFLTILSAINEFERENIRERMTMGKLGRAKSGKSMMWSKTAFGYYHNRETGILEIVPLQATIVEQIYTDYLSGISLTKLRDKLNESGHIGKDIPWSYRTLRQTLDNPVYCGYIKFKDSLFEGMHEPIIPYETYLKVQKELEVRQQQTYERNNNPRPFQAKYMLSGMARCGYCGAPLKIVLGHKRKDGSRTMKYHCANRFPRKTKGVTVYNDNKKCDSGTYDLSNLENTVIDILIGFQENNDSLLKIINGNNQPILDTSSFKKQISQIDKKIQKNSDLYLNDFITMDELKERTDSLQAKKKLLKAKISENKFNGSTDVFELVKTQLGSIPINELSYDNKKKIVNNLVSKVDVTADNVDIIFKFQLA

SEQ ID NO: 1621 - protein, 485 aa, synthetic construct
MTKKVAIYTRVSTTNQAEEGFSIDEQIDRLTKYAEAMGWQVSGTYTDAGFSGAKLERPAMQRLINDIENKAFDTVLVYKLDRLSRSVRDTLYLVKDVFTKNKIDFVSLNESINTSSAMGSLFLTILSAINEFERENIKERMTMGKLGRAKSGKSMMWAKTAFGYYHNRKTGILEVVPLQATIVEQIFTDYLSGISLTKLRDKLNESGHIGKDTPWSYRTLRQTLDNPVYCGYIKFKGSLFEGMHKPIIPYETYLKVQKELEERQQQTYERNNNPRPFQAKYMLSGMARCGYCGAPLRIVLGHKRRDGSRTMKYHCANRFPRKTRGVTVYNDNKKCDSGTYDLCNLENTVIDSLIGFQENNDSLLKIINGNNQPILDTSSFKRQISQIDKKIQKNSDLYLNDFITMDELKERTDSLQAEKRLLKAKVSENKFNDSTGVFELVKTQLGSIPINELSYDNKKKIVNNLVSKVDVTADNVDIIFKFQLA

SEQ ID NO: 1622 - protein, 485 aa, synthetic construct
MTKKVAIYTRVSTTNQAEEGFSIDEQIDRLTKYAEAMGWQVSDTYTDAGFSGAKLERPAMQRLINDIENKAFDTVLVYKLDRLSRSVRDTLYLVKDVFTKNKIDFVSLSESIDTSSAMGSLFLTILSAINEFERENIKERMTMGKLGRAKSGKSMMWTKTAFGYYHNRKTGILEIVPLQATIVEQIFTDYLSGISLTKLRDKLNESGHIGKDIPWSYRTLRQTLDNPVYCGYIKFKGSLFEGMHKPIVPYETYLKVQKELEERQQQTYERNNNPRPFQAKYMLSGMARCGYCGAPLRIVLGHKRKDGSRTMKYHCANRFPRKTKGITVYNDNKKCDSGTYDLSNLENIVIDNLIGFQENDDCLLKIINGNNQPILDTSRFEKQISQIDKKIQKNSDLYLNDFITMDELKDRTDSLQAEKKLLKAKISENKFNDSTDVFELVKTQLGSIPINELSYDNRKKIVNNLVSKVDVTADNVDIIFKFQLA

SEQ ID NO: 1623 - protein, 485 aa, synthetic construct
MTKKVAIYTRVSTTNQAEEGFSIDEQIDRLTKYAEAMGWQVSDTYTDAGSSGAKLERPAMQRLINDIENKAFDTVLVYKLDRLSRSVRDTLYLVEDVFTKNKIDFISLNESIDTSSAMGSLFLTILSAINEFERENIKERMTMGKLGRAKSGKSMMWTKTAFGYYHNRKTGILEIVPLQAAIVEQIFTDYLSGISLTKLRDKLNESGHIGKDIPWSYRTLRQTLDNPVYCGYIKFKGSLFEGMHKPIIPYETYLKVQKELEERQQQTYERNNNPRPFQAKYMLSGMARCGYCGAPLRIVLGHKRKDGSRTMKYHCANRFPRKTKGITVYNDNKKCDSGTYDLRNLENTVIDNLIGFQDNSDSLLKIINGNNQSILDTGNFKKQISQIDKKIQKNSDLYLNDFITMDELKDRTDSLQAEKELLKAKISENEFNDSTDVFELVKTQLGSIPINELSYDNKKKIVNDLVSKVDVTADSVDIIFKFQLA

SEQ ID NO: 1624 - protein, 485 aa, synthetic construct
MTKKVAIYTRVSTTNQAEEGFSIDEQIDRLTKYAEAMGWQVSDTYTDAGLSGAKLERPAMQRLINDIEDKAFDTVLVYKLDRLSRSVRDTLYLVKDVFIKNKIDFISLNESIDTSSAMGSLFLTILSAINEFERENIKERMTMGKLGRAKSGKSMMWAKTAFGYYHNRKTGILEIVPLQATIVEQIFTDYLSGISLTKLRDKLNESGHIGKDIPWSYRTLRQTLDNPVYCGYIKFKDSLFEGMHKPIIPYETYLKVQKELEERQQQAYERNNNPRPFQAKYMLSGVARCGYCGAPLRIVLGHKRKDGGRTMKYHCANRFPRRTKGITVYNDNKKCDSGTYDLNNLENTVVDNLIGFQENNDSLLKIINGNNQPILDTSSLKKQISQIDKKIQKNSDLYLNDFITMDELKDRTDSLQAEKKLLKAKISENKSNDSTDVFELVKTQLGCIPINELSYDNKKKIVNNLVSKVDVTADNVDIIFKFQLA

SEQ ID NO: 1625 - protein, 452 aa, synthetic construct
MKAAIYIRVSTREQVENYSIQAQTEKLTALCRSKDWDVYDIFIDGGYSGSNMNRPALNEMLSKLHEIDAVVVYRLDRLSRSQRDTITLIEEYFLKNNVEFVSLSETLDTSSPFGRAMIGILSVFAQLERETIRDRMVMGKIKRIEAGLPLTTAKGRTFGYDVIDTKLYINEEEARQLQLIYDIFEEEQSITFLQKRLKKLGFKVRTYNRYNNWLTNDLYCGYVSYKDKVHVKGIHEPIISEEQFYRVQEIFTRMGKNPNMNRDSASLLNNLVVCSKCGLGFVHRRKDAMSRSKKYHYRYYSCKTYKHIHELEKCGNKIWRADKLEELIINRVNNYSLASRNVDKEDELDSLNEKLKIEHAKKKRLFDLYVNGNYEVSELDSMMSDIDAQINYYESQIEASEELKKNRKIQENLADLATVDFDSLEFREKQLYLKSLINKIYIDGEQVTIEWL

SEQ ID NO: 1626 - protein, 469 aa, synthetic construct
MSYTTPVRAAVYLRISEDRSGEQLGVARQREDCLELCGQRKWVPVEYLDNDVSASTGKRRPAYEQMLADITAGKIAAVVAWDLDRLHRRPIELEAFMSLADEKRLALATVAGDVDLATPQGRLVARLKGSVAAHETEHKKARQRRAARQKAERGYPNWSKAFGYLPGPNGPEPDPRTAPLVKQAYADILAGASLGDVCRQWNDAGAFTITGRPWTTTTLSKFLRKPRNAGLRAYKGARYGPVDRDAIVGKAQWSPLVDEATFWAAQAVLDAPGRAPGRKSVRRHLLTGLAGCGKCGNHLAGSYRTDGRVVYACKTCHGVVILADNIVPILYHIVAERLAMPDAVDLLRREIHDAAEAETIRLELETLYGELDRLAVERAEGLLTARQVKISTDIVNAKITELQARQLDQERLRVLDGIPLGTPEVADMIAELSPDRFRAVLDVLAEVVVRPVGKGGRIFNPERVQVNWR

SEQ ID NO: 1627 - protein, 485 aa, synthetic construct
MTKKVAIYTRVSTTNQAEEGFSIDEQIDRLTKYAEAMGWQVSDTYTDAGCSGAKLERPAMQRLINDIENRAFDTVLVYKLDRLSRSVRDTLYLVKDVFTKNKIDFISLNESIDTSSAMGSLFLTILSAINEFERENIKERMTMGKLGRAKSGKSMMWTKTAFGYYHNRKTGILEIVPLQATIVEQIFADYLSGISLTKLRDKLNESGHIGKDIPWSYRTLRQTLDNPVYCGYIKFKDSLFEGMHKPIIPHETYLKVQKELEERQQQAYERNNNPRPFQAKYMLSGMARCGYCGAPLKIVLGHKRKDGSRTMKYHCANRFPRKTKGVTVYNGNKKCDSGTYDLCNLENTVIDNLIGFQKNNDSLLKIINGNNQPILDPSSFKEQISQIDKKIQKNSDLYLNDFITMDELKDRTDSLQAEKKLLKAKISENKFNDSTDVFELVKTQLGSIPINELSYDDKKKIVNSLVSKVDVTADNVDIIFKFQLA

SEQ ID NO: 1628 - protein, 469 aa, synthetic construct
MSYTTPVRAAVYLRISEDRSGEQLGVARQREDCLKLCDQRKWVPVEYLDNDVSASTGKRRPAYEQMLADITAGKIAAVVAWDLDRLHRRPIELEAFMSLADEKRLALATVAGDVDLATPQGRLVARLKGCVAAHETEHKRARQRRAARQKAERGYPNWSRAFGYLPGPNGPEPDPRTAPLVKQAYADILAGASLGDVCRQWNDAGAFTITGRPWTTTTLSKFLRKPRNAGLRAYKGARYGPVDRDAIVGKAQWSPLVDEATFWAAQAVLDAPGRAPGRKSVRRHLLTGLAGCGKCGNHLAGSYRTDGRVVYVCKACHGVAILADNIEPILYHIVAERLAMPDAVDLLRREIHDAAEAETIRLELETLYGELDRLAVERAEGLLTARQVKISTDIVNAKIAKLQARQLDQERLRVFDGIPLGTPQVAGMIAELSPDRFRAVLDVLAEVVVQPVGKSGRTFSPERVQVNWR

SEQ ID NO: 1629 - protein, 485 aa, synthetic construct
MTKKVAIYTRVSTTNQAEEGFSIDEQIDRLTRYAEAMGWQVSDTYTDAGFSGAKLERPAMQRLINDIENKAFDTVLVYKLDRLSRSVRDTLYLVKDVFTKNKIDFISLNESIDTGSAMGSLFLTILSAINEFERENIKERMTMGKLGRAKSGKSMMWTKTAFGYYHNRKTGILEIVPLQATIVKQIFTDYLSGISLTKLRDKLNESGHIGKDIPWSYRTLRQTLDNPVYCGYIKFKDSLFEGMHKPIIPYETYLRVQKELEERQQQTYERNNNPRPFQAKYMLSGMARCGYCGAPLRIVLGHKRKDGSRTMKYHCANRFPRKTKGVTVYNDNKKCNSGTYDLSNLENAVIDNLIGFQENSDSLLKIINGNNQPIQDTSSFKEQISQIDKKIQKNSELYLNDFITMDELKNRTDSLQAEKKLLKAKISENKFSDSTDVFELVKTQLGSIPISELSYDNKKKIVNNLVSKVGVTADNVDIIFKFQLA

SEQ ID NO: 1630 - protein, 485 aa, synthetic construct
MTRKVAIYTRVSTTNQAEEGFSIDEQIDRLTKYAEAMGWQVGDTYTDAGLSGAKLERPAMQRLINDIENKAFDTVLVYKLDRLSRSVRDTLYLVKDVFTKNKIDFISLNESIDTSSAMGGLFLTILSAINEFERENIKERMTMGKLGRAKSGKSMMWTKTAFGYYHNRKTGILEIVPLQATIVEQIFTDYLSGISLTKLRDKLNESGHIGKDIPWSYRTLRQTLDNPVYCGYIKFKDSLFEGLHKPIIPYETYLKVQKELEERQQQTYERNNNPRPFQAKYMLSGIARCGYCGAPLRIVLGHKRKDGSRTMKYHCANRFPRKTRGVTVYNDNKKCDSGTYDLSNLENTVIDNLIGFQENNDSLLKIISGNNQPILDTSSFKEQISQIDKKIQKNSDLYLNDFITMDELKDRTDSLQAEKKLLRAKISENKFNDSADVFELVKTQLGSIPINELSYDNKKKIVNNLVSKVDVTADNVDIIFKFQLA

SEQ ID NO: 1631 - protein, 469 aa, synthetic construct
MSYTTPVRAAVYLRISEDRSGEQLGVARQREDCLKLCGQRKWVPVEYLDNDVSASTGKRRPAYEQMLADITAGKIAAVVAWDLDRLHRRPVELEAFMSLADERRLALATVAGDVDLATPQGRLVARLKGVVAAHETEHKKARQRRAAKQKAERGLPNWSKAFGYLPGPNGPEPDPRTAPLVKQAYADILAGASLGDVCRQWNDAGAFTITGRPWTATTLSKFLRKPRNAGLRAYKGARYGPVDRDAIVGKAQWSPLVDEATFWAAQAVLDAPGRAPGRKSVRRHLLTGLACCGKCGNHLAGSYRTDGQVVYVCKACHGVAILADNIEPILYHIVAERLAMPDAVDLLRREAHDAAETETIRLELETLYGELDRLAVERAEGLLTARQVKISTDIVNAKITRLQARQLDQERLRVFDGIPLGTPQVAGMIAELSPDRFRAVLDVLAEVVVRPVGKSSRIFNPERVQVNWR

SEQ ID NO: 1632 - protein, 485 aa, synthetic construct
MTRKVAIYTRVSTTNQAEEGFSIDEQIDRLTKYAEAMGWQVSGTYTDAGLSGAKLERPAMQRLINDIENKAFDTVLVYKLDRLSRSVRDTLYLVKDVFTKNKIDFISLNESIDTSSAMGSLFLTILSAINEFERENIKERMAMGKLGRAKSGKSMMWTKTAFGYYHNRRTGILEIVPLQATIVEQIFTDYLGGISLTKLRDKLNESGHIGKDIPWSYRTLRQTLDNPVYCGYIKFKDSLFEGMHKPIIPYETYLKVQKELEERQQQTYERNNNPRPFQAKYMLSGMARCGYCGAPLRIVLGHKRKDGSRTMKYHCANRFPRKTKGVTVYNDNKKCDSGTYDLSNLENTVIDNLIGLQENNDSLLKIINGNNQPILDTSSFKKQISQIDKKIQKNSDLYLNDFITMDELKERTDSLQAEKKLLEAKISENRFNDSTDAFELVKTQLGSIPINELSYDNKKKIVNNLVSKVDVTADNVDIIFKFQLA

SEQ ID NO: 1633 - protein, 469 aa, synthetic construct
MSYTTPVRAAVYLRISEDRSGEQLGVARQREDCLKLCDQRKWVPVEYLDNDVSASTGKRRPAYEQMLADITAGKIAAVVAWDLDRLHRRPIELEAFMSLADEKRLALATVAGDVDLATPQGRLVARLKGSVAAHETEHKKARQRRAARQKAERGLPNWSKAFGYLPGPNGPEPDPRTAPLVKQAYADILAGASLGDVRRQWNDASAFTITGRPWTTTTLSKFLRKPRNAGLRAYKGARYGPVDRDAIVGKAQWSPLVDEATFWAAQAVLDSPGRAPGRKSVRRHLLTGLAGCGKCGNHLAGSYRTDGRVVYVCKTCHGVAILADNIEPILYHVVAERLAVPEAVDLLRREIHDAAEVETIRLELETLYGELDRLAVERAEGLLTARQVKISTDIVSAKIAQLQARQLDQERLRVFDGIPLGTPQVAGMIAELSPDRFRAVLDALAEVVVQPVGKSGRIFNPERVQVNWR

SEQ ID NO: 1634 - protein, 485 aa, synthetic construct
MTKKVAIYTRVSTTNQAEEGFSIDEQIDRLTKYAEAMGWQVSDTYTDAGFSGAKLERPAMQRLINDIENKAFDTVLVYKLDRLSRSVRDTLYLVKGVFTKNKIDFVSLNESIDTSSAMGSLFLTILSAINEFERENIKERMTMGKLGRAKSGKSMMWTKTAFGYYHNRKTGILEIVPLQATIVEQIFADYLSGISLTKLRDKLNESGHIGKDIPWSYRTLRQTLDNPVYCGYIKFKDSLFEGMHKPIIPYETYLKVQKELEERQQQTYERNNNPRPFQAKYMLSGMARCGYCGAPLRIVLGHKRKDGSRTMKYHCANRFPRKTKGATVYNDNKKCDSGTYDLSNLENTVIDNLIGLQENNDSLLKIINGNNQPILDTSSFKKRVSQIDKKIQKNSDLYLNDFITMDELKARTDSLQAEKELLKAKTSENKFDDSTDVFELVKTQLGSIPINELSYDNKKKIVNNLVSKVDVTADNVDIIFKFQLA

SEQ ID NO: 1635 - protein, 469 aa, synthetic construct
MSYTTPVRAAVYLRISEDRSGEQLGVARQREDCLELCDQRKWVPVEYLDNDVSASTGKRRPAYEQMLADITAGKIAAVVAWDLDRLHRRPIELEAFMSLADEKRLALATVAGDVDLATPQGRLVARLKGCVAAHETEHKKARQRRAARQKAERGLPNWSRAFGYLPGPNGPEPDPRTAPLVKRAYADILAGASLGDVCRQWNDAGAFTITGRPWTTTTLSKFLRKPRNAGLRAYKGARYGPVDRDAIVGKAQWSPLVDEATFWAAQAVLDAPGRAPGRKSVRRHLLTGLAGCGKCGNHLAGSYRTDGRVVYVCKACHGVAILADNIEPILYHIVAERLAMPDAVDLLRREIHDAAEAETIRLELETLYGELDRLAVERAEGLLTARQVKISTDIVNAKITKLQARQLDQERLRVFDGIPLGTPQVAGMIAGLSPDRFRAVLDVLAEVVVQPVGKSGRIFNPERVQVNWR

SEQ ID NO: 1636 - protein, 452 aa, synthetic construct
MKAAIYIRVSTREQVENYSIQAQTEKLTALCRSKDWDVYDIFIDGGYSGSNMNRPALNEMLSKLHEIDAVVVYRLDRLSRSQRDTITLIEEYFLKNNVEFVSLSETLDTSSPFGRAMIGILSVFAQLERETIRDRMVMGKIKRIEAGLPLTTAKGRTFGYDVIDTKLYINEEEAKQLRLIYDIFEEEQSITSLQKRLKKLGFKVRAYNRYNNWLTNDLYCGYVSYKDKVHVKGIHEPIVSEEQFYRVQEIFARMGKNPNMNRDSASLLNNLVVCSKCGLSFVHRRKDAMGRDKKYHYRYYSCKTYKHIHELEKCGNKIWRADELEELIINRVNNYSVANRNMDKEEELDSLNEKLKIEHAKKKRLFDLYINGNYEVSELDSMMSDIDAQISNYESQIEASEELKRNKKIQVTLADLAAVDYDSLEFREKQLYLKSLINKIYIDGEQVTIEWL

SEQ ID NO: 1637 - protein, 469 aa, synthetic construct
MCHTTPVRAAVYLRISEDRSGEQLGVARQREDCLKLCDQRKWVPVEYLDNDVSASTGKRRPAYEQMLADITAGKIAAVVAWDLDRLHRRPIELEAFMSLADEKRLALATVAGDVDLATPQGRLVARLKGSVAAHETEHKKARQRRAARQKAERGYPNWSKAFGYLPGSNGPEPDPRTAPLVKQAYADILAGASLGDVCRQWNAAGAFTITGRPWTTTTLSKFLRKPRNAGLRAYKGARYGPVDREAIVGKAQWSPLVDEATFWAAQAVLDAPGRAPGRKSVRRHLLTGLAGCGKCGNHLAGSYRTDGRVVYVCKACHGVAILADNIEPILYHIVEERLAMPDAVDLLRREIHDAAEAETIRLELETLYGELDRLAVERAEGLLTARQVKISTDVVDAKITKLQARQLDQERLRVFDGIPLGTPQVAGMIAELSPDRFRAVLDVLAEVVVQPVGKGGRVFNPERVQVNWR

SEQ ID NO: 1638 - protein, 485 aa, synthetic construct
MTRKVAIYTRVSTTNQAEEGFSIDEQIDRLTKYAEAMGWQVSDTYTDAGLSGAKLERPAMQRLINDIENKAFDTVLVYKLDRLSRSVRDTLYLVKDVFTKNKIDFISLNESIDTSSAMGSLFLTILSAINEFERETIKERMTMGKLGRAKSGKSMMWTKTAFGYHHNRKTGILEIVPLQATIVEQIFTDYLSGISLTKLRDKLNESGHIGKDIPWSYRTLRQTLDNPVYCGYIKFKDSLFEGMHKPIIPYETYLKVQKELEERQQQTYERNNNSRPFQAKYMLSGMARCGYCGAPLRIVLGHKRKDGSRTMKYHCANRFPRKTKGVTVYNDNKKCDSGTYDLSNLESTVIDHLIGFQENSDSLLRIINGNNQPILDTSSFKKQISQIDKKIQKNSDLYLNDFITMDELKDRTDSLQAEKKLLKAKISENKFSDSTDVFELVKTQLGSIPINELSYDNKKKIVNNLVSKVDVTADNVDIIFKFQLA

SEQ ID NO: 1639 - protein, 469 aa, synthetic construct
MSYTTPVRAAVYLRISEDRSGEQLGVARQREDCLKLCDQRKWVPVEYLDNDVSASTGKRRPAYEQMLADITAGKIAAVVAWDLDRLHRRPIELEAFMSLADEKRLALATVAGDVDLATPQGRLVARLKGSVAAHETEHKKARQRRAARQKAERGYPNWSKAFGYLPGPNGPEPDPRTAPLVKQAYADILAGASLGDVCRRWNDAGAFTITGRPWTTTTLSKFLRKPRNAGLRAYRGARYGPVDRDAIVGKAQWSPLVDETTFWAAQAVLDAPGRAPGRKSVRRHLLTGLAGCGKCGNHLAGSYRTDGRVVYVCKACHGVAILADNIEPILYHIVAERLAMPGAVDLLCREIHDAAEAVTIRLELETLYGELDRLAVERAEGLLTARQVKISTDIVNAKITKLQARQLDQVRLRVFEGIPLGTPQVAGKIAELSPDRFRAVLDVLAEVVVQPVGKSGRIFNPERVQVNWR

SEQ ID NO: 1640 - protein, 469 aa, synthetic construct
MCYTTPVRAAVYLRISEDRSGEQLGVARQREDCLKLCDQRKWVPVEYLDNDVSASTGKRRPAYEQMLADITAGKIAAVVAWDLDRLHRRPIELEAFMSLADEKRLALATVAGDVDLATPQGRLVARLKGSVAAHETEHKKARQRRAARQKAERGYPNWSKAFGYLPGPNGPEPDPRTAPLVKQAYANILAGASLGDVCRQWNDAGAFTITGRPWTTTTLSKFLRKPRNAGLRAYKGARYGPVDRDAIVGKAQWSPLVDEATFWAAQAVLDAPGRAPGRKSVRRHLLTGLAGCGKCGNHLAGSYRTDGRVVYVCKACHGVAILADNIEPILYHIVAERLAMPDAVDLLRRETHDAAEAETIRLELETLYGELDRLAVERAEGLLTARQVKISTDIVNAKIVKLQARQLDQERLRVFDGIPLGTPQVAGMIAELSPNRFRAVLDVLAEVVVQPVGKSGRIFNPERVQVNWR

SEQ ID NO: 1641 - protein, 452 aa, synthetic construct
MKAAIYIRVSTREQVENYSIQAQTEKLTALCRSKDWDVYDIFVDGGYSGSNMNRPALNEMLSKLHEIDAVVVYRLDRLSRSQRDTITLIEEYFLKNNVEFVSLSETLDTSSPFGRAMIGILSVFAQLERETIRDRMVMGKIKRIEAGLPLTTAKGRTFGYDVIDTKLYINEEEAKQLQLIYDIFEEEQSITFLQRRLKELGFKVRTYSCYNNWLTNDLYCGYVSYKDKVHVRGIHEPIISEEQYYRVQEIFARMGKNPNMNRDSASLLNNLVVCSKCGLGFVHRRKDAMSRDKKYHYRYYSCKTYKHIHELEKCGNKIWRADELEELVINRVNSYSVASRNVDKGDELDSLNEKLKIEYAKKKRLFDLYINGSYEVSELDSMMNDINAQINYYESQIEANEGLKKNKKIQENLANLATVDFDSLEFREKQLYLKSLINKIYIDGEQVTIEWL

SEQ ID NO: 1642 - protein, 469 aa, synthetic construct
MSYTTPVRAAVYLRISEDRSGERLGVARQREDCLKLCDQRKWVPVEYLDNDVSASTGKRRPAYEQMLADITAGKIAAVVAWDLDRLHRRPIELEAFMSLADEKRLALATVAGDVDLATPQGRLVARLKGSVAAHETEHKKARQRRAARQKAERGYPNWSKAFGYLPGPNGPEPDPRTAPLVKQAYVDILAGASLGDVCRRWNDAGAFTITGRPWTTTTLSKFLRKPRNAGLRAYKGARYGPVDRDAIVGKAQWSPLVDEATFWAAQAVLDAPGRAPGRKSVRRHLLTGLAGCGKCGNHLAGSYRTDGRVVYVCKACHGVAILADNIVPILYHIVAERLAMPDAVDLLRREIHDAAEAETIRLELETLYGELDRLAVERAEGLLTARQVKISTDIVNAKITKLQARQLDQERMRVLDGIPLGTPQVAGMIAELSPDRFRAVLDVLAEVVVQPVGKGGRILNPERVQVIWR

SEQ ID NO: 1643 - protein, 485 aa, synthetic construct
MTKKVAIYTRVSTANQAEEGFSIDEQIDRLTKYAEAMGWQVSDTYTDAGFSGAKLERPAMQRLINDIENKAFDTVLVYKLDRLSRSVRDTLYLVKDVFTKNKIDFISLNECIDTSSAMGSLFLTILSAINEFERENIKERMTMGKLGRAKSGKSMMWTKTAFGYYHNRKTGILEIVPLQATIVEQIFTDYLSGISLTKLRDKLNESGHVGKDIPWSYRTLRQTLDNPVYCGYIKFKGGLFEGMHKPIIPYETYLKVQKELEERQQQTYERNNNPRPFQAKYMLSGMARCGYCGAPLRIVLGHKRKDGSRTMKYHCANRFPRKTRGVTVYNDNKKCDSGTYDLSTLENTVIDSLIGLQENNDSLLGIISGNNQPILDTSSFKKQISQIDKKIQKNSDLYLNGFITMDELKDRTDSLQAEKRLLKAKISENKFNDSTDVFELVKTQLGSIPINELSYDNKKKIVNSLVSKVDVTADNVDIIFKFQLA

SEQ ID NO: 1644 - protein, 485 aa, synthetic construct
MTKKVAIYTRVSTTNQAEEGFSIDEQIDRLTKYAEAMGWQVSGTYTDAGFSGAKLERPAMQRLINEIENKVFDTVLVYKLDRLSRSVRDTLYLVKDVFTKNKIDFISLNESIDTSSAMGSLFLTILSAINEFERENIKERMTMGKLGRAKSGKSMMWTKTAFGYYHNRKTGILEIVPLQATIVEQIYTDYLSGISLTKLRDKLNESGHIGKDIPWSYRTLRRTLDNPVYCGYIKFKDSLFEGMHKPIISYETYLKVQKELEERQQQTYERNNNPRPFQAKYMLSGMARCGYCGAPLRIVLGHKRKDGSRTMKYHCANRFPRKTKGVTVYNDNKKCDSGTYDLSNLENTVIDNLIGFQENNDSLLKIINGNNQPILDTSSFEEQISQIDKKIQKNSDLYLNDFITMDELKDRIDSLQAEKKLLKARISENKFNDSTDVFELMKTQLGSIPINELSYDNKKKIVNNLVSKVDVTADNVDIIFKFQLA

SEQ ID NO: 1645 - protein, 452 aa, synthetic construct
MKAAIYIRVSTREQVENYSIQAQTEKLTALCRSKDWDVYDVFIDGGYSGSNMNRPALNEMLSKLHEIDAVVVYRLDRLSRSQRDTITLIEEYFLKNNVEFVSLSETLDTSSPFGRAMIGILSVFAQLERETIRDRMVMGKIKRIEAGLPLTTAKGRTFGYDVIDTKLYINEEEAKQLQLIYDIFEEEQSITFLQKRLKKLGFKVRTYSHYNNWLTNDLYCGYVSYKDKVHVKGIHEPIISEEQFYRVQEIFARMGKNPNVNRDSASLLNNLVVCSKCGLGFVHRRKDTMSRGKKYHYRYYSCKTYKHIHELEKCGNKIWRADKLEELVINRVNNYNFASRNADKEDELDSLNEKLRIEHAKKKRLFDLYINGSYEVSELDSMMNDVDAQINYYESQIEANEELKKSKKVQENLANQATVDYDSLEFREKQLYLKSLINKIYIDGEQVTIEWL

SEQ ID NO: 1646 - protein, 452 aa, synthetic construct
MKAAIYIRVSTQEQVENYSIQAQTEKLTALCRSKDWDVYDIFIDGGYSGSNMNRPALNEMLSKLHEIDAVVVYRLDRLSRSQRDTTTLIEEYFLKNNVEFVSLSETLDTSSPFGRAMIGILSVFAQLERETIRDRMVMGKIKRIEAGLPLTTAKGRTFGYDVIDTKLYINEEEAKQLQLIYDIFEEEQSITFLQKRLKKLGFKVRTYNRYNNWLTNDLYCGYVSYKDEVHVKGIHEPIISEEQFYRVQEIFTRMGKNPNMNRDSASLLNNLVVCSKCGLGFVHRSKDTMCRGKKYHYRYYSCKTYKHTHELEKCGNKIWRADKLEELIINRVNSYSFASRNVDKEDKLDSLNEKLRIEHGKKKRLFDLYINGSYEVSELDSMMNDINAQINYYESQIEANEELKKNKKIQENLADLATVDFDSLEFREKQLYLKGLISKIYIDGEQVTIEWL

SEQ ID NO: 1647 - protein, 452 aa, synthetic construct
MKAAIYIRVSTREQVENYSIQAQTEKLTALCRSKDWDVYDIFIDGGYSGSNMNRPALNEMLSKLHEIDAVVVYRLDRLSRSQRDTITLIEEYFLKNNVEFVSLSETLDTSSPFGRAMIGILSVFAQLERETIRDRMVMGKIKRIEAGLPLTTAKGRTFGYDVIDTKLYINEEEAKQLQLIYDIFEEEQSITLLQKRLKKLGFKVHTYSRYNNWLTNDLYCGYVSYKDKVHVKGIHEPIISEEQFYRVQEIFTRTGKNPNMNRDSASLLNNLVVCGKCGLGFVHRRKDTTSRGKKYHYRYYSCKTYKHTHELEKCGNKIWRADKLEELIINRVNNYSFASRNVDKEDELDSLNEKLRLEHVKKKRLFDLYINGSYEVSELDCMMNDIDAQINYYESQIEANEELKKDKKIQESLANLATVDYDSLEFREKQLYLKSLINKIYIDGEQVTIEWL

SEQ ID NO: 1648 - protein, 452 aa, synthetic construct
MKAAIYIRVSTREQVENYSIQAQTEKLTALCRSKDWDVYDIFIDGGYSGSNMNRPALNEMLSKLHEIDAVVVYRLDRLSRSQRDTITLIEEYFLKNNVEFVSLSETLDTSSPFGRAMIGILSVFAQLERETIRDRMVMGKIKRIEAGLPLTTAKGRTFGYNVIDTKLYINEEEAKQLQLIYDIFEEEQSITFLQKRLKKLGFKVHTYNRYNNWLTNDLYCGYVSYKDKVHVKGIHKPIISEEQFYRVQEIFTRMGKSPNMNRDSASLLNNLVVCSKCGLGFVHRRKDAMSRDKKYHYRYYSCKTYKHIHELEKCGNKIWRADKLEELIINRVNNYSIASRNTDKEDKLDSLNEKLKIEHAKKRRVFELYINGSYEVSELDSMMSDIDAQIDYYESQIEVNEELKKNKKIQENLAHLATVDFDSLEFREKQLYLKSLIHKIYIDGEQVTIEWL

SEQ ID NO: 1649 - protein, 469 aa, synthetic construct
MCYTTPVRAAVYLRISEDRSGEQLGVARQREDCLKLCDQRKWVPVEYLDNDVSASTGKRRPAYEQMLADITAGKIAAVVAWDLDRLHRRPIELEAFMSLADEKRLALATVAGDVDLATPQGRLVARLKGCVAAHETEHKKARQRRAARQKAERGYPNWSRAFGYLPGPNGPEPDPRTAPLVKQAYTDILAGASLGDVCRQWNDAGAFTITGRPWATTTLSKFLRKPRNAGLRAYKGARYGPVDRDAIVGKAQWSPLVDEATFWAAQAVLDAPGRAPGRKSVRRHLLTGLAGCGKCGNHLAGSYRTDGRVVYVCKACHGVAILADNIEPILYHIVAERLAMPDAVDLLRRETHDAAEAETIRLGLETLYGELDRLAVERAEGLLTARQVKISTDIVNAKITKLQARQLDQERLRVFEGIPLGTPQVAGMIAELSPDRFRAVLDVLAEVVVQPVGKSGRIFNPERVQVNWR

SEQ ID NO: 1650 - protein, 485 aa, synthetic construct
MTKKVAIYTRVSTINQAEEGFSIDEQIDRLTKYAEAMGWQVSDTYTDAGFSGAKLERPAMQRLINDIENKAFDTVLVYKLDRLSRSVRDTLYLVKDVFTKNRIDFISLNESIDTSSAMGSLFLTILSAINEFERENIRERMTMGKLGRAKSGKSMMWTKTAFGYYHNRKTGILEIVPLQATIVEQIFTDYLRGISLTKLRDKLNESGHIGKDIPWSYRTLRQTLGNPVYCGYIKFKGSLFEGMHEPIIPYETFLKVQRELEERQQQTYERNNNPRPFQAKYMLSGMARCGYCGAPLKIVLGHKRKDGGRTMKYHCANRLPRKTKGVTVYNDNKKCDSGTYDLSDLENTVIDNLIGFQENNDSLLKIINGNNQPILDTSSFKNQISQIDKKIQKNSDLYLNDFITMDELKDRTDSLQAEKKLLKAKISENKFNDSTDVFELVKTQLGSIPINELSYDNKKKIVNNLVSKVDVTADNVDIIFKFQLA

SEQ ID NO: 1651 - protein, 485 aa, synthetic construct
MTKKVAIYTRVSTTNQAEEGFSIDEQIDRLTKYAEAMGWQVSDTYTDAGFSGAKLERPAMQRLINDIENKAFDTVLVYKLDRLSRSVRDTLYLVKDVFTKNKIDFISLNESINTGSAMGSLFLTILSAINEFERENIKERMTMGKLGRAKSGKSMMWTKTAFGYYHNRKTGILEIVPLQATIVEQIFTDYLSGISLTKLRDKLNESGHIGKDIPWSYRTLRQTLDNPVYCGYIKFKGSLFEGMHKPIIPYETYLKVQKELEERQQQAYERNNNPRPFQAKYMLSGMARCGYCGAPLKIVLGRKRKDGSRTMKYHCANRFPRKTKGITVYNDNKKCDSGTYDLSNLENTVIDNLIGFQENDDSLLKIINGNNQPILDTSSFEEQISQIDKKIQKNSDLYLNDFITMDELKDRTNSLQAEKKLLRAKISENKFNDSTEVFELVKTQLGSIPINELSYDNKKKIVNNLVSKVDVTADNVDIIFKFQLA

SEQ ID NO: 1652 - protein, 485 aa, synthetic construct
MTKKVAIYTRVSTTNQAEEGFSIDEQIDRLTKYAEAMGWQVSDTYTDAGFSGAKLERPAMQRLINDIENKAFDTVLVYKLDRLSRSVRDTLYLVKDVFTKNKIDFISLNESIDTSSAMGSLFLTILSAINEFERENIKERMTMGKLGRAKSGKSMMWTKTAFGYYHNRKTGILEIVPLQATIVEQIFTDYLSGISLTKLRDKLNESGHIGKDIPWSYRTLRQTLDNPVYCGYIKFKDSLFVGMHKPIIPYETYLKVQKELKERQQQTYGRNNNPRPFQAKYMLSGMARCGYCGAPLRIVLGHKRKDGSRTMKYHCANRFPRKTKGITVYNDNKKCDSGTYDLSNLENAVIDNLIGFQENNDSLLKIINGNNRPILDTSSLKKQISQIDKKIQKNSDLYLNDFITMDELKDRTDSLQAEKKVLKAKISENKFNDSTDVFELVKTQLGSIPINELSYDNKKKIVNNLVSKVDVTADNVDIIFKFQLA

SEQ ID NO: 1653 - protein, 485 aa, synthetic construct
MTKKVAIYTRVSTTNQAEEGFSIDEQIDRLTKYAEAMGWQVSDTYTDAGFSGAKLERPAMQRLINDIENKAFDTVLVYKLDRLSRSVRDTLYLVKDVFTKNKIDFISLNESINTSSAMGSLFLTILSAINEFERENIKERMTMGKLGRAKSGKSMMWTKTAFGYYHNRKTGILEIVPLQATIVEQIFTDYLSGISLTKLRDKLNESGHIGKDIPWSYRTLRQTLDNPVYCGYIKFKDSLFEGMHKPIIPYETYLKVQKELEERQQQAYERNNNPRPFQAKYMLSGMARCGYCGAPLKIVLGHKRKDGSRTMKYHCANRFPRKTKGITVYNDNKKCDSGTYDLSNLENTVIDNLIGFQENNDSLLKIINGNNRPILDTSSFKKRISQIDKKIQKNSDLYLNDFITMDELKDRTDSLQAEKKLLKAKISENKFNDSTDVFELVKTQLGSIPINELSYDNKKKIVNNLVSKVDVTADNVDIIFKFQLA

SEQ ID NO: 1654 - protein, 469 aa, synthetic construct
MSYTTPVRAAVYLRISEDRSGEQLGVARQREDCLKLCDQRKWVPVEYLDNDVSASTGKRRPAYEQMLADITAGKIAAVVAWDLDRLHRRPIELEAFMSLADEKRLALATVAGDVDLATPQGRLVARLKGSVAAHETEHKKARQRRAARQKAERGHPNWSKAFGYLPGPNGPEPDPRTAPLVKQAYADILAGASLGDVCRQWNGAGAFTITGRPWTTTTLSKFLRKPRNAGLRAYKGARYGPVDRDAIVGKAQWSPLVDEATFWAAQAVLDAPGRAPGRKSVRRHLLTGLAGCGKCGNHLAGSYRTDGRVVYVCKACHGVAILADNIEPILYHVVAERLAMPDAVDLLRCEIHDAAEAETIRLELETLYGELDRLAVERAEGLLTARQVKISTDIVNAKITKLQARQLDQERLRVFDGIPLGTPQVAGMIAELSPDRFRAVLDVLAEVVVQPVGKSGRIFNPERVQVNWR

SEQ ID NO: 1655 - protein, 452 aa, synthetic construct
MKAAIYIRVSTQEQVGNYSIQAQTEKLTALCRSKDWDVYDIFIDGGYSGSNMNRPALNEMLSKLHEIDAVVVYRLDRLSRSQRDTTTLIEEYFLKNNVEFVSLSETLDTSSPFGRAMIGILSVFAQLERETIRDRMVMGKIKRIEAGLPLTTAKGRTFGYDVIDTKLYINEEEAKQLQLIYDIFEEEQSITSLQKRLKKLGFKVRTYNRYNNWLTNDLYCGYVSYKDKVRVKGIHEPIISEEQFYRVQEIFTRMGKNPNMNRDSASLLSNLVVCSKCGLSFVHRSKDTMSRGKKYHYRYYSCKTYKHTHELEKCGNKTWRADKLEELIIDRVNNYSFASRNVDKVDELDSLNEKLKIEHAKKKRLFDLYINGSYEVSELDSMMNDIDAQINYYESQIEANEELNKNKKIQENLADLATVDFDSLEFREKRLYLKSLINKIYIDGEQVTIEWL

SEQ ID NO: 1656 - protein, 452 aa, synthetic construct
MKAAIYIRVSTREQVENYSIQAQTEKLTALCRSKDWDVYDIFIDGGYSGSNMNRPALNEMLSKLHEIDAVVVYRLDRLSRSQRDTITLIEEYFLKNNVEFVSLSETLDTSSPFGRAMIGILSVFAQLERETIRDRMVMGKIKRIEAGLPLTTAKGRTFGYDVIDTKLYINEEEAKQLQLIYDIFEEEQSITSLQKRLKKLGFKVRTYNRYNSWLTNDLYCGYVSYRDKVHVKGIHEPIISEEQFYRVQEIFTRMGKNPNMNRDSASLLNNLVVCSKCGLGFVHRRKDTMSRGKKYYYRYYSCKTYKHIHELEKCGNKIWRADKLEELIINRVNNYSIASRSVDKEVELDSLNEKLKIEHTKKRRLFDLYINGSYEVSELDSMMNDIDAQISYYESQIEANEELRKNKKIQKNLADLATVDYDSLEFREKQLYLKSLINKIYIDGEQVTIEWL

SEQ ID NO: 1657 - protein, 485 aa, synthetic construct
MTKKVAIYTRVSTTNQAEEGFSIDEQIDRLTKYAEAMGWQVSDTYTDAGFSGAKLERPAMQRLINDIENKAFDTVLVYKLDRLSRSVRDTLYLVKDVFTKNKIDFISLNESIDTSSAMGSLFLTILSAINEFERENIKERMTMGKLGRAKSGKSMMWTKTAFGYYHNRKTGILEIVPLQATIVEQIFTDYLSGISLTKLRDKLNESGHIGKDIPWSYRTLRQTLDNPVYCGYIKFKDSLFEGMHKPIISYETYLKVQKELEERQQQTYERNNNPRPFQAKYMLSGMARCGYCGAPLRIVLGHKRKDGSRTMKYHCTNRFPRKTKGVTVYNDNKKCDSGTYDLSNLENTVIDNLIGFQENNDSLLRIINGNNLPILDTSSFKKRISQIDKKIQKNSDLYLNDFITMDELRDRTDSLQAEKRLLKAKISENKLNDSTDVFELVKTQLGSIPINELSYDNKKKIVNNLVSKVDVTADNVDIIFKFQLA

SEQ ID NO: 1658 - protein, 452 aa, synthetic construct
MKAAIYIRVSTREQVENYSIQAQTEKLTALCRSKDWDVYDIFIDGGYSGGNMNRPALNEMLSKLHEIDAVVVYRLDRLSRSQRDTITLIEEYFLKNNVEFVSLSETLDTSSPFGRAMVGILSVFAQLERETIRDRMVMGKIKRVEAGLPLTTAKGRTFGYDVIDTKLYINEEEAKQLQLIYDIFEEEQSITSLQKRLKKLGFKVRTYNRYNSWLTNDLYCGYVSYKDKVHVKGIHEPIISEEQFYRVQEIFTRMGKYPNMNRDSASLLNNLVVCCRCGLGFVHRRKDTMSRGKKYHYRYYSCKTYKHIHELEKCSNKIWRADKLEELIINRVNNYSLASRNADKEDELVSLNEKLKIEQAKKKRLFDLYINGSYEVSELDSMMNDIDAQINYYESQIEANEELKKNKKFQENLAGLATVDFDSLEFREKQLYLKSLINKIYIDGEQVTIEWL

SEQ ID NO: 1659 - protein, 452 aa, synthetic construct
MKAAIYIRVSTREQVENYSIQAQTEKLTALCRSKDWDVYDIFIDGGYSGSNMNRPALNEMLSKLHEIDAVVVYRLDRLSRSQRDTITLIEEYFLKNNVEFVSLSETLDTSSPFGRAMIGILSVFAQLERETIRDRMVMGKIKRIEAGLPLTTAKGRTFGYDVIDTKLYINKEEARQLQLIYDIFEEERSITFLQKRLKKLGFKVRTYNRYSNWLTNDLYCGYVSYKDKVHVKGIHEPIISEEQFYRVQEIFTRMGKNPNMNRGSASLLNNLVVCGKCGLGFVHRRKDAMSRDKRYHYRYYSCKTYKHIHELEKCGNKIWRADKLEELVINRVNNYSLAGRNVDKEDELDSLNEKLKVEHAKKKRLFDLYINGSCEVSELDSMMNDINAQISYYESQIEANEELKKNKKIQENLAHLATVDFDSLEFREKQLYLKSLINKIYIDDEQVTIEWL

SEQ ID NO: 1660 - protein, 469 aa, synthetic construct
MCYTTPVRAAVYLRISEDRSGEQLGVARQREDCLKLCDQRKWVPVEYLDNDVSASTGKRRPAYEQMLVDITAGKIAAVVTWDLDRLHRRPIELEAFMSLADEKRLALATVAGDVDLATPQGRLVARLKGSVAAHETEHKKARQRRAARQKAERGLPNWSKAFGYLPGPDGPEPDPRTAPLVKQAYADILAGASLGDVCRQWNAAGAFTITGRPWTTTTLSKFLRKPRNAGLRAYKGARYGPVDRDAIVGKAQWSPLVDEATFWAAQAVLDAPGRAPGRKSVRRHLLTGLAGCGKCGNHLAGSYRTDGRVVYVCKACHGVAILADNIEPILYHIVAERLAMPDAVDLLRREIHDAAEAETIRLELETLYGELDRLAVERAEGLLTARQVKISTDIVNAKITKLQTRQLDQERLRVLDGIPLGTPQVAGMIAGLSPDRFRAVLDILAEVVVQPVGKSGRIFNPERVQVNWR

SEQ ID NO: 1661 - protein, 469 aa, synthetic construct
MSYTTPVRAAVYLRISEDRSGEQLGVARQREDCLELCGQRKWVPVEYLDNDVSASTGKRRPAYEQMLADITAGKIAAVVAWDLDRLHRRPTELEAFMSLADEKRLALATVAGDVDLATPQGRLVARLKGSVAAHETEHKKARQRRAARQKAERGYPNWSKAFGYLPGPNGPEPDPRTAPLVKQAYADILAGASLGDVCRQWNDAGAFTITGRPWTTTTLSKFLRKPRNAGLRAYKGARYGPVDRDAIVGKAQWSPLVDEATFWAAQAVLDAPGRAPGRKSVRRHLLTGLAGCGKCGNRLAGSYRTDGRVVYVCKACHGVAILADNIVPILYHIVAERLAMPDAVDLLRREFHDAAEAEAIRLELETLYGELDCLAVERAEGLLTARQVKISTDIVNAKITKLQARQQDQERLRVLDGIPLGTPQVAGRIAELSPDRFRAVLDVLAEVVVQPVGKSGRISNPERVQVNWR

SEQ ID NO: 1662 - protein, 469 aa, synthetic construct
MSYTTPVRAAVYLRISEDRSGEQLGVARQREDCLKLCGQRKWVPVEYLDNDVSASTGKRRPAYEQMLADITAGKIAAVVAWDLDRLHRRPIELEAFMSLADEKRLALATVAGDVDLATPQGRLVARLKGSVAAHETEHKKARQRRAARQKAERGHPNWSKAFGYLPGPNGPEPDPRTAPLVKQAYADILAGASLGDVCRQWNDAGAFTITGRPWTTTTLSKFLRKPRNAGLRAYKGARYGPVDRDAIVGKAQWSPLVDEATFWAAQAVLDAPGRAPGRKSVRRHLLTGLAGCGKCGNHLAGSYRTDGRVVYVCKACHGVAILADNIVPILYHIVADRLAMPDAVDLLRREIHDAAEAETIRLELETQYDELDRLAVERAEGLLTARQVKISTDIVNAKITKLQARQLNQDRLRVFEGIPLGTPQVAGMIAELSPNRFRAVLDVLAEVVVQPVGKSGRIFNPERVQVNWR

SEQ ID NO: 1663 - protein, 469 aa, synthetic construct
MCYTTPVRAAVYLRISEDRSGEQLGVARQREDCLKLCDQRKWVPVEYLDNDVSASTGKRRPAYEQMLADITAGKIAAVVAWDLDRLHRRPIELEAFMSLADEKRLALATVAGDVDLATPQGRLVARLKGSVAAHETEHKKARQRRAARQKAERGHPNWSKAFGYLPGPNGPEPDPRTAPLVKQAYADILAGASLGDVCRQWNAAGALTITGRPWTTTTLSKFLRKPRNAGLRAYKGARYGPVDRNAIVGKAQWSPLVDETTFWAAQAVLDAPGRAPGRKSVRRHLLTGLAGCGKCGNHLAGSYRTDGRVVYVCKACHGVAILADNIEPILYHTVAGRLAMPGAVDLLRREIHDAAEAETLRLELETLYGELDRLAVERAEGLLTARQVKISTDIVSAKIAKLQARQLDQERLRVFDGIPLGTPQVAGVIAELSPNRFRAVLDVLAEVVVQPVGKSGRIFNPERVQVNWR

SEQ ID NO: 1664 - protein, 485 aa, synthetic construct
MTKKVAIYTRVSTTNQAEEGFSIDEQIDRLTKYAEAMGWQVSDTYTDAGFSGAKLERPAMQRLINDIENKAFDTVLVYKLDRLSRSVRDTLYLVKDVFTKSKIDFISLNECIDTSSAMGSLFLTILSAINEFERENIKERMTMGKLGRAKSGKSMMWTKTAFGYYHNRKTGILEIVPLQAAIVEQIFTDYLSGISLTKLRDKLNESGHIGKDIPWSYRTLRQTLDNPVYCGYIKFKDSLFEGMHKPIIPYETYLKVQKELEERQQQTYERNNNPRPFQAKYMLSGMARCGYCGAPLKIVLGHKRKDGSRTMKYHCANRFPRKTKGVTVYNDNKKCDSGTYDLSNLENTVIDNLIGFQEDNDSLLKIINGNNQPILDTSSLKKQISQIDEKIQKNSDLYLNDFITMDELKDRTDSLQAEKRLLKAKISENKFNDSTDVFELVKTQLGSTPINELGYDDKRKIVNNLVSKVDVTTDNVDIIFKFQLA

SEQ ID NO: 1665 - protein, 452 aa, synthetic construct
MKAAIYIRVSTREQVENYSIQAQTEKLTALCRSKDWDVYDIFIDGGYSGSNMNRPALNEMLSRLHEIDAVVVYRLDRLSRSQRDTITLIEEYFLKNNVEFVSLSETLDTSSPFGRAMIGILSVFAQLERETIRDRMVMGKIKRIEAGLPLTTAKGRTFGYDVIDTKLYINEEEAKQLQLIYDIFEEEQSITFLQKRLKKLGLKVRTYSRYNNWLTNDLYCGYVGYKDKVHVKGIHEPIISEEQFYRVQEIFTRMGKNPNMNRDSASLLSGLVVCSKCGLGFVHRRKDTTSRGKKYHYRYYSCKTYKHTHELERCGNKIWRADKLEELIISRVNDYSSASRNVGRDDELDSLNEKLKIEHAKKKRLFDLYINGSYEVSELDSMMNDIDAQINYYESQIEANGELKKNKKIQENLADLATVDFDSLEFREKQLYLKSLINKIYIDGEQVTIEWL

SEQ ID NO: 1666 - protein, 452 aa, synthetic construct
MKAAIYIRVSTQEQVGNYSIQAQTEKLTALCRSKDWDVYDIFIDGGYSGSNMNRPALNEMLSKLHEIDAVVVYRLDRLSRSQRDTTTLIEEYFLKNNVEFVSLSETLDTSSPFGRAMIGILSVFAQLERETIRDRMVMGKIKRIEAGLPLTTAKGRTFGYDVIDTKLYINEEEAKQLQLIYDIFEEVQSITFLQKRLKKLGFKVRTYNRYSNWLTNDLYCGYVSYKDKVHVKGIHEPIISEEQFYRVQEIFTRMGKNPNINRDSASLLSNLVVCSKCGLGFVHRSKDTMSRGKRYHYRYYSCKTYKHTHELEKCGNKTWRADKLEELIINRVSNYSFASRNVDKEDELDSLNEKLEIEHAKKKRLFDLYINGSYEVSELDSMMNDIDAQIDYYESQIEANEELKKNKKIQENLADLATVDFDSLEFREKQLYLKSLINKIYIDGEQVTIEWL

SEQ ID NO: 1667 - protein, 452 aa, synthetic construct
MKAAIYIRVSTREQVENYSIQAQTEKLTALCRSKDWDVYDIFIDGGYSGSNMNRPALNEMLSRLHEIDAVVVYRLDRLSRSQRDTITLIEEYFLKNNVEFVSLSETLDTSSPFGRAMIGILSVFAQLERETIRDRMVMGKIKRIEAGLPLTTAKGRTFGYDVIDTKLYINEEEAKQLRLIYDIFEEEQSITSLQKRLKKLGFKVRTYSRYNNWLTNDLYCGYVSYKDKVHVKGIHEPIISEEQFYRVQEIFTRMGKNPNMNRDSASLLNSLVVCSKCGLGFVHRRKDTTSRGKKYHYRYYSCKTYKHTHELEKCGNKIWRADTLEELIINRVSNYSLASRNVGKEDELDTLNEKLKIEHAKKKRLFDLYINGSYEVSELDSMMSDIDAQINYYERQIEANEELKKNKKIQENLAELATVDFDSLEFREKQLYLKSLINKIYIDGEQVTIEWL

SEQ ID NO: 1668 - protein, 485 aa, synthetic construct
MTKKVAIYTRVSTTNQAEEGFSIDEQTDRLTKYAEAMGWQVSDTYTDAGFSGAKLGRPAMQRLINDIENKAFDTVLVYKLDRLSRSVRDTLYLVKDVFTKNKIDFISLNESIDTSSAMGSLFLTILSAINEFERENIKERMTMGKLGRAKSGKSMMWTKTAFGYCHNRKTGILEIVPLQATIVEQIFTDYLSGISLTKLRDKLNESGHIGKDIPWSYRTLRQTLDNPVYCGYIKFKGSLFEGMHKPIIPYETYLKVQKELEERQQQTYERNNNPRPFQAKYMLSGMARCGYCGAPLRIVLGRRRKDGSRTMKYHCANRFPRKTKGVTVYNDNKKCDSGTYDLSNLENTVIDNLIGFQEDNDSLLKIINGNNQPILDTSSFKKQISQIDKKIRKNSDLYLNDFITMDELKDRTDSLQAEKKLLEAKTSENKFNDSTDVFELVKTQLGSIPINELSYDNRKKIVNNLVSKVDVTADNVNIIFKFQLA

SEQ ID NO: 1669 - protein, 485 aa, synthetic construct
MTKKVAIYTRVSTTNQAEDGFSIDEQIDRLTKYAEAMGWQVSDTYTDAGFSGAKLERPAMQRLINDIENKAFDTVLVYKLDRLSRSVRDTLYLVKDVFTKNKIDFISLNESIDTSSAMGSLFLTILSAINEFERENIKERMTMGKLGRAKSGKSMMWTKTAFGYYHNRKTGILEIMPLQATIVEQIFADYLSGISLTKLRDKLNESGHIGKDIPWSYRTLRQTLDNPVYCGYIKFKDSLFEGMHKPIITYETYLKVQKELEERQQQTYERNNNPRPFQAKYMLSGMARCGYCGAPLRIVLGHKRKDGSRTMKYHCANRFPRKTIGVTVYNDNKKCDSGTYDLSDLENTVIDNLIGFQENNDRLLKIINGNNQPILDTSSLKKQISQIDKKIQKNSDLYLNDFITMDELKDRTDSLQAEKKLLKAKISENKSNDSTDVFGLVKTQLGSIPINELSYDNKKKIVNNLVSKVDVTADNVDIIFKFQLA

SEQ ID NO: 1670 - protein, 469 aa, synthetic construct
MSYTTPVRAAVYLRISEDRSGEQLGVARQREDCLKLCGQRNWEPVEYLDNDVSASTGKRRPAYEQMLADITAGNIAAVVAWDLDRLHRRPVELEAFMSLADEKHLALATVAGDVDLATPQGRLVARLKGSVAAHETEHKKARQRRAARQKAERGHPNWSKAFGYLPGPNGPEPDPRTAPLVKQAYADILAGASLGDVCRQWNDAGASTITGRPWTTTTLSKFLRKPRNAGLRAYKGARYGPVDRNAIVGKAQWSPLVDEATFWAAQAVLDAPGRAPGRKSVRRHLLTGLAGCGKCGNHLAGSYRTDGRVVYVCKACHGVAILADNIEPILYHTVAERLAMPDAVDLLRRETHDAAEAETIRLELETQYGELDRLAVERAEGLLTARQVKISTDIVNAKITKLQARQLDQERLRVFDGIPLGTPQVAGIIAELSPNRFRAVLDALVEVVVQPVGKGGRISNPERVQVNWR

SEQ ID NO: 1671 - protein, 469 aa, synthetic construct
MSYTTPVRAAVYLRISEDRSGEQLGVARQREDCLKLCDQRKWAPVEYLDNDVSASTGRRRPAYEQMLADITAGRIAAVVAWDLDRLHRRPIELEAFMSLADEKRLALATVAGDVDLATPQGRLVARLKGSVAAHETEHKKARQRRAARQKAERGYPNWSKAFGYLPGLNGPEPDPRTAPLVKQAYADILAGASLGDVCRQWNDAGAFTTTGRPWTTTALSKFLRKPRNAGLRAYKGARYGPVDRDTIVGKAQWSPLVDEATFWAAQAVLDAPGRAPGRKSVRRHLLTGLAGCGKCGNHLAGSYRTDGQVVYVCKACHGVAILADNIEPILYRIVAERLAMPDAVDLLRREIHDAAEAETIRLELETLYGELDRLAVERAEGLLTARQVKISTDIVSAKITKLQARQLDQERLRVLDGIPLGTPQVAGMIAELSPDRFRAVLDVLAEVVVQPVGKSGRIFNPERVQVNWR

SEQ ID NO: 1672 - protein, 469 aa, synthetic construct
MSYTTPVRAAVYLRISEDRSGEQLGVARQREDCLKLCGQRKWVPVEYLDNDVSASTGKRRPAYEQMLADITAGKIAAVVAWDLDRLHRRPIELEAFMSLADEKRLALATVAGDVDLATPQGRLVARLKGCVAAHETEHKKARQRRAARQKAERGHPNWSKAFGYLPGPNGPEPDPRTAPLVKQAYADILAGASLGDVCRQWNGAGAFTITGRPWTTTTLSKFLRKPRNAGLRAYKGARYGPVDRDAIVGKAQWSPLVDEATFWAAQAVLDAPGRAPGRKSVRRHLLTGLAGCGKCGNHLAGSYRTDGQVVYVCKACYGVAILADNIVPILYHVVAERLAMPDAVDLLRHEIHDAAEAEAIRLELETLYGELDRLAVERAEGLLTARQVKISTDIVNAKITKLQARQLDQERLRVFNGIPLGTPQVAGVIAELSPDRFRAVLDVLVEVVVQPVGKGGRVFNPERVQVNWR

SEQ ID NO: 1673 - protein, 452 aa, synthetic construct
MKAAIYIRVSTQEQVGNYSIQAQTEKLTALCRSKDWDVYDIFIDGGYSGSNMNRPALNEMLSKLHEIDAVVVYRLDRLSRSQRDTTTLIEEYFLKNNVEFVSLSETLDTSSPFGRAMIGILSVFAQLERETIRDRMVMGKIKRIEAGLPLTTAKGRTFGYDVIDTKLYVNEEEAKQLRLIYDIFEEEQSITSLQKRLKKLGFKVRTYNRYNSWLTNDLYCGYVSYKDKVHVKGIHEPIISEEQFYRVQEIFTRMGKNPNMNRDSASLLSNLVVCSKCGLGFVHRSKDTMSRGKKYHYRYYSCKTYKHTHELEKCGNKTWRADKLEELIINRVNNYSFASRNADKEDELDSLNEKLKIEHARKKRLFDLYINGSYEVSELDSMMNDIDAQINYYESQIEANEELEKNKKIQENLADLATVDFGSLEFREKQLYLKSLINKIYIDGEQVTIEWL

SEQ ID NO: 1674 - protein, 485 aa, synthetic construct
MTKKVAIYTRVSTTNQAEDGFSIDEQVDRLTKYAEAMGWQVSDTYTDAGFSGAKLERPAMQRLINDIENKAFDTVLVYKLDRLSRSVRDTLYLVKDVFTKNKIDFISLNECIDTSSAMGSLFLTILSAINEFERENIKERMTMGKLGRAKSGKSMMWTRTAFGYYHNRKTGILEIVPLQATIVEQIFTDYLSGISLTKLRDKLNESGHIGKDIPWSYRTLRQTLDNPVYCGYIKFKDSLFEGMHKPIIPYETYLKAQKELEERQQQTYERNSNPRPFQAKYMLSGMARCGYCGAPLRIVLSHRRKDGSRTMKYHCANRFPRKTKGVTVYNDNKKCDSGTYDLSNLENTVIDYLIGLQENNDSLLKIINGNNQSILDTSSFKKQISQIDKKIQKNSDLYLNDFITMDELKDRTDSLQAEKKLLKAKISENKFNDSTDVFELVKTQLGSIPINELSYDNKKKIVNNLVSKVDVTADNVDIIFKFQLA

SEQ ID NO: 1675 - protein, 452 aa, synthetic construct
MKAAIYIRVSTREQVENFSIQAQTEKLTALCRSKDWDVYDIFIDGGYSGSNMNRPALNEMLSKLHEIDAVVVYRLDRLSRSQRDTITLIEEYFLKNNVEFVSLSETLDTSSPFGRAMIGILSVFAQLERETIRDRMVMGKIKRVEAGLPLTTAKGRTFGYDVIDTRLYINEEEAKQLRLIYDIFEEEQSITFLQKRLKKLGFKVRTYSCYNNWLTNDLYCGYVSYKDKVHVKGIHEPIISEEQFYRVQEIFTRMGKNPNMNRDSASLLSNLVVCSKCGLGFVHRRKDTMSRGKKYHYRYYSCKTYKHTHELEKCGNKIWRADKLEELIINRVNSYSFASRNVDKEDELDSLNEELKIEHAKKKRLFDLYVNGSYEVSELDSMMNDIDAQINYYESQIEANEELKKNKKIQENLADLATVDYDSLEFREKQLYLKSLINKIYIDGEQVTIEWL

SEQ ID NO: 1676 - protein, 452 aa, synthetic construct
MKAAIYIRVSTREQVENYSIQAQTEKLTALCRSKGWDVYDIFIDGGYSGSNMNRPALNEMLSKLREIDAVVVYRLDRLSRSQRDTITLIEEYFLKNNVEFVSLSETLDTSSPFGRAMIGILSVFAQLERETIRDRMVMGKIKRVEAGLPLTTAKGRTFGYDVIDTKLYINEGEAKQLRLIYDIFEEEQSITFLQKRLKKLGFKVRTYNCYNNWLTNDLYCGYVSYKDKVHVKGIHEPIISEEQFYRVQEIFTRMGKNPNMNRDSASLLNNLVVCSKCGLGFVHRRKDATSRDKKYHYRYYSCKTYKHIHELEKCGNKIWRADKLEELIINRVNNYSLASRNVDKEDELDSLNEKLKIEHAKKKRLFDLYINGSYDVSELDSMMNDIDAQINYYESQIEANEELKRNKKIQENLADLATVDFDSLEFREKQLYLKSLINKIYIDGEQVTIEWL

SEQ ID NO: 1677 - protein, 469 aa, synthetic construct
MSYTTPVRAAVYLRISEDRSGEQLGVARQREDCLKLCDQRKWVPVEYLDNDVSASTGRRRPAYEQMLADITAGKIAAVVAWDLDRLHRRPVELEAFMSLADEKRLALATVAGDVDLATPQGRLVARLKASVAAHETEHKKARQRRAARQKAERGHPNWSKAFGYLPGPNGPEPDPRTAPLVKQAYADILAGASLGDVCRQWNDAGAFTITGRPWTTTTLSKFLRKPRNAGLRAYKGARYGPVDRDAIVGKALWSPLVDEATFWEAQAVLDAPGRAPGRKSVRRHLLTGLAGCGKCGYHLAGSYRTDGRVVYVCKACHGVAILADNIEPILYHIVAERLAMPDAVDLLRREIHDAAEAETIRLELETLYGELDRLAVERAEGLLTARQVKISTDIVNAKITKLQARQLDQERLRVLDGIPLGTPRVAAMIAELSPDRFRAVLDVLAEVVVQPVGKSGRIFNPERVQVNWR

SEQ ID NO: 1678 - protein, 452 aa, synthetic construct
MKAAIYIRVSTQEQLENYSIQAQTEKLTALCRSKDWDVYDIFIDGGYSGSNMNRPALNEMLSKLHEIDAVVVYRLDRLSRSQRDTTTLIEEYFLKNNVEFVSLSETLDTSSPFGRAMIGILSVFAQLERETIRDRMVMGKIKRVESGLPLTTAKGRTFGYDVIDTKLYINEEEAKQLQLIYDIFEEEQSITSLQKRLKKLGFKVRTYNRYNSWLTNDLYCGYVSYKDKVHVKGIHEPIISEEQFYRVQEIFTRMGKNPNMNRDSASLLSNLVVCSKCGLGFVHRSKDTMSRGKKYHYRYYSCKTYKHTHELEKCGNKTWRADKLEELIISRVNNYSFASRSVDKEDELDSLNEKLKIEHAKKERLFDLYINGGYEVSELDSMMNDIDTQINCYESQIEANEELKENKKIQENLADLATVDFDSLEFREKQLYLRSLIHKIYIDGEQVTIEWL

SEQ ID NO: 1679 - protein, 469 aa, synthetic construct
MSYTTPVRAAVYLRISEDRSGEQLGVARQREDCLKLCGQRKWVPVEYLDNDVSASTGKRRPAYEQMLADITAGKIAAVVAWDLDRLHRRPIELEAFMSLADEKRLALATVAGDVDLATPQGRLVARLKGSVAAHETEHKRARQRRAARQKAERGYPNWSKAFGYLPGSNGPEPDPRTAPLVKQAYADILAGASLGDVCRQWNDAGAFTITGRPWTTTTLSKFLRKPRNAGLRAYKGARYGPVDRDAIVGKAQWSPLVDETTFWAAQAVLDAPGRAPGRKSVRRHLLTGLAGCGKCGNHLAGSYRTDGRVVYVCKACHGVAILADSIEPILYHIVAERLAMPDAVDLLRREIHDAAEAETIRLELETLHGELDRLAVERAEGLLTARQVKISTDIVNAKITELQARQLDQERLRVFDGIPLGTPRVAGVIAELSPDRFRAVLDVLAEVIVQPVGKSGRIFNPERVQVNWR

SEQ ID NO: 1680 - protein, 469 aa, synthetic construct
MSYTTPVCAAVYLRISEDRSGEQLGVARQREDCLKLCGQHNWVPVEYLDNDVSASTGKRRPAYEQMLADITAGKIAAVVAWDLDRLHRRPVELEAFMSLADEKRLALATVAGDVDLATPQGRLVARLKGSVAAHETEHKKARQRRAARQKAERGHPNWSKAFGYLPGPNGPEPDPRTAPLVKQAYADILAGASLGDVCRQWNDAGASTITGRPWTTTTLSKFLRKPRNAGLRAYKGARYGPVDRDAIVGKAQWSPLVDEATFWAAQAVLDAPGRAPGRKSVRRHLLTGLAGCGKCGYHLAGSYRTDGRVVYVCKACHGVAILADNIEPILYHIVTERLAVPDAVDLLRREIHDAAEAETIRLELETLYGELDRLAVERAEGLLTARQVKISTDIVNAKITKLRAHQLDQERLRVFDGIPLGTPQVAGTIAELSPDRFRAVLDVLAEVVVQPVGKSGRIFNPERVQVNWR

SEQ ID NO: 1681 - protein, 469 aa, synthetic construct
MCYTTPVRAAVYLRISEDRSGEQLGVARQREDCLKLCDQRKWVPVEYLDNDVSASTGKRRPAYEQMLADITAGKIAAVVAWDLDRLHRRPIELEAFMCLADEKRLALATVAGDVDLATPQGRLVARLKGSVAAHETEHKKARQRRAARQKAERGHPNWSKAFGYLPGPNGPEPDPRTAPLVEQAYADILAGASLGDVCRQWNDAGAFTITGRPWTSTTLSKFLRKPRNAGLRAYKGARYGPVDRDAIVGKAQWSPLVDEATFWAAQAVLDAPGRAPGRKSVRRHLLTGLAGCGKCGNHLAGSYRTDGRVVYVCKACHGVAILADIIEPILYHVVAERLAMPDAADLLRREIHDAAEAETIRLELETLYDELDRLAVERAEGLLTARQVKISTDIVNAKITKLQARQLDQERLRVLDGIPLGTPQVAGMIAELSPDRFRAVLDVLAEVVVQPVGKGGGIFNPERVQVNWR

SEQ ID NO: 1682 - protein, 485 aa, synthetic construct
MTKKVAIYTRVSTTNQAEEGFSIDEQVDRLTKYAEAMGWQVSDTYTDAGFSGAKLERPAMQRLINDIENKAFDTVLVYKLDRLSRSVRDTLYLVKDVFTKNKIDFISLNESIDTSSAVGSLFLTILSAINEFERENIKERMTMGKLGRAKSGKSMMWTKTAFGYYHNRETGILEIVPLQATIVEQIFTDYLSGISLTKLRDKLNESGHIGKDIPWSYRTLRQTLDNPVYCGYIKFKDSLFEGMHKPIIPYETYLKVQKELEERQQQAYERNNNPRPFQAKYMLSGLARCGYCGAPLKIVLGHKRKDGSRTMKYHCANRFPRKTKGVTVYNDNKKCDSGTYDLSNLENTVIDNLIGFQENNDNLLKIINGNNQPILDTSSFKKQISQIDKKIQKNSDLYLNDFITMDELKDRTDSLQAEKKLLKAKISENKFNDSADVFEQVKTQLGSIPISELSFDNKKKIVNNLVSKVDVTADNVDIIFKFQLA

SEQ ID NO: 1683 - protein, 452 aa, synthetic construct
MKAAIYIRVSTQEQVGNYSIQAQTEKLTALCRSKDWDVYDIFIDGGYSGSNMNRPALNEMLSKLHEIDAVVVYRLDRLSRSQRDTTTLIEEYFLKNNVEFVSLSETLDTSSPFGRAMIGILSVFAQLERETIRDRMVMGKIKRIEAGLPLTTAKGRTFGYDVIDTKLYINEEEAKQLRLIYDIFEEEQSITFLQKRLKKLGFKVRTYNRYSNWLTNDLYCGYVSYKDKVHVKGIHEPIISEEQFYRVQEIFTRMGKNPNMNRDSASLLSNLVVCSKCGLGFVHRSKDTMSRGKKYHYRYYSCKTYKHTHELEKCGNKTWRADKLEELIINRVNNYSFASRSVDREDELDSLNEKLKIEHAKKKRLFDLYINGSYEVSELDSMMNDIDAQINYYESQIEANEELKENKKIQENLAELATVDFDSLEFREKQLYLKSLINKIYIDGEQVTIEWL

SEQ ID NO: 1684 - protein, 485 aa, synthetic construct
MTKKVAIYTRVSTTNQAEEGFSIDEQIDRLTKYAEAMGWQVSDTYTDAGFSGAKLERPAMQRLINDIENKAFDTVLVYKLDRLSRSVRDTLYLVKDVFTKNKIDFISLNESIDTSSAMGSLFLTILSAINEFERENIKERMTMGKLGRAKSGKSMMWTKTAFGYYHNRKTGILEIVPPQATIVEQIFTDYLSGISLTKLRDKLNESGHIGKDIPWSYRTLRQTLDNPVYCGYIKFKDSLFEGMHKPIIPYETYLKVQKELKERQQQTYERNNNPRPFQAKYMLSGMARCGYCGAPLRIVLGHKRKDGSRTMKYHCANRFPRKAKGITVYNDNKKCDSGTYDLSNLENTVIDSLIGFQENNDSLLRIINSNNQPTPDTSSFKKQISQIDKRIQKNSDLYLNDFITMDELKDRTDRLQAEKKLLKAKISENKFNDSTDVFEQVKTQLGSIPINELSYDNKKKIVNNLVSKVDVTADNVDIIFKFQLA

SEQ ID NO: 1685 - protein, 452 aa, synthetic construct
MKAAIYIRVSTQEQVGNYSIQAQTEKLTALCRSKDWDVYDIFVDGGYSGSNMNRPALNEMLSKLHEIDAVVVYRLDRLSRSQRDTTTLIEEYFLKNNVEFVSLSETLDTSSPFGRAMIGILSVFAQLERETIRDRMVMGKIKRVEAGLPLTTAKGRTFGYDVIDTKLYINEEEAKQLQLIYDIFEEEQSITSLQKRLKKLGFKVRTYNRYSNWLTNDLYCGYVSYKDKVHVKGIHEPIISEEQFYRVQEIFTRMGKNPNMNRDSASLLSNLVACSKCGLSFVHRSKDTMSRGKKYHYRYYSCKTYKHTHELEKCGNKTWRADKLEELVINRVNNYSFASRNVDKEDELDSLNEKLEIERAKRKRLFDLYINGGYEVSELDCMMNDIDAQINYYESQIEANEELKKNKRIQENLAELATADFDSLEFREKQLYLRSLINKIYIDGEQVTIEWL

SEQ ID NO: 1686 - protein, 452 aa, synthetic construct
MKAAIYIRVSTREQVENYSIQAQTEKLTALCRSKDWDVYDIFIDGGYSGSNMNRPALNEMLSKLHEIDAVVVYRLDRLSRSQRDTITLIEEYFLKNNVEFVSLSETLDTSSPFGRAMIGILSVFAQLERETIRDRMVMGKIKRIEAGLPLTTAKGRTFGYDVIDTKLYINEEEAKQLRLIYDIFEEEQSITFLQKRLKKLGFKVRTYNRYNNWLTNDLYCGYVSYKDKVHVKGIHEPIISEEQFYRVQEIFARMGKNPNMNRDSASLLNNLVVCSKCGLGFVHRRKDAMSRDKKYHYRYYSCKTYKHIHELEKCGNKIWRADELEELIINRVNNYSLASRNVDKEDGLDSLNEKLKIEHAKKKRLFDLYLNGSYEVSELDSMMNDIDAQISYYESQIEANEALIKNKKIQENLANLATVDFDSLEFREKQLYLKSLINKIYIDGEQVTIEWL

SEQ ID NO: 1687 - protein, 452 aa, synthetic construct
MKAAIYIRVSTREQVENYSIQAQTEKLTALCRSKDWDVYDIFVDGGYSGSNMNRPALNEMLSKLHEIDAVVVYRLDRLSRSQRDTITLIEEYFLKNNVEFVSLSETLDTSSPFGRAMIGILSVFAQLERETIRDRMVMGKIKRIEAGLPLTTAKGRTFGYDVIDTKLYINEEEAEQLRLIYDIFEEEQSITFLQKRLKKLGFKVRTYNRYNNWLTNDLYCGYVSYKDKVHVKGIHEPIISEEQFYRVQEIFARMGKNPNMNRDSASLLNNLVVCSKCGLSFVHRRKDAVSRDKKYHYRYYSCKTYKHIHELEKCGNKVWRADKLEELIINRVNNYSLAGRNVDKRDELDSLNEKLKIEHAKKKRLFELYINGNYEVSELDSMMNDIDAQINYYESQIEANEELKKNKKIQESLAELAAVDFDSLEFREKQLYLKSLINKIYIDGEQVTIEWL

SEQ ID NO: 1688 - protein, 469 aa, synthetic construct
MSYTTPVRAAVYLRISEDRSGEQLGVARQREDCLKLCGQRKWVPVEYLDNDVSASTGKRRPAYEQMLADITAGKIAAVVAWDLDRLHRRPIELEAFMSLADEKRLALATVAGDVDLATPQGRLVARLKGCVAAHETEHKKARQRRAARQKAERGLPNWSKAFGYLPGPNGPEPDPRTAPLVKQAYADILAGASLGDVCRQWNDAGASTITGRPWTTTTLSKFLRKPRNAGLRAYKGARYGPVDRDAIVGKAQWSPLVDEATFWAAQAVLDAPGRAPGRKSVRRHLLTGLAGCGKCGNHLAGSYRTDGQVVYVCKACHGVAILADNIVPILYHIVAERLAMPDAVDLLRRESHDAAEAETIRLELEALYGELDRLAVERAEGLLTARQVKIGTDIVNAKITKLRARQLDQERLRVLDGIPLGTPQAAGMIAELSPDRFRAVLDVLAEVVVQPVGKSGRISNPERVQVNWR

SEQ ID NO: 1689 - protein, 452 aa, synthetic construct
MKAAIYIRVSTREQVENYSIQAQTEKLTALCRSKDWDVYDIFIDGGYSGSNMNRPALNEMLSKLHEIDAVVVYRLDRLSRSQRDTITLIEEYFLKNNVEFVSLSETLDTSSPFGRAMIGILSVFAQLERETIRDRMVMGKIKRIEAGLPLTTAKGRTFGYDVIDTKLYINEEEAKQLQLIYDIFEEVQSITFLQKRLKKLGFKVRTYNRYNNWLTNDLYCGYVSYKDKVHVKGIHEPIISEEQFYRVQEIFTRMGKNPNMNRDSASLLNNLVVCSKCGLGFVHRRKDAMSRDKKYHYRYYSCKTYKHIHELEKCGNKIWRADKLEELVINRVNNYSVASRNVDKEDELDSLNEKLKIEHAKKKRLFDLYINGSFEVSELDSMMNDIDAQINYYESQIEANEKLRKNKKTQENLAYLATVDFDSLEFREKQLYLKSLINKIYIDGEQVTIEWL

SEQ ID NO: 1690 - protein, 452 aa, synthetic construct
MKAAIYIRVSTREQVENYSIQAQTEKLTALCRSKDWDVYDIFIDGGYSGSNMNRPALNEMLSKLHEIDAVVVYRLDRLSRSQRDTITLIEEYFLKNNVEFVSLSETLDTSSPFGRAMIGILSVFAQLERETIRDRMVMGKIKRIEAGLPLTTAKGRTFGYDVIDTKLYINEEEAKQLRLIYDIFEEEQSITFLQKRLKKLGFKVRTYNRYNNWLTNDLYCGYVNYKDKVHVKGIHEPIISEEQFYRVQEIFARMGKNPNMNRDSASLLNSLVVCSRCGLGFVHRRKDTMSRDKKYHYRYYSCKTYKHIHELEKCGNKIWRADKLEELIIDRVNSYSLASRNADKEDELDGLNEKLKIEHAKKKRLFDLYINGSYEVSELDSMMNDIDAQISYYESQIEANEALIKNKKIQENLANLATVDFDSLEFREKQLYLKSLINKIYIDGEQVTIEWL

SEQ ID NO: 1691 - protein, 469 aa, synthetic construct
MSYTTPVRAAVYLRISEDRSGEQLGVARQREDCLKLCGQRKWVPVEYLDNDVSASTGKRRPAYEQMLADIAAGKIAAVVAWDLDRLHRRPIELEAFMSLADEKRLALATVAGDVDLATPQGRLVARLKGSVAAHETEHKKARQRRAARQKAERGHPNWSKAFGYLPGPNGPEPDPRTAPLVKQAYADILAGASLGDVCRQWNGAGAFTITGRPWTTTTLSKFLRKPRNAGLRAYKGARYGPVDRGAIVGKAQWSPLVDEATFWAAQAVLDAPGRAPGRKSVRRHLLTGLAGCGKCGNHLAGSYRTDGRVVYVCKACHGVAILADNIEPILYHTVAERLAMPGAVDLLRREVHDAVEAETIRLELETLCGELDRLAVERAEGLLTARQVKISTDIVNAKITKLQACQLDQERLRVLDGIPLGTPQVAGMIAELSPDRFRAVLDVLAEVVVLPVGKSGGIFNPERVQVNWR

SEQ ID NO: 1692 - protein, 485 aa, synthetic construct
MIKKVAIYTRVSTANQAEEGFSIDEQIDRLTKYAEAMGWQVSDTYTDAGLSGAKLERPAMQRLINDIENKAFDTVLVYKLDRLSRSVRDTLYLVKDVFTKNKIDFISLNEGIDTSSAMGSLFLTILSAINEFERENIKERMTMGKLGRAKSGKSMMWTKTAFGYYHNRKTGILEIVPLQATIVEQIFTDYLSGISLTKLRDKLNESGHIGKDIPWSYRTLRQTLDNPVYCGYIKFKDSLFEGMHKPIIPYETYLKVQKELEERQQQAYERNNNPRPFQAKYMLSGVARCGYCGAPLRIVLGHKRKDGSRTMKYHCANRFPRKTKGITVYNDNKKCDSGTYDLSNLENTVIDYLIGFQGNNDSLLEAINGNNQPILDTSSFKEQISQIDKKIQKNSDLYLNDFITMDELRDRTDSLQAEKKLLKAKISGDKFNDSSDVFELVKTQLGSIPINELSYDNKKTIVNNLVSKVDVTADNVDIIFKFQLA

SEQ ID NO: 1693 - protein, 485 aa, synthetic construct
MTKKVAIYTRVSTTNQAEEGFSIDEQIDRLTKYAEAMGWQVSDTYTDAGLSGAKLERPAMQRLINDIENKAFDTVLVYKLDRLSRSVRDTLYLVKDVFTKNGIDFISLSESIDTSSAMGSLFLTILSAINEFERENIKERMTMGKLGRAKSGKSMMWTKTAFGYYHNRKTGVLEIVPLQATIVEQIFTDYLSGISLTKLRDKLNESGHIGKDIPWSYRTLRQTLDNPVYCGYIKFKGSLYEGMHKPIIPYETYLKVQKELEERQQQTYERNNNPRPFQAKYMLSGMARCGYCGAPLRIVLGHKRKDGSRTMKYHCANRFPRKTKGVTVYNDNKKCDSGTYDLSNLENTVIDNLIGLQENNDSLLKIINGDNQPILDTSSFEKQISQIDREIQKNSDLYLNDFITMDELKDRTDSLQAEKKLLKAKISENKFNDSTDVFELVKTQLGSIPINELSYDNKKKIVNNLVSKVDVTADNVDIIFKFQLA

SEQ ID NO: 1694 - protein, 452 aa, synthetic construct
MKAAIYIRVSTREQVENYSIQAQTEKLTALCRSKDWDVYDIFIDGGYSGSNMNRPALNEMLSRLHEIDAVVVYRLDRLSRSQRDTITLIEEHFLKNNVEFVSLSETLDTSSPFGRAMIGILSVFAQLERETIRDRMVMGKIKRIEAGLPLTTAKGRTFGYDVVDTKLYINEEEAKQLQLIYDIFEEEQSITFLQKRLKKLGLKVRTYNRYNNWLTNDLYCGYVSYKDKVHVKGIHEPIISEEQFYRVQEIFTRMGKNPNMNRGSASLLNNLVVCGKCGLGFVHRRKDAMSRDKKYHYRYYSCKTYKHIHELEKCGNKIWRADKLEELIIDRVNNYSFASRNADKEDELDSLNEKLKIEHAKKKRLFDLYINGRYEVSELDSMMNDIDAQINYYESQIEANEELKKDKKIQENLADLATVDFDSLEFREKQLYLKSLINKIYIDGEQVTIEWL

SEQ ID NO: 1695 - protein, 452 aa, synthetic construct
MKAAIYIRVSTREQVENYSIQAQTEKLTALCRSKDWDVYDIFIDGGYSGSNMNRPALNEMLSKLHEIDAVVVYRLDRLSRSQRDTITLIEEYFLKNNVEFVSLSETLDTSSPFGRAMIGILSVFAQLERETIRDRMVMGKIKRIEAGLPLTTAKGRTFGYDVIDTKLYINEEEAKQLQLIYDIFEEEQSITFLQKRLKKLGFKVRTYSCYNNWLTNDLYCGYVSYKDKVHVKGIHEPIISEEQFYRVQEIFTRTGKNPNMNRDSASLLNNLVVCSRCGLGFVHRRKDTTSRGKKYHYRYYSCKTYKHIHELEKCGNKIWRADKLEELIINRVNNHSFASRNVDKEDELDSLNEKLKIERAKKRRLFDLYINGSYEVSELDSMMNDIDAQINYYESQIEANEELKKNKKIQEDLADLATVDFDSLEFREKRLYLKSLINKIYIDGEQVTIEWL

SEQ ID NO: 1696 - protein, 452 aa, synthetic construct
MKAAIYIRVSTREQVENYSIQAQTEKLTALCRSKDWDVYDIFVDGGYSGSNMNRPALNEMLSKLHEIDAVVVYRLDRLSRSQRDTITLIEEYFLKNNVEFVSLSETLDTSSPFGRAMIGILSVFAQLERETIRDRMVMGKIKRIEAGLPLTTAKGRTFGYDVIDTKLYINEEEAKQLRLIYDIFEEEQSITFLQKRLKKLGFKVRTYNCYNNWLTNDLYCGYVSYKDKVHVKGIHEPIISEEQFYRVQEIFARMGKNPNMNRDSASLLNNLVVCSKCGLGFVHRRKDTMSRGKKYHYRYYSCKTYKHIHELEKCGNKIWRADKLEELIINRVNNYSFASRIVDKEGELDSLNEKLKIEHAKKKRLFDLYINGSYEVSELDSMMNDIDARINYYESRIEASEELEKNKKVQENLADLVTVDFDSLEFREKQLYLKSLINKIYVDGEQVTIEWL

SEQ ID NO: 1697 - protein, 484 aa, synthetic construct
MTKKVAIYTRVSTTNQAEEGFSIDEQIDRLTKYVEAMGWQVSDTYTDAGISGAKLERPAMQRLINDIENKAFDTVLVYKLDRLSRSVRDTLYLVKDVFTRNKIDFISLNESIDTSSAMGSLFLTILSAINEFERENIKERMTMGKLGRAKSGKSMMWTKTAFGYYHNRKTGILEIVPLQATIVEQIFTDYLSGISLTKLRDKLNESGHIGKDIPWSYRTLRQTLDNPVYCGYIKFKDSLFEGMHKPIIPYETYLKVQKELEERQQQTYERNNNPRPFQAKYMLSGMARCGYCGAPLKIVLGHKRKDGSRTMKYHCANRFPRKTKGVTVYNDNKKCDSGTYDMSNLENIVIDNLIGFQENNDSLLRIINGNNQPILDTSSFKKQISQIDKKIQKNSDLYLNDFITMDELKVRTDSLQAEKKLLKAKIGENRFNDSTDVFELVKTQLGSIPINELSYDDKKIVNNLVSRVDVTADSVDIIFKFQLA

SEQ ID NO: 1698 - protein, 469 aa, synthetic construct
MSYTTPVRAAVYLRISEDRSGEQLGVARQREDCLKLCDQRKWVPVEYLDNDVSASTGKPRPAYEQMLADITAGKVAAVVAWDLDRLHRRPIELEAFMSLADEKRLALATVAGDVDLATPQGRLVARLKGSVAAHETEHKKARQRRAARQKAERGLPNWSKAFGYLPGPSGPEPDPRTAPLVKQAYADILAGASLGDVCRRWNDAGAFTITGRPWTTTALSKFLRKPRNAGLRAYKGARYGPVDRDAIVGKAQWGPLVDEATFWAAQAVLDAPGRAPGRKSVRRHLLTGLAGCGKCGNHLAGSYRTNGRVVYVCKACHGVAILADNIEPILYHIVAERLAMPDAVDLLRREIHDAAEAETIRLELETLYGELDRLAVERAEGLLTARQVKISTDIVNAKITKLQARQLDQGRLRVFDGIPLGTPQVAGVIAELSPDRFRAVLDVLAEVVVQPVGKSGRIFNPERVQVNWR

SEQ ID NO: 1699 - protein, 469 aa, synthetic construct
MSYTTPVRAAVYLRISEDRSGEQLGVARQREDCLKLCGQRKWVPVEYLDNDVSASTGKRRPAYEQMLADITAGKIAAVVAWDLDRLHRRPVELEAFMSLADEKRLALATVAGDVDLATPQGRLVARLKGVVAAHETEHKKARQRRAARQKAERGHPNWGKAFGYLPGPNGPEPDPRTAPLVKQAYADILAGASLGDVCRQWNDAGAFTITGRPWTTTTLSKFLRKPRNAGLREYKGARYGPVDRDAIVGKAQWSPLVDEATFWAAQAVLDAPGRAPGRKSVRRHLLTGLAGCGKCGNHLAGSYRTDGRVVYVCKACHGVAVLADNIEPILYHIVAERLAMPDAVDLLRREIHDAAEAETIRLELETLYGELDRLAVERAEGLLTARQVKISTDIVNAKITKLQARQLDQERLRVLDGIPLGTPQVAAMIAELSPDRFRAVLDVLAEVVVQPVGKSGRIFNPGRVQVYWR

SEQ ID NO: 1700 - protein, 452 aa, synthetic construct
MKAAIYIRVSTQEQVGNYSIQAQTDKLTALCRSKGWDVYDIFIDGGYSGSNMNRPALNEMLSKLHEIGAVVVYRLDRLSRSQRDTTTLIEEYFLKNNVEFVSLSETLDTSSPFGRAMIGILSVFAQLERETIRDRMVMGKIKRIEAGLPLTTAKGRTFGYNVIDTKLYINEEEAKQLRLIYDIFEEEQSITSLQKRLKKLGFKVRTYNRYNNWLTNDLYCGYVSYKDKVHVKGIHEPIISEEQFYRVQEIFARMGKNPNMNRDSASLLSNLVVCSKCGLGFVHRSKDTMSRGKKYHYRYYSCKTYKHTHELEKCGNKTWRADKLEELIINRVNNYSFASRNVDKEGELGSLNEKLKIEHAKKKRLFDLYISGSYEVSELDNMMNDIDAQINYYESQIGASEELRRNKKIQENLADLATVDFDSLEFREKQLYLKSLINKIYIDGEQVTIEWL

SEQ ID NO: 1701 - protein, 452 aa, synthetic construct
MKAAIYIRVSTREQVENYSIQAQTEKLTALCRSKDWDVYDIFIDGGYSGSNMNRPALNEMLSRLHEIDAVVVYRLDRLSRSQRDTITLIEEYFLKNNVEFVSLSETLDTSSPFGRAMIGILSVFAQLERETIRDRMVMGKIKRIEAGLPLTTAKGRTFGYDVIDTKLYINEEEAKQLRLIYDIFEEEQSITFLQKRLKKLGFKVRTYNRYNNWLTNDLYCGYVSYKDKVHVKGIHEPIISEEQFYRVQEIFTRMGKNPNMNRDSASLLNNLVVCSKCGLGFVHRRKDAMSRDKKYHYRYYSCKTYKHIHELEKCGNKIWRADKLEELIINRVNNYSLAGRNVDKEDELDSLNEKLRIEHAKKERLFDLYINGSYEVSELDSMMNDIDAQINYYESQIEANEELKKDKKIQENLANLATVDFDSLEFREKQLYLKSLINKIYIDGDQVTIEWL

SEQ ID NO: 1702 - protein, 485 aa, synthetic construct
MTKKVAIYTRVSTTNQAEEGFSIDEQIDRLTKYAEAMGWQVSDTYTDAGLSGAKLERPAMQRLINDIENKAFDTVLVYKLDRLSRSVRDTLYLVKDVFTKNKIDFISLNESIDTSSAMGSLFLTILSAINEFERENIKERMTMGKLGRAKSGKSMMWTKTAFGYYHNRKTGILEIVPLQATIVEQIFTDYLSGISLTKLRDKLNESGHIGKDIPWSYRTLRQTLDNPVYCGYIKFKDSLFEGTHKPIIPYETYLKVQKELEERQQQTYERNNNPRPFQAKYMLSGMARCGYCGAPLKIVLGHKRKDGSRTMKYHCANRFPRKTKGVTVYNDNKKCDSGTYDLSNLESTVIDILIGLQENNDSLLKIINGNNQPILDTSSFEEQISQIDKKIQKNSDLYLNDFITMDELKDRTDSLQAEKKLLKAKISENKFNDSADVFELVKTQLGSIPINELSYDNKKKVVNNLVSKVDVTADNVDIIFKFQLA

SEQ ID NO: 1703 - protein, 469 aa, synthetic construct
MSYTTPVRAAVYLRISEDRSGEQLGVARQREDCLKLCGQRKWVPVEYLDNDVSASTGKRRPAYEQMLADITAGKIAAVVAWDLDRLHRRPIELEAFMSLADEKRLALATVAGDVDLATPQGRLVARLKGCVAAHETEHKKARQRRAARQKAERGHPNWSKAFGYLPGPNGPEPDPRTAPLVKQAYADILAGASLGDVCRQWNDAGAFTITGRPWTTTTLSKFLRKPRNAGLRTYKGARYGPVDRDAIVGKAQWSPLVDEATFWAAQAVLDAPGRAPGRKSVRRHLLTGLAGCGKCGNHLAGSYRTDGRVVYVCKACHGVAILADNIEPILYHTVAERLAMPDAVDLLCREVHDAAEAETIHLELETLYGELDRLAVERAEGLLTARQVKISTDIVNAKIAKLQARQLDQGRLRVLDGIPLGTPQVAGVIAGLSPDRFRAVLDVLAEVVVQPVGQGGRVFNPERVQVNWR

SEQ ID NO: 1704 - protein, 485 aa, synthetic construct
MTKKVAIYTRVSTTNQAEEGFSIDEQIDRLTKYAEAMGWQVRDTYTDAGLSGAKLERPAMQRLINDIENKAFDTVLVYKLDRLSRSVRDTLYLVKDVFTKNKIDFISLNESIDTSSAMGSLFLTILSAINELERENIKERMTMGKLGRAKSGKSMMWTKTAFGYYHNRKTGILEIVPLQATIVEQIFTDYLSGISLTKLRDKLNESGHIGKDIPWSYRTLRQTLDNPVYCGYIKFKGSLFEGMHKPIIPYETYLKVQKELEERQQQAYERNNNPRPFQSKYMLSGMARCGYCGAPLRIVLGHKRRDGSRTMKYHCANRFPRKTKGVTVYNDNKKCNSGTYDLSNLENAVIDILIGFQENNDSLLKIINGNNQPILDTSSLKKQISQIDKKIQKNSDLYLNDFITMDELKGRTDGLQAEKKLLKAKINENKFNDSTDVFELVKTQLGSIPINELSYDNKKKIVNNLVSKVNVTADNVDITFKFQLA

SEQ ID NO: 1705 - protein, 469 aa, synthetic construct
MSYTTPVRAAVYLRISEDRSGEQLGVARQREDCLKLCDQRKWVPVEYLDNDVSASTGKRRPAYEQMLADITAGKIAAVVAWDLDRLHRRPIELEAFMSLADEKRLALATVAGDVDLATPQGRLVARLKGVVAAHETEHKKARQRRAARQKAERGHPNWSKAFGYLPGPNGPEPDPRTAPLVKQAYADILAGASLGDVCRQWNDAGAFTITGRPWTTTTLSKFLRRPRNAGLRAYKGARYGPVDRDAIVGKAQWSPLVDEATFWAAQAVLDAPGRAPGRKSVRRHLLTGLAGCGKCGNHLAGSYRTDGRVVYVCKACHGVAILADNIEPILYHLVAERLAMPDAVDLLRREIHDAAEAETIRLELETLYGELDHLAVERAEGLLTARQVKIGTDIVNAKITKLQARQLDQERLRVFDGIPLGTPQVAGMIAELSPNRFRAVLDVLAEVVVQPVGKGGRIFNPERVQVNWR

SEQ ID NO: 1706 - protein, 452 aa, synthetic construct
MKAAIYIRVSTREQVENYSIQAQTEKLTALCRSKDWDVYDIFIDGGYSGSNMNRPALNEMLSKLHEIDAVVVYRLDRLSRSQRDTITLIEEYFLKNNVEFVSLSETLDTSSPFGRAMIGILSVFAQLERETIRDRMVMGKIKRTEAGLPLTTAKGRTFGYDVIDTKLYINEEEAKQLQLIYDIFEEEQSITSLQRRLKKLGFKVRTYNRYNNWLTNDLYCGYVSYKDKVHVKGIHEPIISEEQFYRVQEIFTRMGKNPNMNRDSASLLSNLVVCSKCGLGFVHRRKDTMSRGKKYHYRYYSCKTYKHIHELEKCGNKIWRADKLEELIINRVNNYSFAGRNVDKEDELDSLNEKLKIEHAKRKRLFDLYANGSYEVSELDSMMNDIDAQINYYESQIEANEELKKSKKIQENLANLATVDYDSLEFREKQLYLKSLISKIYIDGEQVTIEWL

SEQ ID NO: 1707 - protein, 485 aa, synthetic construct
MTKKVAIYTRVSTTNQAEEGFSIDEQIDRLTKYAEAMGWQVSDTYTDAGFSGAKLERPAMQRLINDIETKAFDTVLVYKLDRLSRSVRDTLYLVKDVFTKNKIDFISLNECIDTSSAMGSLFLTILSAINEFERENIKERMTMGKLGRAKSGKSMMWTKTAFGYYHNRKTGILEIVPLQATIVEQIFTDYLSGISLTKLRDKLNESGHIGKDIPWSYRTLRQTLDNPVYCGYIKFKGSLFKGMHKPIIPYETYLKVQKELEERQQQTYERNDNPRPFQAKYMLSGMARCGYCGAPLRIVLGHKRKDGSRTMKYHCANRFPRKTKGVTVYNDNKKCDSGTYDLSNLENTVIDNLIGFQENNDSLLKIINGNNQPILDTSSLKKQISQIDKKIQKNSDLYLNDFITMDELKDRTDSLQAEKKLLKAKISENKFNDSTDVFELVKTQLGSIPINELSYDNKKKIVNNLVSKVDVTADNVDIIFKFQLA

SEQ ID NO: 1708 - protein, 469 aa, synthetic construct
MSYTTPVRAAVYLRISEDRSGEQLGVARQREDCLRLCGQRKWVPVEYLDNDVSASTGKRRPAYEQMLADITAGKIAAVVAWDLDRLHRRPIELEAFMSLADEKRLALATVAGDVDLATPQGRLVARLKGSVAAHETEHKKARQRRAARQKAERGLPNWSKAFGYLPGPNGPEPDPRTAPLVKQAYADILAGASLGDVCRQWNDAGAFTITGRPWTATTLSKFLRKPRNAGLRAYKGARYGPVDRDAIVGKAQWSPLVDEATFWAVQAVLDAPGRAPGRKSVRRHLLTGLAGCGKCGNHLAGSYRTDGRVVYVCKTCHGITILADNIEPILYHTVAERLAMPDAVDLLRREIHDAAEAETIRLELETLYGELDRLAVERAEGLLTARQVKISTDIVNAKITKLQARQLDQERLRVFDGIPLGTPQAAGMIAELSPDRFRAVLDVLAEVVVQPVGKSGRIFNPERVQVNWR

SEQ ID NO: 1709 - protein, 452 aa, synthetic construct
MKAAIYIRVSTQEQVGNYSIQAQTEKLTALCRSKDWDVYDIFIDGGYSGSNMNRPALNEMLSKLHEIDAVVVYRLDRLSRSQRDTTTLIEEYFLKNNVEFVSLSETLDTSSPFGRAMIGILSVFAQLERETIRDRMVMGKIKRIEAGLPLTTAKGRTFGYDVIDTKLYINEEEAKQLQLIYDIFEEVQSITFLQKRLKKLGFKVRTYNRYNNWLTNDLYCGYVSYKDKVHVKGIHEPIISEEQFYRVQEIFTRMGKNPNMNRDSASLLSNLVVCSKCGLGFVHRSKDTMSRGKKYHYRYYSCKTYKHTHELEKCGNKTWRADKLEELIINRVNNHSLASRNVDKEDELDSLNEKLKIEHAKKRRLFDLYINGSYEVSELDSMMNDIDAQINYYESQIEANEELKKNKKIQENLADLATVDFDSLEFREKQLYLKSLINKIYIDGEQVTIEWL

SEQ ID NO: 1710 - protein, 485 aa, synthetic construct
MTKKVAIYTRVSTTNQAEEGFSIDEQIDRLTKYAEAMGWQVSDTYTDAGFSGAKLERPAMQRLINDIENKAFDTVLVYKLDRLSRSVRDTLYLVKDVFTKNKIDFISLNESIDTSSAMGSLFLTILSAINEFERENIKERMTMGKLGRAKSGKSMMWTKTAFGYYHNRKTGILEIVPLQATIVEQIFTDYLSGVSLTKLRDKLNESGHIGKDIPWSYRTLRQTLDNPVYCGYIKFKDSLFEGMHKPIIPYETYLKVQKELGERQQQTYERNNNPRPFQAKYMLSGMARCGYCGAPLRIVLGHKRKDGSRTMKYHCANRFPRKTKGVTVYNDNKKCDSGTYDLSNLENTVIDNLIGLQENNDSLLKIINGNNQPTLDTSSFEKQISQIDRKIQKNSDLYLNDFITMDELKDRTDSLQAGKKLLKATISENKFNDCTDVFELVKTQLGSIPINELSYDNKKKIVNSLVSKVDVTADNVSIIFKFQQA

SEQ ID NO: 1711 - protein, 469 aa, synthetic construct
MCYTTPVRAAVYLRISEDRSGEQLGVTRQREDCLKLCGQRNWVPVEYLDNDVSASTGKRRPAYEQMLADITAGKIVAVVAWDLDRLHRRPIELEAFMSLADEKRLALATVAGDVDLATPQGRLVARLKGSVAAHETEHKKARQRRAARQKAERGHPNWSKAFGYLPGPNGPEPDPRTAPLVKQAYADILAGASLGDVCRQWNDAGAFTITGRPWTTTALSKFLRKPRNAGLRAYKGARYGPVDRDAIVGKAQWSPLVDEATFWAAQAVLDAPGRAPGRKSVRRHLLTGLAGCGKCGNHLAGSYRTDGRVVYVCKACHGVAILADNIEPILYHIVAERLAMPDAVGLLRREIHDAAEAETIRLELETLYDELDRLAVERAEGLLTARQVKISTDIVDAKIAKLQARQLDQERLRVLDGIPLGTPQVAGMIAELSPDRFRAVLDVLAEVVVQPVGKSGRIFNPERVQVNWR

SEQ ID NO: 1712 - protein, 469 aa, synthetic construct
MSYTTPVRAAVYLRISEDRSGEQLGVARQREDCLKLCDQRKWVPVEYLDNDVSASTGKRRPAYEQMLADITAGKIAAVVAWDLDRLHRRPIELEAFMSLADEKRLALATVAGDVDLATPQGRLVARLKGSVAAHETEHKKARQRRAARQKAERGHPNWSKAFGYLPGPNGPEPDPRTAPLVKQAYADILAGASLGDVCRQWNDAGAFTITGRPWSTTALSKFLRKPRNAGLRAYKGARYGPVDRDAIVGKAQWSPLVDEATFWAAQAVLDAPGRAPGRKSVRRHLLTGLAGCGKCGNHLAGSYRTDGRVVYVCKACHGVAILADNIEPILYHIVAERLAMPDAVDLLRCEVHDAAEAETIRLELETLYGELDHLAVERAEGLLTARQVKISTDIVNAKITRLQARQLDQERLRVFDGIPLGTPQVAGVIAELSPNRFRAVLDVLAEVVVQPVGKSGRIFNPERVQVNWR

SEQ ID NO: 1713 - protein, 485 aa, synthetic construct
MTKKVAIYTRVSTTNQAEEGFSIDEQIDRLTKYAEAMGWQVSDTYTDAGFSGAKLERPAMQRLINDIENKAFDTVLVYKLDRLSRSVRDTLYLVKDVFTKSKIDFISLNESINTSSAMGSLFLTILSAINEFERENIKERMTMGKLGRAKSGKSMMWTKTAFGYYHNRKTGILEIVPLQATIVEQIFTDYLSGISLTKLRDKLNESGHIGKDIPWSYRTLRQTLDNPVYCGYIKFKDSLFEGMHKPIIPYETYLKVQKELEERQQQTYERNNNPRPFQAKYMLSGMARCGYCGAPLRIVLGHKRKDGGRTMKYHCANRFPRKTKGVTVYNDNKKCDSGTYDLSNLENTVIDNLIGFQENNDSLLRIINGNNQPILDTSSFKKQISQIDKKIQKNSDLYLNDFITMDELKDRTDSLQAEKKLLKAKISENKFNDSTDVFELVKAQLGSIPINELSYDNKKKIVNNLVSKVDVTADNVDIIFKFQLA

SEQ ID NO: 1714 - protein, 485 aa, synthetic construct
MTKKVAIYTRVSTTNQAEEGFSIDEQIDRLTKYAEAMGWQVSDTYTDAGSSGAKLERPAMQRLINDIENKAFDTVLVYKLDRLSRSVRDTLYLVKDVFTKNKIDFISLNESIDTSSAMGSLFLTILSAINEFERENIKERMTMGKLGRAKSGKSMMWTKTAFGYYHNRETGILEIVPLQATIVEQIFTDYLSGTSLTKLRDKLNESGHIGKDIPWSYRTLRQTLDNPVYCGYIKFKDSLFEGMHKPIIPRETYLKVQKELEERQQQAYERNNNPRPFQAKYMLSGMARCGYCGAPLRIVLGHKRKDGSRTMKYHCANRFPRKTKGVTVYNDNKKCDSGTYDLSNLENTVIDNLIGFQENNDSLLKIINGSNQPIPDTSSFKKQISQIDKKIQKNSDLYLNDFITMDELKDRTDSLQAEKKLLKAKISENKLNDSTNVFELVKTQLGSIPINELGYDDKKKIVNSLVSKVDVTADNVDIIFKFQLA

SEQ ID NO: 1715 - protein, 469 aa, synthetic construct
MSYTTPVRAAVYLRISEDRSGEQLGVARQREDCLKLCGQRRWVPVEYLDNDVSASTGKRRPAYEQMLADITAGKIAAVVAWDLDRLHRRPVELEAFMSLADEKRLALATVAGDVDLATPQGRLVARLKASVAAHETEHKKARQHRAARQKAERGLPNWSKAFGYLPGPNGPEPDPRTAPLVKQAYADILAGASLGDVCRQWNDAGAFTITGRPWTATTLSKFLRKPRNAGLRAYKGARYGPVDRGAIVGKAQWSPLVDEATFWAAQAVLDAPGRAPGRKSVRRHLLTGLAGCGKCGNHLAGSYRTDGRVVYVCKACHGVAVLADNIEPFLYHIVAERLAMPDAVDLLRREIHDAAEAETIRLELETLYGELDRLAVERAEGLLTARQVKISTDIVNAKITKLQARLLDQERLRVFDGIPLGTPQVVDMIAELSPDRFRAVLDVLAEVVVQPVGKSGRIFNPERVQVNWR

SEQ ID NO: 1716 - protein, 469 aa, synthetic construct
MSYTTPVRAAVYLRISEDRSGEQLGVARQREDCLKLCGQRKWEPVEYLDNDVSASTGKRRPAYEQMLADITAGKIAAVVAWDLDRLHRRPIELEAFMSLADEKRLALATVAGDVDLATPQGRLVARLKGSVAAHETEHKKARQRRAARQKAERGYPNWSKAFGYLPGPNGPEPDPRTAPLVKQAYADILAGASLGDVCRQWNDAGAFTITGRPWTTTTLSKFLRKPRNAGLRAYKGARYGPVDRDAIVGKAQWSPLVDEATFWATQAVLDAPGRAPGRKSVRRHLLTGLAGCGKCGNHLAGSYRTDGKVVYVCKACHGVAILADNIEPILYRIVAERLATPDAVDLLRREIHDAAEAETIRLELETLYGELDRLAVERAEGLLTARQVKISTDIVNAKITKLQARQLDQERLRVFDGIPLGTPQVAGKIAELSPDRFRAVLDVLAEVVVQPVGKSGRIFNPERVQVNWR

SEQ ID NO: 1717 - protein, 452 aa, synthetic construct
MKAAIYIRVSTREQVENYSIQAQTEKLTALCRSKDWDVYDIFIDGGYSGSNMNRPALNEMLSKLHEIDAVVVYRLDRLSRSQRDTIILIEEYFLKNNVEFVSLSETLDTSSPFGRAMIGILSVFAQLERETIRDRMVMGKIKRIEAGLPLTTAKGRTFGYDVIDTKLYINEEEAKQLRLIYDIFEEEQSITSLQKRLKKLGFKVRTYNRYNNWLTNDLYCGYVSYKDKVHVKGIHEPIISEEQFYRVQEIFTRTGKNPNMNRDSASLLNNLVVCSKCGLGFVHRRKDAMSRDKRYHYRYYSCKTYKHIHELEKCGNKIWRADKLEELIIDRVNSYSLASRNVDKEDELDSLNEKLKIEHAKKRRLFDLYINGSYEMSELDSMMNDIDAQINYYESQIEANEELKRNKKIQENLADLATVDFDSLEFREKQLYLKSLINKIYIDGEQVTIEWL

SEQ ID NO: 1718 - protein, 469 aa, synthetic construct
MSYTTSVRAAVYLRISEDRSGEQLGVARQREDCLKLCGQRKWVPVEYLDNDVSASTGKRRPAYEQMLADITAGKIAAVVAWDLDRLHRRPIELEAFMCLADEKRLALATVAGDVDLATPQGRLVARLKGSVAAHETEHKKARQRRAARQKAERGYPNWSKAFGYLPGPNGPEPDPRTAPLVKQAYADILAGASLGDVCRQWNAAGAFTITGRPWTTTTLSKFLRKPRNAGLRAYKGARYGPVDRDAIVGKAQWSPLVDEATFWAAQAVLDAPGRAPGRKSVRRHLLTGLAGCGKCGNHLAGSYRTDGRVVYVCKACHGVAILADNIEPILYHTVAERLAMPDAVDLLRREIRDAGEAETIRLELETLYGELDRLAVERAEGLLTARQVKISTDIVNATITKLQAHQLDQERLRVFDGIPLGTPQAAGMIAELSPDRFRAVLDVLAEVVVQPVGKSGRVFNPERVQVNWR

SEQ ID NO: 1719 - protein, 469 aa, synthetic construct
MSYTTPVRAAVYLRISEDRSGEQLGVARQREDCLKLCDQRKWVPVEYLDNDVSASTGKRRPAYEQMLADITAGKIAAVVAWDLDRLHRRPIELEAFMCLADEKRLALATVAGDVDLATPQGRLVARLKGSVAAHETEHKKARQRRAARQKAERGLPNWSKAFGYLPGPNGPEPDPRTAPLVKQAYADILAGASLGDVCRQWNDAGAFTITGRPWSTTTLSKFLRKPRNAGLRAYKGARYGPVDRDAIVGKAQWSPLVDEATFWAAQAVLDAPGRAPGRKSVRRHLLTGLAGCGKCGHHLAGSYRTDGRVVYVCKACYGVAILADNIEPILYHIVAERLAMPDAVDLLRREIHDAAEAETIRLELETLYGELDRLAVERAEGLLTARQVKISTDIVNAKITKLQTRQLDQERLRVLDGIPLGTPQAAGMIAELSPDRFRAVLDVLAEVVVQPVGKSGRIFNPERVQVNWR

SEQ ID NO: 1720 - protein, 452 aa, synthetic construct
MKAAIYIRVSTREQVENYSIQAQTEKLTALCRSKDWDVYDIFVDGGYSGSNMNRPALNEMLSKLHEIDAVVVYRLDRLSRSQRDTITLIEEYFLKNNVEFVSLSETLDTSSPFGRAMIGILSVFAQLERETIRDRMVMGKIKRIEAGLPLTTAKGRTFGYDVIDTRLYINEEEAKQLQLIYDIFEEEQSITFLQKRLKELGFKVRTYNCYNNWLTNDLYCGYVSYKDKVHVKGIHEPIISEEQFYRVQEIFTRMGKSPNMNRDSASLLNNLVVCGKCGLGFVHRRKDIMSRGKKYHYRYYSCKTYKHIHELEKCGNKIWRADKLEELIINRVNNYSLASRNVDKEDDLDSLNEKLKVEHAKKKRLFDLYINGSYEVSELDSMMSDIDAQISYYESRIEANEELRKDKKIQENLANLATVDFGSLEFREKQLYLKSLISKIYIDGEQVTIEWL

SEQ ID NO: 1721 - protein, 469 aa, synthetic construct
MSYTTPVRAAVYLRISEDRSGEQLGVARQREDCLKLCGQRKWVPVEYLDNDVSASTGKRRPAYEQMLADITAGKIAAVVAWDLDRLHRRPVELEAFMSLADEKRLALATVAGDVDLATPQGRLVARLKGCVAAHETEHKKARQRRAARQKAERGHPNWSKAFGYLPGPNGPEPDPRTAPLVEQAYADILAGASLGDVCRQWNGAGAFTITGRPWTTATLSKFLRKPRNAGLRAYKGARYGPVDRDAIVGRAQWSPLVDEATFWAAQAVLDAPGRTPGRKSVRRHLLTGLAGCGKCGNHLAGSYRTDGRVVYVCKACHGVAILADNIEPILYHIVAERLAMPDAVDLLRREIHDAAEAETIRLELETLYGELDRLAVERAEGLLTARQVKISTDIVNAKITKLQARRLDQERLRVLDGIPLGTPQVAGTIAELSPDRFRAVLDVLAEVVVQPVGKSGRIFNPERVQVNWR

SEQ ID NO: 1722 - protein, 452 aa, synthetic construct
MKAAIYIRVSTQEQVGNYSIQAQTEKLTALCRSKGWDVYDIFVDGGYSGSNMNRPALNEMLSKLHEIDAVVVYRLDRLSRSQRDTTTLIEEYFLKNNVEFVSLSETLDTSSPFGRAMIGILSVFAQLERETIRDRTVMGKIKRIEAGLPLTTAKGRTFGYDVIDTKLYINEEEAKQLQLIYDIFEEEQSITSLQKRLKKLGFKVRTYNRYNNWLTNDLYCGYVSYKDKVRVKGIHEPIISEEQFYRVQEIFSRMGKNPNMNRDSASLLSNLVVCSKCGLGFVHRSKDTMSRGKKYHYRYYSCKTYKHTHELEKCGNKTWRADKLEELIINRVNNYSFASRGVDKEDELDSLNEKLKIEHAKKKRLFDLYINGSYEVSELDGMMSDIDAQINYYESQIEANEELRKNKKTQENLAELAAVDFDSLEFREKQLYLKSLINKIYIDGEQVTIDWL

SEQ ID NO: 1723 - protein, 469 aa, synthetic construct
MSYTTPVRAAVYLRISEDRSGEQLGVARQREDCLKLCDQRKWVPVEYLDNDVSASTGKRRPAYEQMLADITAGKIAAVVAWDLDRLHRRPIELEAFMSLADEKRLALATVAGDVDLATPQGRLVARLKGCVAAHETEHKKARQRRAARQKAERGHPNWSKAFGYLPGPNGPEPDPRTAPLVKQAYADILAGASLGDVCRQWNDAGAFTITGRPWTTTTLSKFLRKPRNAGLRAYKGARYGPVDRDAIVGKAQWSPLVDEATFWAAQAVLDAPGRAPGRKSVRRHLLTGLAGCGKCGSHLAGSYRTDGRVVYVCKACHGVAILADNIEPILYHIVAERLAMPDAEDLLRREIHDVAEAKTIRLELETLYGELDRLAVERAEGLLTARQVKVSTDIVNAKITKLQARQLDQERLRVFDGIPLGTPQVAGMIAELSPNRFRAVLDVLAEVVVQPVGKSGRIFNPERVQVNWR

SEQ ID NO: 1724 - protein, 469 aa, synthetic construct; identical to SEQ ID NO: 1719

SEQ ID NO: 1725 - protein, 452 aa, synthetic construct
MKAAIYIRVSTREQVENYSIQAQTEKLTALCRSKDWDVYDIFIDGGYSGSNMNRPALNEMLSKLHEIDAVVVYRLDRLSRSQRDTITLIEEYFLKNNVEFVSLSETLDTSSPFGRAMIGILSVFAQLERETIRDRMVMGKIKRIEAGLPLTTAKGRTFGYDVIDTKLYINEEEAKQLQLIYDIFEEEQSITFLQKRLKKLGFKVRTYSRYNNWLTNDLYCGYVSYKDRVHVKGIHEPIISEEQFYRVQEIFTRMGKNPNMNRDSASLLNNLVVCSKCGLSFVHRRKDTTSRGKKYRYRYYSCKTYKHIHELEKCGNKIWRADKLEELIINRVNNYSLASRNVDKEDELDSLNERLRTEHAKKKRLFDLYINGSYEVSELDSMMSDIDAQINYYESQIKANEELKKSKKIQENLVDLATVDFDSLEFREKQLYLKSLINKIYIDGEQVTIEWL

SEQ ID NO: 1726 - protein, 452 aa, synthetic construct
MKAAIYIRVSTREQVENYSIQAQTEKLTALCRSKDWDVYDIFIDGGYSGSNINRPALNEMLSKLHEIDAVVVYRLDRLSRSQRDTITLIEEYFLKNSVEFVSLSETLDTSSPFGRAMIGILSVFAQLERETIRDRMVMGKIKRIEAGLPLTTAKGRTFGYDVIDTKLYINEEEAKQLRLIYDIFEEEQSITFLQKRLKKLGFKVRTYNRYNNWLTNDLYCGYVSYKDKVHVKGIHEPIISEEQFYRVQEIFTRMGKNPNMNRDSASLLNNLVVCSKCGLGFVHRRKDAMSRDKKYHYRYYSCKTYKHIHELEKCGNKIWRADKLEELIIDRVNNYSLASRNVDKEDELDSLNEKLKTEHAKKKRLFDLYINGSYEVSELDSMMNDIDAQINHYESQIEANEELKKSKKIQENLAYLATVDFDSLEFREKQLYLKSLINKIYIDGEQVTIEWL

SEQ ID NO: 1727 - protein, 485 aa, synthetic construct
MTKKVAIYTRVSTTNQAEEGFSIDEQTDRLTKYAEAMGWQVSDTYTDAGFSGAKLERPAMQRLINDIETKAFDTVLVYKLDRLSRSVRDTLYLVKDVFTKNKIDFISLSESIDTSSAMGSLFLTILSAINEFERENIKERMTMGKLGRAKSGKSMMWTKTAFGYYHNRETGVLEIVPLQATIVEQIFTDYLSGISLTKLRDKLNESGHIGKDIPWSYRTLRQTLDNPVYCGYIKFKDSLFEGMHKPIIPYETYLKVQKELEERQQQAYERNNNPRPFQAKYMLSGMARCGYCGAPLRIVLGHRRKDGSRTMKYHCANRFPRKTKGVTVYNDNKKCDSGTYDLSNLENAVIDNLIGFQENNDSLLKIINGNNQPILATNSLKEQISQIDKKIQKISDLYLNDFITMDELKDRTDGLQAEKELLKAKISENKFNDSTDVFELVKTQLGSIPINELSYDNKKKIVNNLVSRVDVTADNVDIIFKFQLA

SEQ ID NO: 1728 - protein, 485 aa, synthetic construct
MTKKVAIYTRVSTTNQAEEGFSIDEQIGRLTKYAEAMGWQVSNTYTDAGFSGAKLERPAMQRLINDIENKAFDTVLVYKLDRLSRSVRDTLYLVKDVFTKNKIDFISLNESIDTSSAMGSLFLTILSAINEFERENIKERMTMGKLGRARSGKSMMWTKTAFGYYHNRKTGILEIVPLQAAIVEQIFTDYLSGISLTRLRDKLNGSGHIGKDIPWSYRALRQTLDNPVYCGYIRFKDSLFEGMHKPIIPYETYLKVQKELEERQQQTYERNNNPRPFQAKYMLSGMARCGYCGAPLRIVLGHKRKDGSRTMKYHCANRFPRKTKGVTVYNDNKKCDSGTYDLSNLENTVIDNLIGFQENNDSLLKAISGNDQPILDTSSFKKQISQIDKKIQKNSDLYLNDFITMDELKERTDSLQAEKKLLKAKISENKFNDGTDVFELVKTQLGSIPINELSYDNKKKIVNNLVSKVDVTADNVDIIFKFQLA

SEQ ID NO: 1729 - protein, 452 aa, synthetic construct
MKAAIYIRVSTREQVENYSIQAQTEKLTALCRSKDWDVYDIFIDGGYSGGNMNRPALNEMLSKLHEIDAVVVYRLDRLSRSQRDTITLIEEYFLKNNVEFVSLSETLDTSSPFGRAMIGILSVFAQLERETIRDRMVMGKIKRIEAGLPLTTAKGRTFGYDVIDTKLYINEEEAKQLQLIYDIFEEEQSITFLQKRLKKLGFKVRAYNRYNNWLTNDLYCGYVSYKDKVHVKGIHEPIISEEQFYRVQEIFARMGKNPNMNRDSASLLNNLVVCSKCGLGFVHRRKDAMSRDKKYHYRYYSCKTYKHIHELEKCGNKIWRADKLEELIINRVNSYSVASRNVDKGDELDSLNEKLRIEHAKKKRLFDLYINGSYEVSELDSMMNDIDAQINYYESQIEANEELKKNKKIQEDLAHLAAVDFDSLEFREKQLYLRSLINKIYIDGEQVTIEWL

SEQ ID NO: 1730 - protein, 452 aa, synthetic construct
MKAAIYIRVSTREQVENYSIQAQTEKLTALCRSKDWDVYDIFIDGGYSGSNMNRPALNEMLSKLHEIDAVVVYRLDRLSRSQRDTITLIEEYFLKNNVEFVSLSETLDTSSPFGRAMIGILSVFAQLERETIRDRMVMGKIKRIEAGLPLTTAKGRTFGYDVIDTKLYINEEEAKQLQLIYDIFEEEQSITLLQKRLKKLGFKVRSYSRYNNWLTNDLYCGYVSYKDKVHVKGIHEPIISEEQFYRVQEIFTRMGKNPNMNRDSASLLNSLVVCSKCGLGFVHRRKDAMSRDKKYHYRYYSCKTYKHIHELEKCGNKIWRADKLEELIIDRVNNYSLANRNVDKADELDSLNEKLKVEHAKKRRLFDLYINGSYEVSELESMMNDIDAQINYYESQIEANEELKKNKKIQESLAELATVDFDSLEFREKQLYLKSLISKIYIDGEQVTIEWL

SEQ ID NO: 1731 - protein, 452 aa, synthetic construct
MKAAIYIRVSTQEQVGNYSIQAQTEKLTALCRSKGWDVYDIFVDGGYSGSNMNRPALNEMLSKLHEIDAVVVYRLDRLSRSQRDTTTLIEEYFLKNNVEFVSLSETLDTSSPFGRAMIGILSVFAQLERETIRDRMVMGKIKRVEAGLPLTTAKGRTFGYDVIDTKLYINEEEAKQLQLIYDIFEEEQSITFLQKRLKKLGFKVRTYNRYNNWLTNDLYCGYVSYKDKVHVKGIHEPIISEEQFYRVQEIFTRMGKNPNMNRDSASLLSNLVVCSKCGLSFVHRSKDTMSRGKRYHYRYYSCKTYKHTHELEKCGNKTWRADKLEELIINRVNNYSFASRNVDKEDELDSLNEKLNIEHAKRKRLFDLYINGSYEVSELDSMMNDIDAQIDYYESQIEANEELKKNKKIQENLADLATVDFDSLEFREKQLYLKSLINKIYIDGEQVTIEWL

SEQ ID NO: 1732 - protein, 485 aa, synthetic construct
MTKKVAIYTRVSTTNQAEEGFSIDEQIDRLTKYAEAMGWQVSDTYTDAGFSGAKLERPAVRRLINDIENKAFDTVLVYKLDRLSRSVRDTLYLVKDVFTKNKIDFISLNESIDTSSAMGSLFLTILSAINEFERENIKERMTMGKLGRAKSGKSMMWTKTAFGYYHNRKTGILEIVPLQASIVEQIFTDYLSGISLTKLRDKLNESGHIGKDIPWSYRTLRQTLDNPVYCGYIKFKDSLFEGMHKPIIPYETYLKVQKELEERQQQTYERNNNPRPFQAKYMLGGMARCGYCGAPLRVVLGHKRKDGSRTMKYHCANRFPRKTKGITVYNDNKKCDSGTYDLSDLENTVIDNLIGFQENNDSLLKIINGNNQPILDASSFKKQISQIDKKIQKNSDLYLNDFITMDELKDRTDSLQAEKKLLKAKISENKLNDSTDVFELVKTQLGSIPINELSYDNKKKIVNNLVSKVDVTADNVDIIFKFQLV

SEQ ID NO: 1733 - protein, 469 aa, synthetic construct
MSYTTPVRAAVYLRISEDRSGEQLGVARQREDCLELCDQRKWVPVEYLDNDVSASTGKRRPAYEQMLADITAGKIAAVVAWDLDRLHRRPIELEAFMSLADEKRLALATVAGDVDLATPQGRLVARLKGSVAAHETEHKKARQRRAARQKAERGLPNWSKAFGYLPGPNGPEPDPRTAPLVKQAYADILAGASLGDVCRQWNDAGAFTITGRPWTTTTLSKFLRKPRNAGLRAYKGAPYGPVDRNAIVGKAQWSPLVDEATFWAAQAVLDAPGRAPGRKSVRRHLLTGLAGCGKCGNHLSGSYRTDGRVVYVCKACHGVAILADNIEPILYHIVAERLAMPNAVDLLRREIHDAAEAEAIRLELEALHGELDRLAVERAEGLLTARQVKISTDIVNAKITELQARQQDQERLRVLDGIPLGTPQVVGMIAELSPDRFRAVLDVLVEVVVQPVGKSGRIFNPERVQVNWR

SEQ ID NO: 1734 - protein, 452 aa, synthetic construct
MKAAIYIRVSTREQVENYSIQAQTEKLTALCRSKDWDVYDIFIDGGYSGSNMNRPALNEMLSKLHEIDAVVVYRLDRLSRSQRDTITLIEEHFLKNNVEFVSLSETLDTSSPFGRAMIGILSVFAQLERETIRDRMVMGKIKRIEAGLPLTTAKGRTFGYNVIDTKLYINEEEAKQLQLIYDIFEEEQSITFLQRRLKELGFKVHTYNRYNNWLTNDLYCGYVSYKDKVHVKGIHEPIISEEQFYRVQEIFTRMGKNPNMNRDSASLLNNLVVCGKCGLGFVHRRKDAMSRDKKYHYRYYSCKTYKHIHELEKCGNKIWRADKLEELIINRVNSYSLASRNVDKEDELDSLNEKLKIEHAKKRRLFELYINGRYEVSELDSMMNDIDAQINYYESQIEADEELKKNKKIQEDLARLATVDFDSLEFREKQLYLKSLIHKIYIDGEQVTIEWL

SEQ ID NO: 1735 - protein, 469 aa, synthetic construct
MSYTTPVRAAVYLRISEDRSGEQLGVARQREDCLKLCDQRKWVPVEYLDNDVSASTGKRRPAYEQMLADITAGKIAAVVAWDLDRLHRRPVELEAFMSLADEKRLALATVAGDVDLATPQGRLVARLKGCVAAHETEHKKARQRRAARQKAERGHPNWSKAFGYLPGPNGPEPDPRTAPLVKQAYADILAGASLGDVCRQWNNAGAFTITGRPWTTTALSKFLRKPRNAGLRAYKGARYGPVDRDAIVGKAQWSPLVDEATFWAAQAVLDAPGRAPGKKSVRRHLLTGLAGCGKCGNYLAGSYRTDGQVVYVCKACYGVAILADNIVPILYHVVAERLAMPDAVDLLRHEIHDAAEAEAIRLELETLYGELDRLAVERAEGLLTARQVKISTDIVNAKITKLQARQLDQERLRVFNGIPLGTPQVAGVIAELSPDRFRAVLDVLVEVVVQPVGKGGRIFNPERVQVNWR

SEQ ID NO: 1736 - protein, 452 aa, synthetic construct
MKAAIYIRVSTQEQVENYSIQAQTEKLTALCRSKDWDVYDIFIDGGYSGSNMNRPALNEMLSKLHEIDAVVVYRLDRLSRSQRDTTTLIEEYFLKNNVEFVSLSETLDTSSPFGRAMIGILSVFAQLERETIRDRMVMGKIKRIEAGLPLTTAKGRTFGYDVIDTKLYINEEEAKQLRLIYDIFEEEQSITSLQKRLKKLGFKVRTYNRYNNWLTNDLYCGYVSYKDKVHVKGIHEPIISEEQFYRVQEIFTRMGKNPNMNRDSASLLSNLVVCSKCGLGFVHRSKDTMSRGKKYHYRYYSCRTYKHAHELEKCGNKTWRADKLEELIINRVHDYSFASRNVDKEDELDSLNEKLKIEHAKKRRLFDLYINGSYEVSELDSMMNDIDAQINHYESQIEANEELKKNKKIQENLADLATVDFDSLEFREKQLYLKSLINKIYIDGEQVTIEWL

SEQ ID NO: 1737 - protein, 485 aa, synthetic construct
MTKKVAIYTRVSTTNQAEEGFSIDEQIDRLTKYAEAMGWQVSDTYTDAGFSGAKLERPAMQRLINDIENKVFDTVLVYKLDRLSRSVRDTLYLVKDVFTKNKIDFISLNECIDTSSAMGSLFLTILSAINEFERENIKERMTMGKLGRAKSGKSMMWTKTAFGYYHNRKTGILEIVPLQATIVEQIFTDYLSGISLTKLRDKLNESGHIGKDIPWSYRTLRQTLDNPVYCGYIKFKDSLFEGMHKPIIPYETYLKVQKELEERQQQTYERNNNPRPFQAKYMLSGMARCGYCGAPLKIVLGRKRKDGSRTMKYHCANRFPRKTGGVTVYNDNKKCDSGTYDLSNLENTVIDSLIGFQENNDSLLKIINSNNQPIPDTSSFKEQISQIDKKIQKNSDLYLNDFITMDELKDRTDSLQAEKKLLRARISENKHNDSTDVFELVKTQLGSIPINELSYDNKKKIVNSLVSKVDVTADNVDIIFKFQLA

SEQ ID NO: 1738 - protein, 469 aa, synthetic construct
MSYTTPVRAAVYLRISEDRSGEQLGVARQREDCLKLCDQRRWVPVEYLDNDVSASTGKRRPAYEQMLADITAGKIAAVVAWDLDRLHRRPIELEAFMSLADEKRLALATVAGDIDLATPQGRLVARLKGSVAAHETEHKKARQRRAARQKAERGHPNWSKAFGYLPGPNGPEPDPRTAPLVKQAYADILAGASLGDVCRRWNDAGAFTITSRLWTTTTLSKFLRKPRNAGLRAYKGARYGPVDRDAIVGKAQWSPLVDEATFWAAQAVLDAPGRAPGRKSVRRHLLTGLAGCGKCGNHLAGSYRTDGRVVYVCKACHGVAILADNIEPILYHIVAERLAMPDAVDLLCREIHDAAEAETIRLELETLYGELDRLAVERAEGLLTARQVKISTDIVNAKITKLRAHQQDQERLRVLDGIPLGTPQVAGMIAELSPDRFRAVLDVLAEVVVQPVGKGGRIFNPERVQVNWR

SEQ ID NO: 1739 - protein, 469 aa, synthetic construct
MSNTTPVRAAVYLRISEDRSGEQLGVARQREDCLKLCGQRKWVPVEYLDNDVSASTGRRRPAYEQMLADITAGKVAAVVAWDLDRLHRRPVELEAFMSLADEKRLALATVAGDVDLATPQGRLVARLKGCVAAHETEHKKARQRRAARQKAERGLPNWSKAFGYLPGPSGPEPDPRTAPLVRQAYADILAGASLGDVCRQWNDAGVFTITGRPWTTTTLSKFLRKPRNAGLRAYKGARYGPVDRDAIVGKAQWSPLVDEATFWAAQAVLDAPGRAPGRKSVRRHLLTGLAGCGKCGNHLAGSYRTDGRVVYVCKACHGVAILADNIEPILYHIVAERLAMPDAVNLLRREIHDAAEAETIRQELETLYGELDRLAVERAEGLLTARQVKISTDVVNAKITKLQARQLDQERLRVLDDIPLGTPQVAGMIAELSPDRFRAVLDVLAEVVVQPVGKSGRTFNPERVQVNWR

SEQ ID NO: 1740 - protein, 485 aa, synthetic construct
MTEKVAIYTRVSTTNQAEEGFSIDEQIDRLTKYAEAMGWQVSDTYTDAGFSGAKLERPAMRRLINDIENKAFDTVLVYKLDRLSRSVRDTLYLVKDVFTKNKIDFISLSESIDTSSAMGSLFLTILSAINEFERENIKERMTMGKLGRAKSGKSMMWTKTAFGYYHNRKTGILEIVPLQATIVEQIFTDYLSGFSLTKLRDKLNESGHIGKDIPWSYRTLRQTLDNPVYCGYIKFKGSLFEGMHKPIIPYETYLKVQKELEERQQQTYERNNNPRPFQAKYMLSGMARCGYCGAPLRIVLGHKRKDGSRTMKYHCANRFPRKTKGVTVYNDNKKCDSGTYDLSNLENTVIDSLIGLQENNDSLLKVINGNNQPILDTSSFEKQISQIDKKIQKNSDLYLNDFITMDELKDRTDSLQAEKKLLKAKISENKFNDSTDVFELVKTQLGSIPINELSYDNKKEIVNNLVSKVDVTADNVDIIFKFQLA

SEQ ID NO: 1741 - protein, 469 aa, synthetic construct
MSYTTPVRAAVYLRISEDRSGEQLGVARQREDCLKLCDQRKWVPVEYLDNDVSASTGKRRPAYEQMLADITAGRIAAVVAWDLDRLHRRPIELEAFMSLADEKRLALATVAGDVDLATPQGRLVARLKGSVAAHETEHKKARQRRAARQKAERGYPNWSKAFGYLPGPDGPEPDPRTAPLVKQAYADILAGASLGDVCRRWNDAGAFTATGKPWTTTTLSKFLRKPRNAGLRAYKGARYGPVDRDAIVGKAQWSPLVDEATFWAAQAVLDAPGRAPGRKSVRRHLLTGLAGCGKCGNHLAGSYRTDGRVVYVCKACHGVAILADNIEPILYHAVAERLAMPDAVDLLRRETHDAAEAEAIRLELETLYGELDRLAVERAEGLLTARQVKISTDIVNAKITKLRARQQDQERLRVLDGIPLGTPQVAGMIAELSPDRFRAVLDVLADVVVQPVGKSGRISNPERVQVNWR

SEQ ID NO: 1742 - protein, 469 aa, synthetic construct
MSYTTPVRAAVYLRISEDRSGEQLGVARQREDCLKLCDQRKWVPVEYLDNDVSASTGKRRPAYEQMLADITAGKIAAVVAWDLDRLHRRPIELEAFMSLADEKRLALATAAGDVDLATPQGRLVARLKGSVAAHETEHKRVRQRRAARQKAERGHPNWSKAFGYLPGPNGPEPDPRTAPLVKQAYADILAGASLGDVCRQWNAAGALTITGRPWTTTTLSKFLRKPRNAGLRAYKGARYGPVDRDAIVGKAQWSPLVDEATFWAAQAVLDAPGRAPGRKSVRRHLLTGLAGCGKCGNHLAGSYRTDGRVVYVCKACHGVAILADNIEPILYHIVAERLAMPDAVDLLRREIHDAAEAETIRLELETLYGELDRLAVERAEGLLTARQVKISTDIVNAKITKLQARQLDQERLRVLDDIPLGTPQVAGMIAELSPDRFRAVLDVLAEVVVQPVGKSGRVFNPERVQVNWR

SEQ ID NO: 1743 - protein, 485 aa, synthetic construct
MTKKVAIYTRVSTTNQVEEGFSINEQIDRLTKYAEAMGWQVSDTYTDAGLSGAKLERPAMQRLINDIENKAFDTVLVYKLDRLSRSVRDTLYLVKDVFTKNKVDFISLNESIDTSSAMGSLFLTILSAINEFERENIKERMTMGKLGRAKSGKSMMWTKTAFGYYHNRKTGILEIVPLQATIVEQIFTDYLSGISLTKLRDKLNESGHIGKDIPWSYRTLRQTLDNPVYCGYIKFKDSLFEGMHKPIIPYETYLKVQKELGERQQQAYERNNNPRPFQAKYMLSGVARCGYCGAPLRIVLGHKRKDGSRTMKYHCANRFPRKTKGITVYNGNKKCDSGTYDLGNLENTVIDYLVGFQEDNDSLLKIINGNNQPILDTSSFRKQISLIDKKIQKNSDLYLNNFITMDELKARTDSLRAEKRLLKAKISENKFNDSTDVFELVKTQLGSIPINELSYDNKKKIVNNLVSKVDVTADSVDIIFKFQLA

SEQ ID NO: 1744 - protein, 485 aa, synthetic construct
MTKKVAIYTRVSTTNQAEEGFSIDEQIDRLTKYAEAMGWQVSDTYTDAGFSGAKLERPAMQRLINDIENKTFDTVLVYKLDRLSRSVRDTLCLVKDVFTKNKIDFISLNESIDTSSAMGSLFLTILSAINEFERENIKERMTMGKLGRAKSGKSMMWTKTAFGYYHNRETGILEIVPLQATVVEQIFTDYLSGISLTKLRDKLNESGHIGKDIPWSYRTLRQTLDNPVYCGYIKFKGRLFEGMHKPIIPYETYLKVQKELEERQQQTYERNNNPRPFQAKYMLSGMARCGYCGAPLRIVLGHKRKDGSRTMKYHCANRFPRKTKGVTVYNDNKKCDSGTYDLSSLENTVIDSLIGFQENNDSLLKIINGNNQPILDTSSFKEQISQIDKKIQKNSDLYLNDFITMDELKDRTDSLQAEKKLLKAKISENKFNDSTDVFELVKTQLGSIPINELSYDNKKKIVNNLVSKVDVTADNVDIILKFQLA

SEQ ID NO: 1745 - protein, 469 aa, synthetic construct
MSYTTPVRAAVYLRISEDRSGEQLGVARQREDCLKLCDQRKWVPVEYLDNDVSASTGKRRPAYEQMLADITAGKIAAVVAWDLDRLHRRPIELEAFMSLADEKRLALATVAGDVDLATPQGRLVARLKGSVAAHETEHKKARQRRAARQKAERGYPNWSKAFGYLPGPNGPEPDPRTAPLVKQAYADILAGASLGDVCRQWNDAGASTITGRPWTTTTLSKFLRKPRNAGLRAYKGARYGPVDRDAIVGKAQWSPLVDEATFWAAQAVLDAPGRAPGRKSVRRHLLTGLAGCGKCGNHLAGSHRTDGRVVYVCKACHGVSILADNIEPILYRIVAERLAMPDAVDLLRREVHDAAEAETIRLELETLYGELDRLAVERAEGLLTARQVKISTDIVNAKITKLQARQLDQERLRVFDGIPLGTPQVAGMIAGLSPDRFRAVLDVLAEVVVQPMGKGGRIFNPERVQVNWR

SEQ ID NO: 1746 - protein, 469 aa, synthetic construct
MCYTTPVRAAVYLRISEDRSGEQLGVARQREDCLKLCGQRNWVPVEYLDNDVSASTGKRRPAYEQMLADITAGKIAAVVAWDLDRLHRRPIELEAFMSLADEKRLALATVAGDVDLATPQGRLVARLKGSVAAHETEHKKARQRRAARQKAERGHPNWSKAFGYLPGPNGPEPDPRTAPLVKQAYADILAGASLGDVCRQWNDAGAFTITGRPWTTTTLSKFLRKPRNAGLRTYKGAHYGPVDRDAIVGKAQWSPLVGEATFWAAQAVLDAPGRAPGRKSVRRHLLTGLAGCGKCGNHLAGSYRTDGRVVYVCKACYGVAILADNIEPILYHIVAERLAMPDAVDLLRREVHDAAEAETVRLELETLHGELDRLAVERAEGLLTARQVKISTDIVNAKITKLQARQLDQERLRVLDGIPLGTPQVAGMIAELSPDRFRAVLDVLAEVVVQPVGKSGRISNPERVQVNWR

SEQ ID NO: 1747 - protein, 469 aa, synthetic construct
MSYTTPVRAAVYLRISEDRSGEQLGVARQREDCLKLCDQRKWVPVEYLDNDVSASTGKRRPAYEQMLADIAAGKIAAVVAWDLDRLHRRPTELEAFMSLADEKRLALATVAGDVDLATPQGRLVARLKGSVAAHETEHKKARQRRAARQKAERGHPNWSKAFGYLPGPNGPEPDPRTAPLVKQAYADILAGASLGDVCRQWNGAGAFTITGRPWTTTALSKFLRKPRNAGLRAYKGARYGPVDRDAIVGKAQWSPLVDEATFWAAQAVLDAPGRAPGRKSVRRHLLTGLAGCGKCGNHLAGSYRTDGRVVYVCRACHGVAILADSIEPILYHIVAERLAMPDAVDLLRREIHDAAEAETIRLELETLYGELDRLAVERAEGLLTARQVKISTDIVNAKITKLLARQLDQERLRVFDGIPLGTPQVAGMIAELSPNRFRAVLDVLAEVVVQPVGKGGRIFNPERVQVNWR

SEQ ID NO: 1748 - protein, 485 aa, synthetic construct
MTKKVAIYTRVSTTNQAEVGFSIDEQIDRLTKYAEAMGWQVSGTYTDAGFSGAKLERPAMQRLINDIENKAFDTVLVYKLDRLSRSVRDTLYLVKDVFTKNKIDFISLNESIDTSSAMGSLFLTILSAINEFERENIKERVTMGKLGRAKSGKSMMWTKTAFGYYHNRKTGILEIVPLQAAVVEQIFTDYLNGISLTKLRDKLNESGHIGKDIPWSYRTLRQTLDNPVYCGYIKFKGSLFEGMHKPIIPYETYLKVQKELKERQQQTYERNNNPRPFQAKYMLSGMARCGYCGAPLRIVLGHKRKDGSRTMKYHCANRFPRKTKGVSVYNDNKKCDSGTYDLGNLENTVIDNLIGFQENNDSLLKIINGNSQPILDTSSFKKQISQIDKKIQKISDLYLNDFITMDELKDRTDSLQAEKELLKAKVSENKFNDSTDVLELVKTQLGSIPINELSYDNKKKIVNSLVSKVDVTADNVDIIFKFQLP

SEQ ID NO: 1749 - protein, 469 aa, synthetic construct
MSYTTPVRAAVYLRISEDRSGEQLGVARQREDCLKLCDQRKWVPVEYLDNDVSASTGKRRPAYEQMLADITAGKIAAVVAWDLDRLHRRPVELEAFMSLADEKRLALATVAGDVDLATPQGRLVARLKGSVAAHETEHKKARQRRAARQKAERGLPNWSKAFGYLPGPNGPGPDPRTAPLVKQAYADILAGASLGDVCRQWNGAGAFTITGRLWTTTALSKFLRKPRNAGLRAYKGARYGPVDRDAIVGKAQWSPLVDEATFWAAQAVLDAPGRAPGRKSVRRHLLTGLAGCGKCGNHLAGSYRTDGKVVYVCKACHGVAILADNIEPILYHIVTERLTMPDAVDLLRREIRDAAEAETFRLELETLYGELDRLAVERAEGLLTARQVKISTDIVNAKITKLQARQLDQERLRVFDGIPLGTPQVAGMIAELSPDRFRAVLDVLAEVVVQPVGKGGRIFNPERVQVNWR

SEQ ID NO: 1750 - protein, 485 aa, synthetic construct
MTKKVAIYTRVSTTNQAEEGFSIDEQIDRLTKYAEAMGWQVSDTYTDAGLSGAKLERPAMQRLINDIENKAFDTVLVYKLDRLSRSVRDTLYLVKDVFTKNKIDFISLNESIDTSSAMGSLFLTILSAINEFERENIKERMTMGKLGRAKSGKSMMWTKTAFGYYHNRKTGILEIVPLQATIVEQIFTDYLSGISLTKLRDKLNESGHIGKDIPWSYRTLRQTLDNPVYCGYIKFKGSLFEGMHKPIIPYETYLKVQKELEERQRQTYERNNNPRPFQAKYMLSGMARCGYCGAPLRIVLGHKRKDGSRTMKYHCANRFPRRTKGITVYNDNKKCDSGTYDLSNLENTVIDNLIGFQENNDSLLKIINGNNQPIPDTSSFKRQISQIDKKIQKNSDLYLNDFITMDELKDRTDSLQAEKKLLKAKISESKFNDSTDVFELVKTQLGSIPINELSYDNKKKIVNNLVSKVDVTADNVDIVFKFQLA

SEQ ID NO: 1751 - protein, 452 aa, synthetic construct
MKAAIYIRVSTREQVENYSIQAQTEKLTALCRSKDWDVYDIFIDGGYSGSNMNRPALNEMLSKLHEIDAVVVYRLDRLSRSQRDTITLIEEYFLKNNVEFVSLSETLDTSSPFGRAMIGILSVFAQLERETIRDRMVMGKIKRIEAGLPLTTAKGRTFGYDVIDTKLYVNEEEARQLQLIYDIFEEEQSITFLQKRLKKLGFKVRTYNCYNNWLTNDLYCGYVSYKDKVHVKGIHEPIISEEQFCRVQEIFTRMGKNPNMNRDSASLLNNLVVCSKCGLGFVHRRKDAMSRDKKYHYRYYSCKTYKHIHELEKCGNKIWRADKLEELIINRVNNYSFASRNADKEDELDGLYEKLKIEHAKKKRLFDLYINGSYEVSELDSMMNDIDAQINYYESQIEANEELKKNEKIQENLAYLATVDFDSLEFREKQRYLKSLINKIYIDGEQVTIEWL

SEQ ID NO: 1752 - protein, 452 aa, synthetic construct
MKAAIYIRVSTREQVENYSIQAQTEKLTALCRSKDWDVYDIFIDGGYSGSNMNRPALNEMLSKLHEIDAVVVYRLDRLSRSQRDTITLIEEYFLKNNVEFVSLSETLDTSSPFGRAMIGILSVFAQLERETIRDRMVMGKIKRIEAGLPLTTAKGRTFGYDVIDTKLYINEEEAKQLQLIYDIFEEEQSITFLQKRLKKLGFKVRTYNRYSNWLTNDLYCGYVSYKDKVHVKGIHEPIISEEQFYRVQEIFTRMGKSPNMNRDSASLLNNLVVCGKCGLSFVHRRKDTMSRDKRYHYRYYSCKTYKHIHELEKCGNKIWRADELEELIINRVNNYSFASRNVDKENELDSLNEKLKTEHAKKKRLFDLYINGSYEVSELDSMMNDIDAQINYYESQIEANEELKKNKKIQENLAYLATVDFDSLEFREKQLYLKSLINKIYIDGEQVTIEWL

SEQ ID NO: 1753 - protein, 469 aa, synthetic construct
MSYTTPVRAAVYLRISEDRSGEQLGVARQREDCLKLCDQRKWVPVEYLDNDVSASTGKRRPAYEQMLADITAGKIAAVVAWDLDRLHRRPIELEAFMSLADEKRLALATVAGDVDLATPQGRLVARLKGSVAAHETEHKKARQRRAARQKAERGYPNWSKAFGYLPGPNGPEPDPRTAPLVKQAYADILAGASLGDVCRQWNDAGAFTITGRPWTSTTLSKFLRKPRNAGLRAYRGAPYGPVDRDAIVGKAQWSPLVDEATFWAAQAVLDAPGRAPGRKSVRRHLLTGLAGCGKCGNHLAGSYRADGRVVYVCKACHGVAILADNIEPILYHIVAERLAMPDAVDLLRCEIHDAAEAETIRLELETLYGELDRLAVERAEGLLTARQVKISTDIVNAKITELQARQLDQERLRVFDGIPLGTPQVAGMIAELSPDRFRAVLDVLAEVVVQPVGKSGRIFNPERVQVNWR

SEQ ID NO: 1754 - protein, 485 aa, synthetic construct
MTKKVAIYTRVSTINQAEEGFSIDEQIDRLTKYAEAMGWQVSGTYTDAGFSGAKLERPAMQRLINGIENKAFDTVLVYKLDRLSRSVRDTLYLVKDVFTKNKIDFISLNESIDTSSAMGSLFLTILSAINEFERENIKERMTMGKLGRARSGKSMMWTKTAFGYYHNRNTGILEIVPLQATIVEQIFTDYLSGISLTKLRDKLNESGHIGKDIPWSYRTLRQTLDNPVYCGYIKFKDSLFEGMHKPIIPYETYLKVQKELEERQQQTYERNNNPRPFQAKYMLSGMARCGYCGAPLRIVLGHKRKDGSRTMKYHCANRFPRKTKGVTVYNDNKKCDSGTYELSNLENTVIDNLIGFQENNDSLLKIINGNNQPIPDTSSFKKQISQIDKKIQKNSDLYLNDFITMDELKDRTDSLQAEKELLKAKISETKFNDSTDVFELVKTQLGSIPINELSYDNKKKIVNNLVSKVDVTADSVDIIFKFQLA

SEQ ID NO: 1755 - protein, 452 aa, synthetic construct
MKAAIYIRVSTQEQVGNYSIQAQTEKLTALCRSKDWDVYDIFVDGGYSGSNMDRPALNEMLSKLHEIDAVVVYRLDRLSRSQRDTTTLIEEYFLKNNVEFVSLSETLDTSSPFGRAMIGILSVFAQLERETIRDRMVMGKIKRIEAGLPLTTAKGRTFGYDVIDTKLYINEEEARQLQLIYDIFEEEQSITSLQKRLKKLGFKVRTYNRYSNWLTNDLYCGYVSYKDKVHVKGIHEPIISEEQFHRVQEILTRMGKNPNMNRDSASLLNNLVVCSKCGLGFVHRSKDTMSRGKKYHYRYYSCKTYKHTHELEKCGNKIWRADRLEELVINRVNNYSFASRNVDKEDELDSLNEKLKVEHAKKKRLFDLYINGSYEVSELDSMMNDIDAQINYYESQIEAKEGLRKNKKIQENLADLATVDFDSLGFREKQLYLKSLINKIYIDGEQVTIEWL

SEQ ID NO: 1756 - protein, 452 aa, synthetic construct
MKAAIYIRVSTREQVENYSIQAQTEKLTALCRSKGWDVYDIFIDGGYSGSNMNRPALNEMLSKLHEIDAVVVYRLDRLSRSQRDTLTLIEEYFLKNNVEFVSLSETLDTSSPFGRAMIGILSVFAQLERETIRDRMVMGKIKRIEAGLPLTTAKGRTFGYDVIDTKLYINEEEAKQLRLIYDIFEEEQSITFLQKRLKKLGFKVRTYNRYNNWLTNDLYCGYVSYKDKVHVKGIHEPIISEEQFYRVQEIFTRMGKNPNMNRDSASLLNNLVVCSKCGLGFVHRRKDTMSRGKKYHYRYYSCKTYKHTHELEKCGNKIWRADKLEELIINRVNNYSLASRNVDKEDELDSLNEKLKIEHAKKKRLFDLYINGSYEVSELDSMMNDIDAQISYYESQIEANEELKKNKKIRENLADLAIVDFDSLEFREKQLYLKSLINRIYIDGEQVTIEWL

SEQ ID NO: 1757 - protein, 485 aa, synthetic construct
MTKKVAIYTRVSTTNQAEEGFSIDEQIDRLTKYAEAMGWQVSDTYTDAGLSGAKLERPAMQRLINDIETKAFDTVLVYKLDRLSRSVRDTLYLVKDVFTKNKIDFISLNESIDTSSAMGSLFLTILSAINEFERENIKERMTMGKLGRAKSGKSMMWTKTAFGYYHNRKTGILEIVPLQATIVEQIFTDYLGGISLTKLRDKLNESGHIGKDIPWSYRTLRQTLDNPVYCGYIKFKGSLFEGMHKPIIPYETYLKVQKELEERQQQTYERNNNPRPFQAKYMLSGMARCGYCGAPLKIVLGHKRKDGSRTMKYHCANRFPRKTKGVTVYDDNKKCDSGTYDLSNLENTVIDNLIGLQENNDSLLKIINGNNQPILDTSSFKKQISQIDKKIQKNSDLYLNGFITMDELKDRTDSLQAEKKLLKAKISENKFNDSADVFELVKTQLGSIPINELSYDDKKKIVNNLVSKVDVTADNVDIIFKFQLA

SEQ ID NO: 1758 - protein, 452 aa, synthetic construct
MKAAIYIRVSTQEQVENYSIQAQTEKLTALCRSKDWDVYDIFTDGGYSGSNMNRPALNEMLSKLHEIDAVVVYRLDRLSRSQRDTITLIEEYFLKNNVEFVSLSETLDTSSPFGRAMIGILSVFAQLERETIRDRMVMGKIKRIEAGLPLTTAKGRTFGYDVIDTKLYINEEEAKQLQLIYDIFEEEQSITSLQKRLKKLGLKVRTYNRYSNWLTNDLYCGYVSYKDKVHVKGIHEPIISEEQFYRVQEIFARMGKSPNMNRDSASLLNSLVVCSKCGLGFVHRRKDTVSRGKKYHYRYYSCKTYKHPHELEKCGNKIWRADKLEELIINRVNNYSLACRNVDKAEELDSLNEKLKVEHAKKKRLFDLYINGSYNVSELDIMMNDIDAQINYYESQIEANEELKKNKKIQENLAGLATVDFESLEFREKQLYLKSLINKIYIDGEQVTIEWL

SEQ ID NO: 1759 - protein, 485 aa, synthetic construct
MTKKVAIYTRVSTTNQAEEGFSIDEQIDRLTKYAEAMGWQVSDTYTDAGLSGAKLERPAMQRLINDIENKAFDTVLVYKLDRLSRSVRDTLYLVKDVFTKNKIDFISLNESIDTSSAMGSLFLTILSAINEFERENIKERMTMGKLGRAKSGKSMMWTKTAFGYYHNRRTGILEIVPLQATIVEQIFTDYLSGISLTKLRDKLNESGHIGKDIPWSYRTLRQTLDNPVYCGYIKFKGSLFEGMHKPIIPYETYLKVQKELEERQQQTYERNNNPRPFQAKYMLSGMARCGYCGAPLRIVLGHKRKDGGRTMRYHCANRFPRKTKGVTVYNDNKKCDSGTYDLSNLENTVIDNLVGFQENSDSLLKIINGTNQPILDTSSLKEQISLIDKKIQKNSDLYLNDFITMDELKDRTDSLQAEKKLLKAKISENKFNDSTDVFELVRTQLGSIPINELSYDDKKKIVNNLVSKVVVTADNVDIIFKFQLA

SEQ ID NO: 1760 - protein, 485 aa, synthetic construct
MTKKVAIYTRVSTTNQAEEGFSIDEQIDRLTKYAEAMGWQVSDTYTDAGFSGAKLERPAMRRLINDIEDKAFDTVLVYKLDRLSRSVRDTLYLVKDVFTKNEIDFISLNESIDTSSAMGSLFLTILSAINEFERENIKERMTMGKLGRAKSGKSMMWTKTAFGYYHNRKTGILEIVPLQAAIVEQIFTDYLSGISLTKLRDKLNESGHIGKDIPWSYRTLRQTLDNPVYCGYIKFKDSLFEGMHKPIIPYETYLRVQKELKERQQQTYERNNNPRPFQAKYMLSGMARCGYCGAPLRIVLGHRRKDGSRTMKYHCANRFPRKAKGITVYNDNKKCDSGTYDLSNLENTVIDNLIGFQENNDSLLKIINGNNQPILDTSSFKKQIIQIDKKIQKNSDLYLNDFITMDELKERTDSLQAEKKLLEAKVSENRFNDSTDVFELVKTQLGSIPINELSYDNKKKIVNSLVSKVDVTADNVDIIFKFQLA

SEQ ID NO: 1761 - protein, 452 aa, synthetic construct
MKAAIYIRVSTREQVENYSIQAQTEKLTALCRSKDWDVYDIFIDGGYSGSNMNRPALNEMLSKLHEIDAVVVYRLDRLSRSQRDTITLIEEYFLKNNVEFVSLSETLDTSSPFGRAMIGILSVFAQLERETIRDRMVMGKIKRIEAGLPLTTAKGRTFGYDVIGTKLYINEEEAKQLQLIYDIFEEEQSITFLQKRLKKLGFKVRAYNRYNNWLTNDLYCGYVSYKDKVHVKGIHEPIISEEQFYRVQEIFTRMGKNPNMNRDSASLLNNLVVCSKCGLGFVHRRKDATSRDKKYHYRYYSCKTYKHIHELEKCGNKIWRADKLEELIINRVNNYSFASRNADKEDELDSLNEKLKIEHAKKKRLFDLYLNGSYEVSELDSMMSDIDAQINYYESQIEANKELRKSKRIQENLANLATVDFDSLEFREKQLYLKSLINKIYIDGEQVTIEWL

SEQ ID NO: 1762 - protein, 469 aa, synthetic construct
MCYTTPVRAAVYLRISEDRSGEQLGVARQREDCLKLCDQRKWEPVEYLDNDVSASTGKRRPAYEQMLADITAGKIAAVVAWDLDRLHRRPIELEAFMSLADEKRLALATVAGDVDLATPQGRLVARLKGSVAAHETEHKKARQRRAARQKAERGHPNWSKAFGYLPGPNGPEPDPRTAPLVKQAYADILAGASLGDVCRQWNAAGAFTITGRPWTTTTLSKFLRKPRNAGLRAYKGARYGPVDRDAIVGRAQWSPLVDEATFWAAQAVLDAPGRAPGRKSVRRHLLTGLAGCGKCGNHLAGSYRTDGRVVYVCKACHGVAILADNIEPVLYHIVAERLAKPDAVDLLRREIHDAAEAETIRLELETLHGELDRLAVERAEGLLTARQVKISTDIVNAKIAKLQARQLDQERLRVFDGIPLGTPQVAGMIAELSPNRFRAVLDVLAEVVVQPVGKSGRIFNPERVQVNWR

SEQ ID NO: 1763 - protein, 469 aa, synthetic construct
MCYTTPVRAAVYLRISEDRSGEQLGVARQREDCLKLCDQRKWVPVEYLDNDVSASTGKRRPAYEQMLADITAGKIAAVVAWDLDRLHRRPIELEAFMSLADEKRLALATVAGDVDLATPQGRLVARLKGSVAAHETEHKKARQRRAARQKAERGHPNWSKAFGYLPGPNGPEPDPRTAPLVKQAYADILAGASLGDVCRQWNAAGVFTITGRPWTTTTLSKFLRKPRNAGLRAYKGARYGPVDRDAIVGIAQWSPLVDEATFWAAQAALDAPGRAPGRKSVRRHLLTGLAGCGKCGNHLAGSYRTDGRVVYVCKACHGVAILADNIEPILYHIVAERLAMPDAVDLLRREIHDAAEAETIRLELETLYGELDRLAVERAEGLLTARQVKISTDIVNAKITKLQARQLDQERLRVFDGIPLGTPQVAGMIAELSPNRFRAVLDVLAEVVVQPVGKSGRIFNPERVQVNWR

SEQ ID NO: 1764 - protein, 485 aa, synthetic construct
MTKKVAIYTRVSTTNQAEEGFSIDEQIDRLTKYAEAMGWQVSDTYTDAGFSGAKLERPAMQHLINDIENKAFDTVLVYKLDRLSRSVRDTLHLVKDVFTKNKIDFVSLNESIDTSSAMGSLFLTILSAINEFERENIKERMTMGKLGRAKSGKSMMWTKTAFGYYHNRKTGILEIVPLQATIVEQIFTDYLSGISLTKLRDKLNESGHIGKDIPWSYRTLRQTLDNPVYCGYIKFKDSLFEGMHKPIIPYETYLKVQKELEERQQQTYERNNNPRPFQAKYMLSGMARCGYCGAPLRIVLGHKRKDGSRTMKYQCANRFPRKTKGITVYNDNKKCDSGTYDLSNLENTVIDNLIGFQENSDSLLKIINGSNQPVLDTSSFKKQISQIDKKIQKNTDLYLNDFITIDELRDRTDSLQAEKKLLKAKISENKFNDGTDVFELVKTQLGSTPISELSYDNKKKIVNNLVSKVDVTADNVDIVFKFQLA

SEQ ID NO: 1765 - protein, 485 aa, synthetic construct
MTKKVAIYTRVSTTNQAEEGFSIDEQIDRLTKYAEAMGWQVSDTYTDEGSSGAKLERPAMQRLINDIENKAFDTVLVYKLDRLSRSVRDTLYLVKDVFTKNKIDFISLNESIDTSSAMGSLFLTILSAINEFERENIKERMTMGKLGRAKSGRSMMWTKTAFGYYHNRKTGILEIVPLQAAIVEQIFTDYLSGISLTKLRDKLNESGHIGKDIPWSYRTLRRTLDNPVYCGYIKFKDSLFEGMHKPIIPYETYLKVQKELEERQQQTYERNNNPRPFQAKYMLSGMARCGYCGAPLRIVLGHKRKDGSRTMKYHCANRFPRKTKGATVYNDNKKCDSGTYDLSNLETTVIDNLIGFQENNDSLLKIINGSNQPILDTSSSKKQISQIDKKIQKNTDLYLNDFITMDELKARTDSLQAEKKLLEAKISENKSNDSTDVFELVKTQLGSIPINELSYDNKKKIVNNLVSKVDVTADDVDIIFKFQLA

SEQ ID NO: 1766 - protein, 452 aa, synthetic construct
MKAAIYIRVSTQEQVGNYSIQAQTEKLTALCRSKDWDVYDIFIDGGYSGSNMNRPALNEMLSKLHEIDAVVVYRLDRLSRSQRDTTTLIEEYFLKNNVEFVSLSETLDTSSPFGRAMIGILSVFAQLERETIRDRMVMGKIKRIEAGLPLTTAKGRTFGYDVIDTKLYINEEEAKQLQLIYDIFEEEQSITLLQKRLKKLGFKVRTYNRYNNWLTNDLYCGYVSYKDKVHVKGIHEPIISEEQFYRVQEIFTRMGKNPNMNRDSASLLNNLVVCGKCGLGFVHRSKDTTSRGKKYHYRYYSCKTYKHTHELEKCGNKIWRADKLEELIISRVNNYSFASRNVDKEDELDSLNEKLKIEHAKKKRLFDLYINGSYEVSELDSMMNDIDAQINYYESQIEASEELKKNKKIQENLADLATVDFDSLEFREKQLYLKSLINKIYIDGEQVTIEWL

SEQ ID NO: 1767 - protein, 469 aa, synthetic construct
MSYTTPVRAAVYLRISEDRSGEQLGVARQREDCLKLCGQRKWVPVEYLDNDVSASTGKRRPAYEQMLADITAGKIAAVVAWDLDRLHRRPIELEAFMCLADEKRLALATVAGDVDLATPQGRLVARLKGSVAAHETEHKRARQRRAARQKAERGHPNWSKAFGYLPGPNGPEPDPRTAPLVKQAYADILAGASLGDVCRQWNDAGAFTITGRPWTTTTLSKFLRKPRNAGLRAYKGARYGPVDRDAIVGKAQWSPLVDEATFWAAQAVLDAPGRAPGRKSVRRHLLTGLAGCGKCGNHLAGSYRTDGRVVYVCKACHGVAILADNIEPILYHIVTERLAMPDAMDLLLREIHDAAEAETIRLELETLYGELDRLAVERAEGLLTARQVKISTDIVNAKITKLQARQLDQERLRVLDGIPLGTPQVAGMIAELSPGRFRAVLDVLAEVVVQPVGKSGRIFNPERVQVNWR

SEQ ID NO: 1768 - protein, 485 aa, synthetic construct
MTKKVAIYTRVSTANQAEEGFSIDEQIDRLTKYAEAMGWQVSDTYTDAGCSGAKLERPAMQRLINDIENKAFDTVLVYKLDRLSRSVRDTLYLVKDVFAKNKIDFVSLNESINTSSAMGGLFLTILSAINEFERENIKERMTMGKLGRAKSGKSMMWTKTAFGYYHNRKTGILEIVPLQAAIVEQIFTDYLSGISLTKLRDKLNESGHIGKDIPWSYRTLRQTLDNPVYCGYIKFKDSLFEGMHKPIIPYETYLKVQKELEERQQQTYERNNNPRPFQAKYMLSGMARCGYCGAPLKVVLGHKRKDGSRTMKYHCANRFPRKTKGVTVYNDNKKCDSGTYDLSNLENTVIDNLIGFQENIDSLLEIINGNNQPILDTSSLKKQISQIDKKIQKNSDLYLNDFITMDELKDRTGSLQAEKKLLKAKISENKFNDSTDVFELVKTQLGSIPINELSYDNKKKIVNNLVSKVDVTADNVDIIFKFQLA

SEQ ID NO: 1769 - protein, 485 aa, synthetic construct
MTKKVAIYTRVSTTNQAEEGFSIDEQIDRLTKYAGAMGWQVSDTYTDAGLSGAKLERPAMQRLINDIENKAFDTVLVYKLDRLSRSVRDTLYLVKDVFTKNKIDFISLNESIDTSSAMGSLFLTILSAINEFERENIKERMTMGKLGRAKSGKSMMWTKTAFGYYHNRKTGILEIVPLQATIVEQIFTDYLSGISLTKLRDKLNESGHIGKDIPWSYRTLRQTLDNPVYCGYIKFKDSLFEGMHKPIIPYETYLKVQKELEERQQQTYERNNNPRPFQAKYMLSGMARCGYCGAPLRIVLGHKRKDGSRTMKYHCANRFPRKTKGVTVYNDNKKCDSGTYDLSNLENTVIDNLIGFQEDNDSLLEIINGNNQPIQDTSSFEKQISQIDKKIQKNSDLYLNDFITMDELKDRTGSLQAEKRLLKAKISENKFNDSTDVFELVKTQLGSIPINELSYDNKKKIVNNLVSKVDVTADNVDIIFKFQLA

SEQ ID NO: 1770 - protein, 452 aa, synthetic construct
MKAAIYIRVSTREQVENYSIQAQTEKLTALCRSKDWDVYDIFIDGGYSGSNMNRPALNEMLSRLHEIDAVVVYRLDRLSRSQRDTITLIEEYFLKNNVEFVSLSETLDTSSPFGRAMIGILSVFAQLERETIRDRMVMGKIKRIEAGLPLTTAKGRTFGYDVIDTKLYINEEEAKQLQLIYDIFEEEQSITFLQKRLKKLGFKVRTYNRYNNWLTNDLYCGYVSYKDKVHVKGIHEPIISEEQFYRVQEIFTRMGKNPNMNRGSASLLNNLVVCSKCGLGFVHRRKDTMSRGKKYRYRYYSCKTYKHTQELEKCGNKIWRADKLEELIISRVNNYSFASRNVDKEDELDSLNEKLKIERAKKKRLFDLYINGSYEVSELDCMMNDIDAQINYYESQIGANEELKKDKKIQESLANLATVDYDSLEFREKQLYLKSLINKIYIDGEQVTIEWL

SEQ ID NO: 1771 - protein, 452 aa, synthetic construct
MKAAIYIRVSTREQVENYSIQAQTEKLTALCRSKDWDVYDIFIDGGYSGSNMNRPALNEMLSKLHEIDAVVVYRLDRLSRSQRDTITLIEEYFLKNNVEFVSLSETLDTSSPFGRAMIGILSVFAQLERETIRDRMVMGKIKRIEAGLPLTTAKGRTFGYDVINTKLYINEEEAKQLQLIYDIFEEEQSITFLQKRLKELGFKVRTYNCYNNWLTNDLYCGYVSYKDKVHVKGIHEPIISEEQFHRVQEIFTRMDRHPNMNRDSASLLNNLVVCSKCGLGFVHRRKDTTSRGKKYHYRYYSCKTYKHTHELEKCGNKIWRADKLEELIISRVNNYSFASRNVDKEDELDSLNEKLKVEHAKKKRLFDLYINGSYEVSELDCMMNDIDAQINYYESQIEANEELKKDEKIQESLANLATVDYDSLEFREKQLYLKSLINKIYIDGEQVTIEWL

SEQ ID NO: 1772 - protein, 469 aa, synthetic construct
MSYTTPVRAAVYLRISEDRSGEQLGVARQREDCLKLCDQRKWVPVEYLDNDVSASTGKRRPAYEQMLADITAGKIAAVVAWDLDRLHRRPTELEAFMSLADEKRLALATVAGDVDLATPQGRLVARLKGSVAAHETEHKKARQRRAARQKAERGLPNWSKAFGYLPGPNGPEPDPRTAPLVKRAYADILAGASLGDVCRQWNDAGASTITGRPWTTATLSKFLRKPRNAGLRAYKGARYGPVDRGAIVGKAQWSPLVDEETFWAAQAVLDAPGRAPGRKSVRRHLLTGLAGCGKCGNHLAGSYRTDGRVVYVCKACHGITILADNIEPILYHIVAERLAMPDAVDLLRREIHDAAEAETVRLELETLYSELDRLAVERAEGLLTARQVKISTDIVNAKITKLRARQLDQERLRVFDGIPLGTPQVAGMIAELSPNRFRAVLDVLAEVVVQPVGKGGRTFNPERVQVNWR

SEQ ID NO: 1773 - protein, 485 aa, synthetic construct
MTKKVAIYTRVSTTNQAEEGFSIDEQIDRLTKYAEVMGWQVSDTYTDAGSSGAKLERPAMQRLINDIENKAFDTVLVYKLDRLSRSVRDTLYLVKDVFTKNKIDFISLNESIDTSSAMGSLFLTILSAINEFERENIKERMTMGKLGRAKSGKSMMWTKTAFGYYHNRKTGILEIVPLQATIVEQIFTDYLSGISLTKLRDKLNESGHIGKDIPWSYRTLRQTLDNPVYCGYIKFKDSLFEGMHKPIIPYETYLKVQKELEERQQQTYERNNNPRPFQAKYMLSGMARCGYCGAPLKIVLGHKRKDGSRTMKYHCANRFPRKTKGVTVYNDNKKCDSGTYDLSNLENTVIDNLIGFQENNDSLLKIINGNNQPILDTSSFKKRINQIDKKIQKNSDLYLNDFITMDELKARTDSLQAEKKLLKAKISENKFNDSTDVFELVKTQLGSIPINELSYDNKKKIVNNLVSEVDVTADNVDIIFKFQLA

SEQ ID NO: 1774 - protein, 452 aa, synthetic construct
MKAAIYIRVSTREQVENYSIQAQTEKLTALCRSKDWDVYDIFIDGGYSGSNMNRPALNEMLGKLHEIDAVVVYRLDRLSRSQRDTITLIEEYFLKNNVEFVSLSETLDTSSPFGRAMIGILSVFAQLERETIRDRMVMGKIKRIEAGLPLTTAKGRTFGYDVIDTKLYINEEEAKQLQLIYDIFEEERSITFLQKRLKKLGFKVRTYNCYNNWLTNDLYCGYVSYKDKVHVKGIHEPIISEEQFYRVQEIFTRMGKNPNMNRGSASLLNNLVVCSKCGLGFVHRRKDIMSRGKKYHYRYYSCKTYKHIHELEKCGNKIWRADKLEELIINRVNNYSLASRNVDKEDELDSLNEKLKIEHAKKRRLFDLYINGSYEVSGLDSMLNDIDARINSYESQIEENEELKKNRKIQENLADPATVDFDNLEFREKQLYLKSLINKIYIDGEQVTIEWL

SEQ ID NO: 1775 - protein, 469 aa, synthetic construct
MCYTTPVRAAVYLRISEDRSGEQLGVARQREDCLKLCDQRKWVPVEYLDNDVSASTGKRRPAYEQMLADITAGKIAAVVAWDLDRLHRRPIELEAFMSLADEKRLALATVAGDVDLATPQGRLVARLKGSVAAHETEHKKARQRRAARQKAERGHPNWSRAFGYLPGPNGPEPDPRTAPLVKQAYADILAGASLGNVCRQWNDAGAFTITGRPWTTTALSKFLRKPRNAGLRAYKGARYGPVDRDAIVGKAQWSPLVDEATFWAAQAVLDAPGRAPGRKSVRRHLLTGLAGCGKCGNHLAGSYRTDGRVVYVCKACHGVAILADNIEPILYHIVAERLAMPDAVDLLRREVHDAAEAEATRQELETLYGELDRLAVERAEGLLTARQVKISTDIVNAKITKLQARQLDQERLRVFDGIPLGTPQVAGMIAELSPNRFRAVLDVLAEVVVQPVGKGGRIFNPERVQVNWR

SEQ ID NO: 1776 - protein, 452 aa, synthetic construct
MKAAIYIRVSTQEQVGNYSIQAQTEKLTALCRSKGWDVYDIFIDGGYSGSNMNRPALNEMLSKLHEIDAVVVYRLDRLSRSQRDTTTLIEEFFLKNNVEFVSLSETLDTSSPFGRAMIGILSVFAQLERETIRDRMVMGKIKRIEAGLPLTTAKGRTFGYDVIDTKLYINEEEAKQLQLIYDIFEEEQSITSLQKRLKKLGFKVRTYNRYSNWLTNDLYCGYVSYKDKVHVKGIHEPIISEEQFYRVQEIFTRMGKNPNMNRDSASLLNNLVVCSRCGLGFVHRRKDTMSCGKKYHYRYYSCKTYKHTHELEKCGNKTWRADKLEELIINRVNNYSFASRNADKEDELDSLNEKLKIEHARKKRLFDLYINGSYEVSELDSMMNDIDAQIDYYESQIEANEELKKNKKIQENLADLATVDFDSLEFREKQLYLKSLINKIYIDGEQVTIEWL

SEQ ID NO: 1777 - protein, 485 aa, synthetic construct
MTKKVAIYTRVSTTNQAEEGFSIDEQIDRLTKYAEAMGWQVCDTYTDAGFSGAKLERPAMQRLINDIENKAFDSVLVYKLDRLSRSVRDTLHLVKDVFTKNKIDFISLNESIDTSSAMGSLFLTILSAINEFERENIKERMTMGKLGRAKSGKSMMWTKTAFGYYHNRETGILEIVPLQATIVEQIFTDYLSGISLTKLRDKLNESGHIGKDIPWSYRTLRQTLDNPVYCGYIKFKDSLFEGVHKPIIPYETYLKVQKELEERQQQTYERNNNPRPFQAKYMLSGMARCGYCGAPLRIVLGHKRKDGSRTMKYHCANRFPRKTKGVTVYNDNKKCDSGIYDLGNLENTVIDTLIGFQENNDSLLKIVNGNSPPILDTSSLKKQISQIDKKIQKNSDLYLNDFITMDELKDRTDSLQAEKKLLKAKISENRFNDGTDVFEQVKTQLGSIPINELSYDNKKKIVNNLVSKVDVTADNVDIIFKFQLA

SEQ ID NO: 1778 - protein, 485 aa, synthetic construct
MTRKVAIYTRVSTTNQAEEGFSIDEQIDRLTKYAEAMGWQVSDTYTDAGYSGAKLERPAMQRLINDIENKAFDTVLVYKLDRLSRSVRDTLYLVKDVFTKNKIDFISLNESINTSSAMGSLFLTILSAINEFERENIKERMTMGKLGRARSGKSMMWTKTAFGYYHNRKTGILEVVPLQATIVEQIFTDYLSGISLTKLRDKLNESGHIGKDIPWSYRTLRQTLDNPVYCGYIKFKDSLFEGMHKPIIPYETYLKVQKELEERQQQTYERNNNPRPFQAKYMLSGMARCGYCGAPLRIVLGHKRKDGSRTMKYHCANRFPRKTKGVTVYNDNKKCDSGTYDLSNLENTVIGNLIGFQENNDSLLKVINGNNQPILDTSNFEKQISQIDKKIQKNSDLYLNDFITMDELKVRTDSLQAEKKLLKAKISENKFNDSADVFELVKTQLGSIPINELSYDNKKKIVNDLVSKVDVTADNVDIIFKFQLA

SEQ ID NO: 1779 - protein, 469 aa, synthetic construct
MSYTTPVRAAVYLRISEDRSGEQLGVARQREDCLELCGQRKWEPVEYLDNDVSASTGKRRPAYEQMLADITAGKIAAVVAWDLDRLHRRPIELEAFMSLADEKRLALATVAGGVDLATPQGRLVARLKGSVAAHETEHKKARQRRAARQKAERGYPNWSRAFGYLPGPNGPEPDPRTAPLVKQAYADILAGASLGDVRRQWNDAGAFTITGRPWTTTTLSKFLRKPRNAGLRAYKGARYGPVDRDAIVGKAQWSPLVDEATFWAVQAVLDAPGRAPGRKSVRRHLLTGLAGCGKCGNHLAGSYRTDGRVVYVCKACHGVAILADNIEPILYHIVAERLAMPDAVDLLRREIHDAAEAETIRMGLETLYGELDRLAVERAEGLLTARQVKISTDIVNAKITKLQARQQDQERLRVLDGIPLGTPQVAGMIAELSPDRFRAVLDVLAEVVVQPVGKSGRIFNPERVQVNWR

SEQ ID NO: 1780 - protein, 469 aa, synthetic construct
MSYTTPVRAAVYLRISEDRSGEQLGVARQREDCLKLCDQRKWVPVEYLDNDVSASTGKRRPAYEQMLADITAGKITAVVAWDLDRLHRRPVELEAFMSLADEKRLALATVAGDVDLATPQGRLVARLKGVVAAHETEHKKARQRRAARQKAERGHPNWSKAFGYLPGPNGPEPDPRTAPLVKQAYADILAGASLGDVCRQWNDACAFTITGRPWTTTTLSKFLRKPRNAGLRAYKGARYGPVDRDAIVGKAQWSPLVDEATFWAAQAVLDAPGRAPGRKSVRRHLLTGLAGCGKCGNHLAGSYRTDGRVVYVCKACHGVAILADNIEPFLYHIVAERLAMPDAVDLLRREIRDAAVAETIRLELETLYGELDRLAVERAEGLLTARQVKISTDIVNAKITKLQARQLDQERLRVLGGIPLGTPQVAGTIAELSPDRFRAVLDVLAEVVVQPVGKSGRIFNPERVQVNWR

SEQ ID NO: 1781 - protein, 452 aa, synthetic construct
MKAAIYIRVSTREQVENYSIQAQTEKLTALCRSKDWDVYDIFIDGGYSGSNMNRPALNEMLSRLHEIDAVVVYRLDRLSRSQRDTITLIEEYFLKNNVEFVSLSETLDTSSPFGRAMIGILSVFAQLERETIRDRMVMGKIKRIEAGLPLTTAKGRTFGYDVIDTKLYINEEEARQLQLIYDIFEEERSITFLQKRLKKLGLKVRTYNCYNNWLTNDLYCGYVSYKDKVHVKGIHEPIISEEQFYRVQEIFTRMGKNPNMNRDSASLLNNLVVCGKCGLGFVHRRKDAKSRDKKYHYRYYSCKTYKHIHELEKCGNKIWRADKLEELIINRVNSYSLASRNVDKEDELDSLNEKLKVEYAKKRRLFDLYINGSYEMSELDSMMNDIDAQINYYESQIEANEELKRNKKIQENLADLETVDYDSLEFREKQLYLKSLINKIYIDGEQVTIEWL

SEQ ID NO: 1782 - protein, 485 aa, synthetic construct
MTKKVAIYTRVSTTNQAEEGFSIDEQIDRLTKYAEAMGWQVSDTYTDAGLSGAKLERPAMQRLINDIENKAFDTVLVYKLDRLSRSVRDTLYLVKDVFTKNKIDFISLSESIDTSSAMGSLFLTILSAINEFERENIKERMTMGKLGRAKSGKSMMWTKTAFGYYHNRKTGILEIVPLQAAIVEQIFTDYLSGISLTKLRDKLNESGHIGKDIPWSYRTLRQTLDNPVYCGYIKFKDSLFEGMHKPIIPYETYLKVQKELEKRQQQTYERNNDPRPFQAKYMLSGLARCGYCGAPLRIVLGHKRKDGSRTMKYHCANRFPRKTKGVTVYNDNKKCDSGTYDLSNLENTVIDNLIGFQENNDSLLKIINGNNQPILDTSSFKKQISQIDKKIQKNSDLYLNDFITMDELKDRTDSLQAEKKLLKAKISENKFSDSTDVFEQVKTQLGSIPINELSYDNKKKIVNNLVSKVDVTADNVDIIFKFQLA

SEQ ID NO: 1783 - protein, 452 aa, synthetic construct
MKAAIYIRVSTREQVENYSIQAQTEKLTALCRSKDWDVYDIFIDGGYSGSNMNRPALNEMLSKLHEIDAVVVYRLDRLSRSQRDTITLIEEYFLKNNVEFVSLSETLDTSSPFGRAMIGILSVFAQLERETIRDRMVMGKIKRIEAGLPLTTAKGRTFGYDVIDTKLYINEEEAKQLRLIYDIFEEEQSITFLQKRLKKLGFKVRTYNCYNNWLTNDLYCGYVSYKDKVHVRGIHEPIISEEQFYRVQEIFARMGKNPNMNRDSASLLNNLVVCSKCGLGFVHRRKDAMSRDKKYHYRYYSCKTYKHIHELEKCGNKIWRADKLEELIINRVNNYSFASRNADKEDELDSLNEKLKIEHAKKKRLLDLYINGSYEVSELDSMMNDIDVQINYYESQIEASEELKKNKKIQEDLAHLATVDFDSLEFREKQLYLKSLINKIYIDGEQVTIEWL

SEQ ID NO: 1784 - protein, 485 aa, synthetic construct
MTKKVAIYTRVSTTNQAEEGFSIDEQIDRLTKYAEAMGWQVSDTYTDAGFSGAKLERPAMQRLINDIENKAFDTVLVYKLDRLSRSVRDTLYLVKDVFTKNKIDFISLNESINTSSAMGSLFLTILSAINEFERENIKERMTMGKLGRAKSGKSMMWTKTAFGYYHNRKTGILEIVPLQATIVEQIFTDYLSGISLTKLRDKLNESGHIGKDIPWSYRTLRQTLDNPVYCGYIKFKDSLFEGMHKPIIPYETYLKVQKELEERQQQTYERNNNPRPFQAKYMLSGMARCGYCGAPLRIVLGRKRKDGSRTMKYHCANRFPRKTKGVTVYNDNKKCDSGTYDLSSLEDTVIDTLIGFQENNDSLLEIINGNNQPILDTSSIKKQISQIDKKIQKNSDLYLNDFITMDELKNRTDSLQAEKELLKAKISENKINDSTDVFELVKTQLGSIPINELSYDNKKKIVNNLVSKVDVTADNVDIIFKFQSA

SEQ ID NO: 1785 - protein, 452 aa, synthetic construct
MKAAIYIRVSTREQVENYSIQAQTEKLTALCRSKDWDVYDIFVDGGYSGSNMNRPALNEMLSKLHEIDAVVVYRLDRLSRSQRDTITLIEEYFLKNNVEFVSLSETLDTSSPFGRAMIGILSVFAQLERETIRDRMVMGKIKRIEAGLPLTTAKGRTFGYDVIDTKLYINEEEAKQLRLIYDIFEEEQSITFLQKRLKKLGFKVRTYNRYNNWLTNDLYCGYVSYKDKVHVKGIHEPIISEEQFYRVQEIFTRMGRNPNMNRDSASLLNNLVVCSKCGLGFVHRRKDAMSRDKKYHYRYYSCKTYKHIHELEKCGNKIWRADKLEELIINRVNNYSLASRNVVKEDELDSLNEKLRIERAKKKRLFDLYISGSYEVSELDSMMNDIDAQINYYESQIEANEELKKSKKIQENLAHLATVDFDSLEFREKQLYLKSLINKIYIDGEQVTIEWL

SEQ ID NO: 1786 - protein, 469 aa, synthetic construct
MCYTTPVRAAVYLRISEDRSGEQLGVARQREDCLKLCDQRKWVPVEYLDNDVSASTGKRRPAYEQMLADITAGKIAAVVAWDLDRLHRRPIELEAFMSLADEKRLALATVAGDVDLATPQGRLVARLKGSVAAHETEHKKARQRRAARQKAERGHPNWSKAFGYLPGPNGPEPDPRTAPLVKQAYADILAGASLGDVCRQWNDAGAFTITGRPWTTTTLSKFLRKPRNAGLRAYKGARYGPVDRDAIVGKAQWSPLVDEATFWAAQAVLDAPGRAPGRKGVRRHLLTGLASCGKCGNHLAGSYRTDGRVVYVCKACHGVAILADNIEPILYHIVAERLAMPDAVDLLRREIHDAAEAEAIRLELETLYGELDRLAVERAEGLLTARQVKISTDIVSAKIAKLQARQLDQERLRVLDGIPLGTPQAAGMIAELSPDRFRAVLDVLAEVVVQPVGKSGRIFNPERVQVNWR

SEQ ID NO: 1787 - protein, 452 aa, synthetic construct
MKAAIYIRVSTQEQVGNYSIQAQTEKLTALCRSKDWDVYDIFIDGGYSGSNMNRPALNEMLSKLHEIDAVVVYRLDRLSRSQRDTTTLIEEYFLKNNVEFVSLSETLDTSSPFGRAMIGILSVFAQLERETIRDRMVMGKIKRIEAGLPLTTAKGRTFGYDVIDTKLYVNEEEAKQLRLIYDIFEEEQSITFLQKRLKKLGFKVRTYNRYNNWLTNDLYCGYVSYKDKVHVKGIHEPIISEEQFYRVQEIFARMGKNPNMNRDSASLLSNLVVCSKCGLGFVHRSKDTMSRGKKYHYRYYSCKTYKHTHELEKCGNKTWRADKLEELIINRVNNYSFASRNVDKEDELDSLSEKLETERAKKKRLFDLYINGSYEVSELDSMMNDIDAQINYYESRIEANEELKKNKKIQENLADLATVDFDGLEFREKQLYLKSLINKIYIDGEQVTIEWL

SEQ ID NO: 1788 - protein, 485 aa, synthetic construct
MTKKVAIYTRVSTTNQAEEGFSIDEQIDRLTKYAEAMGWQVSDTYTDAGFSGAKLERPAMQRLINDIENKVFDTVLVYKLDRLSRSVRDTLHLVKDVFTKNKIDFISLNESIDTSSAMGSLFLTILSAINEFERENIKERMTMGKLGRAKSGKSMMWTKTAFGYYHNCKTGILEIVPLQATIVEQIFTDYLSGISLTKLRDKLNESGHIGKDIPWSYRTLRQTLDNPVYCGYIKFKDSLFKGMHKPIIPYETYLEVQKELEERQQQTYERNNNPRPFQAKYMLSGMARCGYCGAPLKIVLGHRRKDGSRTMKYHCANRFPRKTKGVTVYNDNKKCDSGTYDLSNLENTVIDNLIGFQENNDSLLKIIIGNNQPILDTSSFEKRISQIDKKIQKNSDLYLNDFITMDELKVRTDSLQAEKKLLKAKISENRFNDSTDVFELVKAQLGSIPINELSYDNKKKIVNNLVSKVDVTADNVDIIFKFQLA

SEQ ID NO: 1789 - protein, 452 aa, synthetic construct
MKAAIYIRVSTREQVENYSIQAQTEKLTALCRSKDWDVYDIFIDGGYSGSNMNRPALNEMLSKLHEIDAVVVYRLDRLSRSQRDTITLIEEYFLKNNVEFVSLSETLDTSSPFGRAMIGILSVFAQLERETIRDRMVMGKIKRIEAGLPLTTAKGRTFGYDVIDAKLYINEEEAKQLQLIYDIFEEEQSITFLQKRLKKLGFKVHTYNRYNNWLTNDLYCGYVSYKDKVHVKGIHEPIISEEQFYRVQEIFARMGKNPNMNRDTASLLNNLVVCSKCGLSFVHRRKDIMGRGKKYHYRYYSCKTYKHIHELEKCGNKIWRADKLEELIINRVNNYSFASRNADKEDELDSLNEKLKIEHAKKKRLFDLYINGSYEVSELDSMMNDIDAQINHYESQIEANEELKKNKKIQENLAHLATVDFDSLEFREKQLYLKSLINKIYIDGEQVTIEWL

SEQ ID NO: 1790 - protein, 485 aa, synthetic construct
MTRKVAIYTRVSTTNQAEEGFSIDEQIDRLTNYAEAMGWQVSDTYTDAGFSGAKLERPAMRRLINDIENKAFDTVLVYKLDRLSRSVRDTLYLVKDVFTKNKIDFISLNESINTSSAMGSLFLTILSAINEFERENIKERMTMGKLGRAKSGKSMMWTKTAFGYYHNRKTGILEIVPLQATIVEQIFTDYLSGISLTKLRDKLNESGHIGKDIPWSYRTLRQTLDNPVYCGYIKFKDSLFEGMHKPIIPYGTYLKVQKELEERQQQTYERNNNPRPFQAKYMLSGMARCGYCGAPLRIVLGHKRKDGSRTMKYHCANRFPRKTKGVTVYNDNKKCDSGTYDLSDLENTVIDNLIGFQENNDSLLKIINGNNQPILDTSGLKKQISQIDEKIQKNSDLYLNDFITMDELKDRTDSLQAEKKLLKAKISENRFNDSTDVFELVKTQLGSIPINELSYDNKKKIVNNLVSKVDVTADNVDIIFKFQLA

SEQ ID NO: 1791 - protein, 452 aa, synthetic construct
MKAAIYIRVSTREQVENYSIQAQTEKLTALCRSKDWDVYDIFIDGGYSGSNMNRPALNEMLSKLHEIDAVVVYRLDRLSRSQRDTITLIEEYFLKNNVEFVSLSETLDTSSPFGRAMIGILSVFAQLERETIRDRMVMGKIKRIEAGLPLTTAKGRTFGYDVIDTKLYINEEEAKQLRLIYDIFEEEQSITFLQKRLKKLGFKVRTYNRYNDWLTNDLYCGYVSYKDKVHVKGIHEPIISEEQFYRVQEIFARMGKNPNMNRDSASLLNSLVVCSKCGLGFVHRRKDTTSRGKKYHYRYYSCKTYKHIHELEKCGNKIWRADKLEELIINRVNNYGFAGRNVGKEDELVSLNEKLKIEHAKKKRLFDLYTNGSHEVSELDSMMNDIDAQINYYESQIEANEELKKNKKIQENLADLATVDFDSLEFREKQLYLKNLINKIYIDGEQVTIEWL

SEQ ID NO: 1792 - protein, 485 aa, synthetic construct
MTKKVAIYTRVSTTNQAEEGFSIDEQIDRLTKYAEAMGWQVSDTYTDAGLSGAKLERPAMQRLINDIENKAFDTVLVYKLDRLSRSVRDTLYLVKDVFTKNKIDFISLNESIDTSSAMGSLFLTILSAINEFERENIKERMTMGKLGRAKSGKSMMWTKTAFGYYHNRETGILEVVPLQAAIVEQIFTDYLSGISLTKLRDKLNESGHIGKDIPWSYRTLRQTLDNPVYCGYIKFKDSLFEGMHKPIIPYETYLKVQKELEERQQQTYERNNNPRPFQAKYMLSGMARCGYCGAPLRVVLGHKRKDGSRTMKYHCANRFPRKTKGVTVYNDNEKCDSGTYDLRNLENTVIDNLIGFQENNDSLLKIINGNNQPILDTSSFKKQISQIDRKIQKNSDLYLNDFITMDELKDRTDSLRAEKKLLKAKIRENKFNASTDVFELVKTQLGSIPISELSYDNKKKIVNNLVSKVDVTADNVDIIFKFQLA

SEQ ID NO: 1793 - protein, 485 aa, synthetic construct
MTKKVAIYTRVSTTNQAEEGFSIDEQIDRLTRYAEAMGWQVSDTYTDAGFSGAKLVRPAMRRLINDIENKAFDTVLVYKLDRLSRSVRDTLYLVKDVFTKNKIDFISLNECIDTSSAMGSLFLTILSAINEFERENIKERMTMGKLGRAKSGKSMMWTKTAFGYYHNRKTGILEIVPLQATIVEQIFTDYLSGISLTKLRDKLNEGGHIGKDIPWSYRTLRQTLDNPVYCGYIKFKDSLFEGMHKPIIPYETYLKVQKELEERQQQTYERNNNPRPFQAKYMLSGMARCGYCGAPLKIVLGHERKDGSRTMKYHCANRFPRKTKGVTVYNDNKKCDSGAYDLNNLENTVIDNLIGFQENDDSLLKIINGNNQPILDTSSFRKQISQIDKKIQKNSDLYLNDFITIDELKDRTASLQAEKKLLKAKISENRFNDSTDVFELVKTQLGSIPINELSYDNKKKIVNNLVSKVDVTADSVDIIFKFQLA

SEQ ID NO: 1794 - protein, 452 aa, synthetic construct
MKAAIYIRVSTREQVENYSIQAQTEKLTALCRSKDWDVYDIFIDGGYSGSNMNRPALNEMLSKLHEIDAVVVYRLDRLSRSQRDTITLIEEYFLKNNVEFVSLSETLDTSSPFGRAMIGILSVFAQLERETIRDRMVMGKIKRIEAGLPLTTAKGRTFGYDVIDTKLYINEEEAKQLQLIYDIFEEEQSITFLQKRMKKLGFKVRTYNRYNNWLTNDLYCGYVSYKDKVHVKGIHEPIISEEQFYRVQEIFTRMGKNPNMNRESASLLNNLVVCSKCGLGFVHRRKDAMSRDKKYHYRYYSCKTYKHIHELEKCGNKIWRADKLEELVINRVNNYSLASRNVDKEDELDSLNEKLKIEHAKKKRLFDLYINGSYEMSELDSMMNDIDAQINYYESQIEANEELKKNKKIQENLAYLATVDFDSLEFREKQLYLKSLINKIYIDGEQVTIEWL

SEQ ID NO: 1795 - protein, 452 aa, synthetic construct
MKAAIYIRVSTQEQVGNYSIQAQTEKLTALCRSKDWDVYDIFVDGGYSGSNMNRPALNEMLSKLHEIDAVVVYRLDRLSRSQRDTTTLIEEYFLKNNVEFVSLSETLDTSSPFGRAMIGILSVFAQLERETIRDRMVMGKIKRIEAGLPLTTAKGRTFGYDVIDTRLYINEEEARQLQLIYDIFEEEQSITSLQKRLKKLGFKVRTYNRYNNWLTNDLYCGYVSYKDKVHVKGIHEPIISEEQFYRVQEIFTRMGKSPNMNRDSASLLSNLVVCSKCGLGFVHRSKDTMSRGKKYHYRYYSCKTYKHTHELEKCGNKTWRADKLEELIINRVNNYSFASRNVDKEDELDSLNEKLKIEHAKRKRLFDLYINGSYDVSELDSMMNDIDAQINYYESQIGANEELRKNKKIQENLADLATVDFDSLEFREKQLYLKSLINKIYIDGEHVTIEWL

SEQ ID NO: 1796 - protein, 485 aa, synthetic construct
MTKKVAIYIRVSTTNQAEEGFSIDEQIDRLTKYAEAMGWQVSDTYTDAGISGAKLERPAMQRLINDIENKAFDTVLVYKLDRLSRSVRDTLYLVKDVFTKNKIDFISLNESIDTSSAMGSLFLTILSAINEFERENIKERMTMGKLGRAKSGKSMMWTKTAFGYYHNRKTGILEIVPLQATIVEQIFTDYLSGISLTKLRDKLNESGHIGKDIPWSYRTLRQTLDNPVYCGYIKFKGSLFEGMHKPIISYETYLKVQKELEERQQQTYERNNNPRPFQAKYMLSGMARCGYCGAPLRIVLGHKRKDGSRTMKYHCTNRFPRRTKGITVYNENKKCDSGTYDLSNLENTVIDSLIGLQEDNDSLLKIINGNNQPILDTSSFEKQISQIDKKIQKNSDLYLNDFITMDELKERTDSLQAEKKLLKAKISENKFNDSTDVFELVKAQLGSIPINELSYDNKKKIVNNLVSKVDVTADNVDIIFKFQLA

SEQ ID NO: 1797 - protein, 469 aa, synthetic construct
MCYTTPVRAAVYLRISEDRSGEQLGVARQREDCLKLCDQRKWVPVEYLDNDVSASTGKRRPAYEQMLADIAAGKIAAVVAWDLDRLHRRPIELEAFMCLADEKRLALATVAGDVDLATPQGRLVARLKGSVAAHETEHKKARQRRAARQKAERGLPNWSKAFGYLPGPNGPEPDPRTAPLVKQAYADILAGASLGDVCRRWNDAGAFTITGRPWTTTTLSKFLRKPRNAGLRAYKGARYGPVDRDAIVGKAQWSPLVDEATFWAAQAVLDAPGRAPGRKSVRRHLLTGLAGCGKCGNHLAGSYRTDGRVVYVCKACHGVAILADNIEPILYHIVAERLAMPDAVDLLRREIHDAAEAETIRLELDTLYGELDRLAVERAEGLLTARQVKISTDIVNAKITKLRACQLDQERLRVFDGIPLGTPQVAGVIAELSPDRFRAVLDVLAEVVVQPVGKSGRIFNPERVQVNWR

SEQ ID NO: 1798 - protein, 469 aa, synthetic construct
MSYTTPVRAAVYLRISEDRSGEQLGVARQREDCLKLCDQRKWEPVEYLDNDVSASTGKRRPAYEQMLADISAGKIAAVVAWDLDRLHRRPIELEAFMSLADEKRLALATVAGDVDLATPQGRLVARLKGSVAAHETEHKKARQRRAARQKAERGHPNWSKAFGYLPGPNGPEPDPRTAPLVKQAYADILAGASLGDVCRQWNGAGAFTITGRPWTTTTLSKFLRKPRNAGLRAYKGARYGPVDRDAIVGKAQWSPLVDEATFWAAQAVLDAPGRAPGRKSVRRHLLTGLAGCGKCGNHLAGSYRTDGRVVYVCKACHGVAILADNIEPILYHIVAERLAMPDAVDLLRREIHDAAEAETIRLELETLYGELDRLAVERAEGLLTARQVKISTDIVNAKITKLQARQLDQERLRVLDGIPLGTPQVAGMIAELSPDRFRAVLDVLAEVVVQPVGKGGRIFNPKRVQVNWR

SEQ ID NO: 1799 - protein, 452 aa, synthetic construct
MKAAIYIRVSTREQVENYSIQAQTEKLTALCRSKDWDVYDIFVDGGYSGSNMNRPALNEMLSKLHEIDAVVVYRLDRLSRSQRDTITLIEEYFLKNNVEFVSLSETLDTSSPFGRAMIGILSVFAQLERETIRDRMVMGKIKRIEAGLPLTTAKGRTFGYDVIDTKLHINEEEARQLQLIYDIFEEEQSITSLQKRLKKLGFKVRTYNRYNNWLTNDLYCGYVSYKDKVHVKGIHEPIISEEQFYRVQEIFTRMGKNPNMNRDSASLLSNLVVCSKCGLGFVHRRKDAMSRDKRYHYRYYSCKTYKHIHELEKCGNKIWRADKLEELIINRVNNYSLAGRNVDKEDELDSLNEKLKIEHAKKKRLFDLYINGSYKVNELDSMMSDIDAQINYYESQIEASEELRRNKKIQENLANLATVDFDSLEFREKQLYLKSLINKIYIDGEQVTIEWL

SEQ ID NO: 1800 - protein, 470 aa, synthetic construct
MSYTTPVRAAVYLRISEDRSGEQLGVARQREDCLKLCGQRKWVPVEYLDNDVSASTGKRRPAYEQMLADITAGKIAAVVAWDLDRLHRRPTELEAFMSLADEKHLALATVAGDVDLATPQGRLVARLKASVAAHETEHKKARQRRAARQKAERGLPNWSKAFGYLPGPNGPEPDPRTAPLVKQAYADILAGASLGDVCRRWNDAGAFTITGRPWTTTTLSKFLRKPRNAGLREYKGARYGPVDRDAIVGKAQWSPLVDEATFWAAQTVLDAPGRAPGRKSVRRHLLTGLAGCGRCGNHLAGSYRTDGRVVYVCKACHGVAILADNIEPVLYHIVAERLAMPDAVGLLRREIHDAAEAETIRLELETLYGELDRLAVERAEGLLTARQVKISTDIVNAKITKLQARPLDQERLRVLDGIPLGTPQVAGAIAELSPDRFRAVLDVLAEVVVQPVGKSGRIFNPERVQVNWRQ

SEQ ID NO: 1801 - protein, 469 aa, synthetic construct
MHYTTPVRAAVYLRISEDRSGEQLGVARQREDCLKLCDQRKWVPVEYLDNDVSASTGKRRPAYEQMLADITAGKIAAVVAWDLDRLHRRPIELEAFMSLADEKRLALATVAGDVDLATPQGRLVARLKGSVAAHETEHKKARQRRAARQKAERGHPNWSKAFGYLPGPNGPEPDPRTAPLVKQAYADILAGASLGDVCRRWNDAGAFTITGRPWTTTTLSKFLRKPRNAGLRAYKGARYGPVDRDAIVGKAQWSPLVDEATFWAAQAVLDAPGRAPGRKSVRRHLLTGLAGCGKCGSHLAGSYRTDGRVVYVCKACHGVAILADNIEPILYHIVAERLAMPDAVDLLRREIHDAAEAETIRLELEALYGVLDRLAVERAEGLLTARQVKISTDIVNAKIIKLQARQLDQERLRVFDGIPLGTPQVAGMIAELSPDRFRAVLDVLADVVVQPVGKSGRIFNPERVQVNWR

SEQ ID NO: 1802 - protein, 469 aa, synthetic construct
MSYTTPVRAAVYLRISEDRSGEQLGVARQREDCLKLCDQRKWVPVEYLDNDVSASTGKRRPAYEQMLADITAGKIAAVVAWDLDRLHRRPIELEAFMSLADEKRLALATVAGDVDLATPQGRLVARLKGSVAAHETEHKKARQRRAARQKAERGHPNWSKAFGYLPGPNGPEPDPRTAPLVMQAYADILAGASLGDVCRQWNNAGAFTITGRPWATTTLSKFLRKPRNAGLRAYKGARYGPVDRDAIVGKAQWSPLVDEATFWAAQAVLDAPGRAPGRKSVRRHLLTGLAGCGKCGNHLAGSYRTDGRVVYVCKACHGVAILADNIEPILYHIVAERLAMPDAVDLLHREIHDAAEAETIRLELETLYGELDRLAVERAEGLLTARQVKISTDIVNAKITKLQARQLDQERLRVLDGIPLGTPQVAGMIAELSPDRFRAVLDVLAEVVVQPVGKSGRIFNPERVQVNWR

SEQ ID NO: 1803 - protein, 485 aa, synthetic construct
MTKKVAIYTRVSTTNQAEEGFSIDEQIDRLTKYAEAMGWQVSDTYTDAGSSGAKLERPAMQRLINDIGSKAFDTVLVYKLDRLSRSVRDTLYLVKDVFTKNKIDFISLNESIDTSSAMGSLFLTILSAINEFERENIKERMTMGKLGRARSGKSMMWTKTAFGYYHNRKTGILEIVPLQATIVEQIFTDYLSGISLTKLRDRLNESGHIGKDIPWSYRTLRQTLDNPVYCGYIKFKDSLFEGMHKPIIPYETYLKVQKELEERQQQTYERNNNPRPFQAKYMLSGMARCGYCGAPLRIVLGRKRKDGSRTMKYHCANRFPRRTKGVTVYNDNKKCDSGTYDLSSLEDTVIDSLIGLQENNDSLRKIINGNNQPILDTSSFKKQISQIDKKIQKNSDLYLNDFITMDELKERTNSLQAEKKLLIAKISENKFNDSADVFELVKTQLGSIPINELSYDNKKKIVNNLVSKVDVTADNVDIIFKFQLA

SEQ ID NO: 1804 - protein, 469 aa, synthetic construct
MSYTTPVRAAVYLRISEDRSGEQLGVARQREDCLKLCGQRKWVPVEYLDNDVSASTGKRRPAYEQMLADITAGKIAAVVAWDLDRLHRRPTELEAFMSLADEKRLALATVAGDVDLATPQGRLVARLKASVAAHETEHKKARQRRAARQKAERGYPNWSKAFGYLPGPNGPEPDPRTAPLVKQAYADILAGASLGDVCRQWNGAGAFTITGRPWTTTALSKFLRKPRNAGLRAYKGARYGPVDRDAIVGKAQWSPLVDEATFWAAQAVLDAPGRAPGRKSVRRHLLTGLAGCGKCGSHLAGSYRTDGRVVYVCKACHGVSILADNIVPILYHIVAERLAMPDVVDLLCRESHDAAGAETIRLELETLYGELDRLAVERAEGLLTARQVKISTDIVNAKITKLQARQLDQERLRVFDGIPLGTPQVAGVIAELSPDRFRAVLDVLAEVVVQPVGKSGRIFNPERVQVNWR

SEQ ID NO: 1805 - protein, 452 aa, synthetic construct
MKAAIYIRVSTQEQVGNYSIQAQTEKLTALCRSKDWDVYDIFIDGGYSGSNMNRPALNEMLSKLHEIDAVVVYRLDRLSRSQRDTTTLIEEYFLKNNVEFVSLSETLDTSSPFGRAMIGILSVFAQLERETIRDRMVMGKIKRIEAGLPLTTAKGRTFGYDVIDTKLYINEEEAKQLQLIYDIFEEEQSITFLQKRLKKLGFKVRTYNRYNSWLTNDLYCGYVSYKDKVHVKGIHEPIISEEQFYRVQEIFTRMGKNPNMNRDSASLLNGLVVCSKCGLSFVHRSKDTMSRGKKYHYRYYSCKTYKHTHELEKCGNKTWRADKLEELIINRVNNYSFASRNADKEDELDSLNEKLKIEHARKKRLFDLYINGSYEVSELESMMNDIDAQINYYESQIEANEELRKNRKIQENLADLATVDFDGLEFRDKQLYLKSLINKIYIDGEQVTIEWL

SEQ ID NO: 1806 - protein, 485 aa, synthetic construct
MTKKVAIYTRVSTTNQAEEGFSIDEQIDRLTKYAEAMGWQVSDTYTDAGCSGAKLERPAMQRLINDIGNKAFDTVLVYKLDRLSRSVRDTLYLVKDVFTKNKIDFISLNESIDTGSAMGSLFLTILSAINEFERENIKERMTMGKLGRAKSGKSMMWTKTAFGYYHNRETGILEIVPLQATIVEQIFTDYLSGISLTKLRDKLNESGHIGKDIPWSYRTLRQTLDNPVYCGYIKFKDSLFEGMHKPIIPYETYLKVQKELEERQQQTYERNNNPRPFQAKYMLSGMARCGYCGAPLRIVLGHKRKDGSRTMKYHCTNRFPRKTKGITVYNDNKKCDSGTYDLSNLENTVIDNLIGFQENNDSLLKIINGNNQPILDVGSLKKQISQIDEKIRKNSDLYLNDFITMDELKDRTDSLQAEKELLKAKISENKFNDRTDVFELAKTQLGSIPINELSYDNKKKIVNNLVSKVDVTADNVDIIFKFQLA

SEQ ID NO: 1807 - protein, 485 aa, synthetic construct
MTKKVAIYTRVSTTNQAEEGFSIDEQIDRLTKYAEAMGWQVSDTYTDAGFSGAKLERPAMQRLINDIENKAFDTVLVYKLDRLSRSVRDTLYLVKEVFTKNKIDFISLNESIDTSSAMGSLFLTILSAINEFERENIKERMTMGKLGRAKSGKSMMWTKTAFGYYHNRKTGILEIVPLQATIVEQIFTDYLSGISLTKLRDKLNESGHIGKDIPWSYRTLRQTLDNPVYCGYIKFKDSLFEGMHKPIIPYGTYLRVQKELEERQQQTYERNNNPRPFQAKYMLSGMARCGYCGAPLKIVLGHKRKDGSRTMKYHCANRFPRKTKGVTVYNDNKKCDSGTYDLSDLENAVIDNLIGLQENNDSLLRIVNGNNQPILDTSSLKKQISQIDKKIQKNSDLYLNDFITMDELRDRTDSLQAEKKLLEAEISENKFNDSTDVFELVKTQLGSIPINELSYDNKKKIVNNLVSKVDVTADNVDIIFKFQLA

SEQ ID NO: 1808 - protein, 452 aa, synthetic construct
MKAAIYIRVSTREQVENYSIQAQTEKLTALCRSKDWDVYDIFIDGGYSGSNMNRPALNEMLSKLHEIDAVVVYRLDRLSRSQRDTITLIEEYFLKNNVEFVSLSETLDTSSPFGRAMIGILSVFAQLERETIRDRMVMGKIKRIEAGLPLTTAKGRTFGYDVIDTKLYINEEEAKQLQLIYDIFEEEQSITFLQKRLKKLGFKVHTYSRYNNWLTNDLYCGYVSYKDKVHVKGIHEPIISEEQFCRVQEIFTRMGKNPNMNRDSASLLNNLVVCSKCGLGFVHRRKDTMSRGKKYHYRYYSCKTYKHTYELEKCGNKIWRADKLEELIINRVDNYSFTSRSEDKEDALDSLNEKLKIEHAKRKRLFDLYINGSYEVSELDSMMNVIDAQINYYEGQVEANEELKKNKKIQENLADLATVDFDSLEFREKQLYLKSLINKIYIDGEQVTIEWL

SEQ ID NO: 1809 - protein, 452 aa, synthetic construct
MKAAIYIRVSTREQVENYSVQAQTEKLTALCRSKDWDVYDVFIDGGYSGSNMNRPALNEMLSKLHEIDAVVVYRLDRLSRSQRDTITLIEEYFLKNNVEFVSLSETLDTSSPFGRAMIGILSVFAQLERETIRDRMVMGKIKRIEAGLPLTTAKGRTFGYDVIDTKLYINEEEAKQLQLIYDIFEEEQSITLLQKRLKKLGFKVRTYNRYNNWLTNDLYCGYVSYKDRVHVKGIHEPIISEEQFYRVQEIFTRMGKSPNMNRDNASLLSSLVVCSKCGLGFVHRRKDAASRDKKYHYRYYSCKTYKHIHELEKCGNKIWRADELEELIINRVSNYSLAGRNVDKEAELDSLNEKLKTEHAKKRRLFDLYINGSYEVSELDSMMNDIDAQISYYEGQIKANEELKKNKKIQETLAYLATVDFDSLEFREKQRYLKSLINKIYIDGEQVTIEWL

SEQ ID NO: 1810 - protein, 485 aa, synthetic construct
MTRKVAIYTRVSTTNQAEEGFSIDEQIDRLTKYAEAMGWQVSDTYTDPGFSGAKLKRPAMQRLINDIENKAFDTVLVYKLDRLSRSVRDTLYLVKDVFTKNKIDFISLNESIDTSSAMGSLFLTILSAINEFERENIKERMTMGKLGRAKSGKSMMWTKTAFGYYHNRKTGILEIVPLQATIVEQIFTDYLSGISLTKLRDKLNESGHIGKDIPWSYRTLRQTLDNPVYCGYIKFKDSLFEGMHKPIIPYETYLKVQKELEERQQQAYERNNNPRPFQAKYMLSGMARCGYCGAPLRIVLGHKRKDGSRTMKYHCANRFPRKTKGVTVYNDNKKCDSGTYDLSNLENTVIDNLIGFQENNDSLLKVINGNNQPIPDISSFKKQISQIDKKIQKNSDLYLNDFITMDELKDRTDSLQAEKKLLKAKISENKFNDSTDVFELVKTQLGSIPINELSYDDKKKIVNNLVSKVDVTADNVDIIFKFQLA

SEQ ID NO: 1811 - protein, 452 aa, synthetic construct
MKAAIYIRVSTREQVENYSIQAQTEKLTALCRSKDWDVYDIFIDGGYSGSNMNRPALNEMLSKLHEIDAVVVYRLDRLSRSQRDTITLIEEYFLKNNVEFVSLSETLDTSSPFGRAMIGILSVFAQLERETIRDRMVMGKIKRVEAGLPLTTAKGRTFGYDVIDTKLYINEEEAKQLQLIYDIFEEERSITFLQKRLKKLGFKVHTYNRYNNWLTNDLYCGYVSYKDKVHVKGIHEPIISEEQFYRVQEIFTRMGKNPNMNRDSASLLNNLVVCSKCGLGFVHRRKDAMSRDKKYHYRYYSCKTYKHIHELEKCGNKIWRADELEELVINRVSSYSVASRNVDKEDELGSLNEKLKIEHAKKKRLFDLYINGSYEVSELDSMMNDIDAQINYYESQIEANEELKKNKKIQENLAYLATVDFDSLEFREKQLYLKSLINKIYIDGEQVTIEWL

SEQ ID NO: 1812 - protein, 485 aa, synthetic construct
MTKKVAIYTRVSTTNQAEEGFSIDEQIDRLTKYAEAMGWQVSDTYTDAGFSGAKLERPAMQRLINDIENRAFDTVLVYKLDRLSRSVRDTLYLVKDVFTKNKIDFISLNESIDTSSAMGSLFLTILSAINEFERENIKERMTMGKLGRAKSGKSMMWTKTAFGYYHNRKTGILEIAPLQATIVEQIFTDYLSGISLTKLRDKLNKSGHIGKDIPWSYRTLRQTLDNPVYCGYIKFKDSLFEGMHKPIIPYETYLKVQKELEERQQQTYERNNNPRPFQAKYMLSGMARCGYCGAPLRIVLGHKRKDGSRTMKYHCANRFPRKTRGVTVYNDNKKCDSGTYDLRNLENTVIDNLIGLQENDDCLLKIINGNNQPTLDTSSFEEQISQIDKEIQKNSDLYLNGFITMDELKDRTDSLQAEKKLLKAKISENKFNDSTDVFELVRTQLGSIPINKLSYDNKKKIVNNLVSKVDVTADNVDIIFKFQLA

SEQ ID NO: 1813 - protein, 485 aa, synthetic construct
MTKKVAIYTRVSTTNQAEDGFSIDEQIDRLTKYAEAMGWQVSDTYTDAGFSGAKLERPAMQRLINDIENKAFDTVLVYKLDRLSRSVRDTLYLVKDVFTKNKIDFISLNESINTSSAMGSLFLTILSAINEFERENIKERMTMGKLGRAKSGKSMMWTKTAFGYYHNRKTGILEVVPLQATIVEQIFTDYLSGISLTKLRDKLNESGHIGKDIPWSYRTLRQTLDNPVYCGYIKFKDSLFEGMHKPIIPYETYLKVQKELEERQQQTYERNNNPRPFQAKYMLSGMARCGYCGAPLRIVLGHKRKDGSRTMKYHCANRFPRKTKGITVYNDNKRCDSGTYDLSDLENTVIDNLIGFQENNDSLLKIINGNNQPILDTSSFKKQISQIDKKIQKNSDLYLNDFITMDELKDRTDSLQAEKKLLEAKISENKLNDSTGVFELVKTQLGSIPINELSYDNKKKIVNNLVSKVDVTADNVDIIFKFQLA

SEQ ID NO: 1814 - protein, 452 aa, synthetic construct
MKAAIYIRVSTREQVENYSIQAQTEKLTALCRSKDWDVYDIFIDGGYSGSNMNRPALNEMLSKLHEIDAVVVYRLDRLSRSQRDTITLIEEYFLKNNVEFVSLSETLDTSSPFGRAMIGILSVFAQLERETIRDRMVMGKIKRIEAGLPLTTAKGRTFGYDVIDTKLYINEEEAKQLQLIYDIFEEEQSITFLQKRLKKLGFKVRTYNRYNNWLTNDLYCGYVSYKDKVHVKGIHEPIISEEQFYRVQEIFTRMGKNPNMNRDSASLLNNLVVCSKCGLGFVHRRKDAMSRDKKYHYRYYSCKTYKHIHELEKCGNKIWRADKLEELIVDRVNNYSLVNRNADKEDELDSLNEKLKIEHAKKKRLFDLYINGSYEVSELDSMMNDIDAQINYYESQIEANEGLKKDKKIQEILANLATVDFGSLEFREKQLYLKSLINKIYIDGEQVTIEWL

SEQ ID NO: 1815 - protein, 485 aa, synthetic construct
MTKKVAIYTRVSTTNQAEEGFSIDEQIDRLAKYAEAMGWQVSDTYTDAGFSGAKLERPAMQRLINDVGSKAFDTVLVYKLDRLSRSVRDTLYLVKDVFTKNKIDFISLNESINTSSAMGSLFLTILSAINEFERENIKERMTMGKLGRAKSGKSMMWTKTAFGYYHNRKTGILEIVPLQATIVEQIFTDYLSGISLTKLRDKLNESGHIGKDIPWSYRTLRQTLDNPVYCGYIKFKGSLFEGMHKPIIPYETYLKVQKELEERQQQTYERNNNPRPFQAKYMLSGMARCGYCGAPLRIVLGHKRKDGSRTMKYHCANRFPRKTKGVTVYNDNKKCDSGTYDLSNLENTVIDNLIGFQENNDSLLKIINGNNQPILDTSSFKEQISQIDKKIQKNSDLYLNDFITMDELKDRTGSLQAEKKLLKAKISENKFNDSTDVFELVRTQLGSIPINELSYDNKKKIVNNLVSKVDVTADNVGIIFKFQLA

SEQ ID NO: 1816 - protein, 452 aa, synthetic construct
MKAAIYIRVSTQEQVGNYSIQAQTEKLTALCRSKDWDVYDIFIDGGYSGSNMNRPALNEMLSKLHEIDAVVVYRLDRLSRSQRDTTTLIEEYFLKNNVEFVSLSETLDTSSPFGRAMIGILSVFAQLERETIRDRMVMGKIKRIEAGLPLTTAKGRTFGYDVIDTKLYINEEEAKQLQLIYDIFEEEQSITLLQKRLKKLGFKVRTYNRYNNWLTNDLYCGYVSYKDKVHVKGIHEPIISEEQFYRVQEIFARMGKNPNMNRDNASLLSNLVVCSKCGLGFVHRSKDTMSRGKKYHYRYYSCKTYKHTHELEKCGNKTWRADKLEELIINRVNSYSFASRDVDRVDELDNLNEKLKIEHARKKRLFDLYTNGSYEASELDSMMNDIDAQINYYESQIEASEELKKNKKIQENLADLATVDFDSLEFREKQLYLKSLINKIYIDGEQVTIEWL

SEQ ID NO: 1817 - protein, 485 aa, synthetic construct
MTKKVAIYTRVSTTNQAEEGFSIDEQIDRLTKYAEAMGWQVSDTYTDAGISGAKLERPAMQRLINDIENKAFDTVLVYKLDRLSRSVRDTLYLVKDVFTKNKIDFISLNESIDTSSAMGSLFLTILSAVNEFERENIKERMTMGKLGRAKSGKSMMWTKTAFGYYHNRETGILEIVPLQATIVEQIFTDYLSGISLTKLRDKLNESGHIGKDIPWSYRTLRQILDNPVYCGYIKFKGSLFEGMHKPIVPYETYLKVQKELEERQQQAYERNNNPRPFQAKYMLSGVARCGYCGAPLRIVLGRKRKDGSRTMKYHCANRFPRKTKGVTVYNDNKRCDSGTYDLSNLENTVIDNLIGFQENHDSLLKVINGNNQPILDTSSLKKQISQIDKKIQKNSDLYLNDFITMDELKDRTDSLQAEKKLLKAKISENKFDNSTDVFELVKTQLGSIPINELSYDNKKKTVNNLVSKVDVTADNVDIIFKFQLA

SEQ ID NO: 1818 - protein, 452 aa, synthetic construct
MKAAIYIRVSTREQVENYSIQAQTEKLTALCRSKDWDVYDIFVDGGYSGSNMNRPALNEMLSKLHEIDAVVVYRLDRLSRSQRDTITLIEEYFLKNNVEFVSLSETLDTSSPFGRAMTGILSVFAQLERETIRDRMVMGKIKRIEAGLPLTTAKGRTFGYDVIDTKLYINEEEAKQLQLIYDIFEEEQSITFLQKRLKKLGFKVHTYSRYNNWLTNDLYCGYVSYKDKVHVKGIHEPIISEEQFYRVQEIFARMGKNPNMNRDSASLLNNLVVCSKCGLGFVHRRKDTMSRGKKYRYRYYSCKTYKHTHELEKCGNKIWRADKLEELVINRVNNYSLAGRVADKEDELHSLNEKLKIEHAKRKRLFELYTNGSYEVSELDSMMSDIEAQINYYESQIEANEELKKSKKIQENLANLATVDYDSLEFREKQLYLRSLINKIYIDGEQVTIEWL

SEQ ID NO: 1819 - protein, 485 aa, synthetic construct
MTRKVAIYTRVSTTNQAEEGFSIDEQIDRLTKYAEAMGWQVSDTYTDAGFSGAKLERPAMQRLINDIENKAFDTVLVYKLDRLSRSVRDTLYLVKDVFTKNKIDFISLNESIDTSSAMGSLFLTILSAVNEFERENIKERMTMGKLGRARSGKSMMWTKTAFGYYHNRKTGILEIVPLQATIVEQIFTDYLSGISLTKLRDKLNEGGHIGKDIPWSYRTLRQTLDNPVYCGYIKFKDSLFEGMHKPIIPYETYLKVQKELEERQQQTYERNNNPRPFQAKYMLSGMARCGYCGAPLRIVLGHKRKDGSRTMKYHCANRFPRKTKGVTVYNDNKKCDSGTYDLSNLENTVIDNLIGFQENNDSLLKIINGNNQPILDTSSFERQISQIDKKIQKNSDLYLNDFITMDELKDRTDSLQAEKKLLKAKISENRFNDSTDVFELVKTQLGSIPINELSYDNKKKIVNNLVSKVDVTADNVDIIFKFQLA

SEQ ID NO: 1820 - protein, 452 aa, synthetic construct
MKAAIYIRVSTREQVENYSIQAQTEKLTALCRSKDWDVYDIFIDGGYSGSNMNRPALNEMLSKLHEIDAVVVYRLDRLSRSQRDTITLIEEYFLKNNVEFVSLSETLDTSSPFGRAMIGILSVFAQLERETIRDRMVMGKIKRIEAGLPLTTAKGRTFGYDVIDTKLYINEEEAKQLQLIYDIFEEEQSITFLQKRLKKLGFKVRTYNRYNNWLTNDLYCGYVSYKDKVHVKGIHEPIISEEQFYRVQEIFTRMGKNPNMNRDSASLLNNLVVCSKCGLSFVHRRKDTMSRGKKYHYRYYSCKTYKHIHELEKCGNKIWRADKLEELVINRVNNYSIASRNVDKEDELDSLNEKLKIEHAKKKRLFDLYINGSYEVSELDSMMNDIDAQINYYESQIEANGELKKNKKIRENLAGLATVDFDSLEFREKQLYLKSLINKIYIDGEQVTIEWQ

SEQ ID NO: 1821 - protein, 452 aa, synthetic construct
MKAAIYIRVSTREQVENYSIQAQTEKLTALCRSKDWDVYDIFIDGGYSGSNMNRPALNEMLSKLHEIDAVVVYRLDRLSRSQRDTITLIEEYFLKNDVEFVSLSETLDTSSPFGRAMIGILSVFAQLERETIRDRMVMGKIKRIEAGLPLTTAKGRTFGYDVVDTKLYINEEEAKQLQLIYDIFEEEQSITFLQKRLKKLGFKVRTYNRYNNWLTNDLYCGYVSYKDKVHVKGIHEPIISEEQFYRVQEIFARMGKNPNMNRDSASLLSNLVVCSKCGLGFVHRRKDAMSRDKKYHYRYYSCKTYKHIHELEKCGNKIWRADKLEELIISRVNNYSLAGRNVDKKDELDSLNEKLKIEHAKKKRLFDLYINGSYGVSELDSMMNDIDAQINYYESQIEANEELKKDKKIQENLAYLATVDFDSLEFREKQLYLKSLINKIYIDGEQVTIEWL

SEQ ID NO: 1822 - protein, 452 aa, synthetic construct
MKAAIYIRVSTREQVENYSIQAQTEKLTALCRSKDWDVYDIFIDGGYSGSNMNRPALNEMLSKLHEIDAVVVYRLDRLSRSQRDTITLIEEYFLKNNVEFVSLSETLDTSSPFGRAMIGILSVFAQLERETIRDRMVMGKIKRIEAGLPLTTAKGRTFGYDVIDTKLYINEEEAKQLQLIYDIFEEEQSITFLQKRLKKLGFKVHSYNRYNNWLTNDLYCGYVSYKDKVHVKGIHEPIISEEQFCRVQEIFTRMGKNPNMNRDSASLLNNLVVCGKCGLGFVHRRKDATSRSKKYHYRYYSCKTYKHIHELEKCGNKIWRADKLEELVISRVNNYSLASRNVDKEDELDSLNEKLKIEHAKKKRLFDLYINGSYEVSELDSMMNDIDAQINYYESQIEANEGLRRNKKIQENLAHLATVDFDSLEFREKQLYLRSLINKIYIDGEQVTIEWL

SEQ ID NO: 1823 - protein, 469 aa, synthetic construct
MSYTTPVRAAVYLRISEDRSGEQLGVARQREDCLKLCDQRKWVPVEYLDNDVSASTGKRRPAYEQMLADITAGKIAAVVAWDLDRLHRRPIELEAFMSLADEKRLALATVAGDVDLATPQGRLVARLKGCVAAHETEHKKARQRRAARQKAERGLPNWSKAFGYLPGPSGPEPDPRTAPLVEQAYADILAGASLGDVCRQWNDAGAFTITGRPWITTTLSKFLRKPRNAGLRAYKGARYGPVDRDAIVGKAQWSPLVDEATFWAAQAVLDAPGRAPGRKSVRRHLLTGLAGCGKCGNHLAGSYRTDGQVVYVCKACYGVAILADNIVPILYHVVAERLAMPDAVDLLRHEIHDAAEAEAIRLELETLYGELDRLAVERAEGLLTARQVKISTDIVNAKITKLQARQLDQERLRVFNGIPLGTPQVAGVIAELSPDRFRAVLDVLAEVVVQPVGKGGRIFSPERVQVNWR

SEQ ID NO: 1824 - protein, 452 aa, synthetic construct
MKAAIYIRVSTREQVENYSIQAQTEKLTALCRSKDWDVYDIFIDGGYSGSNMNRPALNEMLSKLHEIDAVVVYRLDRLSRSQRDTITLIEEYFLKNNVEFVSLSETLDTSSPFGRAMIGILSVFAQLERETIRDRMVMGKIKRIEAGLPLTTAKGRTFGYDVIDTKLYINGEEAKQLRLIYDIFEEEQSITSLQKRLKKLGFKVHTYNRYNNWLTNDLYCGYVSYKDKVHVKGIHEPIISEEQFYRVQEIFTRMGKNPNMNRDSASLLNNLVVCSKCGLGFVHRRKDAMSRDKKYHYRYYSCKTYKHIHELEKCGNKIWRADKLEELIINRVNSYSLVSRNVDKEDELDSLNEKLKIEHAKKKRLFDLYINGGYEMSELDSVMNDIDAQINYYESQIEANEELKKNKKIQENLADLATVDFDSLEFREKQLYLKSLINKIYIDGEQVTIEWK

SEQ ID NO: 1825 - protein, 485 aa, synthetic construct
MTKKVAIYTRVSTTNQAEEGFSIDEQVDRLTKYAEAMGWQVSDTYTDAGFSGAKLERPAMQRLINDIENKAFDTVLVYKLDRLSRSVRDTLYLVKDVFAKNKIDFISLNESIDTSSAMGSLFLTILSAINEFERENIKERMTMGKLGRAKSGKSMMWTKTAFGYNHNRKTGILEIVPLQATIVEQIFTDYLSGISLTKLRDKLNESGHIGKDIPWSYRTLRQTLDNPVYCGYIKFKDSLFEGMHKPIIPYETYLKVQKELEERQQQTYERNNNPRPFQAKYMLSGMARCGYCGAPLKIVLGHKRKDGSRTMKYHCANRFPRKTRGITVYNDNKKCDSGTYDLSNLENTVIDNLIGFQENNDSLLEIINGNNQPILDTSSFEKQISQIDKKIQKNSDLYLNDFITMDELKDRTDSLQAEKKLLKAKISENKFNDGADVFELVKTQLGSIPINELSYENKKKIVNNLVSKVDVTADNVDIIFKFQLA

SEQ ID NO: 1826 - protein, 485 aa, synthetic construct
MTKKVAIYTRVSTTNQAEEGFSIDEQVDRLTKYAEAMDWQVSDTYTDAGFSGAKLERPAMQRLINDIENKAFDTVLVYKLDRLSRSVRDTLYLVKEVFTKNRIDFISLNESIDTSSAMGSLFLTILSAINEFERENIKERMTMGKLGRAKSGKSMMWTKTAFGYYHNRKTGILEIVPLQATIVEQIFTDYLSGISLTKLRDKLNESGHIGKDIPWSYRTLRQTLDNPVYCGYIKFKDSLFEGMHKPIIPYETYLKVQKELEERQQQAYEHNNNPRPFQAKYMLSGMARCGYCGAPLRIVLGHKRKDGSRTMKYHCANRFSRKTKGVTVYNDNKKCDSGTYDLSDLENTVIDNLVGLQENSDSLLKIINGNNQPILDTSSFKEQISQIDEKIQKNSDLYLNDFITMDELKNRTDSLQAEKKLLKAKISENKFNDSTDVFELVKTQLGSIPINELSYDNKKKIVNNLVSKVDVTADNVDIIFKFQLA

SEQ ID NO: 1827 - protein, 469 aa, synthetic construct
MSYTTPVRAAVYLRISEDRSGEQLGVARQREDCLKLCGQRKWVPVEYLDNDVSASTGKRRPAYEQMLADITAGKIAAVVAWDLDRLHRRPIELEAFMSLADEKRLALATVAGDVDLATPQGRLVARLKGSVAAHETEHKKARQRRAARQKAERGYPNWSKAFGYLPGPNGPEPDPRTAPLVKQAYADILAGASLGDVCRQWNAAGAFTITGRPWTTTALSKFLRKPRNAGLRAYKGARYGPVDRDAIVGKAQWSPLVDEATFWAAQAVLDAPGRAPGRKSVRRHLLTGLAGCGKCGNRLAGSYRTDGRVVYVCKACHGVAILAENIEPILYHTVAGRLAMPDAVDLLRCEIHDAAEAETIRLELETLYGELDRLAVERAEGLLTARQVKISTDVVNAKITELQARQLDQERLRVFDGIPLGTPQVAGAIAELSPDRFRAVLDVLAKVVVQPVGKSGRIFNPERVQVNWR

SEQ ID NO: 1828 - protein, 452 aa, synthetic construct
MKAAIYIRVSTQEQVGNYSIQAQTEKLTALCRSKDWDVYDIFIDGGYSGSNMNRPALNEMLSKLHEIDAVVVYRLDRLSRSQRDTTTLIEEYFLKNNVEFVSLSETLDTSSPFGRAMIGILSVFAQLERETIRDRMVMGKIKRIEAGLPLTTAKGRTFGYDVIDTRLYINEEEAKQLQLIYDIFEEEQSITSLQKRLKKLGFKVRTYNRYNSWLTNDLYCGYVSYKDEVHVKGIHEPIISEEQFYRVQEIFTRMGKNPNMNRDSASLLSNLVVCSKCGLGFVHRSKDTMSRGKKYHYRYYSCKTYKHTHELEKCGNKTWRADKLEELIISRVNNYSFAGRNADKEDELDSLNEKLKTEHAKKKRLFDLYINGSYEVCELDSMMNDIDAQINYYESQIEANEELKKNKKIQENLADLATVDFDSLEFREKRLYLKSLINKIYIDGEQVTIEWL

SEQ ID NO: 1829 - protein, 452 aa, synthetic construct
MKAAIYIRVSTREQVENYSIQAQTEKLTALCRSKDWDVYDIFIDGGYSGSNMNRPALNEMLSKLHEIDAVVVYRLDRLSRSQRDTITLIEEYFLKNNVEFVSLNETLDTSSPFGRAMIGILSVFAQLERETIRDRMVMGKIKRIEAGLPLTTAKGRTFGYDVIDTKLYINEEEAKQLQLIYDIFEEEQSITFLQKRLKKLGFKVHTYNRYNNWLTNDLYCGYVSYKDKVHVKGIHEPIISEEQFYRVQEIFTRMGKNPNMNRDSASLLNNLVVCSKCGLGFVHRRKDAMGRDKKYHYRYYSCKTYKHIHELEKCGNKIWRADKLEELVINRVNNYSIASRNVDKEDELGSLNEKLRIEHAKKKRLFDLYISGSYEVSELDSMMSDIDAQINYYESRIEANEELRRNKKIQENLAHLATVDFDSLEFREKQLYLKSLINKIYIDGEQVTIEWL

SEQ ID NO: 1830 - protein, 485 aa, synthetic construct
MTKKVAIYTRVSTTNQAEEGFSIDEQIDRLTKYAEAMGWQVSDTYTDAGFSGAKLERPAMQRLINDIENKAFGTVLVYKLDRLSRSVRDTLYLVKDVFTKNKIDFISLNESIDTSSAMGSLFLTILSAINEFERENIKERMTMGKLGRAKSGKSMMWTKTAFGYYHNRKTGILEIVPLQATIVKQIFTDYLSGISLTKLRDKLNESGHIGKDIPWSYRTLRQTLDNPVYCGYIKFKDSLFEGMHKPIIPYETYLKVQKELEERQQQTYERNNNPRPFQAKYMLSGMARCGYCGAPLRIVLGHKRKDGSRTMKYHCANRFPRKTKGVTVYNDNKKCNSGTYDLSNLENTVIDNLIGFQENSDSLLKIINGNNQPIQDTSSFKEQISQIDKKIQKNSELYLNDFITMDELKNRTDSLQAEKKLLKAKISENKFSDSTDVFELVKTQLGSIPISELSYDNKKKIVNNLVSKVDVTADNVDIIFKFQLA

SEQ ID NO: 1831 - protein, 485 aa, synthetic construct
MTKKVAIYTRVSTTNQAEEGFSIDEQIDRLTKYAEAMGWQVSDTYTDAGFSGAKLERPAMQRLINDIESKAFDTVLVYKLDRLSRSVRDTLHLVKEVFTKNKIDFISLNESIDTSSAMGSLFLTILSAINEFERENIKERMTMGKLGRAKSGKSMMWTKTAFGYYHNRKTGILEVVPLQATIVEQIFTDYLSGISLTKLRDKLNESGHIGKDIPWSYRTLRQTLDNPVYCGYIKFKGSLFEGMHKPIIPYETYLKVQKELEERQQQTYERNNNPRPFQAKYMLSGMARCGYCGAPLKIVLGHKRKDGSRTMKYHCANRFPRKTRGVTVYNDNKKCDSGAYDLSNLENTVIDNLIGFQENDDSLLKIINGNNQPILDTSSFKKQISLIDKKIQKNSDLYLNDFITMDELKDRTDSLQAEKKLLKAKISENRFNDSTDVFELVKTQLGSIPINELSYDNKKKIVNNLVSKVDVTADNVDIIFKFQLA

SEQ ID NO: 1832 - protein, 469 aa, synthetic construct
MCYTTPVRAAVYLRISEDRSGEQLGVARQREDCLKLCDQRKWVPVEYLDNDVSASTGKRRPAYEQMLADITAGKIAAVVAWDLDRLHRRPIELEAFMSLADEKRLALATVAGDVDLATPQGRLVARLKGSVAAHETEHKKARQRRAARQKAERGHPNWSKAFGYLPGPNGPEPDPRTAPLVKQAYADILAGASLGDVCRQWNDAGALTITGRPWTTTTLSKFLRKPRNAGLRAYKGARYGPVDRDAIVGKAQWSPLVDEATFWAAQAVLDAPGRAPGRKSVRRHLLTGLAGCGKCGNHLAGSYRTDGKVVYVCKACHGVAILADNIEPILYHIVAERLAMPDAVDLLRREIHDAAEAETIRLELETLCGELDRLAVERAEGLLTSRQVKISTDIVNAKITELRARQLDQERLRVFDGIPLGTPRVAGTIAELSPDRFRVVLDVLAEVVVQPVGKSGRVFNPERVQVNWR

SEQ ID NO: 1833 - protein, 452 aa, synthetic construct
MKAAIYIRVSTQEQVGNYSIQAQTEKLTALCRSKDWDVYDIFIDGGYSGSNMNRPALNEMLSKLHEIDAVVVYRLDRLSRSQRDTTTLIEEYFLKNNVEFVSLSETLDTSSPFGRAMIGILSVFAQLERETIRDRMVMGKIKRIEAGLPLTTAKGRTFGYDVIDTKLYINEEEAKQLQLIYDIFEEEQSITFLQKRLKKLGFKVRTYNRYNSWLTNDLYCGYVSYKDKVHVKGIHEPIISEEQFYRVQEIFTRMGKNPNMNRDSASLLSNLVVCSKCGLGFVHRSKDTMSRGKKYHYRYYSCKTYKHTHELEKCGNKTWRADKLEELIISRVNNYSFAGRSVDKEDELDSLNEKLKIEHAKKKRLFDLYINGSYEVSELDSMMNDIDAQINYYESQIEANEELKENKKVQENLADLAAVDFGSLEFREKRLYLKSLINKIYIDGEQVTIEWL

SEQ ID NO: 1834 - protein, 485 aa, synthetic construct
MTKKVAIYTRVSTTNQAEEGFSIDEQIDRLAKYAEAMGWQVSGTYTDAGFSGAKLERPAMRRLINDIENKAFDSVLVYKLDRLSRSVRDTLYLVKDVFTKNKIDFISLNESIDTSSAMGSLFLTILSAINEFERENIKERMTMGKLGRAKSGKSMMWTKTAFGYYHNRKTGILEIVPLQATIVEQIFTDYLSGISLTKLRDKLNESGHIGKDIPWSYRTLRQTLDNPVYCGYIKFKDSLFEGMHKPIIPYETYLKVQKELEERQQQTYERNNNPRPFQAKYMLSGMARCGYCGAPLKIVLGHRRKDGSRTMKYHCANRFPRKTKGVTVYNDNKKCDSGTYDLSNLENTVIDNLVGFQENNDSLLKVINGNNQPILDTSSFKKQISQIDKKIQKNSDLYLSDFITMDELKARTDSLQAEKKLLKAKISENKFNDSTGVFELVKTQLGSIPINELSYDNKKKIVNNLVSKVDVTADNVDIVFKFQLA

SEQ ID NO: 1835 - protein, 452 aa, synthetic construct
MKAAIYIRVSTQEQVGNYSIQAQTEKLTALCRSKDWDVYDIFIDGGYSGSNMNRPALNEMLSKLHEIDAVVVYRLDRLSRSQRDTTTLIEEYFLKNNVEFVSLSETLDTSSPFGRAMIGILSVFAQLERETIRDRMVMGKIKRIEAGLPLTTAKGRTFGYDVIDTKLYINEEEAKQLQLIYDIFEEEQSITSLQKRLKKLGFKVRTYNRYNNWLTNDLYCGYVSYKDKVHVKGIHEPIISEEQFYRVQEIFARMGKNPNMNRDSASLLNNLVVCSKCGLGFVHRSKDTMCRGKKYHYRYYSCKTYKHTHELEKCGNKIWRADKLEELIVNRVNNYSFASRNVDKEDELDSLNEKLKIEHAKKRRLFDLYINGSYEVSVLDSMMNEIDAQINYYEGQIEANEELRKNKKIQENLAELATVDFDSLEFREKQLYLKSRINKIYIDGEQVTIEWL

SEQ ID NO: 1836 - protein, 485 aa, synthetic construct
MTKKVAIYTRVSTTNQAEEGFSIDEQVDHLTKYAEAMGWQVSDTYTDAGFSGAKLERPAMQRLINDIENKAFDTVLVYKLDRLSRSVRDTLYLVKDVFTKNKIDFISLNESINTSSAMGSLFLTILSAINEFERENIKERMTMGKLGRAKSGKSMMWTKTAFGYYHNRKTGILEIVPLQATIVEQIFTDYLSGISLTKLRDKLNESGHIGKDVPWSYRTLRQTLDNPVYCGYIKFKDSLFEGMHKPIIPYETYLKVQKELEERQQQTYERNNNPRPFQAKYMLSGMARCGYCGAPLRIVLGHKRKDGSRTMKYHCANRFPRKTKGVTVYNDNKKCDSGTYDLNNLENTVIDILVGFQENNDSLLKIINGDNQPILDTSSFKEQISQIDKKIQKSSDLYLNDFITMDELKDRTDSLQAEKKLLKAKISENKFNDSTDVFELVKTRLGSIPINELSYDNKKKIVNNLVSKVDVTADNVDIIFKFQLA

SEQ ID NO: 1837 - protein, 485 aa, synthetic construct
MTRKVAIYTRVSTTNQAEGGFSIDEQTDRLTKYAEAMGWQVSDTYTDAGFSGAKLERPAMQRLINDIENKAFDTVLVYKLDRLSRSVRDTLHLVKDVFTKNKIDFISLNESIDTSSAMGSLFLTILSAINEFERENIKERMTMGKLGRAKSGKSMMWTKTAFGYYHNRKTGILEIVPLQATIVKQIFTDYLSGISLTKLRDKLNDSGHIGKDIPWSYRTLRQTLDNPVYCGYIKFKDSLFEGMHKPIIPYETYLKVQKELKERQQQTYERNNNPRPFQAKYMLSGMARCGYCGAPLRIVLGHKRKDGSRTKKYHCANRFPRKTKGVTVYNDNKKCDSGTYDLSNLENAVIDNLTGFQEDNDSLLKIINGNNQPILDTSSFKKQISQIDKKIQKNSDLYLNDFITMDELKDRTDSLQAEKKLLEAKISENKFNDSTDVFELVRAQLGSIPINELSYDNKKKIVNNLVSKVDVTADNVDIIFKFQLA

SEQ ID NO: 1838 - protein, 452 aa, synthetic construct
MKAAIYIRVSTREQVENYSIQAQTEKLTALCRSKDWDVYDIFIDGGYSGSNMNRPALNEMLSKLHEIDAVVVYRLDRLSRSQRDTITLIEEYFLKNNVEFVSLSETLDTSSPFGRAMIGILSVFAQLERETIRDRMVMGKIKRVEAGLPLTTAKGRTFGYDVIDTKLYINEEEARQLRLIYDIFEEEQSITFLQKRLKKLGFKVRTYSRYNNWLTNDLYCGYVSYKDKVHVKGIHEPIISEEQFYRVQEIFTRMGKYPNMNRDSASLLSNLVVCGKCGLGFVHRRKDTTSRGKKYHYRYYSCKTYKHTHELEKCGNKIWRADKLEELIINRVNGYSFASRSVDKEDELDSLNEKLKIEHAKKKRLFDLYINGSYEVSELDSMMNDIDAQINYYESRIEANEGLKRNKKIQENLAELATVDFDSLEFREKQLYLKSLINKIHIDGEQVTIEWL

SEQ ID NO: 1839 - protein, 485 aa, synthetic construct
MTKKVAIYTRVSTTNQAEEGFSIDEQIDRLTKYAEAMGWQVSDTYTDAGLSGAKLERPAMQRLIDDIENKAFDTVLVYKLDRLSRSVRDTLYLVKDVFTKNKIDFISLNESIDTSSAMGSLFLTILSAINEFERENIKERMTMGKLGRARSGKSMMWTRTAFGYYHNRKTGILEIVPLQATIVEQIFTDYLSGISLTKLRDKLNESGHIGKDIPWSYRTLRQTLDNPVYCGYIKFKDSLFEGMHKPIIPYETYLRVQKELEERQQQTYERNNNPRPFQAKYMLSGMARCGYCGAPLRIVLGHKRKDGSRTMKYHCANRFPRKTKGITVYNDNKRCDSGTYDMSNLENTVIDSLIGFQENNDSLLKIINGNNQPIPDTSSFKKQISQIDKKIQKNSDLYLNDFITMDELKDRTDSLQAEKKLLKAKISENKFNDSTDVFELVKTQLGSIPISELSYDDKKKIVNNLVSKVDVTADSVDIIFKFQLA

SEQ ID NO: 1840 - protein, 485 aa, synthetic construct
MTKKVAIYTRVSTTNQAEEGFSIDEQIDRLTKYAEAMGWQVSDTYTDAGLSGAKLERPAMQRLINDIENKAFDTVLVYKLDRLSRSVRDTLYLVKDVFTKNKIDFISLSESIDTSSAMGSLFLTILSAINEFERENIKERMTMGKLGRAKSGKSMMWTKTAFGYYHNRKTGILEIVPLQATIVEQIFADYLSGISLTKLRDKLNESGHIGKDIPWSYRTLRQTLDNPVYCGYIKFKDSLFEGMHRPIIPYETYLKVQKELEERQQQTYERNNNPRPFQAKYMLSGMARCGYCGAPLKIVLGHKRKDGSRTMKYHCANRFPRKTKGVTVYNDNKKCDSGTYDLSNLENTVIDNLIGLQENDDSLLKIINGNNQPILDTSSFKKQISQIDKKIQKNSDLYLNDFITMDELKDRTDSLQAKKRLLKAKISENKFNDSTDVFELVKAQLGSIPINELSYDNKKKIVNNLVSKVDVTADNVDIIFKFQLA

SEQ ID NO: 1841 - protein, 469 aa, synthetic construct
MSYTTPVRAAVYLRISEDRSGEQLGVARQREDCLKLCDQRKWVPVEYLDNDVSASTGKRRPAYEQMLADITAGKIAAVVAWDLDRLHRRPIELEAFMSLADEKRLALATVAGDVDLATPQGRLVARLKGCVAAHETEHKKARQRRAARQKAERGYPNWSKAFGYLPGPNGPEPDPRTAPLVKQAYADILAGASLGDVCRQWNDAGAFTITGRPWTTTTLSKFLRKPRNAGLRAYKGARYGPVDRDAIVGKAQWSPLVDEATFWAAQAVLDAPGRAPGRKSVRRHLLTGLAGCGKCGYHLAGSYRTDGRVVYVCKACHGVAILADNIEPILYHIVAERLATPDAVDLLRREIHDAAEAETIRLELETLYGELDRLAVERAEGLLTARQVKISTDIVSAKITKLQARQLDQERQRVLDGIPLGTPQVAGMIAELSPDRFRAVLDVLAEVVVQPVGKSGRIFNPERVQVNWR

SEQ ID NO: 1842 - protein, 469 aa, synthetic construct
MSYTTPVRAAVYLRISEDRSGEQLGVARQREDCLKLCDQRKWVPVEYLDNDVSASTGKRRPAYEQMLADIAAGKIAAVVAWDLDRLHRRPIELEAFMSLADEKRLALATVAGDVDLATPQGRLVARLKGSVAAHETEHKKARQRRAARQKAERGHPNWSKAFGYLPGPNGPEPDPRTAPLVKQAYADILAGASLGDVCRQWNDAGAFTITGRPWTTTTLSKFLRKPRNAGLRAYKGAHYGPVDRDAIVGKAQWSPLVDEATFWAAQAVLDAPGRAPGRKSVRRHLLTGLAGCGKCGNHLAGSYRTDGRVVYVCKACHGVAILADNIEPILYHIVAERLAMPDAVDLLRREIHDAAEAETIRLELETLYGELDHLAVERAEGLLTARQVKISTDIVNAKITKLQARQLDQERLRVLDGIPLGTPQVAGTIAELSPDRFRAVLDVLVEVVVQPVGRSGRIFNPERVQVNWR

SEQ ID NO: 1843 - protein, 452 aa, synthetic construct
MKAAIYIRVSTQEQVGNYSIQAQTEKLTALCRSKDWDVYDIFVDGGYSGSNMNRPALNEMLSKLHEIDAVVVYRLDRLSRSQRDTTTLIEEYFLKNNVEFVSLSETLDTSSPFGRAMIGILSVFAQLERETIRDRMVMGKIKRIEAGLPLTTAKGRTFGYDVIDTKLYINEEEAKQLRLIYDIFEEEQSITSLQKRLKKLGFKVRTYNRYNNWLTNDLYCGYVSYKDKVHVKGIHEPIISEEQFYRVQEIFTRMGKKPNMNRDSASLLNNLVVCSKCGLGFVHRSKDTMSRGKKYHYRYYSCKTYKHTHELEKCGNKIWRADKLEELIVNRVNNYGLASRNVDKEDELDSLNEKLKIEHAKKKRLFDLYVNGSYEVSELDSMMNDIDAQINYYESQIGANEELKKNKKIQESPAALATVDFDSLEFREKQLYLKGLINKIYIDGEQVTIEWL

SEQ ID NO: 1844 - protein, 452 aa, synthetic construct
MKAAIYIRVSTREQVENYSIQAQTEKLTALCRSKDWDVYDIFVDGGYSGSNMNRPALNEMLSKLHEIDAVVVYRLDRLSRSQRDTITLIEEYFLKNNVEFVSLSETLDTSSPFGRAMIGILSVFAQLERETIRDRMVMGKIKRIEAGLPLTTAKGRTFGYDVIDAKLYINEEEAKQLQLIYDIFEEEQSITFLQKRLKKLGFKVHTYNRYNNWLTNDLYCGYVSYKDKVHVKGIHEPIISEEQFYRVQEIFTRMGKNPNMNRDSASLLNNLVVCSKCGLGFVHRRKDAMSRDKKYHYRYYSCKTYKHIHELEKCGNKIWRADKLEELIINRVNNYSFASRNVDKGNELDSLNEKLKIEHAKKKRLFDLYINGRYEVSELDSMMSDIDAQINCYESQIEANEELKKNKKIQENLAYLATVDFDSLEFREKQRYLKSLINKIYIDGEQVTIEWL

SEQ ID NO: 1845 - protein, 485 aa, synthetic construct
MTKKVAIYTRVSTTNQAEEGFSIDEQIDRLTKYAEAMGWQVSDTYTDAGFSGAKLERPAMQRLINDIETKAFDTVLVYKLDRLSRSVRDTLYLVKDVFTKNKIDFISLNESINTSSAMGSLFLTILSAINEFERENIKERMTMGKLGRAKSGKSMMWTKTAFGYYHNRKTGVLEIVPLQASIVEQIFTDYLSGISLTKLRDKLNESGHIGKDIPWSYRTLRQTLDNPVYCGYIKFKDSLFEGMHKPIIPYETYLKVQKELGERQQQAYERNNNPRPFQAKYMLSGMARCGYCGAPLKIVLGHKRKDGSRTMKYHCANRFPRKTKGVTVYNDNKKCDSGTYDLSNLEDTVIDNLIGFQENNDNLLRIINGNNQPILDTSSLKEQISQIDKKIQKNSDLYLNDFITMDELKDRTDSLQAEKRLLKAKISENKFNDSTDVFELVKTQLGSIPINELSYDDKKKIVNNLVSKVDVTADSVDIIFKFQLA

SEQ ID NO: 1846 - protein, 485 aa, synthetic construct
MTKKVAIYTRVSTTNQAEEGFSIDEQIDRLTKYAEAMGWQVSDTYTDAGLSGAKLERPAMQRLINDIENKAFDTVLVYKLDRLSRSVRDTLYLVKDVFAKNKIDFISLNESIDTSSAMGSLFLTILSAINEFERENIKERMTMGKLGRAKSGKSMMWTKTAFGYYHNRKTGILEIVPLQATIVEQIFTDYLSGISLTKLRDKLNESGHIGKDIPWSYRTLRQTLDNPVYCGYIKFKDSLFEGMHKPIIPYETYLKVQKELEERQQQTYERNNNPRPFQAKYMLSGMARCGYCGAPLKIVLGHKRKDGSRTMKYHCANRFPRKTKGVTVYNDNKKCDSGTYDLSDLENTVIDSLIGFQENNDSLLKIINGNNQPILDTSSFKEQISQIDKKIQKNSDLYLNDFITMDELKDRTDSLQAEKKLLKAKISESKFNDSTDVIELVKTQLGSIPINELSYDNKKKIVNNLVSKVDVTADNVDIIFKFQLA

SEQ ID NO: 1847 - protein, 452 aa, synthetic construct
MKAAIYIRVSTREQVENYSIQAQTEKLTALCRSKDWDVYDIFIDGGYSGSNMNRPALNEMLSKLHEIDAVVVYRLDRLSRSQRDTITLIEEYFLKNNVEFVSLSETLDTSSPFGRAMIGILSVFAQLERETIRDRMVMGKIKRIEAGLPLTTAKGRTFGYDVIDSKLYINEEEAKQLRLIYDIFEEEQSITFLQKRLKKLGFKVRSYNRYNNWLTNDLYCGYVSYKDKVHVKGIHEPIISEEQFYRVQEIFTRMGKNPNMNRGSASLLNNLVVCGKCGLGFVHRRKDAMSRDKKYHYRYYSCKTYKHIHELEKCGNKIWRADKLEELIINRVNNYSFASRNADKEDGLDSLNEKLKIEHAKKKRLFELYINGSYEVSGLDSMMNGIDAQINYYESQIEANEELKGNKKIQENLAYLATVDFDSLEFREKQLYLKSLINKIYIDGEQVTIEWL

SEQ ID NO: 1848 - protein, 452 aa, synthetic construct
MKAAIYIRVSTREQVENYSIQAQTEKLTALCRSKDWDVYDIFVDGGYSGSNMNRPALNEMLSKLHEIDAVVVYRLDRLSRSQRDTITLIEEYFLKNNVEFVSLSETLDTSSPFGRAMIGILSVFAQLERETIRDRMVMGKIKRIEAGLPLTTAKGRTFGYDVIDTKLYVNEEEAKQLQLIYDIFEEEQSITSLQKRLKKLGFKVRTYNRYNNWLTNDLYCGYVSYKDKVHVKGIHEPIISEEQFYRVQEIFTRMGKNPNMNRNSASLLNNLVVCSKCGLGFVHRRKDAMSRDKRYHYRYYSCKTYKHIHELEKCGNKIWRADKLEELVINRVNNYSFASRNADKEDELDSLNEKLKVEHAKKKRLFDLYISGRYEVNELDSMMNDIDAQINYYEGQIEANEELKKNKKIQENLAHLAIVDFDSLEFREKQLYLKSLINKIYIDGEQVTIEWL

SEQ ID NO: 1849 - protein, 469 aa, synthetic construct
MGYTTPVRAAVYLRISEDRSGEQLGVARQREDCLKLCSQRKWVPVEYLDNDVSASTGKRRPAYEQMLADITAGKIAAVVAWDLDRLHRRPIELEAFMSLADEKRLALATVAGDVDLATPQGRLVARLKGCVAAHETEHKKARQRRAARQKAERGLPNWSKAFGYLPGPNGPEPDPRAAPLVKQAYADILAGASLGDVCRQWNDAGAFTITGRPWTTTTLSKFLRKPRNAGLRAYKGARYGPVDRDAIVGKAQWSPLVDEATFWAAQAVLDAPGRAPGRKSVRRHLLTGLAGCGKCGSHLAGSYRTDGRVVYVCKACYGVAILADNIEPILYRIVTERLAMPDAVDLLRREIHDAAEAEPIRLELETLYGELDRLAVERAEGLLTARQVKISTDIVNAKITKLQARQLDQERLRVFDGIPLGTPQVAGMIAELSPDRFRAVLDVLAEVVVQPVGKGGRIFNSERVQVNWR

SEQ ID NO: 1850 - protein, 485 aa, synthetic construct
MTKKVAIYTRVSTTNQAEEGFSIDEQIDRLTKYAEAMGWQVSDTYTDAGLSGAKLERPAMQRLINDIENKAFDTVLVYKLDRLSRSVCDTLYLVKDVFTKNKIDFISLSESIDTGSAMGSLFLTILSAINEFERENIKERMTMGKLGRAKSGKSMMWTKTAFGYYHNRKTGILEIVPPQATIVEQIFTDYLSGISLTKLRDKLNESGHIGKDIPWSYRTLRQTLDNPVYCGYIKFKDSLFEGMHKPIIPYETYLKVQKELGERQQQTYERNNNPRPFQAKYMLSGMARCGYCGAPLRIVLGRKRKDGSRTMKYHCANRFPRKTKGVTVYNDNKKCDSGTYDLSNLENTVIDILIGFQENNDSLLKIINGNNQPSLDTGSIKKQISQIDKKIQKNSDLYLNDFITMDELKDRTDSLQAEKKLLKAKIGENKFNDSTDVFELVKTQLGSIPVNELSYDNKKKIVNNLVSKVDVTADNVDIIFKFQLA

SEQ ID NO: 1851 - protein, 452 aa, synthetic construct
MKAAIYIRVSTREQVENYSIQAQTEKLTALCRSKDWDVYDIFIDGGYSGSNMNRPALNEMLSKLHEIDAVVVYRLDRLSRSQRDTITLIEEYFLKNNVEFVSLSETLDTSSPFGRAVIGILSVFAQLERETIRDRMVMGKIKRIEAGLPLTTAKGRTFGYDVVDTKLYINEEEAKQLRLIYDIFEEEQSITSLQKRLKKLGFKVRTYSRYNSWLTNDLYCGYVSYKDKVHVKGIHEPIISEEQFYRVQEIFARMGKNPNMNHDSASLLSNLVVCSRCGLGFVHRRKDTVSRGKKYHYRYYSCKTYKHIHELEKCGNKIWRADKLEELVINRVNSYSFASRNMGKEDELDSLNEKLKIEHAKKKRLFDLYINGSHEVSELDGMMNDIDAQINYYESQIEANEELKKNKKIQENLANLATVDYDSLEFREKQLYLKSLINKIYIDGEQVTIEWL

SEQ ID NO: 1852 - protein, 452 aa, synthetic construct
MKAAIYIRVSTREQVENYSIQAQTEKLTALCRSKDWDVYDIFIDGGYSGSNMNRPALNEMLSKLHEIDAVVVYRLDRLSRSQRDTITLIEEYFLKNNVEFVSLSETLDTSSPFGRAMIGILSVFAQLERETIRDRMVMGKIKRIEAGLPLTTAKGRTFGYDVIDTKLYINEEEAKQLQLIYDIFEEEQSITFLQKRLKELGFKVHTYNRYNNWLTNDLYCGYVSYKDKVHVKGIHEPIISEEQFHRVQEIFTRMGKNPNMNRDSASLLNNLVVCSKCGLGFVHRRKDAMSRDKKYHYRYYSCKTYKHIHELEKCGNKIWRADKLEELIIKRVNNYSLASRNVDKEDELDSLNEKLKVEHAKKKRLFDLYINGSYEVSELDSMMSDIDAQINYYESQIEASEELKKSKKIQENLANLATVDFDSLEFREKQLYLKSLISKIYIDGEQVTIEWL

SEQ ID NO: 1853 - protein, 469 aa, synthetic construct
MSYTTPVRAAVYLRISEDRSGEQLGVARQREDCLKLCDQRKWVPVEYLDNDVSASTGKRRPAYEQMLADITAGKIAAVVAWDLDRLHRRPIELEAFMSLADEKRLALATVAGDVDLATPQGRLVARLKGSVAAHETEHKKARQRRAARQKAERGYPNWSKAFGYLPGPNGPEPDPRTAPLVKQAYADILAGASLGDVCRRWNDAGALTVTDRPWTTTTLSKFLRKPRNAGLRAYKGARYGPVDRDAIVGKAQWSPLVDEATFWAAQAVLDAPGRAPGRKSVRRHLLTGLAGCGKCGNHLAGSYRTDGRVVYVCKACHGVAILADNIEPILYHIVVERLAMPDAVDLLRREIHDAAEAETIRLELETLYGELDRLAVERAEGLLTARQVKISTDIVNAKITKLQARQLDQERLRVFDGIPLGTPKVAGVIAELSPDRFRAVLDVLAEVVVQPVGKSSRIFNPERVQVNWR

SEQ ID NO: 1854 - protein, 469 aa, synthetic construct
MSYTTLVRAAVYLRISEDRSGEQLGVARQREDCLKLCDQRKWVPVEYLDNDVSASTGKRRPAYEQMLADITAGKIAAVVAWDLDRLHRRPIELEAFMSLADEKRLALATVAGDVDLATPQGRLVARLKGSVAAHETEHKKARQRRAARQKAERGHPNWSRAFGYLPGPNGPEPDPRTAPLVKQAYADILAGASLGDVCRRWNDAGAFTITGRPWTTTTLSKFLRKPRNAGLRAYKGARYGPVDRDAIVGKAQWSPLVDEATFWAAQAVLDAPGRAPGRKSVRRHLLTGLAGCGKCGNHLAGSYRTDGQVVYVCKVCHGVSILAANIVPILYHVVAERLAMPDAVDLLRREIHDAAEAETIRLELETLYGELDRLAVERAEGLLTARQVKISTDIVNAKITKLQARQLDQERLRVLDGIPLGTPQVAGMIAELSPDRFRAVLDALAEVVVQPVGKSGRIFNPERVQVNWR

SEQ ID NO: 1855 - protein, 485 aa, synthetic construct; identical to SEQ ID NO: 1692

SEQ ID NO: 1856 - protein, 485 aa, synthetic construct
MTKKVAIYTRVSTTSQAEEGFSIDEQIDRLTKYAEAMGWQVSDTYTDAGCSGAKLERPAMRRLINDIENKAFDTVLVYKLDRLSRSVRDTLYLVKDVFTKNKIDFISLNESIDTSSAMGSLFLAILSAINEFERENIKERMTMGKLGRAKSGKSMMWTKTAFGYYHNRRTGILEIVPLQAAIVEQIFADYLSGISLTKLRDKLNGSGHIGKDIPWSYRTLRQTLDNPVYCGYIKFKDSLFEGMHKPIIPYETYLKVQKELEERQQQTYERNNNPRPFQAKYMLSGMARCGYCGAPLKIVLGHKRKDGSRTTKYHCANRFPRKTKGVTVYNDNKKCDSGTYDLSNLENTVIDNLIGFQEDNGSLLRIINGNNQPTLDTSSFKEQISQIDKKIQKNSDLYLNDFITMDELKARADGLQAEKKLLKAKISENKFNDSTDVFELVKTQLGSVPINELSYDNKKKIVNNLVSKVVVTADNVDIIFKFQLA

SEQ ID NO: 1857 - protein, 469 aa, synthetic construct
MCYITPVRAAVYLRISEDRSGEQLGVARQREDCLKLCDQRKWVPVEYLDNDVSASTGKRRPAYEQMLADITAGKIAAVVAWDLDRLHRRPIELEAFMCLADEKRLALATVAGDVDLATPQGRLVARLKGSVAAHETEHKKARQRRAARQKAERGHPNWSKAFGYLPGPNGPEPDPRTAPLVKQAYADILAGASLGGVCRQWNDAGAFTITGRPWTTTTLSKFLRKPRNAGLRAYKGARYGPVDRDAIVGKAQWSPLVDEATFWAAQAVLDAPGRAPGRKSVRRHLLTGLAGCGKCGNHLAGSYRTDGRVVYVCKACHGVAILADNIEPILYHIVAERLAMPDAVDLLRREIYDAAEAETIRLELETLYGELDRLAVERAEGLLTARQVKISTDIVNAKITKLQARQLDQERLRVFDGIPLGTPQVAGMIAELSPNRFRAVIDVLAEVVVQPVGKSGRIFNPERVQVNWR

SEQ ID NO: 1858 - protein, 485 aa, synthetic construct
MTKKVAIYTRVSTTNQAEEGFSIDEQIDRLTKYAEAMGWQVSDTYTDAGFSGAKLERPAMQRLINGIENKAFDTVLVYKLDRLSRSVRDTLYLVKDVFTKNKIDFISLNESIDTSSAMGSLFLTILSAINEFERENIKERMTMGKLGRAKSGKSMMWARTAFGYYHNRKTGILEIVPLQATVVEQIFTDYLSGISLTKLRDKLNESGHIGKDIPWSYRTLRQTLGNPVYCGYIKFKGSLFEGMHKPIIPYETYLKVQKELEERQQQTYERNNNPRPFQAKYMLSGMARCGYCGAPLRIVLGHKRKDGSRTMKYHCANRFPRKTKGVTVYNDNKKCDSGTYDLSNLENAVIDNLIGFQENNESLLKIINGNNQPILDTSSFEKQISQIDKKIQKNSDLYLNDFITMDELRDRTDSLQAEKKLLKAKISENKFNDSTDVFELVKTQLGSIPINELSYDNKKKIVNNLVSKVDVTADNVDIIFKFQLA

SEQ ID NO: 1859 - protein, 485 aa, synthetic construct
MTKKVAIYTRVSTTNQAEEGFSIDEQIDRLTKYAEAMGWQVSDTYTDAGFSGAKLERPAMQRLINDIENKAFDTVLVYKLDRLSRSVRDTLYLVKDVFTKNRIDFISLNESINTSSAMGSLFLTILSAINEFERENIKERMTMGKLGRAKSGKSMMWTKTAFGYYHNRKTGILEIVPLQATIVEQIFTDYLSGISLTKLRDKLNESGHIGKDIPWSYRTLRQTLDNPVYCGYIKFKDSLFEGMHKPIIPYETYLKVQKELEERQQQTYERNNNPRPFQAKYMLSGMARCGYCGAPLRIVLGHKRKDGSRTMKYHCANRFPRKTKGVTVYNDNKKCDSGTYDLSSLENTVIDNLIGFQENNDSLLKIINGNSQPILDTSGLEKQISQIDKKIQKNSDLYLNDFITMDELKDRTDSLQAEKKLLKAKISENKFNDSIIVFELVKTQLGSIPINELSYDNKKKIVNNLVSKVDVTADNVDIIFKFQLA

SEQ ID NO: 1860 - protein, 469 aa, synthetic construct
MSYTTPVRAAVYLRISEDRSGEQLGVARQREDCLKLCGQRKWVPVEYLDNDVSASTGKRRPAYEQMLADITAGKIAAVVTWDLDRLHRRPIELEAFMSLADEKRLALATVAGDVDLATPQGRLVARLKGSVAAHETEHKKARQRRAARQKAERGLPNWSKAFGYLPGPNGPEPDSRAAPLVKQAYADILAGASLGDVCRQWNDTGAFTITGRPWTTTTLSKFLRKPRNAGLRAYKGARYGPVDRDAIVGKAQWSPLVDEATFWAAQAVLDAPGRAPGRKSVRRHLLTGLAGCGKCGNHLAASYRTGGRVVYVCKACHGVAILADNIEPILYRIVAERLAMPDAVDLLRREIHDAAEAETIRLELETLYGELDRLAVERAEGLLTARQVKISTDIVNAKITKLQAHQLDQERLRVLDGIPLGTPQVAGVIAKLSPDRFRAVLDVLAEVVVQPVGKSGRIFNPERVQVNWR

SEQ ID NO: 1861 - protein, 452 aa, synthetic construct
MKAAIYIRVSTREQVENYSIQAQAEKLTALCRSKDWDVYDIFIDGGYSGSNMNRPALNKMLSKLHEIDAVVVYRLDRLSRSQRDTITLIEEYFLKNNVEFVSLSETLDTSSPFGRAMIGILSVFAQLERETIRDRMVMGKIKRVEAGLPLTTAKGRTFGYDVIDTKLYTNEEEAKHLQLIYDIFEEEQSITFLQKRLKKLGFKVRTYNRYNNWLTNDLYCGYVSYRDKVHVKGIHEPIISEEQFYRVQEIFTRMGKNPNMNRDSASLLNNLVVCSKCGLGFVHRRKDTVSRGKKYHYRYYSCKTYKHTHELEKCGNKIWRADKLEELIINRVNNYSFAGRNVDKEDELDSLNEKLKIEHEKKKRLFDLYINGSYEVRELDGMMNDIDAQINYYESQIEANKELKKNRKIQENLAYLATVDFDGLEFREKQLYLKSLINKIYIDGEQVTIEWL

SEQ ID NO: 1862 - protein, 452 aa, synthetic construct
MKAAIYIRVSTQEQVGNYSIQAQTEKLTALCRSKDWDVYDIFIDGGYSGSNMNRPALNKMLSKLHEIDAVVVYRLDRLSRSQRDTTTLIEEYFLKNNVEFVSLSETLDTSSPFGRAMIGILSVFAQLERETIRDRMVMGKIKRIEAGLPLTTAKGRTFGYDVIDTKLYINEEEAKQLQLIYDIFEEEQSITSLQKRLKKLGFKVRTYNRYNNWLTNDLYCGYVSYKDKVHVKGIHEPIISEEQFCRVQEIFTRMGKNPNMNRDSASLLNSLVECSKCGLSFVHRSKDTMSRGKKYRYRYYSCKTYKHTHELEKCGNKIWRADKLEELIISRVNNYSSASRSVDKEDELDSLNEKLKTEHAKKKRLFDLYINGSYEVSELDSMMNDIDAQINYYESQIEANEELRKNKKIQENLADLATVDFGSLEFREKRLYLKSLINKIYIDGEQVTIEWL

SEQ ID NO: 1863 - protein, 485 aa, synthetic construct
MIKKVAIYTRVSTTNQAEEGFSIDEQIDRLTKYAEAMGWQVSDTYTDAGLSGAKLERPAMQRLINDIENKAFDTVLVYKLDRLSRSVRDTLYLVKDVFTKNKIDFISLNESIDTSSAMGSLFLTILSAINEFERENIKERMTMGKLGRAKSGKSMMWTKTAFGYYHNRKTGILEIVPLQATIVEQIFTDYLSGISLTKLRDKLNESGHIGKDIPWSYRTLRQTLDNPVYCGYIKFKGSLFEGMHKPIIPYETYLKVQKELEERQQQTYERNNNPRPFQAKYMLSGMARCGYCGAPLKIVLGRKRKDGSRTMKYHCANRFPRKTKGVTVYNDNKKCDSGTYDLCNLENTVIDNLIGFQEDNDSLLKIINSNNQPILDTSSFKKQISQIDKKIQKNSDLYLNDFITMDELKDRTDSLQAEKKLLKAKISENKFNDSTGVFELVKTQLGSIPINELSYDDKKKIVNNLVSKVDVTADNVDIIFKFQLA

SEQ ID NO: 1864 - protein, 452 aa, synthetic construct
MKAAIYIRVSTQEQVENYSIQAQTEKLTALCRSKDWDVYDIFIDGGYSGSNMNRPALNEMLSKLHEIDAVVVYRLDRLSRSQRDTTTLIEEYFLKNNVEFVSLSETLDTSSPFGRAMIGILSVFAQLERETIRDRMVMGKIKRIEAGLPLTTAKGRTFGYDVVDTKLYINEEEAKQLRLIYDIFEEEQSITSLQKRLKKLGFKVRTYNRYNNWLTNDLYCGYVSYKDKVHVKGIHEPIISEEQFYRVQEIFTRMGKNPNMNRDSASLLSNLVVCSKCGLGFVHRSKDTMSRGKKYHYRYYSCKTYKHTHELEKCGNKIWRADKLEELIINRVNNYSFASRNVDKEDELDGLNEKLKIEHAKKKRLFDLYINGSYEVSELDSMMNDIDAQINYYESRIEANEELKKNKKIQENLADLATVDFDSLGFREKRLYLKSLINKIYIDGEQVTIEWL

SEQ ID NO: 1865 - protein, 452 aa, synthetic construct
MKAAIYIRVSTREQVENYSIQAQTEKLTALCRSKDWDVHDIFIDGGYSGSNMNRPALSEMLSKLHEIDAVVVYRLDRLSRSQRDTITLIEEYFLKNNVEFVSLSETLDTSSPFGRAMIGILSVFAQLERETIRDRMVMGKIKRIEAGLPLTTAKGRTFGYDVIDTKLYINEEEAKQLQLIYDIFEEEQSITFLQKRLKKLGFKVRTYNRYSNWLTNDLYCGYVSYKDKVHVKGIHEPIISEEQFYRVQEIFTRMGKSPNMNRDSASLLNNLVVCGKCGLSFVHRRKDIMSRGKKYHYRYYSCKTYKHIHELEKCGNKIWRADKLEELIINRVNNYSLASRNVDKEDELDSLNGKLKTEHAKKKRLFDLYINGSYEVSELDSMMNDIDAQINYYESQIEANEELKKNKKIQENLAYLATVDFDSLGFREKQLYLKSLINKIYIDGEQVTIEWL

SEQ ID NO: 1866 - protein, 485 aa, synthetic construct
MTKKVAIYTRVSTTNQAEEGFSIDEQIDRLTKYAEAMGWQVSDTYTDAGFSGAKLERPAMQRLINDIENKAFDTVLVYKLDRLSRSVRDTLHLVKEVFTKNKIDFISLNESIDTSSAMGSLFLTILSAINEFERENIKERMTMGKLGRAKSGKSMMWTKTAFGYYHNRKTGILEIVPLQATIVEQIFTDYLGGISLTKLRDKLNESGHIGKDIPWSYRTLRQTLDNPVYCGYIKFKGSLFEGMHKPIIPYETYLKVQKELEERQQQTYERNNNPRPFQAKYMLSGMARCGYCGAPLRIVLGHKRKDGSRTMKYHCANRFPRKTKGITVYNDSKKCDSSTYDLRNLENTVIDNLIGFQENNDSLLKIINGNNQPILDTSSFKKQISQIDKKIQKNSDLYLNDFITMDELKDRTDSLQAEKKLLKAKISENKFNDSTDVFEQVKTQLGSIPINELSYDNKKKIVNNLVSKVDVTADNVDIIFKFQLG

SEQ ID NO: 1867 - protein, 485 aa, synthetic construct
MTKKVAIYTRVSTTNQAEEGFSIDEQIDRLTKYAEAMGWQVSDTYTDAGFSGAKLERPAMQRLINDIENKAFDTVLVYKLDRLSRSVRDTLYLVKDVFTKNKIDFISLNESIDTSSAMGSLFLTILSAINEFERENIKERMTMGKLGRAKSGKSMMWTKTAFGYYHNRETGILEIVPLQATIVEQIFTDYLSGISLTKLRDKLNESGHVGKDIPWSYRTLRQTLDNPVYCGYIKFKDSLFEGMHKPIIPYETYLKVQKELEERQQKAYERNNNPRPFQAKYMLSGMARCGYCGAPLRIVLGHERKDGSRTMKYHCANRFPRKTKGITVYNDNKKCDSGTYDLSDLENTVIDSLIGFQENDDSLLKIINGNNQPILDTSSFKKQISQIDKKIQKNSDLYLNDFITMDELKDRTDSLQAEKKLLKAKISENKFYDSTGVFELVKTQLGSIPINELSYDNKKRIVNNLVSKVDVTADNVDIIFKFQLA

SEQ ID NO: 1868 - protein, 469 aa, synthetic construct
MCYTTPVRAAVYLRISEDRSGEQLGVARQREDCLKLCDQRKWVPVEYLDNDVSASTGKRRPAYEQMLADITAGRIAAVVAWDLDRLHRRPIELEAFMSLADEKRLALATVAGDVDLATPQGRLVARLKGCVAAHETEHKKARQRRAARQKAERGYPNWSKAFGYLPGPNGPEPDPRTAPLVKQAYADILAGASLGDVCRRWNDAGAFTITGRPWTTTALSKFLRKPRNAGLRAYKGARYGPVDRDAIVGKAQWSPLVDEATFWAAQAVLDAPGRAPGRKSVRRHLLTGLAGCGKCGGHLAGSYRTDGRVVYVCKACHGVAILADNIEPILYHIVAERLAMPDAVDLLRREIHDATEAETIRLELETLYGELDRLAVERAEGLLTARQVKISTDIVNAKITKLQARQQDQERLRVLDGIPLGTPQVAGRIAELSPDRFRAVLDVLAEVVVQPVGKGGRIFNPERVQVNWR

SEQ ID NO: 1869 - protein, 452 aa, synthetic construct
MKAAIYIRVSTREQVGNYSIQAQTEKLTALCRSKDWDVYDIFIDGGYSGSNMNRPALNEMLSKLHEIDAVVVYRLDRLSRSQRDTTTLIEEYFLKNNVEFVSLSETLDTSSPFGRAMIGILSVFAQLERETIRDRMVMGKIKRIEAGLPLTTAKGRTFGYDVIDTKLYINEEEARQLRLIYDIFEEEQSITILQKRLKKLGFKVRTYNRYNSWLTNDLYCGYVSYKDKVHVKGIHEPIISEEQFHRVQEIFTRMGKNPNMNRDSASLLSNLVVCSKCGLGFVHRSKDTMNRGKKYHYRYYSCKTYKHTHELEKCGNKTWRADKLEELIISRVNNYSFASRNVDKEDELDSLNEKLEIVRARKKRLFDLYISGNYEVSELDSMMNDIDAQINYYESQIGANEGLKKNKKIQENLAGLATVDFDSLEFREKQLYLKSLINKIYIDGEQVTIEWL

SEQ ID NO: 1870 - protein, 469 aa, synthetic construct
MSYTTPVRAAVYLRISEDRSGEQLGVARQREDCLKLCSQRKWVPVEYLDNDVSASTGRRRPAYERMLADITAGKIAAVVAWDLDRLHRRPIELEAFMSLADERRLALATVAGDVNLATPQGRLVARLKGCVAAHETEHKKARQRRAARQKAERGLPNWSKAFGYLPGPNGPEPDPRTAPLVKQAYADILAGASLGDVCRQWNDAGAFTITGRPWTTTALSKFLRKPRNAGLRAYRGARYGPVDRDAIVGKAQWSPLVDEAAFWAAQAVLDAPGRVPGRKSVRRHLLTGLAGCGKCGNHLAGSYRTDGRVVYVCKACHGVAILADNIEPILHHVVAERLAMPDAVDLLRREIHDAAEAETIRLELETLYGELDRLAVERAEGLLTARQVKISTDIVNAKITRLQARQLDQERLRVFNGIPLGTPQVAGMIAELSPDRFRAVLDVLAEVVVQPVGKSGRIFNPERVQVNWR

SEQ ID NO: 1871 - protein, 485 aa, synthetic construct
MTKKVAIYTRVSTTNQAEEGFSIDEQTDRLTKYAEAMGWQVSDTYTDAGFSGAKLERPAMQRLINDIENKAFDTVLVYKLDRLSRSVRDTLHLVKDVFTKNKIDFISLNESIDTSSAMGSLFLTILSAINEFERENIKERMTMGKLGRAKSGKSMMWTKTAFGYYHNRKTGILEIVPLQATIVEQIFTDYLSGISLTKLRDKLNESGHIGKDIPWSYRTLRQTLDNPVYCGYIKFKGSLFKGMHKPIIPYETYLKVQKELEERQQQTCERNNNPRPFQAKYMLSGMARCGYCGAPLRIVLGHKRKDGSRTMKYHCANRFPRKTKGVTVYNDNKKCDSGTYDLSNLENTVIDSLIGFQENNDSLLKIINGNNQPILDTSSFKKQISQIDKKIQKNSDLYLNDFITMDELKDRTDSLQAEKRLLIAKISENKFNDSTDVLELVKTQLGSIPINELSYDNRKKIVNDLVSKVDVTADNVDIIFKFQPA

SEQ ID NO: 1872 - protein, 485 aa, synthetic construct
MTRKVAIYTRVSTTNQAEEGFSIDEQIDRLTKYAEAMGWQVSDTYTDAGSSGAKLERPAMQRLINDIENKAFDTVLVYKLDRLSRSVRDTLYLVKDVFTKNKIDFISLSESIDTSSAMGSLFLTILSAINEFERENIKERMTMGKLGRAKSGKSMMWTKTAFGYYHNRKTGILEIVPLQATIVEQIFTDYLSGISLTKLRDKLNESGHIGKDIPWSYRTLRQTLDNPVYCGYIKFKGSLFEGMHKPIIPYETFLKVQKELEERQQQACERNNNPRPFQAKYMLSGMARCGYCGAPLRIVLGHKRKDGSRTMKYHCANRFPRKTRGVTVYNDNKKCDSGTYDLSNLENTVIDNLIGFQENNDSLLKIINGNNQPILDASSFKKQISQIDKKIQKSSDLYLNDFITMDELKDRTNSLQAEKKLLKAKISENKLNDSTDVFELVKAQLGSTPINELSYDNKKKIVNNLVSKVDVTADNVDIIFKFQLA

SEQ ID NO: 1873 - protein, 469 aa, synthetic construct
MCYTTPARAAVYLRISEDRSGEQLGVARQREDCLKLCDQRKWEPVEYLDNDVSASTGKRRPAYEQMLADISAGKIAAVVAWDLDRLHRRPIELEAFMCLADEKRLALATVAGDIDLATPQGRLVARLKGSVAAHETEHKKARQRRAARQKAERGYPNWSKAFGYLPGPNGPEPDPRTAPLVKQAYADILAGASLGDVCRQWNDAGAFTITGRQWTTTTLSKFLRKPRNAGLRAYKGARYGPVDRGAIVGKAQWSPLVDEATFWAAQAVLDAPGRAPGRKSVRRHLLTGLAGCGKCGNHLAGSYRTDGRVVYVCKACHGVAILADNIEPILSHIVAERLAMPDAVDLLRREIHDAAEAETIRLELETLYGELDRLAVERAEGLLTARQVKISTDIVNAKITKLQARQLDQERLRVFDGIPLGTPQVAGMIAELSPDRFRAVLDVLAVVVVQPVGKSGRIFNPERVQVNWR

SEQ ID NO: 1874 - protein, 485 aa, synthetic construct
MTKKVAIYTRVSTTSQAEEGFSIDEQIDRLTKYAEAMGWQVSDTYTDAGFSGAKLERPAMQRLINDIENKAFDTVLVYKLDRLSRSVRDTLYLVKDVFTKNKIDFISLNECIDTSSAMGSLFLTILSAINEFERENIKERMTMGKLGRAKSGKSMMWTKTAFGYYHNRKTGILEIVPLQATIVEQIFTDYLSGISLTKLRDKLNESGHIGKDIPWSYRTLRQTLDNPVYCGYIKFRGSLFEGMHKPIIPYETYLKVQKELEERQQQTYERNNNPRPFQAKYMLSGMARCGYCGAPLKIVLGHKRKDGSRTMKYHCANRFPRKTKGVTVYNENKKCDSGTYDLSDLENTVIDNLIGFQENDDSLLKIINGNNRPILDTSSFKKQISQVDKKIQKNSDLYLNDFITMDELKDRTDSLQAEKKLLKAKISENKFNDSTDVFELVKTQLGSIPINELSYDNKKKIVNNLVSKVDVTADNVDIIFKFQLA

SEQ ID NO: 1875 - protein, 469 aa, synthetic construct
MSYTTPVRAAVYLRISEDRSGEQLGVARQREDCLKLCGQRKWVPVEYLDNDVSASTGKRRPAYEQMLADITAGKIAAVVAWDLDRLHRRPIELEAFMSLADEKRLALATVAGDVDLATPQGRLVARLKGSVAAHETEHKKARQRRAARQKAERGLPNWSKAFGYLPGPNGPEPDPRTAPLVNQAYADILAGASLGDVCRQWNDAGAFTVTGRPWTTTTLSKFLRKPRNAGLRAYKGARYGPVDRDAIVGKAQWSPLVDEATFWAAQAVLDAPGRAPGRKSVRRHLLTGLAGCGKCGNHLAGSYRTDGRVVYVCKACHGVAILADNIEPILYHIVAERLAMPDAVDLLRREAHDAAEAETIRLELETLYGELDRLAVERAEGLLTARQVKISTSIVNAEITKLQARQLDQERLRVFDGIPLGTPQVAGMIAELSPDRFRAVLDVLAEVVVQPVGKSGRSFNPERVQVNWR

SEQ ID NO: 1876 - protein, 485 aa, synthetic construct
MTKKVAIYTRVSTANQAEEGFSIDEQIDRLTKYAEAMGWQVSDTYTDAGFSGAKLERPAMQRLINDIENKAFDTVLVYKLDRLSRSVRDTLYLVKDVFTKNKIDFISLSESIDTSSAMGSLFLTILSAISEFERENIKERMTMGKLGRAKSGKSMMWTKTAFGYYHNRKTGILEIVPLQATIVEQIFTDYLSGISLTKLRDKLNESGHIGKDIPWSYRTLRQTLDNPVYCGYIKFKDSLFEGMHKPIIPYETYLKVQKELEERQQQTYERNNNPRPFQAKYMLSGMARCGYCGAPLRIVLGHKRKDGSRTMKYHCANRFPRKTKGVTVYNDNKKCDSGTYDLSNLEDIVIDNLIGFQEDNDSLLKIINSNNQPILDTSSFKKQISQIDKKIQKNSDLYLNDFITMDELKDRTDSLRAEKKLLKAKISENKFNDSTDVFELVKTQLGSIPINELSYDNKKKIVNNLVSKVDVTADNVDIIFKFQLA

SEQ ID NO: 1877 - protein, 469 aa, synthetic construct
MSYTTPVRAAVYLRISEDRSGEQLGVARQREDCLKLCDQRKWVPVEYLDNDVSASTGKRRPAYEQMLADITAGKIAAVVAWDLDRLHRRPIELEAFMSLADEKRLALATVAGDVDLATPQGRLVARLKGCVAAHETEHKKARQRRAARQKAERGLPNWSKAFGYLPGPNGPGPDPRTAPLVKQAYADILAGASLGDVCRQWNDAGAFTVTGRPWTTTTLSKFLRKPRNAGLRAYKGARYGPVDRDAIVGKAQWSPLVDEATFWAAQAVLDAPGRAPGRKSVRRHLLTGLAGCGKCGNHLAGSYRTDGRVVYVCKACHGVAILADNIEPILYHIVAERLAMPDAVDLLRREVHDAAEVETIRLELETLYGELDRLAVERAEGLLTARQVKISTDIVNAKIAKLQARQLDQERLRVFDGIPLGTPQVAGMIAELSPDRFRAVLDVLAEVVVQPVGKGGRIFNPERVQVNWR

SEQ ID NO: 1878 - protein, 485 aa, synthetic construct
MTKKVAIYTRVSTTNQAEEGFSIDEQTDRLTKYAEAMGWQVSDTYTDAGFSGAKLERPAMQRLINDIGNKAFDTVLVYKLDRLSRSVRDTLYLVKDVFAKSNIDFISLNESIDTSSAMGSLFLTILSAINEFERENIKERMTMGKLGRAKSGKSMMWTKTAFGYYHNRKTGILEIVPLQAAIVEQIFTDYLSGTSLTKLRDKLNESGHIGKDIPWSYRTLRQTLDNPVYCGYIKFKDSLFEGMHKPIIPYETYLKVQKELEERQQQTYERNNNPRPFQAKYMLSGMARCGYCGAPLKIVLGHKRKDGSRTMKYHCANRFPRKTKGVTVYNDNKKCDSGTYDLSDLETTVIDNLIGLQENDDSLLKIVNGNNQPILDTSSFKKQISQIDKKIQKNSDLYLSDFITMDELKDRTDSLQAKKKLLKAKISENRSNDSTDVFELVKTQLGSIPINELSYDNKKKIVNNLVSKVDVTADNVDIIFKFQLA

SEQ ID NO: 1879 - protein, 485 aa, synthetic construct
MTRKVAIYTRVSTTNQAEEGFSIDEQIDRLTKYAEAMGWQVSDTYTDAGFSGAKLERPAMQRLINDIENKAFDTVLVYKLDRLSRSVRDTLYLVKDVFTKNKIDFISLSESIDTSSAMGSLFLTILSAINEFERENIKERMTMGKLGRAKSGKSMMWTKTAFGYYHNRKTGILEIVPLQATIVEQIFTDYLSGISLTKLRDKLNESGHIGKDIPWSYRTLRQTLDNPVYCGYIKFKDSLFEGMHKPIIPYETYLKVQKELEERQQQAYVRNNNPRPFQAKYMLSGMARCGYCGAPLRIVLGHKRKDGSRTMKYHCANRFPRKTRGVTVYNDNKKCDSGTYDLSNLENTVIDSLIGFQENNDSLLKIINGNNQPVQDTSSIKKQISQIDKKIQKNSDLYLNDFITMDELKERTDSLQAEKKLLKAKISENKFNDSTDVFELVKTQLGSIPINELSYDNKKKMVNNLVSKVDVTADNVDIIFKFQLA

SEQ ID NO: 1880 - protein, 452 aa, synthetic construct
MKAAIYIRVSTREQVENYSIQAQTEKLTALCRSKDWDVYDIFIDGGYSGSNMNRPALNEMLSKLHEIDAVVVYRLDRLSRSQRDTITLIEEYFLKNNVEFVSLSETLDTSSPFGRAMIGILSVFAQLERETIRDRMVMGKIKRIEAGLPLTTAKGRTFGYDVIDTKLHINEEEAKQLRLIYDIFEEEQSITFLQKRLKKLGLKVHTYNRYNNWLTNDLYCGYVSYKDKVHVKGIHEPIISEEQFYRVQEIFTRMGKNPNMNRDSASLLNSLVVCSKCGLGFVHRRKDTTSRGKKYHYRYYSCKTYKHTYELEKCGNKIWRADKLEELIINRVNNYSLASRNVDKEDELDSLNEKLKIEHAKKKRLFDLYISGSYEVSELDSMMNDIDAQISYYESQIEANEGLKKNKKIQENLADLATVDFDSLEFREKQLYLKSLINKIYIDGEQVTIEWL

SEQ ID NO: 1881 - protein, 485 aa, synthetic construct; identical to SEQ ID NO: 1595

SEQ ID NO: 1882 - protein, 452 aa, synthetic construct
MKAAIYIRVSTQEQVGNYSIQAQTEKLTALCRSKDWDVYDIFIDGGYSGSNMNRPALNEMLSKLQEIDAVVVYRLDRLSRSQRDTTTLIEEYFLKNNVEFVSLSETLDTSSPFGRAMIGILSVFAQLERETIRDRMVMGKIKRIEAGLPLTTAKGRTFGYDVIDTKLYINEEEARQLQLIYDIFEEEQSITFLQKRLKELGFKVRSYNRYNSWLTNDLYCGYVSYKDEVHVKGIHEPIISEEQFYRVQEIFTRMGKNPNMNRDSASLLNNLVVCSKCGLSFVHRSKDTMSRGKKYHYRYYSCKTYKLTHELEKCGNKTWRADKLEELIINRVNNYSFASRNADKEDELDSLNEKLKIEHARKKRLFDLYINGSYEVGELVSMMNDIDVQINYYESQIEANEELKKSKKIQENLADLATVDFDSLEFREKQLYLKSLINKIYIDGEQVTIDWL

SEQ ID NO: 1883 - protein, 452 aa, synthetic construct
MKAAIYIRVSTQEQVGNYSIQAQTEKLTALCRSKDWDVYDIFIDGGYSGSNMNRPALNEMLSKLHEIDAVVVYRLDRLSRSQRDTTTLIEEYFLKNNVEFVSLSETLDTSSPFGRAMIGILSVFAQLERETIRDRMVMGKIKRIEAGLPLTTAKGRTFGYDVIDTKLYINEEEAKQLRLIYDIFEEEQSITSLQKRLKKLGFKVRTYNRYNNWLTNDLYCGYVSYKDKVHVKGIHEPIISEEQFYRVQEIFTRMGKNPNMNRDSASLLNGLVVCSKCGLSFVHRSKDTMSRGKKYHYRYYSCKTYKHTHELEKCGNKTWRADKLEELIINRVNNYSFASRSADKEDELDSLNEKLRIEHARKKRLFDLYINGSYEVSELDSMMYDIDAQINYYESQIEASEELKKNKKIQENLADLATVDFDSLGFREKQLYLKSLINKIYIDGEQVTIEWL

SEQ ID NO: 1884 - protein, 452 aa, synthetic construct
MKAAIYIRVSTREQVENYSIQAQTEKLTALCRSKDWDVYDIFIDGGYSGSNMNRPALNEMLSKLHEIDAVVVYRLDRLSRSQRDTITLIEEYFLKNNVEFVSLSETLDTSSPFGRAMIGILSVFAQLERETIRDRMVMGKIKRIEAGLPLTTAKGRTFGYDVIDTKLYINEEEAKQLRLIYDIFEEEQSITFLQKRLKKLGFKVRTYSCYNSWLTNDLYCGYVSYKGKVHVKGIHEPIISEEQFYRVQEIFTRMGKNPNMNRDSASLLNNLVVCSKCGLGFVHRRKDTVSRGKKYHYRYYSCKTYKHTHELEKCGNKIWRADKLEELVINRVNNYSFANRNADKEDELDSLNEKLKIEHAKRKRLFDLYINGSYNVSELDSVMSGIDAQINYYESQIEANGELKKNKKIQENLADLATVDFDSLGFREKQLYLKSLINKIYIDGEQVTIEWL

SEQ ID NO: 1885 - protein, 469 aa, synthetic construct
MSYTTPVRAAVYLRISEDRSGEQLGVARQREDCLKLCDQRKWVPVEYLDNDVSASTGKRRPAYEQMLADITAGKIAAVVAWDLDRLHRRPIELEAFMSLADEKRLALATVAGDVDLATPQGRLVARLKGSVAAHETEHKKARQRRAARQKAERGHPNWSKAFGYLPGPNGPEPDPRTAPLVKQAYADILAGASLGDVCRQWNDAGAFTITGRPWTTTTLSKFLRKPRNAGLRAYKGARYGPVDRDAIVGKAQWSPLVDEATFWAAQAVLDAPGRAPGRKSVRRHLLTGLAGCGKCGNHLAGSYRTDGRVVYVCRACHGVTILADNIEPILYHIVAERLAMPNAVDLLRREIRDAAEAETIRLELETLHGELDRLAVERAEGLLTARQVKISTDIVNAKITELQARQLDQERLRVFGGIPLGTPQVAGMIAELSPDRFRAVLDVLAEVVVQPVGKSGRIFNPERVQVNWR

SEQ ID NO: 1886 - protein, 469 aa, synthetic construct
MSYTTPVRAAVYLRISEDRSGEQLGVARQREDCLKLCVQRKWVPVEYLDNDVSASTGKRRPAYEQMLADITAGKIAAVVAWDLDRLHRRPVELEAFMSLADEKRLALATVAGDIDLATPQGRLVARLKGCVAAHETEHKKARQRRAARQKAERGLPNWSKAFGYLPGPNGPEPDPRTAPLVNQAYADILAGASLGDVCRQWNDAGAFTITGRPWTTTTLSKFLRKPRNAGLRAYKGARYGPVDRDAIVGKAQWSPLVDEVTFWAAQAVLDAPGRAPGRKSVRRHLLTGLAGCGKCGNHLAGSYRADGRVVYVCKACHGVAILADNIEPILYHIVAERLAMPDAVDLLRREIHDAAEAETIRLELETLYGELDRLAVERAEGLLTARQVKISTDIVNAKITKLQARQLDQERLRVLDGIPLGTPQVAGVIAELSPDRFRAVLDVLAEVVVQPVGKSGRIFSPGRVQVNWR

SEQ ID NO: 1887 - protein, 485 aa, synthetic construct
MTKKVAIYTRVSTTNQAEEGFSIDEQIDRLTKYAEAMGWQVSDTYTDAGLSGAKLERPAMQRLINDIENKAFDTVLVYKLDRLSRSVRDTLYLVKDVFTKNKIDFISLNESIDTSSAMGSLFLTILSAINEFERENIKERMTMGKLGRAKSGKSMMWTKTAFGYYHNRKTGILEIVPLQATIVEQIFTDYLSGISLTKLRDKLNESGHIGKDIPWSYRTLRQTLDNPVYCGYIKFKDSLFEGMHKPIIPYETYLKVQKELEERQRQTYERNNNPRPFQAKYMLSGMARCGYCGAPLRIVLGHKRKDGSRTMKYHCANRFPRKTKGATVYNDNKKCDSGTYNLSNLENTVIDNLIGFQENNDSLLKIINGSNQPILDTNSFEEQISQIDKKIQKNSDLYLNDFITMDELKDRTDSLQAEKRLLKAKISENKSNYSTDVFELVKAQLGSIPINELSYDNKKKIVNNLVSKVDVTADNVDIIFKFQLA

SEQ ID NO: 1888 - protein, 452 aa, synthetic construct
MKAAIYIRVSTREQVENYSIQAQTEKLTALCRSKDWDVYDIFIDGGYSGSNMNRPALNEMLSKLHEIDAVVVYRLDRLSRSQRDTITLIEEYFLKNNVEFVSLSETLDTSSPFGRAMIGILSVFAQLERETIRDRMVMGKIKRIEAGLPLTTAKGRTFGYDVIDTKLYINEEEAEQLQLIYDIFEEEQSITFLQKRLKKLGFKVRTYNCYNNWLTNDLYCGYVSYKDKVRVKGIHEPIISEEQFYRVQEIFTRMGKNPNMNRDSASLLNNLVVCSKCGLGFVHRRKDAMSRDKKYHYRYYSCKTYKHIHELEKCGNKIWRADKLEELIIDRVNNYSLASRNVDKGGELDSLNEKLKIEHAKKKRLFDLYINGSYEVSELDSMMNDIDAQINYYESQIEANEELKKSKKIQENLAYLATVDFDSLEFREKQLYLKSLINKIYIDGEQVTIEWL

SEQ ID NO: 1889 - protein, 485 aa, synthetic construct
MTKKVAIYTRVSTTNQAEEGFSIDEQTDRLTKYAEAMGWQVSDTYTDAGFSGAKLERPAMQRLINDIENKAFDTVLVYKLDRLSRSVRDTLYLVKDVFTKNKIDFVSLNESINTSSAMGSLFLTILSAINEFERENIKERMTMGKLGRAKSGKSMMWTKTAFGYYHNRKTGILEIVPLQATIVEQIFTDYLSGISLTKLRDKLNESGHIGKDIPWSYRTLRQTLDNPVYCGYIKFKGSLFEGMHKPIIPYETYLRVQKELDERQQRTYERNNNPRPFQAKYMLSGMARCGYCGAPLRIVLGHKRKDGSRTMKYHCANRFPRKTKGVTVYNDNKKCDSGTYDLSNLENTVIDNLIGFQENNDSLLKIINGNNQPILDTSCLKKQISQIDKKIQKNSDLYLNDFITMDELKDRTDSLQAEKRLLKAEISGNKVNDSTDVFELVKTQLGSIPINELSYDNKKKIVNNLVSKVDVTADNVDIIFKFQLG

SEQ ID NO: 1890 - protein, 469 aa, synthetic construct
MCYTTPVRAAVYLRISEDRSGEQLGVARQREDCLKLCDQRKWVPVEYLDNDVSASTGKRRPAYEQMLADITAGKVAAVVAWDLDRLHRRPIELEAFMSLADEKRLALATVAGDVDLATPQGRLVARLKGSVAAHETEHKKARQRRAARQKAERGHPNWSKAFGYLPGPNGPEPDPRTAPLVKQAYADILAGASLGDVCRQWNDAGAFTITGRPWTTTTLSKFLRKPRNAGLRAYKGARYGPVDRDAIVGKAQWSPLVDEATFWAAQAVLDAPGRAPGRKSVRRHLLTGLAGCGKCGNHLAGSYRTGGRVVYVCKACHGVAILADNIEPILYRIVAERLAMPDAVDLLRREFHDAAEAETIRLELVTLHGELDRLAVERAEGLLTARQVKISTDIVNAKITKLQARQLDQERLRVLDGIPLGTPQVAGMIAELSPDRFRAVFDVLAEVVVQPAGKGGRISNPERVQVNWR

SEQ ID NO: 1891 - protein, 452 aa, synthetic construct
MKAAIYIRVSTREQVENYSIQAQTEKLTALCRSKDWDVYDIFIDGGYSGSNMNRPALNEMLSKLHEIDAVVVYRLDRLSRSQRDTITLIEEYFLKNSVEFVSLSETLDTSSPFGRAMIGILSVFAQLERETIRDRMVMGKIKRIEAGLPLTTAKGRTFGYDVIDTKLYINEEEARQLQLIYDIFEEEQSITFLQRRLKKLGFKVRTYNCYNNWLTNDLYCGYVSYKDKVHVKGIHEPIISEEQFYRVQEIFTRMGKSPNMNRDSASLLNNLVVCSKCGLGFVHRRKDTMSRGKKYHYRYYSCKTYKHIYELEKCGNKIWRADKLEELIINRVNNYSLASRNVDREDELDSLSEKLEVEHAKKKRLFELYINGSYEMGEQDSMTNDIDAQINYYESQIEANEGLKRNKRIQENLAELATVDFDSLEFREKQLYLKSLINKIYIDGEQVTIEWL

SEQ ID NO: 1892 - protein, 469 aa, synthetic construct
MSYTTPVHAAVYLRISEDRSGEQLGVARQREDCLKLCDQRKWVPVEYLDNDVSASTGKRRPAYEQMLADITAGKIAAVVAWDLDRLHRRPMELEAFMSLADEKRLALATVAGDVDLATPQGRLVARLKGSVAAHETEHKKARQRRAARQKAERGYPNWNKAFGYLPGPNGPEPDPRTAPLVKQAYADILAGASLGDVCRRWNDAGALTITGRPWTTTTLSKFLRKPRNAGLRAYKGARYGPADRDAIVGKAQWSPLVDEATFWAAQAVLDAPGRAPGRKSVRRHLLTGLAGCGKCGNHLAGSYRTDGRVVYVCKACHGVAILADNIEPILYRIVAERLAMPDAVDLLRREIHDAAEAEAIRLELETLYGELDRLAVERAEGLLTARQVKISTDIVNAKITKLQARQLDQERLRVFDGIPLGTPQVAGVIAELSPDRFRAVLDVLAEVVVQPVGKSGRIFNPERMQVNWR

SEQ ID NO: 1893 - protein, 469 aa, synthetic construct
MSYTTPVRAAVYLRISEDRSGEQLGVARQREDCLKLCGQRKWEPVEYLDNDVSASTGKRRPAYEQMLADITAGKIAAVVAWDLDRLHRRPTELEAFMSLADEKRLALATVAGDVDLATPQGRLVARLKGSVAAHETEHKRARQRRAARQKAERGYPNWSKAFGYLPGPSGPEPDPRTAPLVKQAYADILAGASLGDVCRQWNDAGAFTITGRPWTATTLSKFLRKPRNAGLRVYKGARYGPVDRDAIVGKAQWSPLVDEATFWAAQAVLDAPGRAPGRKSVRRHLLTGLAGCGKCGNHLAGSYRTDGRVVYVCKACHGVAILADNIEPILYHIVAERLATPDAVDLLRREIHDAAEAETIRLELEALYDELDRLAVERAEGLLTARQVKISTDIVNAKITKLQARQLSQERLRVLDGIPLGTPQVAGMIAELSPDRFRAVLDVLAKVVVQPVGKSGRIFNPERVQVNWR

SEQ ID NO: 1894 - protein, 452 aa, synthetic construct
MKAAIYIRVSTREQVENYSIQAQTEKLTALCRSKDWDVYDIFIDGGYSGSNMNRPALNEMLSKLHEIDAVVVYRLDRLSRSQRDTITLIEEYFLKNNVEFVSLSETLDTSSPFGRAMIGILSVFAQLERETIRDRMVMGKIKRIEAGLPLTTAKGRTFGYDVIDTRLYINEEEAKQLQLIYDIFEEEQSITFLQKRLKKLGFKVRTYSRYNSWLTNDLYCGYVSYKDKVHVKGIHEPIISEEQFYRVQEIFTRMGKNPNMNRDSASLLNNLVVCGKCGLGFVHRRKDTMSRGKKYHYRYYSCKTYKHIHELEKCGNKIWRADKLEELIINRVNNYSFASRNVDKEDELDSLNEKLKVEQAKRKRLFDLYINGSYEVSELDSMMNDVDAQINYYESQIEASEELKKNKKIQENLANLATVDFDSLEFRERQLYLRSLINKIYIDGEQVTIEWL

SEQ ID NO: 1895 - protein, 485 aa, synthetic construct
MTRKVAIYTRVSTTNQAEEGFSIDEQIDRLTKYAEAMGWQVSNTYTDAGFSGAKLERPAMQRLINGIENKAFDTVLVYKLDRLSRSVRDTLHLVKDVFTKNKIDFISLNESIDTSSAMGSLFLTILSAINEFERENIKERMTMGKLGRAKSGKSMMWTKTAFGYYHNRETGILEIVPLQAAIVEQIFTDYLSGISLTKLRDKLNESGHIGKDIPWSYRTLRQTLDNPVYCGYIKFKDSLFEGMHKPIIPYETYLKVQKELEERQQQTYERNNNPRPFQAKYMLSGMARCGYCGAPLRIVLGHKRKDGSRTMKYHCANRFPRKTKGVTVYNDNKKCDSGTYDLSNLENTVIDNLIGLQENNDSLLKIINGNNQPILDTSSLKRRISQIDRKIQKNGDLYLNDFITMDELKDRTDSLQAEKKLLKAKISEDKFNDSTDVFELVKTQLGSVPINELSYDNKKKIVNNLVSKVDVTADSVDIIFKFQLA

SEQ ID NO: 1896 - protein, 469 aa, synthetic construct
MSYTTPVRAAVYLRISEDRSGEQLGVARQREDCLKLCDQRKWVPVEYLDNDVSASTGKRRPAYEQMLADITAGRIAAVVAWDLDRLHRRPIELEAFMSLADEKRLALATVAGDVDLATPQGRLVARLKGSVAAHETEHKKARQRRAARQKAERGHPNWSKAFGYLPGPNGPEPDPRTAPLVKQAYADILAGASLGDVCRQWNDAGAFTITGRLWTTTALSKFLRKPRNAGLRAYKGARYGPVDRDAIVGKAQWSPLVDEAAFWAAQAVLDAPGRAPGRKSVRRHLLTGLAGCGKCGYHLAGSYRTDGRVVYVCKACHGVAILADNIEPILYHIVAERLAMPDAVDLLRREIHDAAEAETIRLELEALYGELDRLAVERAEGLLTARQVKISTDIVNAKITKLQARQLDQERLRVFEGIPLGTPLVAGVIAELSPDRFRAVLDVLAEVVVQPVGKSGRIFSPERVQVNWR

SEQ ID NO: 1897 - protein, 469 aa, synthetic construct
MSYTTPVRAAVYLRISEDRSGEQLGVARQREDCLKLCDQRKWVPVEYLDNDVSASTGKRRPAYEQMLADITAGKIAAVVAWDLDRLHRRPIELEAFMSLADEKRLALATVAGDVDLATPQGRLVARLKGSVAAHETEHKKARQRRAARQKAERGHPNWSKAFGYLPGPSGPEPDPRTAPLVRQAYADILAGASLGDVCRQWNDAGAFTITGRPWTTTTLSKFLRKPRNAGLRAYKGARYGPVDRDAIVGKAQWSPLVDEATFWAAQAVLDAPGRAPGRKSVRRHLLTGLAGCGKCGNHLAGSYRTDGRVVYVCKACHGVSILADNIEPILYHIVAERLAVPDAVDLLRREIHDAAEAETIRLELETLYGELDRLAVERAEGLLTARQVKISTDIVNAKIAKLQARQLDQERLRVFEGIPLGTPQVAGTIAELSPNRFRAVLDVLAEVVVQPVGKSGRISNPERVQVNWR

SEQ ID NO: 1898 - protein, 469 aa, synthetic construct
MSYTTPVRAAVYLRISEDRSGEQLGVARQREDCLKLCGQRNWVPVEYLDNDVSASTGKRRPAYEQMLTDITAGKIAAVVAWDLDRLHRRPIELEAFMSLADEKRLALATVAGDVDLATPQGRLVARLKGSVAAHETEHKKARQRRAARQKAERGHPNWSKAFGYLPGPNGPEPDPRTAPLVKQAYEDILAGASLGDVCRQWNDAGAFTITGRPWTTTTLSKFLRKPRNAGLRAYKGARYGPVDRDAIVGKAQWSPLVDEATFWAAQAVLDAPGRAPGRKSVRRHLLTGLAGCGKCGNHLAGSYRTDGRVVYVCKACHGVAILADNIEPILYHIVVERLAMPDAVDLLCRESHDAAEAETIRLELETLYGELDRLAVERAEGLLTARQVKISTDIVNAKITKLQARQLDQERLRVFDGIPLGTPQVAGMIAELSPDRFRAVLDVLAEVVVQPVGKSGRIFNPERVQVNWR

SEQ ID NO: 1899 - protein, 452 aa, synthetic construct
MKAAIYIRVSTQEQVGNYSIQAQTEKLTALCRSKDWDVYDIFVDGGYSGSNMNRPALNEMLSKLHEIDAVVVYRLDRLSRSQRDTTTLIEEYFLKNNVEFVSLSETLDTSSPFGRAMIGILSVFAQLERETIRDRMVMGKIKRIEAGLPLTTAKGRTFGYDVIDTKLYINEEEAKQLQLIYDIFEEEQSITFLQKRLKRLGFKVRTYNRYSSWLTNDLYCGYVSYKDQVHVKGIHEPIISEEQFYRVQEIFTRMGKNPNMNRDSASLLSSLVVCSKCGLGFVHRSKDTMSRGKKYHYRYYSCKTYKHTHELEKCGNKTWRADKLEELIINRVSNYSFASRNVDKEDELDSLNEKLKIEHAKKKRLFDLYINGSYEVSELDSMMDDIDAQIDYYESQIEANEELKKNKKIQENLADLATVDFDSLEFREKQLYLKSLINKIYIDGEQVTIEWL

SEQ ID NO: 1900 - protein, 485 aa, synthetic construct
MTKKVAIYTRVSTTNQAEEGFSIDEQIDRLTKYAEAMGWQVSDTYTDAGTSGAKLERPAMQRLINDIENKAFDTVLVYKLDRLSRSVRDTLYLVKDVFTKNKIDFISLNESIDTSSAMGSLFLTILSAINEFERENIKERMAMGKLGRAKSGKSMMWTKTAFGYYHNRKTGILEIVPLQAAIVEQIFTDYLSGISLTKLRDKLNEGGHIGKDIPWSYRTLRQTLGNPVYCGYIKFKDSLFEGMHKPIIPYETYLKVQKELEERQQQTYERNNNPRPFQAKYMLSGMARCGYCGAPLKIVLGHKRKDGSRTMRYHCANRFPRKTKGVTVYNDNKKCDSGTYDLSDLENTVIDNLVGFQENNDSLLKIINGNNQPILDTSSFKKQISQIDKKIQKNSDLYLNDFITMDELKDRTDSLQAEKKLLKAKISENKFNDSTDVFELVKTQLGSIPINELNYDNKKKIVNNLVSKVDVTADSVDIIFKFQLA

SEQ ID NO: 1901 - protein, 485 aa, synthetic construct
MTKKVAIYTRVSTTNQAEEGFSIDEQIDRLTKYAEAMGWQVSDTYTDAGFSGAKLERPAMQRLINDIENKAFDTVLVYKLDRLSRSVRDTLYLVKDVFTKNKIDFISLNESINTSSAMGSLFLTILSAINEFERENIKERMTMGKLGRAKSGKSMMWTKTAFGYYHNRKTGILEIVPLQAAIVEQIFTDYLSGISLTKLRDKLNESGHIGKDIPWSYRTLRQTLDNPVYCGYIKFKDSLFEGMHKPIIPYETYLKVQKELEERQRQTYERNNNPRPFQAKYMLSGMARCGYCGAPLRIVLGHKRKDGSRTMKYHCANRSPRKTKGVTVYNDNKKCDSGAYDLSNLENTVIDSLIGFQENNDSLLEIINGNNQPILDTSSFKKQISQIDKKIQKNSDLYLNDFITMDELKDRTDSLQAEKKLLKAKISENKFNDSTDVLELVKTQLGSIPINELSYDNKKKIVNNLVSKVDVTADNVDIIFKFQLA

SEQ ID NO: 1902 - protein, 485 aa, synthetic construct
MTKKVAIYTRVSTTNQAEEGFSIDEQIDRLTKYAEAMGWQVSDTYTDAGLSGAKLERPAMQRLINDIGDKAFDTVLVYKLDRLSRSVRDTLYLVKDVFTKNKIDFISLNESIDTSSAMGSLFLTILSAINEFERENIKERMTMGKLGRAKSGKSMMWTKTAFGYYHNRKTGVLEIVPLQATIVEQIFTDYLSGISLTKLRDKLNESGHIGKAIPWSYRALRQTLDNPVYCGYIRFKDSLFKGMHKPIIPYETYLKVQKELEERQQQTYERNNNPRPFQAKYMLSGMARCGYCGAPLRIVLGHKRKDGSRTMKYHCANRFPRKTRGVTVYNDNKKCDSGTYDLCNLENTVIDNLTGFQEDNDSLLKIINGNNQPILDTSSFKKQISRIDKKIQKNSDLYLNDFITMDELRVRTDSLQAEKKLLKAKISENKFNDSTDVFELVKTQLGSIPISKLSYDDKKKIVNNLVSKVDVTADNVDIIFKFQLA

SEQ ID NO: 1903 - protein, 452 aa, synthetic construct
MKAAIYIRVSTREQVENYSIQAQTEKLTALCRSKDWDVYDIFIDGGYSGSNMNRPALNEMLSKLHEIDAVVVYRLDRLSRSQRDTITLIEEYFLKNNVEFVSLSETLDTSSPFGRAMIGILSVFAQLERETIRDRMVMGKIKRIEAGLPLTTAKGRTFGYDVIDTKLYINEEEAKQLQLIYDIFEEVQSITSLQKRLKKLGFKVHTYNRYNNWLTNDLYCGYVSYKDKVHVKGIHEPIISEEQFYRVQEIFTRMGKNPNMNRDSASLLNNLVVCSKCGLGFVHRRKDAMSRDKKYHYRYYSCKTYKHIHELEKCGNKIWRADKLEELIINRVNNYSFAGRNVDKEDELDSLNEKLKTEHAKKKRLFDLYINGRYEVSELDSMMNDIDAQIDYYESQIEANEELKKNKKIQEDLAYLATVDFDSLEFREKQLYLKSLINKIYIDGELVTIEWL

SEQ ID NO: 1904 - protein, 485 aa, synthetic construct
MTKKVAIYTRVSTTNQAEEGFSIDEQVDRLTKYAEAMGWRVSDTYTDAGFSGAKLQRPAMQRLINDIGNKVFDTVLVYKLDRLSRSVRDTLYLVKDVFTKNKIDFISLNESIDTSSAMGSLFLTILSAINEFERENIKERMTMGKLGRAKSGKSMMWTKTAFGYYHNRKTGILEIVPLQATIVEQIFTDYLSGISLTKLRDKLNESGHIGKDIPWSYRTLRQTLDNPVYCGYIKFKGSLFEGMHKPIIPYETYLKVQKELEKRQQQTYERNNNPRPFQAKYMLSGMARCGYCGAPLRIVLGHKRKDGSRTMKYHCANRFPRKTRGITVYSDNKKCDSGTYDLSNLENTVIDNLIGFQDNNDSLLKIINGNSQPILDTSSFEKQISQIDKKIQKNSDLYLNDFITMDELKDRTDSLQAEKRLLKAKISENKFNDSTDVFELVKTQLGSIPINELSYDNKKKIVNNLVSKVDVTADNVDIIFKFQLA

SEQ ID NO: 1905 - protein, 469 aa, synthetic construct
MCYTTPVRAAVYLRISEDRSGEQLGVARQREDCLKLCDQRKWVPVEYLDNDVSASTGKRRPAYEQMLADITAGEIAAVVAWDLDRLHRRPVELEAFMSLADEKRLALATVAGDVDLATPQGRLVARLKGSVAAHETEHKKARQRRAARQKAERGYPNWSKAFGYLPGPNGPEPDPRTAPLVKQAYADILAGASLGDVCRQWNDAGAFTITGRPWTTTTLSKFLRKPRNAGLRAYKGARYGPVDRDAVVGKAQWSPLVDEATFWAAQAILDAPGRAPGRKSVRRHLLTGLAGCGKCGNHLAGSYRTDGRVVYVCKACHGVAILADNIEPILYHIVAERLAMPDAVDLLRREIHDAAEAETIRLELETLYDELDRLAVERAEGLLTARQVKIGTDIVNAKITRLQARQLDQERLRVFDGIPLGTPQVAGMIAELSPDRFRAVLDVLAEVVVQPVGKGGRIFNPERVQVNWR

SEQ ID NO: 1906 - protein, 452 aa, synthetic construct
MKAAIYIRVSTREQVENYSIQAQTEKLTALCRSKGWDVYDIFIDGGYSGSNMNRPALNEMLSKLHEIDAVVVYRLDRLSRSQRDTITLIEEYFLKNNVEFVSLSETLDTSSPFGRAMIGILSVFAQLERETIRDRMVMGKIKRIEAGLPLTTAKGRTFGYDVIDTKLYINEEEAKQLRLIYDIFEEEQSITFLQKRLKKLGFKVRTYNRYNNWLTNDLYCGYVSYKDKVHVKGIHEPIISEEQFYRVQEIFTRMGKNPNMNRDSASLLNNLVVCSKCGLGFVHRRKDAMSRDKKYHYRYYSCKTYKHIHELEKCGNKIWRADKLEELIINRVNNYSVASRNVDKEDELDSLNEKLKTEHAKKKRLFDLYINGSYEVSELGSMMNDIDAQINYYESQIEANEELKKTKKIRENLADLATVDFDSLEFREKQLYLKSLINKIYIDGEQVTIEWL

SEQ ID NO: 1907 - protein, 469 aa, synthetic construct
MSYTTPVRAAVYLRISEDRSGEQLGVARQREDCLKLCGQRKWVPVEYLDNDVSASTGKRRPAYEQMLADITAGKIAAVVAWDLDRLHRRPIELEAFMSLADEKRLALATVAGDVDLATPQGRLVARLKGSVAAHETEHKKARQRRAARQKAERGHPNWSKAFGYLPGPNGPEPDPRTAPLVRQAYADILAGASLGDVCRQWNDAGAFTITGRPWTTTTLSKFLRKPRNAGLRAYKGARYGPVDRDAIVGKAQWCPLVDEATFWAAQAVLDAPGRAPGRKSVRRHLLTGLAGCGKCGNRLAGSYRTDGQIVYVCKACHGVSILAVNIEPILYRIVAERLAMPDAVDLLRRGIHDAAEAETIRLELETLYGELDRLAVERAEGLLTARQVKISTDVVNAKITKLQARQLDQERLRVLDGIPLGTPQVAGMIAELCPDRFRAVLDVLAEVVVQPVGKSGRILNPERVQVNWR

SEQ ID NO: 1908 - protein, 452 aa, synthetic construct
MKAAIYIRVSTREQVENYSIQAQTEKLTALCRSKDWDVYDIFIDGGYSGCNMNRPALNEMLSKLHEIDAVVVYRLDRLSRSQRDTITLIEEYFLKNSVEFVSLSETLDTSSPFGRAMIGILSVFAQLERETIRDRMVMGKIKRIEAGLPLTTAKGRTFGYDVIDTKLYINEEEAKQLRLIYDIFEEEQSITFLQKRLKKLGFKVHTYNRYNNWLTNDLYCGYVSYKDKVHVKGIHEPIISEEQFYRVQEIFARMGKNPNMNRDSASLLNNLVVCGKCGLGFVHRRKDAMSRDKKYHYRYYSCKTYKHIHELEKCGNKIWRADKLEELVISRVNNYSLASRDVDKEDELDSLNEKLKIEHAKKKRLFDLYVNGNYEVSELDSMMSDIDAQISYYESQIEANEELKKNKKIQENLAYLATVDFDSLEFREKQLYLKSLINKIYIDGEQVTIEWL

SEQ ID NO: 1909 - protein, 469 aa, synthetic construct
MSHTTPVRAAVYLRISEDRSGEQLGVARQREDCLKLCDQRKWEPVEYLDNDVSASTGKRRPAYEQMLADITAGKIAAVVAWDLDRLHRRPIELEAFMSLADEKHLALATVAGDVDLATPQGRLVARLKGSVAAHETEHKKARQRRAARQKAERGYPNWSKAFGYLPGPNGPEPDPRTAPLVKQAYADILAGASLGDVCRQWNDAGAFTITGRPWTTTTLSKFLRKPRNAGLRAYKGARYGPVDRDAIVGKAQWSLLVDEATFWAAQAVLDAPGRAPGRKSVRRHLLTGLAGCGKCGNHLAGSYRTDGRVVYVCKACHGVAILADNIEPILYHIVAERLAMPDAVDLLRREIHDAVEAETIRLELETLYGELDRLAVERAEGLLTARQVKISTDIVKAKITKLQTCQLDQERLRVLDGIPLGTPRVAGMIAELSPDRFRAVLDVLAEVVVQPVGKGGRIFSPERVQVNWR

SEQ ID NO: 1910 - protein, 452 aa, synthetic construct
MKAAIYIRVSTREQVENYSIQAQAEKLTALCRSKDWDVYDVFVDGGYSGSNMNRPALNEMLSKLHEIDAVVVYRLDRLSRSQRDTITLIEEYFLKNNVEFVSLSETLDTSSPFGRAMIGILSVFAQLERETIRDRMVMGKIKRIEAGLPLTTAKGRTFGYDVIDTKLYINEEEAKQLQLIYDIFEEEQSITLLQKRLKKLGFKVRTYSRYNNWLTNDLYCGYVSYKDKVHVKGIHEPIISEEQFYRVQEIFTRMGKNPNMNRDSASLLNGLVVCSKCGLGFVHRRKDTTSRGKKYHYRYYSCKTYKHIHELEKCGNKIWRADKLEELVINRVNNYSFASRNVDKEDELDSLNEKLKIERTKRKRLFDLYINGSYEVSELDSMMNDIDAQINYYESQIEANEELKKNKKIQDNLAELATVDFGRLEFREKQLYLKSLINKIYIDGEQVTIEWQ

SEQ ID NO: 1911 - protein, 452 aa, synthetic construct
MKAAIYIRVSTQEQVENYSIQAQTEKLTALCRSKDWDVYDIFIDGGYSGSNMNRPALNEMLSKLHEIDAVVVYRLDRLSRSQRDTITLVEEYFLKNNVEFVSLSETLDTSSPFGRAMIGILSVFAQLERETIRDRMVMGKIKRIEAGLPLTTAKGRTFGYDVIDTKLYINEEEARQLQLIYDIFEEEQSITFLQKRLKRLGFKVHTYNRYNNWLTNDLYCGYVSYKDKVHVKGIHEPIISEEQFYRVQEIFTRMGKNPNMNRGSASLLSNLVVCSKCGLSFVHRRKDTTSRGKKYHYRYYCCKTYKHIHELEKCGNKIWRADKLEELVINRVNNYSFASRNVDKEDELDSLNEKLKIEHAKKKRLFDLYINGSYNVSEQNSMMNDIDAQINYYESQIEANEELKKNKKIQENLAGLATVDFDSLEFREKQLYLKGLINKIYIDGEQVTIEWL

SEQ ID NO: 1912 - protein, 485 aa, synthetic construct
MTKKVAIYTRVSTTNQAEEGFSIDEQIDRLTKYAEAMGWQVCDTYTDAGFSGAKLERPAMQRLINDIENKAFDTVLVYKLDRLSRSVRDTLYLVKEVFTKNKIDFISLNESIDTSSAMGSLFLTILSAINEFERENIKERMTMGKLGRAKSGKSMMWTKTAFGYYHNRKTGILEIVPLQATIVEQIFTDYLSGISLTKLRDKLNESGHIGKDIPWSYRTLRQTLDNPVYCGYIKFKDSLFEGMHKPIIPYETYLKVQKELEERQQQAYERNNNPRPFQAKYMLSGMARCGYCGAPLRIVLGHKRKDGSRTMKYHCANRYPRKTKGVTVYNDNKKCDSGTYDLSNLENTVIDNLIGFQENNDSLLEIINGNNQPILDTSSFKKQISQIDKKIQKNSDLYLNDFITMDELKNRTDSLQAEKKLLKAKISENELNGSTDVFELVKTQLGSIPINELSYDNKKKIVNSLVSKVDVTADNVDIIFKFQLA

SEQ ID NO: 1913 - protein, 452 aa, synthetic construct
MKAAIYIRVSTQEQVGNYSIQAQTEKLTALCRSKDWDVYDIFIDGGYSGSNMNRPALNEMLSKLHEIDAVVVYRLDRLSRSQRDTTTLIEEYFLKNNVEFVSLSETLDTSSPFGRAMIGILSVFAQLERETIRDRMVMGKIKRIEAGLPLTTAKGRTFGYDVIDTKLYINEEEAKQLRLIYDIFEEEQSITSLQKRLKKLGFKVRTYNRYSNWLTNDLYCGYVSYKDKVHVKGVHEPIISEEQFYRVQEIFTRTGKSPNMNRDSASLLNNLVVCSKCGLSFVHRSKDTMSRGKKYHYRYYSCKTYKHTHELEKCGNKTWRADKLEELIINRVNNYSFASRNVDKEDELDGLNEKLKIEHAKKKRLFDLYINGSYEVSELDSMMSDIDAQINYYESQIEANEELKKNKKIQENLADLATVDFDSLEFREKQLYLKSLINKIYIDGEQVTIEWL

SEQ ID NO: 1914 - protein, 452 aa, synthetic construct
MKAAIYIRVSTQEQVGNYSIQAQTEKLTALCRSKDWDVYDIFIDGGYSGSNMNRPALNEMLSKLHEIDAVVVYRLDRLSRSQRDTTTLIEEYFLKNNVEFVSLSETLDTSSPFGRAMIGILSVFAQLERETIRDRMVMGKIKRIEAGLPLTTAKGRTFGYDVIDTKLYINEEEAKQLQLIYDIFEEEQSITFLQKRLKKLGLKVHTYNRYNNWLTNDLYCGYVSYKDKVHVKGIHEPIISEEQFYRVQEIFTRMGKNPNMNRDSASLLNSLVVCSKCGLGFVHRSKDTMNRGKKYHYRYYSCKTYKHAHELEKCGNKIWRADKLEELIINRVNNYSFASRNVDKEGELDSLNEKLRIEHGKKKRLFDLYINGSYEVSELDSMMSDIDAQINHYESQIEANEKLKKNKKIQENLADLATVDFDSLEFREKQLYLKSLISKIYIDGEQVTIEWL

SEQ ID NO: 1915 - protein, 452 aa, synthetic construct
MKAAIYIRVSTREQVENYSIQAQTEKLTALCRSKDWDVYDIFVDGGYSGSNMNRPALNEMLSKLHEIDAVVVYRLDRLSRSQRDTITLIEEYFLKNNVEFVSLSETLDTSSPFGRAMIGILSVFAQLERETIRDRMVMGKIKRIEAGLPLTTAKGRTFGYDVIDTKLYINEEEAKQLQLIYDIFEEEQSITSLQKRLKKLGFKVRSYNRYNNWLTNDLYCGYVSYKDKVHVKGIHEPIISEEQFYRVQEIFTRMGKSPNMNRDSASLLNSLVVCSKCGLGFVHRRKGTMSRGKKYHYRYYCCKTYKHIHELEKCGNKIWRADKLEELIINRVNNYSFASRNADKEDELDSLNEKLKTEHAKKKRLFDLYVNGSYEVSELDSMMSDIDAQINYYESQIEANEELKRNKKIQENLAYLATVDFGSLEFREKQLYLKSLINKIYIDGEQVTIEWL

SEQ ID NO: 1916 - protein, 452 aa, synthetic construct
MKAAIYIRVSTREQVENYSIQAQTEKLTALCRSKDWDVYDIFIDGGYSGSNMNRPALIEMLSKLHEIDAVVVYRLDRLSRSQRDTITLIEEYFLKNNVEFVSLNETLDTSSPFGRAMIGILSVFAQLERETIRDRMVMGKIKRIEAGLPLTTAKGRTFGYDVIDTKLYINEEEAKQLQLIYDIFEEEQSITSLQKRLKELGFKVRTYNRYNNWLTNDLYCGYVSYKDKVHVKGIHEPIISEEQFYRVQEIFTRMGKNPNMNRDSASLLNNLVVCSKCGLGFVHRRKDAMSRDKKYHYRYYSCKTYKHIHELEKCGNKIWRADELEELIINRVNNYSLASRNVDKEDGLDSLNEKLKIEHAKKKRLFDLYINGNYEVSELDSMMNDIDAQINYYESQIEANEELKKNKKIQENLANLATLDFDSLEFREKQLYLKSLINKIYIDGEQVTIEWL

SEQ ID NO: 1917 - protein, 452 aa, synthetic construct
MKAAIYIRVSTREQVENYSIQAQTEKLTALCRSKDWDVYDIFIDGGYSGSNMNRPALNEMLNKLHEIDAVVVYRLDRLSRSQRDTITLIEEYFLKNNVEFVSLSETLDTSSPFGRAMIGILSVFAQLERETIRDRMVMGKIKRIEAGLPLTTAKGRTFGYDVIDTKLYINEEEAKQLRLIYDIFEEEQSITFLQKRLKKLGLKVRTYNRYNNWLTNDLYCGYVSYKDKVHVKGIHEPIISEEQFYRVQEIFTRMGKNPNMNRDSASLLNNLVVCSKCGLGFVHRRKDAMSRDKKYHYRYYSCKTYKHIHELEKCGNKIWRADKLEELIINRVNNYSIASRNADKEDELDSLDEKLKIEHAKKKRLFELYINGSYEVSELDSMMNDIDAQINYYESQIEANKELKKNKKIQENLAGLATVDFDSLEFREKQRYLKGLINKIYIDGEQVTIEWL

SEQ ID NO: 1918 - protein, 452 aa, synthetic construct
MKAAIYIRVSTQEQVGNYSIQAQTEKLTALCRSKDWDVYDIFVDGGYSGSNMNRPALNEMLSKLHEIDAVVVYRLDRLSRSQRDTTTLIEEYFLKNNVEFVSLSETLDTSSPFGRAMIGILSVFAQLERETIRDRMVMGKIKRIEAGLPLTTAKGRTFGYDVIDTKLYINEEEAKQLRLIYDIFEEEQSITSLQKRLKNLGFKVRTYNRYNNWLTNDLYCGYVSYKDKVHVKGIHEPIISEEQFYRVQEIFTRMGKNPNMNRDSASLLNGLVVCSRCGLGFVHRSKDTMSRGKKYHYRYYSCKTYKHTHELEKCGNKTWRADKLEELIINRVNNYIFVSRNVDKEDELDNLNEKLKIELAKKKRLFDLYINGSYEVCELDSMMNDIDAQINYYESRIEANEELKKNKKIQESLANLATVDFDSLEFREKQLYLKSLINKIYIDGEQVTIEWL

SEQ ID NO: 1919 - protein, 452 aa, synthetic construct
MKAAIYIRVSTREQVENYSIQAQTEKLTALCRSKDWDVYDIFIDGGYSGSNMNRPALNEMLSKLHEIDAVVVYRLDRLSRSQRDTITLIEEYFLKNNVEFVSLSETLDTSSPFGRAMIGILSVFAQLERETIRDRMVMGKIKRIEAGLPLTTAKGRTFGYDVIDTKLYINEEEAKQLQLIYDIFEEEQSITFLQKRLKELGFKVRTYNRYNNWLTNDLYCGYVSYKDKVHVKGIHEPIISEEQFYRVQEIFTRMGKNPNMNRDSASLLNNLVVCSKCGLGFVHRRKDAMSRDKKYHYRYYSCKTYKHIHELEKCGNKIWRADKLEELIIDRVINYSLASRNVDKEDELGSLNEKLKAEHAKKKRLFDLYINGSYEVSELDSMMNDIDTQINYYESQIEANEELKKNKQIQENLANLATVDFDSLEFREKQLYLKSLINKIYIDGEQVTIEWL

SEQ ID NO: 1920 - protein, 469 aa, synthetic construct
MSYTTPVRAAVYLRISEDRSGEQLGVARQREDCLKLCDQRKWVPVEYLDNDVSASTGKRRPAYEQMLADITAGEIAAVVAWDLDRLHRRPIELEAFMSLADEKRLALATVAGDVDLATPQGRLVARLKGSVAAHETEHKKARQRRAARQKAERGHPNWSKAFGYLPGPNGPEPDPRTAPLVKQAYADILAGASLGDVCRQWNDAGAFTITGRPWTTTTLSKFLRKPRNAGLRAYKGARYGPVDRDAIVGKAQWSPLVDEATFWAAQAVLDAPGRAPGRKSVRRHLLTGLAGCGKCGNHLAGSYRTDGRIVYVCKACHGVAILADNIEPILYHIVAERLAMPDAVDLLRHEAHDAAEAVTIRLELETLYGELDRLAVERAEGLLTARQVKISTDIVNAKITKLQARQLDQERLRVLDGIPLGTPQVAGAIAELSPDRFRAVLDVLAEVVVQPVGKGGRIFNPERVQVNWR

SEQ ID NO: 1921 - protein, 469 aa, synthetic construct
MSYTTPVRAAVYLRISEDRSGEQLGVARQREDCLKLCGQRKWVPVEYLDNDVSASTGKRRPAYEQMLADITAGKIAAVVAWDLDRLHRRPIELEAFMSLADEKRLALATVAGDVDLATPQGRLVARLKGSVAAHETEHKKARQRRAARQKAERGYPNWSKAFGYLPGPNGPEPDPRTAPLVKQAYTDILAGASLGDVCRQWNDAGAFTITGRPWTSTTLSKFLRKPRNAGLRAYKGARYGPVDRDAIVGKAQWRPLVDEATFWAAQAVLDAPGRAPGRKSVRRHLLTGLAGCGKCGHHLAGSYRTDGRVVYVCKACHGVAILADNIEPVLYHIVAERLAMPDAVDLLRREIHDAAEAETIRLELETLYGELDRLAVERAEGLLTARQVKISTDIVNAKITKLQARQLDQERLRVFDGIPLGTPQVAGMIAELSPDRFRAVLDVLAEVVVQPVGKSGRIFNPERVQVSWR

SEQ ID NO: 1922 - protein, 469 aa, synthetic construct
MSYTTPVRAAVYLRISEDRSGEQLGVARQREDCLKLCDQRKWVPVEYLDNDVSASTGKRRPAYEQMLADITAGKIAAVVAWDLDRLHRRPIELEAFMSLADEKRLALATVAGDVDLATPQGRLVARLKASVAAHETEHKKARQRRAARQKAERGYPNWSKAFGYLPGPNGPEPDPRTAPLVKQAYADILAGASLGDVCRQWNDAGAFTITGRPWTTTTLSKFLRKPRNAGLRAYKGARYGPVDRDAIVGMAQWSPLVDEATFWAAQAVLDAPGRAPGRKSVRRHLLTGLAGCGKCGNHLAGSYRTDGQVVYVCKACYGVAILADKIEPILYHIVAERLAMPDAVDLLCREIHDAAEAETIRLELGTLYGELDRLAVERAEGLLTARQVKISTDIVNAKITKLQAHQLDQERLRVFDGIPLGTPQVAGMIAELSPDRFRAVLDVLAEVVVQPVGKSGRIFNPERVQVNWR

SEQ ID NO: 1923 - protein, 485 aa, synthetic construct
MTKKVAIYTRVSTTNQAEEGFSIDEQTDRLTKYAEAMGWQVSDTYTDAGFSGAKLERPAMQRLINDIENKAFDTVLVYKLDRLSRSVRDTLYLVKDVFTKNKIDFISLNESINTSSAMGSLFLTILSAINEFERENIKERMTMGKLGRAKSGKSMMWTKTAFGYYHNRKTGILEIVPLQATIVEQIFTDYLSGMSLTKLRDKLNESGHIGKDIPWSYRTLRQTLDNPVYCGYIKFKDSLFEGMHKPIIPYETYLKVQKELGERQQQTYERNNNPRPFQAKYMLSGTARCGYCGAPLKIVLGHKRKDGSRTMKYHCANRFPRKTKGVTVYNDNKKCDSGTYDLSSLENTVIDNLIGFQENNDSLLKIINGNNQPILDTSSFKKQISQIDKKIQKNSDLYLNDFITMDELKDRTDSLQAEKKLLEAKISENKFNDSTDVFELVKTQLGSIPINELSYDNKKKIVNNLVSKVDVTADNVDIIFKFQPA

SEQ ID NO: 1924 - protein, 485 aa, synthetic construct
MTKKVAIYTRVSTTNQAEEGFSIDEQIDRLTKYAEAMGWQVSDTYTDAGLSGAKLERPAIQRLINDIEDKAFDTVLVCKLDRLSRSVRDTLYLVKDVFTKNKIDFISLNESIDTSSAMGSLFLTILSAINEFERENIKERTTMGKLGRAKSGKSMMWTKTAFGYYHNRKTGILEIVPLQATIVEQIFTDYLSGISLTKLRDKLNESGHIGKDIPWSYRTLRQTLDNPVYCGYIKFKDSLFEGMHKPIISYETYLKVQKELGERQQQTYERNNNPRPFQAKYMLSGMARCGYCGAPLRIVLGHKRKDGSRTMKYHCANRFPRKTKGVTVYNDNKKCDSGTYDLSSLENTVIDNLIGLQENNDSLLKIINDNNQPILDTSSFRKRIGQIDKKIQKNSDLYLNDFITMDELKNRTDSLQAEKRLLKAKISENKFNDSTDVFELVKTQLGSIPINELSYDNKKKIVNNLVSKVDVTADNVDIIFKFQLA

SEQ ID NO: 1925 - protein, 485 aa, synthetic construct
MTKKVAIYTRVSTTNQAEEGFSIDEQIDRLTKYAEAMGWQVSDTYTDAGFSGAKLERPAVQRLINDIENKAFDTVLVYKLDRLSRSVRDTLYLVKDVFTKNKIDFISLNESIDTSSAMGSLFLTILSAINEFERENIKERMTMGKLGRAKSGKSMMWTKTAFGYYHNRKTGILEIVPLQAAIVEQIFTDYLSGISLTKLRDKLNESGHIGKDIPWSYRTLRQTLDNPVYCGYIKFKGSLFEGMHKPIIPYETYLKVQKELEERQQQTYERNNNPRPFQAKYMLSGMARCGYCGAPLRIVLGHKRKDGSRTMKYHCANRFPRRTKGVTVYNGNKKCDSGTYDLSNLENTVIDNLVGFQENNDSLLKIINGNNQPILDTSSFKKQISQIDKKIQKNSDLYLNDFITMDELKDRTDSLQAEKKLLKAKISENKFNDSTDVSELVKTQLGSIPINELSYDNKKKIVNNLVSKVDVTADNVDIIFKFQLA

SEQ ID NO: 1926 - protein, 485 aa, synthetic construct
MTKKVAIYTRVSTTSQAEEGFSIDEQTDRLTKYAEAMGWQVSDTYTDAGFSGAKLERPAMQRLINDIENKAFDTVLVYKLDRLSRSVRDTLYLVKDVFTKNKIDFISLNESIDTSSAMGSLFLTILSAINEFERENIKERMTMGKLGRAKSGKSMMWTKTAFGYYHNRKTGILEIVPPQATIVEQIFTDYLSGISLTKLRDKLNESGHIGKDIPWSYRTLRQTLDNPVYCGYIKFKDSLFEGMHKPIIPYETYLKVQKELEERQQQAYERNNNPRPFQAKYMLSGMARCGYCGAPLKIVLGHKRKDGSRTMKYHCANRFPRKTKGVTVYNDNKKCDSGTYDLSNLENTVIDNLIGFQENNDSLLKIINGSDQPILDTSSFKEQISQIDKKIQKNSDLYLNDFITMDELKARTDSLQAEKKLLEAKISENKFNDSTDVFELVKTQLGSIPINELSYDNKKKVVNSLVSKVDVTADNVDIIFKFQLA

SEQ ID NO: 1927 - protein, 452 aa, synthetic construct
MKAAIYIRVSTREQVENYSIQAQTEKLTALCRSKDWDVYDIFIDGGYSGSNMNRPALNEMLSKLHEIDAVVVYRLDRLSRSQRDTITLIEEYFLKNNVEFVSLSETLDTSSPFGRAMIGILSVFAQLERETIRDRMVMGKIRRIEAGLPLTTAKGRTFGYDVIDTKLYINEEEAKQLQLIYDIFEEEQSITFLQKRLKKLGFKVRTYSCYNNWLTNDLYCGYVSYKDKVHVKGIHEPIISEEQFYRVQEIFTRMGKSPNMNRDSASLLSNLVVCSKCGLGFVHRRKDTMSRGKKYHYRYYSCKTYKHVHELEKCGNKIWRADKLEELIINRVNNYSFASRDVDKEDELDSLNEKLKIEQAKRRRLFDLYINGSYNVSELDSMMNDIDAQINYYESQIEANGELKKNKRIQENLADLATVDFDSLEFREKQLYLKSLINKIYIDGEQVTIEWL

SEQ ID NO: 1928 - protein, 452 aa, synthetic construct
MKAAIYIRVSTREQVENYSIQAQTEKLTALCRSKDWDVYDIFIDGGYSGSNMNRPALNEMLSKLHEIDAVVVYRLDRLSRSQRDTITLIEEYFLKNNVEFVSLSETLDTSSPFGRAMIGILSVFAQLERETIRDRMVMGKIKRIEAGLPLTTAKGRTFGYDVIDTKLYINEEEAKQLQLIYDIFEEEQSITFLQKRLKKLGFKVRTYNRYNNWLTNDLYCGYVSYKDKVHVKGIHEPIISEEQFYRVQEIFTRMGKNPNMNRDSASLLNNLVVCGKCGLGFVHRRKDAASRDKKYHYRYYSCKTYKHIHELEKCGNKIWRADKLEELIVNRVNNYSFASRNADKEDELDSLNEKLKTEHAKKKRLFDLYINGSYEVSELDSMMSDIDAQIGYYEGQIEANKGLRKNKKIQENLAHLATVDFDSLEFREKQLYLKSLINKIYIDGEQVTIEWL

SEQ ID NO: 1929 - protein, 485 aa, synthetic construct
MTKKVAIYTRVSTTNQAEEGFSIDEQIDRLTKYAEAMGWQVSDTYTDAGFSGAKLERPAMQRLINDIENKAFDTVLVYKLDRLSRSVRDTLHLVKDVFTKNKIDFISLSESIDTSSAMGSLFLTILSAINEFERENIKERMTMGKLGRAKSGKSMMWTKTAFGYYHNRKTGILEIVPLQATIVEQIFTDYLSGISLTKLRDKLNESGHIGKEIPWSYRTLRQTLDNPVYCGYIKFKGSLFEGMHKPIIPYETYLKVQKELEERQQQTYGRNNNPRPFQAKYMLSGMARCGYCGAPLRIVLGHKRKDGSRTMKYHCANRFPRKTKGVTVYNDNKKCDSGTYDLSYLENTVIDNLIGFQENNDSLLKIINGNNQPTLDTSSFKKRISQIDKKIQKNSDLYLNDLITMDELKDRTDSLQAEKKLLKAKISENKFNDSTDVFELVRTQLGSIPINDLSYDNKKKIVNNLVSKVDVTADNVDIIFKFQLA

SEQ ID NO: 1930 - protein, 469 aa, synthetic construct
MSYTTPVRAAVYLRISEDRSGEQLGVARQREDCLKLCDQRKWVPVEYLDNDVSASTGKRRPAYEQMLADITAGKIAAVVAWDLDRLHRRPIELEAFMSLADEKHLALATVAGDVDLATPQGRLVARLKGCVAAHETEHKKARQRRAARQKAERGLPNWSKAFGYLPGPNGPEPDPRTAPLVRQAYADILAGASLGDVCRQWNDAGAFTITGRPWTTTTLSKFLRKPRNAGLRAYKGARYGPVDRNAIVGKAQWSPLVDEATFWAAQAVLDAPGRAPGRKSVRRHLLTGLAGCGKCGNHLAGSYRTDGRVVYVCKACHGIAILADNIEPFLYHIVAERLAMSDAVDLLRREIHDAAEAETIRLELETLYGELDRLAVERAEGLLTARQVKISTDIVNAKITKLQARQLDQERLRVLDGIPLGTPQVAAMIAELSPDRFRAVLDVLAEVVVQPAGKSGRIFNPERVRVNWR

SEQ ID NO: 1931 - protein, 469 aa, synthetic construct
MSYTTPVRAAVYLRISEDRSGEQLGVARQREDCLELCGQRKWVPVEYLDNDVSASTGKRRPAYEQMLADITAGKIAAVVAWDLDRLHRRPIELEAFMSLADEKRLALATVAGDVDLATPQGRLVARLKGCVAAHETEHKKARQRRAARQKAERGHPNWSKAFGYLPGPNGPEPDPRTAPLVKQAYADILAGASLGDVRRQWNDVGAFTITGRPWTTAALSKFLRKPRNAGLRAYKGARYGPVDRDAIVGKAQWSPLVDEATFWAAQAVLDAPGRAPGRKSVRRHLLTGLAGCGKCGNHLAGSYRTDGQVVYVCKACYGVAILADNIVPILYHVVAERLAMPDAVDLLRHEIHDAAEAEAIRLELETLYGELDRLAVERAEGLLTARQVKISTDIVNAKITKLQACQQDQERLRVFDGIPLGTPQVAGKIAELSPDRFRAVLDVLAEVVVQPAGKSGRTFNPERVQVNWR

SEQ ID NO: 1932 - protein, 485 aa, synthetic construct
MTKKVAIYTRVSTTNQAEEGFSIDEQIDRLTKYAEAMGWQVSDTYTDAGFSGAKLERPAMQRLISDIENKAFDTVLVYKLDRLSRSVRDTLYLVKDVFTKNKIDFISLNESINTSSAMGSLFLTILSAINEFERENIKERMTMGKLGRAKSGKSMMWTKTAFGYYHNRKTGILEIVPLQATIVEQIFTDYLSGISLTKLRDKLNESGHIGKDIPWSYRTLRQTLDNPVYCGYIKFKDSLFEGMHKPIIPYETYLKVQRELEERQQQTYERNNNPRPFQAKYMLSGMARCGYCGAPLKIVLGHKRKDGSRTMKYHCANRFPRKTKGVTVYNDNKKCDSGTYDLSNLENTVIDNLIGFQENNDSLLKIINGNSQPILDTSSFKKQISQIDEKIQKNSDLYLNDFITMDELKARTDSLQAEKKLLKAKISENKFNDSTDVFELVKTQLGSVPINELSYDNKKKIVNDLVSKVDVTADNVDIIFKFQLA

SEQ ID NO: 1933 - protein, 485 aa, synthetic construct
MTKKVAIYTRVSTTNQAEEGFSIDEQIDRLTKYAEAMGWQVSDTYTDAGFSGAKLERPAMQRLINGIENKAFDTVLVYKLDRLSRSVRDTLYLVKDVFTKNKIDFISLNESINTSSAMGSLFLTILSAINEFERENIKERMTMGKLGRAKSGKSMMWTKTAFGYYHNRNTGILEIVPLQAAIVEQIFTDYLSGISLTKLRDKLNESGHIGKDIPWSYRTLRQTLDNPVYCGYIKFKDSLFEGMHKPIIPYETYLKVQKELEERQQQAYERNNNPRPFQAKYMLSGMARCGYCGAPLKIVLGHKRKDGSRTMKYHCANRFPRKTRGVTVYNDNKKCDSGTYDLSNLEDTVIDNLVGFQENNDSLLKIINGNNQPILDTSSFERQISQIDKKIQKNSDLYLNDFITMEELKERTDSLQAEKKQLKAKISENKFNGSTDVLELVKTQLGSIPINELSYDNKKKIVNDLVSRVDVTADNVDIIFKFQLA

SEQ ID NO: 1934 - protein, 485 aa, synthetic construct
MTKKVAIYTRVSTTNQAEEGFSIDEQIDRLTKYAEAMGWQVSDTYTDAGLSGAKLERPAMQRLINDIGNKAFDTVLVYKLDRLSRSVRDTLYLVKDVFTKNKIDFISLNESIDTSSAMGSLFLTILSAINEFERENIKERMTMGKLGRAKSGKSMMWTKTAFGYYHNRKTGILEIVPLQATIVEQIFTDYLSGISLTKLRDKLNGSGHIGKDIPWSYRTLRQTLDNPVYCGYIKFKDSLFEGMHKPIIPYETYLKVQKELEERQQRAYERNNNPRPFQAKYMLSGMARCGYCGAPLRIVLGHKRKDGSRTMKYHCANRFPRKTKGVTVYNDNKKCDSGTYDLSNLENTVINNLIGFQGNDDSLLKIINGNNQPIPDTSSFEKQISQIDKKIQKNSDLYLNDFITMDELKDRTDSLQAEKKLLKAKISENKFNDSTDVFELVKTQLGSIPINELSYDDKKKIVNNLVSKVDVTADSVDIIFKFQLA

SEQ ID NO: 1935 - protein, 485 aa, synthetic construct
MTKKVAIYTRVSTTNQAEEGFSIDEQIDRLTKYAEAMGWQVSDTYTDAGLSGAKLERPAMQRLINDIENKAFDTVLVYKLDRLSRSVRDTLYLVKDVFTKNKIDFISLNESIDTSSAMGSLFLTVLSAINEFERENIKERMTMGKLGRAKSGRSMMWTKTAFGYYHNRETGILEIVPLQATIVEQIFTDYLSGISLTKLRDKLNESGHIGKDIPWSYRTLRQTLDNPVYCGYIKFKDSLFEGLHKPIIPYETYLKVQKELEERQQQTYERNNNPRPFQAKYMLSGMARCGYCGAPLRIVLGRKRKDGSRTVKYHCANRFPRKTKGVTVYNDNKKCDSGTYDLSNLENTVIDNLIGFQENNDSLLKIINGNNQPILDTSSFKEQISQIDKKIQKNSDLYLNDFITMDELKDRTDSLQAEKKLLKAKVSENKFNDSTDVFELVKTQLGSIPINELSYDDKKKIVNNLVSKVDVTADNVDIIFKFQLA

SEQ ID NO: 1936 - protein, 452 aa, synthetic construct
MKAAIYIRVSTREQVENYSIQAQTEKLTALCRSKDWDVYDIFIDGGYSGSNMNRPALNEMLSKLHEIDAVVVYRLDRLSRSQRDTITLIEEYFLKNNVEFVSLSETLDTSSPFGRAMIGILSVFAQLERETIRDRMVMGKIKRIEAGLPLTTAKGRTFGYDVIDTKLYINEEEAKQLQLIYDIFEEEQSITFLQKRLKKLGFKVRTYNRYNNWLTNDLYCGYVSYKDKVHVKGIHEPIISEEQFYRVQEIFARMGKNPNMNRDSASLLNNLVVCSKCGLGFVHRRKDATSRDKKYHYRYYSCKTYKHIHELEKCGNKIWRADKLEELIINRVNSYSLVSRNVDKEDELDSLNEKLKIEHAKKKRLFDLYINGSYEVSELDSMMSDIDAQINYYESRIEANEELRKNKKIQENLADLATVDFDSLEFREKQLYLKSLINKIYIDGEQVTIEWL

SEQ ID NO: 1937 - protein, 452 aa, synthetic construct
MKAAIYIRVSTREQVENYSIQAQTEKLTALCRSKDWDVYDIFIDGGYSGSNMNRPALNEMLSKLHEIDAVVVYRLDRLSRSQRDTITLIEEYFLKNNVEFVSLSETLDTSSPFGRAMIGILSVFAQLERETIRDRMVMGKIKRIEAGLPLTTAKGRTFGYDVVDTKLYINEEEAKQLQLIYDIFEEEQSITSLQKHLKRLGFKVRTYNCYNNWLTNDLYCGYVSYKDKVHVKGIHEPIISEEQFYRVQEIFTRMGKNPNMNRDSASLLSNLVVCSKCGLGFVHRRKDTMSRGKKYHYRYYSCKTYKHIHELERCGNKIWRADKLEELIINRVNNYSSAGRNVDKEDELDSLSEKLKIEHAKKKRLFDLYINGSYEVSELDSMMNDIDAQINYYESQIEANEELKKSKKIQENLADLATVDFDGLEFREKQLYLKSLIDKIYIDGEQVTIEWL

SEQ ID NO: 1938 - protein, 452 aa, synthetic construct
MKAAIYIRVSTREQVENYSIQAQTEKLTALCRSKGWDVYDIFIDGGYSGSNMNRPALNEMLSKLHEIDAVVVYRLDRLSRSQRDTITLIEEYFLKNNVEFVSLSETLDTSSPFGRAMIGILSVFAQLERETIRDRMVMGKIKRIEAGLPLTTAKGRTFGYDVIDTKLYINEEEAKQLQLIYDIFEEEQSITFLQKRLKKLGFKVHTYNRYNNWLTNDLYCGYVSYKDKVHVKGIHEPIISEEQFYRVQEIFTRMGKSPNMNRDSASLLNNLVVCSKCGLGFVHRRKDATSRDKKYHYRYYSCKTYKHIHELEKCGNKVWRADKLEELIINRVNNYSFASRDAGKEDELDSLNEKLKIEHAKKRRLFELYINGRYEVSELDSMMNDIDAQINYYESQIEANEELKKNKKIQENLADLATVDFDSLEFREKQLYLKSLINKIYIDGEQVTIEWL

SEQ ID NO: 1939 - protein, 452 aa, synthetic construct
MKAAIYIRVSTREQVENYSIQAQTEKLTALCRSKDWDVYDIFIDGGYSGSNMNRPALNEMLSKLHEIDAVVVYRLDRLSRSQRDTITLIEEYFLKNNVEFVSLSETLDTSSPFGRAMIGILSVFAQLERETIRDRMVMGKIKRIEAGLPLTTAKGRTFGYDVIDTKLYINEEEAKQLQLIYDIFEEEQSITFLQKRLKKLGFKVRTYNRYNNWLTNDLYCGYVSYKDKVHVKGIHEPIISEEQFYRVQEIFTRMGKNPNMNRDSASLLSNLVVCSKCGLGFVHRRKDTVSRGKKYHYRYYSCKTYKHIHELEKCGNKIWRADKLEELIINRVHNYSLASRSVDKEDELDSLNEKLRIEHAKKKRLFDLYINGNYEVSELDNMMNDIDAQINYYESQIEANKELKKNKKIQENLADLATVDFDSLEFREKQLYLKSLINKIYIDGELVTIEWL

SEQ ID NO: 1940 - protein, 452 aa, synthetic construct
MKAAIYIRVSTREQVENYSIQAQTEKLTALCRSKDWDVYDVFIDGGYSGSNMNRPALNEMLGKLHEIDAVVVYRLDRLSRSQRDTITLIEEYFLKNNVEFVSLSETLDTSSPFGRAMIGILSVFAQLERETIRDRMVMGKIKRIEAGLPLTTAKGRTFGYDVIDTKLHINEEEAKQLQLIYDIFEEEQSITFLQKRLKKLGFKVRSYNRYNNWLTNDLYCGYVSYKDRVHVKGIHEPIISEEQFYRVQEIFTRMGKNPNMNRDSASLLNNLVVCSKCGLGFVHRRKDAMSRDKKYHYRYYSCKTYKHIHELEKCGNKIWRADELEELVINRVNSYSVASRNVDKEDELDSLNEKLKVEHAKKKRLFDLYISGRYEVSELDSMMDDIDAQINYYESQIGANEELKKNKKIQEDLAHLATADFDSLEFREKQLYLKSLINKIYIDGEQVTIEWL

SEQ ID NO: 1941 - protein, 485 aa, synthetic construct
MTKKVAIYTRVSTTHQAEEGFSIDEQIDRLTKYAEAMGWQVSDTYTDAGFSGAKLERPAMQRLINDIENKAFDTVLVYKLDRLSRSVRDTLYLVKDVFTKNKIDFISLNESIDTSSAMGSLFLTILSAINEFERENIKERMTMGKLGRAKSGKSMMWTKTAFGYYHNRRTGILEIVPLQATIVEQIFTDYLSGISLTKLRDKLNESGHIGKDIPWSYRTLRQTLDNPVYCGYIKFKDSLFEGMHKPIIPYETYLKVQKELKERQQQTYERNNNPRPFQAKYMLSGMARCGYCGALLRIVLGHKRKDGSRTMKYHCANRFPRRTKGVTVYNDNKKCDSGTYDLSNLENTVIDNLIGFQENNDSLLKIINGNNQPILDTSSFKKQISQIDKKIQKNSDLYLNDFITMDELKDRTDSLQAEKKLLKAKISENKFNDSTDVFELVKTQLGSIPINELSYDNKKKIVNNLVSKVDVTADNVDIIFKFQLA

SEQ ID NO: 1942 - protein, 469 aa, synthetic construct
MSYTTPVRAAVYLRISEDRSGEQLGVARQREDCLKLCDQRKWVPVEYLDNDMSASTGKRRPAYEQMLADIAAGKIAAVVAWDLDRLHRRPIELEAFMSLADEKRLALATVAGDVDLATPQGRLVARLKGSVAAHETEHKKARQRRAARQKAERGYPNWSKAFGYLPGPNGPEPDPRTAPLVKQAYADILAGASLGDVCRRWNDAGAFTITGRPWTSTTLSKFLRKPRNAGLRAYKGARYGPVDRDAIVGKARWSPLVDEATFWAAQAVLDAPGRAPGRKSVRRHLLTGLAGCGKCGNHLAGSYRTDGRVVYVCKACHGVAILADNIEPILYHVVAERLAMPDAVDLLRREIHDAAEAETIRQELETLHGELDRLAVERAEGLLTARQVKISTDIVNAKITKLQARLLDQERLRVFDGIPLGTPQVAGVIAELSPDRFRAVLDVLAEVVVQPVGKSGRTFNPERVQVNWR

SEQ ID NO: 1943 - protein, 469 aa, synthetic construct
MSYTTPVRAAVYLRISEDRSGEQLGVARQREDCLKLCSQRKWVPVEYLDNDVSASTGKRRPAYEQMLADITAGKIAAVVAWDLDRLHRRPIELEAFMSLADEKRLALATVAGDVDLATPQGRLVARLKGCVAAHETEHKKARQRRAARQKAERGLPNWSKAFGYLPGPNGPEPDPRTAPLVKQAYADILAGASLGDVCRQWNDAGAYTITGRPWTTTALSKFLRKPRNAGLRAYKGARYGPVDRDAIVGKAQWSPLVDEATFWAAQAVLDAPSRAPGRKSVRRHLLTGLAGCGKCGNHLAGSYRTDGRVVYVCKACHGVAILADNIEPMLYRIVAERLATPGAVDLLRREIHDAAEAETIRLELGTLYGELDRLAVERAEGLLTARQVKISTDIVNAKIARLQARQLDQERLRVFDGIPLGTPQVAGVIAELSPDRFRAVLDVLAEVVVQPVGKSGRIFNPERVQVNWR

SEQ ID NO: 1944 - protein, 485 aa, synthetic construct
MTKKVAIYTRVSTTSQAEEGFSIDEQIDRLTKYAEAMGWQVSDTYTDAGLSGAKLERPAMQRLINDIENKAFDTVLVYKLDRLSRSVRDTLYLVKDVFTKNKIDFISLNESIDTSSAMGSLFLTILSAINEFERENIKERMTMGKLGRAKSGKSMMWTKTAFGYYHNRKTGILEIVPQQATIVEQIFTDYLGGISLTKLRDKLNESGHIGKDIPWSYRTLRQTLDNPVYCGYIKFKDSLFEGMHKPIIPYETYLKVQKELEERQQQTYERNNNPRPFQAKYMLSGMARCGYCGAPLRIVLGHKRKDGSRTMKYHCANRFPRKTKGVTVYNNNKKCDSGTYDLSNLENTVIDSLIGFQENNDSLLKIVNGNNQPILDTSSFKEQISQIDKKIQRISDLYLNDFITLDELKDRTDSLQAEKKLLKAKISEHKFNDSTDVFELVRTKLGSIPINELSYDDKKKIVNNLVSKVDVTADNVDIIFKFQLA

SEQ ID NO: 1945 - protein, 485 aa, synthetic construct
MTKKVAIYTRVSTTNQAEEGFSIDEQTDRLTKYAEAMGWQVSDTYTDAGFSGAKLERPAMQRLINDIGNKAFDTVLVYKLDRLSRSVRDTLYLVKDVFTKNKIDFISLNESIDTSSAMGSLFLTILSAINEFERENIKERMTMGKLGRAKSGKSMMWTKTAFGYYHNRKTGILEIVPLQAAIVEQIFTDYLSGISLTKLRDKLNESGHIGKDIPWSYRTLRQTLGNPVYYGYIKFKDSLFEGMHKPIIPYETFLKVQKELEVRQQQTYERNNNPRPFQAKYMLSGMARCGYCGAPLRIVLGHKRKDGSRTMKYHCANRFPRKTKGVTVYNDNKKCDSGTYDLSNLENTVIDNLIGFQENNDSLLKIINGNNQPILDASSFKKQISQIDKKIQKNSDLYLNDLITMDELKDRTDSLRAEKKLLKAKINENKFNDSTDVFELVKTQLGSIPINELSYDNKKKIVNSLVSKVDVTADNVDIVFKFQLA

SEQ ID NO: 1946 - protein, 485 aa, synthetic construct
MTKKVAIYTRVSTTNQAEEGFSIDEQIDRLAKYAEAMGWQVSDTYTDAGFTGAKLERPAMQRLINDIENKAFDTVLVYKLDRLSRSVRDTLYLVKDVFTKNKIDFISLSESIDTSSAMGSLFLTILSAINEFERENIKERMTMGKLGRAKSGKSMMWTKTAFGYYHNRKTGILEIVPLQATIVEQIFTDYLSGISLTKLRDKLNESGHIGKDIPWSYRTLRQTLGNPVYCGYIKFKDSLFEGMHKPIIPYETYLKVQKELEERQQQAYERNNNPRPFQAKYMLSGMVRCGYCGAPLKIVLGHKRKDGSRTMKYHCTNRFPRKTKGVTVYNDNKKCDSGTYDLCNLENAVIDNLIGFQENNDSLLKIINGNNQPIQETSSLKKQISQIDKKIQKNSDLYLNDFITMDELKARTDSLQAEKKLLKAKVSENKFNDSTDVLELVKTQLGSIPINELSYDDKKKIVNNLVSKVDVTADNVDIIFKFQPA

SEQ ID NO: 1947 - protein, 485 aa, synthetic construct
MTKKVAIYTRVSTTNQAEEGFSIDEQIDRLTKYAEAMGWQVSDTYTDAGFSGAKLERPAMQRLINDIENKAFDTVLVYKLDRLSRSVRDTLYLVKGVFTKNKIDFISLNESIDTSSAMGSLFLTILSAINEFERENIKERMTMGKLGRAKSGKSMMWTKTAFGYYHNRKTGILEIVPLQATIVQQIFTDYLSGISLTKLRDKLNESGHIGKDIPWSYRTLRQTLDNPVYCGYIKFKDSLFEGMHKPIIPYETYLEVQKELEERQQQAYERNNNPRPFQAKYMLSGVARCGYCGAPLRIVLGHKRKDGSRTKKYHCANRFPRKTKGVTVYNDNKKCDSGAYDLSNLENTVIDNLIGFQENNDSLLKIINGNNQPILDTSSFKKQISQIDKKIQKNSDLYLNDFITMDELKDRTDSLQAEEKLLKAKISENKFNDSTDVFELVKTQLGSVPINELSYDNKKKIVNNLVSKVDVTADKVDIIFKFQLA

SEQ ID NO: 1948 - protein, 485 aa, synthetic construct
MTKKVAIYTRVSTTNQAEEGFSIDEQIDRLTKYAEAMGWQVSDTYTDAGFSGAKLERPAMQRLINDIGNRAFDTVLVYKLDRLSRSVRDTLYLVKDVFTKNKIDFISLNESIDTSSAMGSLFLTILSAINEFERENIKERMTMGKLGRAKSGKSMMWTKTAFGYYHNRKTGILEIVPLQATVVEQIFTDYLSGISLTKLRDKLNESGHIGKDIPWSYRTLRQTLDNPVYCGYIKFKDSLFEGMHKPIIPYETYLKVQKELEERQQQAYERNNNPRPFQAKYMLSGMARCGYCGAPLRIVLGHKRKDGNRTMKYHCANRFPRKTKGVTVYNDNKKCDSGTYDLSNLENTVIDYLIGFQENNDSLLKIINGNNQPILDTSSFKKQISQIDKKIQKNNDLYLNDFITMDELKDRTDSLQAEKKLLRAKISENKFNDSTDVFELVKTQLGSIPINELSYDNKKKIVNNLVSKVDVTADNVDIIFKFQLA

SEQ ID NO: 1949 - protein, 485 aa, synthetic construct
MTKKVAIYTRVSTTNQAEEGFSIDEQIDRLTKYAEAMGWQVSDTYTDAGFSGAKLERPAMLRLINDIENKAFDTVLVYKLDRLSRSVRDTLYLVKDVFTKNKIDFISLNESIDTSSAMGSLFLTILSAINEFERENIKERMTMGKLGRAKSGKSMMWTKTAFGYYHNRNTGILEIVPLQATIVEQIFTDYLSGISLTKLRDKLNESGHIGKDIPWSYRTLRQTLDNPVYCGYIKFKGSLFEGMHKPIIPYETYLKVQKELEERQRQTYERNNNPRPFQAKYMLSGMARCGYCGAPLKIVLGHKRKDGSRTMKYHCANRFPRKTRGITVYNDNKKCDSGTYDLSNLENTVIDNLIGFQENDDSLLKIINGNNQPILDTSSFKKQISQIDKKIQKNSDLYLNDFITMDELKDRTDSLQAEKKLLKAKISENEFIDSTDVFELVKTQLGSIPINELSYDNKKKIVNNLVSKVDVTADNVDIIFKFQLA

SEQ ID NO: 1950 - protein, 469 aa, synthetic construct
MSYTTPVRAAVYLRISEDRSGEQLGVARQREDCLKLCGQRKWVPVEYLDNDVSASTGKRRPAYEQMLADIIAGKIAAVVAWDLDRLHRRPIELEAFMSLADEKRLALATVAGDVDLATPQGRLVARLKGCVAAHETEHKKARQRRAARQKAERGYPNWSKAFGYLPGPNGPEPDPRTAPLVKQAYADILAGASLGDVCRQWNDAGAFTITGRPWTTTTLSKFLRKPRNAGLRAYKGARYGPVDRDAIVGKAQWSPLVDEATFWAAQAVLDAPGRAPGRKSVRRHLLTGLAGCGKCGNHLAGSYRTDGQIVYVCKACHGVSILAVNIEPILYHVVAERLAMPDAVDLLRREIHDAAEAETIRLELETLYGELDRLAVERAEGLLTARQVKISTDIVNAKITRLQARQLDQERLRVFDGVPLGTPQVAGMIAELSPDRFRAVLDVLAEVVVRPVGKSGRIFNPERVQVNWR

SEQ ID NO: 1951 - protein, 485 aa, synthetic construct
MTKKVAIYTRVSTTNQAEEGFSIDEQIDRLTKYAEAMGWQVSDTYTDAGCSGAKLERPAMQRLINDIENKAFDTVLVYKLDRLSRSVRDTLYLVKDVFTKNKIDFISLNESIDTSSAMGSLFLTILSAINEFERENIKERMTMGKLGRAKSGKSMMWTKTAFGYYHNRKTGILEIVPLQATIVEQIFTDYLSGISLTKLRDKLNESGHIGKDIPWSYRTLRQTLDNPVYCGYIKFKDSLFEGMHKPIIPYETYLKVQKELEERQQQTYERNNNPRPFQAKYMLSGMARCGYCGAPLRIALGRKRKDGSRTMKYHCANRFPRKTKGITVYNDNKKCDSGTYDLSNLENTVIDNLIGLQENNDSLLKIINGNNQPILDTSSFREQISQIDKKIQKNSDLYLNDFITMDELKGRTDSLQAEKKLLKAKISENKFNDSTDVFELVKTQLGSIPINELSYDNKKKIVNNLVSKVDVTADNVDIIFKFQLA

SEQ ID NO: 1952 - protein, 452 aa, synthetic construct
MKAAIYIRVSTQEQVGNYSIQAQTEKLTALCRSKDWDVYDIFIDGGYSGSNMNRPALNEMLSKLHEIDAVVVYRLDRLSRSQRDTTTLIEEYFLKNNVEFVSLSETLDTSSPFGRAMIGILSVFAQLERETIRDRMVMGKIKRIEAGLPLTTAKGRTFGYDVIDTRLYINEEEAKQLQLIYDIFEEEQSITFLQKRLKKLGFKVHTYNRYNNWLTNDLYCGYVSYKDKVHVKGIHEPIISEEQFYRVQEIFTRMGKNPNMNRDSASLLSSLVVCSKCGLGFVHRSKDTMSRGKKYHYRYYSCKTYKHTHELEKCGNKTWRADKLEELIISRVNNYSFASRSVDKEDELDSLNERLKIEHAKKKRLFDLYINGSCEVSELDSMMNDIDAQINYYESQIEANVGLKKNKKIQESLADLATVDFDSLEFREKQLYLKSLINKIYVDGEQVTIEWL

SEQ ID NO: 1953 - protein, 485 aa, synthetic construct
MTKKVAIYTRVSTTNQAEEGFSIDEQIDRLTKYAEAMGWQVSDTYTDAGFSGAKLERPAMQRLINDIENKAFDTVLVYKLDRLSRSVRDTLYLVKDVFTKNKIDFISLSESIDTSSAMGSLFLTILSAINEFERENIKERMTMGKLGRAKSGKSMMWTKTAFGYYHNRKTGILEIVPLQATIVEQIFTDYLSGISLTKLRDKLNESGHIGKDIPWSYRTLRQTLDNPVYCGYIKFKDSLFEGMHKPIISYETYLKVQKELEERQQQTYERNNNPRPFQAKYMLSGMARCGYCGAPLRIVLGHKRKDGSRTMKYHCANRFPRKTKGVTVYNDNKKCDSGTYDLSNLENTVIDNLIGFQENNDSLLKIINGNNQPIPDTSSFKKQISQIDKKIQKNSDLYLDDFITMDELKDRTDSLQAEKKLLKAKISENKFNERTDVFELVKTQLGSIPINELSYDSKKKIVNNLVSKVDVTADNVDIIFKFQLA

SEQ ID NO: 1954 - protein, 452 aa, synthetic construct
MKAAIYIRVSTQEQVENYSIQAQTEKLTALCRSKDWDVYDIFIDGGYSGSNMNRPALNEMLSKLHEIDAVVVYRLDRLSRSQRDTTTLIEEYFLKNNVEFVSLSETLDTSSPFGRAMIGILSVFAQLERETIRDRMVMGKIKRIEAGLPLTTAKGRTFGYDVIDTKLYINEEEAKQLQLIYDIFEEEQSITSLQKRLKKLGFKVRTYNRYNNWLTNDLYCGYVSYKDKVHVKGIHEPIISEEQFYRVQEIFTRMGKNPNMNRGSASLLNNLVVCSKCGLGFVHRSKDTMSRGKKYHYRYYSCKTYKHTHELEKCGNKTWRADKLEELIINRVNNYSFASRNVDKEDELDSLNEKLKIEHAKKKRLFDLYINGSYEVSELDSMMNDIDAQINYYESQIEANEELKKNKKIQESLADLATVDFDSLGFREKQLYLKGLINKIYIDGEQVTIEWL

SEQ ID NO: 1955 - protein, 452 aa, synthetic construct
MKAAIYIRVSTQEQVGNYSIQAQTEKLTALCRSKGWDVYDIFVDGGYSGSNMNRPALNEMLSKLHEIDAVVVYRLDRLSRSQRDTTTLIEEYFLKNNVEFVSLSETLDTSSPFGRAMIGILSVFAQLERETIRDRMVMGKIKRIEAGLPLTTAKGRTFGYDVIDTKLYINEEEAKQLQLIYDIFEEEQSITSLQKRLKKLGFKVRTYNRYNNWLTNDLYCGYVSYKDKVHVKGIHEPIISEEQFYRVQEIFTRMGKSPNMNRDSASLLSNLVVCSKCGLGFVHRSKDTMSRGKKYHYRYYSCKTYKHTHELEKCGNKTWRADKLEELIINRVNNYSFASRNADKEDELDSLNEKLEIEHARKKRLFDLYINGSYEVSELDSMMNDIDAQINYYESQIEASEELKKNKKIQENLADLAAVDFDSLEFREKQLYLKSLINKIYIDGEQVTIEWL

SEQ ID NO: 1956 - protein, 469 aa, synthetic construct
MSYTTSVRAAVYLRISEDRSGEQLGVARQREDCLKLCGQRKWVPVEYLDNDVSASTGKRRPAYEQMLADITAGKIAAVVAWDLDRLHRRPMELEAFMSLADEKRLALATVAGDVDLATPQGRLVARLKGSVAAHETEHKKARQRRAARQKAERGHPNWSKAFGYLPGPSGPEPDPRTAPLVKQAYADILAGASLGDVCRRWNDAGAFTITGRPWTTTTLSKFLRKPRNAGLRAYKGARYGPVDRDAIVGKAQWSPLVDEATFWAAQAVLDAPGRAPGRKSVRRHLLTGLAGCGKCGNHLAGSYRTGGRVVYVCKACHGVAILADNIEPILYRIVAERLAMPDAVDLLRREIHDAAEAETVRLELETLHGELDRLAVERAEGLLTARQVKISTDIVNTKITKLQARQLDQERLRVLNGIPLGTPQVADLIAELSPDRFRAVLDVLAEVVVQPVGKSGRIFNPERVQVYWR

SEQ ID NO: 1957 - protein, 452 aa, synthetic construct
MKAAIYIRVSTQEQVGNYSIQAQTEKLTALCRSKDWDVYDIFIDGGYSGSNMNRPALNEMLSKLHEIDAVVVYRLDRLSRSQRDTTTLIEEYFLKNNVEFVSLSETLDTSSPFGRAMIGILSVFAQLERETIRDRMVMGKIKRIEAGLPLTTAKGRTFGYDVIDTKLYINEEEAKQLQLIYDIFEEEQSITFLQKRLKKLGFKVRTYNRYNSWLTNDLYCGYVSYKDKVHVKGIHEPIISEEQFYRVQEIFTRMGKNPNVNRDSASLLNNLVVCSKCGLGFVHRSKDTMSRGKKYHYRYYSCKTYKHTHELEKCGNKTWRADKLEELIISRVNNYSFASHSVDKEDELDSLNEKLRIEHAKKKRLFDLYINSSYEASELDGMMNDIDAQINYYESQIEANEELKKNKKIQENLADLATVDFDSLEFREKQLYLKSLINKIYIDGEQVTIEWL

SEQ ID NO: 1958 - protein, 452 aa, synthetic construct
MKAAIYIRVSTQEQVENYSIQAQTEKLTALCRSKDWDVYDIFIDGGYSGSNMNRPALNEMLSKLHEIDAVVVYRLDRLSRSQRDTTTLIEEYFLKNSVEFVSLSETLDTSSPFGRAMIGILSVFAQLERETIRDRMVMGKIKRIEAGLPLTTAKGRTFGYDVIDTKLYINEEEAKQLQLIYDIFEEEQSITSLQKRLKKLGFKVRTYNRYNNWLTNDLYCGYVSYKDKVHVKGIHEPIISEEQFYRVQEIFTRMGKNPNMNRDSASLLNNLVVCSKCGLGFVHRSKDTMCRGKKYHYRYYSCKTYKHTHELEKCGNKTWRADELEGLIIDRVNNYSFASRNVDKEDELDSLNEKLKIEHAKKKRLFDLYINGSYEVSELDSMMGDIDAQINYYESQIKANGELKRNKKIQGNLVDLTTVDFDSLEFREKQLYLKSLINKIYIDGEQVTIEWL

SEQ ID NO: 1959 - protein, 452 aa, synthetic construct
MKAAIYIRVSTQEQAENYSIQAQTEKLTALCRSKDWDVYDIFVDGGYSGSNMNRPALNEMLSKLHEIDAVVVYRLDRLSRSQRDTTTLIEEYFLKNNVEFVSLSETLDTSSPFGRAMIGILSVFAQLERETIRDRMVMGKIKRIEAGLPLTTAKGRTFGYDVIDTKLYINEEEAKQLQLIYDIFEEEQSITSLQKRLKKLGFKVRTYNRYNNWLTNDLYCGYVSYKDKVHVKGIHEPIISEEQFYRVQEIFTRMGKNPNMNRDSASLLNNLVVCSKCGLGFVHRSKDTMCRGKKYHYRYYSCKTYKHTHELEKCGNKTWRADKLEELVVNRVNNYSFASRNADKEDELDSLNEKLKIEHAKKKRLFDLYINGSYEVSELGSMMNDIDAQINYYESQIEASEELKKNKKIQENLADLATVDFDSLEFREKQQYLKSLINKIYIDGEQVTIEWL

SEQ ID NO: 1960 - protein, 452 aa, synthetic construct
MKAAIYIRVSTREQVENYSIQAQTEKLTALCRSKDWDVYDIFIDGGYSGSNMNRPALNEMLSKLHEIDAVVVYRLDRLSRSQRDTITLIEEYFLKNNVEFVSLSETLDTSSPFGRAMIGILSVFAQLERETIRDRMVMGKIKRIEAGLPLTTAKGRTFGYDVIDTKLYINEEEAKQLQLIYDIFEEEQSITFLQKRLKKLGFKVRTYNRYNNWLTNDLYCGYVSYKDKVHVKGIHEPIISEEQFYRVQEIFTRMGKNPNMNRDSASLLNNLVVCSKCGLGFVHRRKDAMSRDKKYHYRYYSCKTYKHIHELEKCGNKIWRADKLEELIINRVHNYSFASRNADKEDELDSLNEKLKIEHAKKRRLFELYINGRYEVSELDSMMNDIDAQINYYESQIEANEELKKNKQMQENLAHLATVDFDSLEFREKQLYLKSLINKIYIDGEQVAIEWL

SEQ ID NO: 1961 - protein, 452 aa, synthetic construct
MKAAIYIRVSTREQVENYSIQAQTEKLTALCRSKDWDVYDIFIDGGYSGSNMNRPALNEMLSKLHEIDAVVVYRLDRLSRSQRDTITLIEEYFLKNNVEFVSLSETLDTSSPFGRAMIGILSVFAQLERETIRDRMVMGKIKRIEAGLPLTTAKGRTFGYDVIDTKLYINEEEAKQLQLIYDIFEEEQSITFLQKRLKRLGFKVHTYNRYNNWLTNDLYCGYVSYKDKVRVKGIHEPIISEEQFYRVQEIFTRMGKNPNMNRDSASLLNNLVVCSKCSLGFVHRRKDTMSRGKKYHYRYYSCKTYKHIHELERCGNKIWRADKLEELIINRVNNYSFASRNVDKEDELDNLNEKLKIEHAKKKRLFDLYINGSYEVSELDSMMNDIDAQINYYESQIEANEELKKNKKIQENLANLATVDYDSLEFREKQLYLRSLINKIYIDGEQVTIEWL

SEQ ID NO: 1962 - protein, 469 aa, synthetic construct
MSYTTPVRAAVYLRISEDRSGEQLGVARQREDCLKLCGQRKWVPVEYLDNDVSASTGKRRPAYEQMLADIAAGKIAAVVAWDLDRLHRRPVELEAFMSLADEKRLALATVAGDVDLATPQGRLVARLKGSVAAHETEHKKARQRRAARQKAERGYPNWSKAFGYLPGPNGPEPDPRTAPLVKRAYADILAGASLGDVCRQWNDAGAFTITGRPWTTTTLSKFLRKPRNAGLRAYKGARYGPVDRDAIVGKAQWSPLVDEATFWAAQAVLDAPGRAPGRKSVRRHLLTGLAGCGKCGNHLAGSHRTDGRVVYVCKACHGVAILADNIEPILYHIVAERLAMPDAVDLLRREVHDATEAETIRLELEALYGELDRLAVERAEGLLTARQVKISTDIVNAKITKLQARQLDQERLRVLGGIPLGTPQVAGMIAELSPDRFRAVLDVLVEVVVQPVGKGGRISNPERVQVNWR

SEQ ID NO: 1963 - protein, 469 aa, synthetic construct
MSYTTPVRAAVYLRISEDRSGEQLGVARQREDCLKLCGQRKWVPVEYLDNDVSASTGKRRPAYEQMLADITAGKIAAVVAWDLDRLHRRPVELEAFMSLADEKRLALATVAGDVDLATPQGRLVARLKGCVAAHETEHKKARQRRAARQKAERGLPNWSKAFGYLPGPNGPEPDPRTAPLVKQAYADILAGASLGDVCRQWNDVGAFTITGRPWTATTLSKFLRKPRNAGLRAYKGARYGPVDRDAIVGKAQWSPLVDEATFWAAQAVLDAPGRAPGRKSVRRHLLTGLAGCGKCGNHLAGSYRTDGRVVYACKACHGVAILADNIEPILYHIVAERLAMPDAVDLLRREIHDAAEAETIRLELETLYGELDRLAVERAEGLLTARQVKISTDIVNARITKLQARQLDQERLRVFDGIPLGTPQVAGVIAELSPDRFRAVLDVLAEVVVQPVGKSGRIFSPERVQVNWR

SEQ ID NO: 1964 - protein, 469 aa, synthetic construct
MSYTTPVRAAVYLRISEDRSGEQLGVARQREDCLKLCGQRKWVPVEYLDNDVSASTGKRRPAYEQMLADITAGKIAAVVAWDLDRLHRRPIELEAFMSLADEKRLALATVAGDVDLATPQGRLVARLKGCVAAHETEHKKARQRRAARQKAERGLPNWSKAFGYLPGPNGPEPDPRTAPLVKQAYADILAGASLGDVCRQWNDAGAFTITGRPWTTTTLSKFLRKPRNAGLRAYKGAPYGPVNRDAIVGKAQWSPLVDEATFWAAQAVLDAPGRAPGRKSVRRHLLTGLAGCGKCGKHLAGSYRTDGRIVYVCKTCHGVAILADNIEPILYHIVAERLAMPDAVDLLRCGIHDATEAETIRLELETLYGELDRLAVERAEGLLTARQVKISTDIVNAKITKLQARQLDQERLRVFDGIPLGTPQVAGTIAELSPDRFRAVLDVLAEVVVQPVGKSGRIFNPERVQVNWR

SEQ ID NO: 1965 - protein, 452 aa, synthetic construct
MKAAIYIRVSTQEQVENYSIRAQTEKLTALCRSKDWDVYDIFIDGGYSGSNMNRPALNEMLSKLHEIDAVVVYRLDRLSRSQRDTTTLIEEYFLKNNVEFVSLSETLDTSSPFGRAMIGILSVFAQLERETIRDRMVMGKIKRIEAGLPLTTAKGRTFGYDVIDTKLYINEEEAKQLQLIYDIFEEEQSITSLQRRLKKLGFKVRSYNRYNNWLTNDLYCGYVSYKDKVHVKGIHEPIISEEQFYRVQEIFTRMGRNPNMNRGSASLLNNLVVCGKCGLGFVHRSKDTMSRGKKYHYRYYSCKTYKHTHELEKCGNKTWRADKLEELVIDRVNNYSFASRNVDREDELDSLNEKLKIEHAKKKRLFDLYINGSYEVSELDSMMSDIDARIDYYESQIEAKEELRKNKKIQENLADLAAVDFDSLEFREKQLYLKSLVNKVYIDGEQVTIEWL

SEQ ID NO: 1966 - protein, 452 aa, synthetic construct
MKAAIYIRVSTREQVENYSIQAQTERLTALCRSKDWDVYDIFIDGGYSGSNMNRPALNEMLSKLHEIDAVVVYRLDRLSRSQRDTITLIEEYFLKNNVEFVSLSETLDTSSPFGRAMIGILSVFAQLERETIRDRMVMGKIKRIEAGLPLTTAKGRTFGYDVIDTKLYINEEEAKQLQLIYDIFEEEQSITFLQKRLKKLGFKVRTYSCYNNWLTNDLYCGYVSYKDKVRVKGIHEPIISEEQFYRVQEIFARMGRNPNMSRDSASLLNNLVVCSKCGLGFVHRRKDTMGRGKKYHYRYYSCKTYKHTHELEKCGNKIWRADKLEELIINRVNNYSFASRNVDKEDELDSLNEKLKIEHAKKKRLFDLYINGSYDVSELDSMMSDIDAQINYYEGQIEANEELKKNKKIQENLADLATVDFDSLEFREKQLYLKSLINKIYIDGERVTIEWL

SEQ ID NO: 1967 - protein, 485 aa, synthetic construct
MTKKVAIYTRVSTTNQAEEGFSIDEQIDRLTKYAEAMGWQVSDTYTDAGLSGAKLERPAMQRLINDIETKAFDTVLVYKLDRLSRSVRDTLYLVKDVFTKNKIDFISLNESIDTSSAMGSLFLTILSAINEFERENIKERMTMGKLGRAKSGKSMMWTKTAFGYYHNRKTGILEIVPLQATIVEQIFTDYLSGISLTKLRDKLNESGHIGKDIPWSYRTLRQTLDNPVYCGYIKFKDSLFEGMHKPIIPYETYLKVQKELEERQQQTYERNNNPRPFQAKYMLSGMARCGYCGAPLRIVLGHKRKDGSRTMKYHCANRFPRKTKGVTVYNDNKKCDSGTYDLSNLENTVIDNLVGFQENSDNLLKITNGNNQPILDTSSFKEQISQIDKKIQKNCDLYLNDFITMDELKDRTDSLQAEKKLLKAKISENKFNASADVFELVKTQLGSIPINELSYDNKKKIVNNLVSKVDVTADNVDIIFKFQLA

SEQ ID NO: 1968 - protein, 452 aa, synthetic construct
MKAAIYIRVSTREQVENYSIRAQTEKLTALCRSKDWDVYDIFIDGGYSGSNMNRPALNEMLSKLHEIDAVVVYRLDRLSRSQRDTITLIEEYFLKNNVEFVSLSETLDTSSPFGRAMIGILSVFAQLERETIRDRMVMGKIKRIEAGLPLTTAKGRTFGYDVIGTKLYINEEEAKQLQLIYDIFEEEQSITFLQKRLKKLGFKVRTYNRYSNWLTNDLYCGYVSYKDKVHVKGIHEPIISEEQFCRVQEIFTRMGRNPNMNRDSASLLNNLVVCSKCGLGFVHRRKDTVSRGKKYHYRYYSCKTYKHTHELERCGNKIWRADKLEELIINRVNNYSFASRNVDKEDELNSLNEKLKIEHAKRKRLFDLYIDGSYEVSELDSMMNDIDAQINYYGSQIEANEELKKNKKIQENLANLATVDYDSLEFREKQLYLKSLINKIYIDGEQVTIEWL

SEQ ID NO: 1969 - protein, 469 aa, synthetic construct
MSYTTPVRAAVYLRISEDRSGEQLGVARQREDCLKLCGQRKWVPVEYLDNDVSASTGKRRPAYEQMLADITAGKIAAVVAWDLDRLHRRPVELEAFMSLADEKRLALATVAGDVDLATPQGRLVARLKASVAAHETEHKKARQRRAARQKAERGYPNWSKAFGYLPGPNGPEPDPRTAPLVKQAYADILAGASLGDVCRQWNDAGAFTITGRPWTTTTLSKFLRKPRNAGLRAYKGARYGPVDRDAIVGKAQWSPLVDEATFWAAQAVLDAPGRAPGRKSVRRHLLTGLAGCGKCGNHLAGSYRTDGQVVYVCKACHGVSILAVNIEPILYHIVAERLAMPDAVDLLRREIHDAAGAETIRLELETLYGELDRLAVERAEGLLTARQVKISTDIVNAKITKLQARQLDQERLRVFDGIPLGTPQVAGTIAELSPDRFRAVLDVLAEVVVQPVGRNGRIFNPERVQVNWR

SEQ ID NO: 1970 - protein, 485 aa, synthetic construct
MTKKVAIYTRVSTTNQAEEGFSIDEQIDRLTKYAEAMGWQVSDTYTDAGLSGAKLERPAMQRLINDIENKAFDTVLVYKLDRLSRSVRDTLYLVKDVFTKNKIDFISLNESIDTSSAMGGLFLTILSAINEFERENIKERMTMGKLGRAKSGKSMMWTKAAFGYYHNRETGILEIVPLQATIVEQIFTDYLSGISLTKLRDKLNESGHIGKDIPWSYRTLRQTLDNPVYCGYIKFKGSLFEGMHKPIIPYETYLKVQEELEERQQQTYERNNNPRPFQAKYMLSGMARCGYCGAPLRIVLGHKRKDGSRTMKYHCANRFPRKTKGVTVYNDNKKCDSGTYDLSNLENTVIDNLIGFQVNNDSLLEIINGNNQPILDTSSLKKQISQIDKKIQKNSDLYLNDFITMDELKDRTDGLQAEKRLLKAKISKSKFNDSADVFELVKAQLGSVPINELSYDNKKKIVNNLVSKVDVTADNVDIIYKFQPA

SEQ ID NO: 1971 - protein, 469 aa, synthetic construct
MSYTTPVRAAVYLRISEDRSGEQLGVARQREDCLKLCGQRKWVPVEYLDNDVSASTGKRRPAYEQMLADITAGKIAAVVAWDLDRLHRRPIELEAFMSLADEKRLALATVAGDVDLATPQGRLVARLKGCVAAHETEHKKARQRRAARQKAERGHPNWSKAFGYLPGPNGPEPDPRTAPLVKQAYADILAGASLGDVCRQWNGAGAFTITGRPWTTTTLSKFLRKPRNAGLRAYKGARYGPVDRDAIVGKAQWSPLVDEATFWAAQAVLDAPGRAPGRKSVRRHLLTGLAGCGKCGNHLAGSYRTDGRVVYVCKACHGVAILADNIEPILYHIVAERLAMPDAVDLLRREIHDAAEAETIRLELETLHGELDRLAVERAEGLLTARQVKISTDIVNAKITKLQACQLDQERLRVFDGLPLGTPQVAGMIAKLSPNRFRAVLDVLAEVVVQPVGKSGRIFNPERVQVNWR

SEQ ID NO: 1972 - protein, 452 aa, synthetic construct
MKAAIYIRVSTREQVENYSIQAQAEKLTALCRSKDWDVYDIFIDGGYSGSNMNRPALNEMLSKLHEIDAVVVYRLDRLSRSQRDTITLIEEYFLKNDVEFVSLSETLDTSSPFGRAMIGILSVFAQLERETIRDRMVMGKIKRVEAGLPLTTAKGRTFGYDVIDTKLYINEEEAKQLQLIYDIFEEEQSITFLQKRLKKLGFKVRTYNRYNSWLTNDLYCGYVSYKDKVHVKGVHEPIISEEQFYRVQEIFTRTGKNPNMNRDSASLLNNLVVCSKCGLGFVHRRKDTTSRGKKYHYRYYSCKTYKHTHELEKCGNKIWRADKLEELIINRVNNYSSASRNVDKEDELDSLNEKLKIEHAKKKRLFDLYINGSYEVSELDSMMNDIDAQINYYESQIEANEELKRSKKIQENLADLATVDLDSLEFREKQLYLKSLINKIYIDGEQVTIEWL

SEQ ID NO: 1973 - protein, 452 aa, synthetic construct
MKAAIYIRVSTREQVENYSIQAQTEKLTALCRSKDWDVYDIFIDGGYSGSNMNRPALNEMLSKLHEIDAVVVYRLDRLSRSQRDTITLIEEYFLKNNVEFVSLSETLDTSSPFGRAMIGILSVFAQLERETIRDRMVMGKIKRIEAGLPLTTAKGRTFGYDVIDTKLYINEEEARQLRLIYDIFEEEQSITFLQKRLKKLGFKVRTYNRYNNWLTNDLYCGYVSYKDKVHVKGIHEPIISEEQFYRVQEIFTRMGKSPNMNRGSASLLNNLVVCGKCGLGFVHRRKDAMSRDKKYHYRYYSCKTYKHIHELEKCGNKIWRADKLEELIINRVNNYSFASRNADKEDELDSLNEKLKIEHAKRKRLFDLYINGSYEVNELDSMMNDIDAQIDYYESQIEANEELRKNKKIQEDLADLATVDFNSLEFREKQLYLKSLINKIYIDGEQVTIEWL

SEQ ID NO: 1974 - protein, 469 aa, synthetic construct
MSYTTPVRAAVYLRISEDRSGEQLGVARQREDCLKLCDQRKWVPVEYLDNDVSASTGNRRPAYEQMLADITAGKIAAVVAWDLDRLHRRPIELEAFMSLADEKRLALATVAGDVDLATPQGRLVARLKGSVAAHETEHKKARQRRAARQKAERGYPNWSKAFGYLPGPNGPEPDPRTAPLVKQAYADILAGASLGDVCRQWNDAGAFTITGRPWTTTTLSKFLRKPRNAGLRAYKGARYGPVDRDAIVGKAQWSPLVDEATFWAAQAVLDAPGRAPGRKSVRRHLLTGLAGCGKCGNHLAGSCRTDGQIVYVCKACHGVSILAVNIEPILYHVVAERLAMPDAVDLLRREIHDAAEAETIRLELETLYGELDRLAVERAEGLLTARQVKISTDIVNAKITKLRARQLDQERLRVFDGIPLGTPQVAGMIAELSPDRFRAVLAVLAEVVVQPVGKSGRIFNPERVQVNWR

SEQ ID NO: 1975 - protein, 452 aa, synthetic construct
MKAAIYIRVSTQEQVGNYSIQAQTEKLTALCRSKDWDVYDIFIDGGYSGSNMNRPALNEMLSKLHEIDAVVVYRLDRLSRSQRDTTTLIEEYFLKNNVEFVSLSETLDTSSPFGRAMIGILSVFAQLERETIRDRMVMGKIKRIEAGLPLTTAKGRTFGYDVIDTKLYINEEEAKQLQLIYDIFEEVQSITFLQKRLKKLGFKVRTYNRYNNWLTNDLYCGYVSYKDKVHVKGIHEPIISEEQFYRVQEIFTRTGKNPNMNRDSASLLNNLVVCSKCGRGFVHRSKDTMSRGKKYHYRYYSCKTYKHTHELEKCGNKTWRADKLEELIIDRVNNYSFASRNVDKEDELDSLNEKLKIEHVKKKRLFDLYINGSYEVSELDSMMNDIDAQINYYESQIEANEELKKNRKIRESLADLATVDFDSLGFRDKQLYLKSLINKIYIDGEQVTIEWL

SEQ ID NO: 1976 - protein, 452 aa, synthetic construct
MKAAIYIRVSTREQVENYSIQAQTEKLTALCRSKDWDVYDIFIDGGYSGSNMNRPALNEMLSKLHEIDAVVVYRLDRLSRSQRDTITLIEEYFLKNNVEFVSLSETLDTSSPFGRAMIGILSVFAQLERETIRDRMVMGKIKRIEAGLPLTTAKGRTFGYDVIDTKLYINEEEAKQLQLIYDIFEEEQSITSLQKRLKKLGFKVRTYNRYSNWLTNDLYCGYVGYKDKVHVKGIHEPIISEEQFYRVQEIFTRMGKNPNMNRDSASLLNNLVVCSKCGLGFVHRRKDAMSRDKKYHYRYYSCKTYKHIHELEKCGNKIWRADKLEELIIDRVNSYSLASRNVDKEDELDGLNEKLKTEHAKKKRLFDLYINGSYEVSELDSMMSDIDAQINYYESQIEANEELKKNKKIQENLADLAAVDFDSLEFREKQLYLKSLINKIYIDGEQVTIEWL

SEQ ID NO: 1977 - protein, 485 aa, synthetic construct
MTKKVAIYTRVSTVNQAEEGFSIDEQIDRLTKYAEAMGWQVSDTYTDAGFSGAKLERPAMQRLINDIENKAFDTVLVYKLDRLSRSVRDTLYLVKDVFTKNKIDFISLNESINTSSAMGSLFLTILSAINEFERENIKERMTMGKLGRAKSGKSMMWTKTAFGYYHNRKTGILEIVPLQATIVEQIFTDYLSGISLTKLRDKLNESGHIGKDIPWSYRTLRQTLDNPVYCGYIKFKGSLFEGMHKPIIPYETYLKVQKELEERQQQTYERNNNPRPFQAKYMLSGMARCGYCGAPLRIVLGHKRKDGSRTMKYHCANRFPRKTRGVTVYNDNRKCDSGAYDLSNLENTVIDNLIGFQENNDSLLKIINGNNQPTLDTSSLKEQISQIDKKIQKNSDLYLNDFITMDELKGRTDSLQAEKKLLKAKISENKFNDTTGVFELVKTQLGSIPINELSYDNKKKIVNNLVSKVDVTADSVDIIFKFQLA

SEQ ID NO: 1978 - protein, 452 aa, synthetic construct
MKAAIYIRVSTQEQVENYSIQAQTEKLTALCRSKGWDVYDIFIDGGYSGSNMNRPALNEMLSKLREIDAVVVYRLDRLSRSQRDTTTLIEEYFLKNNVEFVSLSETLDTSSPFGRAMIGILSVFAQLERETIRDRMVMGKIKRIEAGLPLTTAKGRTFGYDVIDTKLYINEEEAKQLQLIYDIFEEEQSITFLQKRLKKLGFKVRSYNRYNNWLTNDLYCGYVSYKDKVHVKGIHEPIISEEQFYRVQEIFTRMGKNPNMNRDSASLLSNLVVCGKCGLGFVHRSKDTMSRGKKYHYRYYSCKTYKYTHELEKCGNKTWRADRLEELIINRVNNYSFASRNVDREDELDSLNDKLKIEHAKRKRLFDLYINGNYEVSELDSMMNDIDAQINYYESQIEANRELKKSKKIQENLADLATVDFDSLEFREKQLYLKSLINKIYIDGEQVTIEWQ

SEQ ID NO: 1979 - protein, 469 aa, synthetic construct
MSYTTPVRAAVYLRISEDRSGEQLGVARQREDCLKLCDQRKWVPVEYLDNDVSASTGKRRPAYEQMLADITAGRIAAVVAWDLDRLHRRPVELEAFMSLADEKRLALATVAGDVDLATPQGRLVARLKGCVAAHETEHKKARQRRAARQKAERGLPNWSKAFGYLPGPNGPEPDPRTAPLVKQAYADILAGASLGDVCRQWNDAGAFTITGRPWTATTLSKFLRKPRNAGLRAYKGARYGPVDRDAIVGKAQWSPLVDEATFWAAQAVLDAPGRAPGRKSVRRHLLTGLAGCGKCGNHLAGSYRADGRVVYVCKACHGVAILADNIVPILYHIVAERLAMPDAVDLLRREIHDAAEAETIRLELGTLYGELDRLAVERAEGLLTARQVKISTDIVSAKITKLQARQLDQERLRVFDGIPLGTPQVAGMIAELSPDRFRAVLDVLAEVVVQPVGKSGRIFSPERVQVNWR

SEQ ID NO: 1980 - protein, 485 aa, synthetic construct
MTRKVAIYTRVSTTNQAEEGFSIDEQVDRLTKYAEVMGWQVSDTYTDAGFSGAKLERPAMQRLINDIENKAFDTVLVYKLDRLSRSVRDTLYLVKDVFTKNKIDFISLNESIDTSSAMGSLFLTILSAINEFERENIKERMAMGKLGRAKSGKSMMWTKTAFGYYHNRKTGILEIVPLQATIVEQIFTDYLSGISLTKLRDKLNESGHIGKDIPWSYRTLRQTLDNPVYCGYIKFKDSLFEGMHEPIIPYETYQKVQKELEERQQQTYERNNNPRPFQAKYMLSGMARCGYCGAPLRIVLGHKRKDGSRTMKYHCANRFPRKTNGVTVYNDNKKCDSGTYDLSNLENTVIDNLIGFQENNDSLLKIINGNNQPILDTSSFKKQISQIDKKIQKNSDLYLNDFITMDELKDRTDSLQAEKKLLEAKISENKFNDSTDVFELVKTQLGSIPINELSYDNKKKIVNNLVSKVDVTADNVDIIFKFQLA

SEQ ID NO: 1981 - protein, 452 aa, synthetic construct
MKAAIYIRVSTREQVENYSIQAQTEKLTALCRSKDWDVYDIFIDGGYSGSNMNRPALNEMLSKLHEIDAVVVYRLDRLSRSQRDTITLIEEYFLKNNVEFVSLSETLDTSSPFGRAMIGILSVFAQLERETIRDRMVMGKIKRIEAGLPLTTAKGRTFGYDVVDTKLYINEEEAKQLQLIYDIFEEVQSITFLQKRLKKLGFKVRTYNRYNNWLTNDLYCGYVSYKDKVHVKGIHEPIISEEQFYRVQEIFTRMGKNPNMNRDSASLLNNLVVCGKCGLGFVHRRKDAMSRDKKYHYRYYSCKTYKHIHELEKCGNKTWRADKLEELIINRVNNYSLAGRNVDKEDELDGLNEKLKIEHAKKKRLFDLYINGSYEVSELDSLMSDIDAQINYYESQIEANEELKRNKKIQEDLADLATVDFDSLEFREKQLYLKSLINKIYIDGEQVTIEWL

SEQ ID NO: 1982 - protein, 452 aa, synthetic construct
MKAAIYIRVSTQEQVGNYSIQAQTEKLTALCRSKDWDVYDIFVDGGYSGSNMNRPALNEMLSKLHEIDAVVVYRLDRLSRSQRDTTTLIEEHFLKNNVEFVSLSETLDTSSPFGRAMIGILSVFAQLERETIRDRMVMGKIKRIEAGLPLTTAKGRTFGYDVIDTKLYINEEEAKQLQLIYDIFEEEQSITSLQKRLKKLGFKVRTYNRYNNWLTNDLYCGYVSYKDKVHVKGIHEPIISEEQFYRVQEIFTRMGKNPNMNRDSASLLNNLVVCSKCGLGFVHRSKDTVSRGKKYHYRYYSCKTYKHTHELEKCGNKTWRADKLEELVINRVNNYSFASRNVDKEDELDSLNEKLKIEHAKKRRLFDLYISGSYEVSELDSMMNDIDAQINHYESQIEANEELEENKKIQESLANLATVDFDSLEFREKQLYLKSLINKIYIDGEQVTIEWL

SEQ ID NO: 1983 - protein, 485 aa, synthetic construct
MTKKVAIYTRVSTTNQAEEGFSIDEQIDRLTKYAEAMGWQVSDTYTDAGLSGAKLERPAMQRLINDIENKAFDTVLVYKLDRLSRSVRDTLYLVKDVFTKNKIDFISLNESIDTSSAMGSLFLTILSAINEFERENIKERMTMGKLGRAKSGKSMMWAKTAFGYYHNRETGILEIAPLQAAIVEQIFTDYLSGTSLTKLRDKLNESGHIGKDIPWSYRTLRQTLDNPVYCGYIKFKGSLFEGMHKPIIPYETYLKVQKELEERQQQTYERNNNPRPFQAKYMLSGMARCGYCGAPLKIVLGHKRKDGSRTMKYHCANRFPRKTKGVTVHNDNKKCDSGTYDLSNLENTVIDNLIGLQENNDSLLEIINGNNQPILDTSSFKKQISLIDKKIQKNSDLYLNDFITMDELKARTDSLQAEKELLKAKISENKFSDSTDVFELVKTQLGSIPINELSYDNKKKIVNNLVSKVDVTADNVDIIFKFQLA

SEQ ID NO: 1984 - protein, 485 aa, synthetic construct
MTKKVAIYTRVSTTNQAEEGFSIDEQIDRLTKYAEAMGWQVSDTYTDAGLSGAKLERPAMQRLISDIENKAFDTVLVYKLDRLSRSVRDTLYLVKDVFTKNKVDFISLNESIDTSSAMGSLFLTILSAINEFERENIKERMTMGKLGRAKSGKSMMWTKTAFGYYHNRKTGILEIVPLQATIVEQIFTDYLSGISLTKLRDKLNESGHIGKDIPWSYRTLRQTLDNPVYCGYIKFKDSLFEGMHKPIIPYETYLKVQKELEVRQQQTYERNNNPRPFQAKYMLSGTARCGYCGAPLRIVLGHKRKDGSRTAKYHCANRFPRKTKGTTVYNDNRRCDSGAYDLSNLENTVIDNLIGFQEDNDSLLKIINGNDQPILDTSSFEEQISQIDKKIQKNSDLYLNDFITMDELKDRTDSLQAEKKLLKAKISENKFNDSTDVFELVKTQLGSIPINELSYDNKKKIVNNLVSKVDVTADNVDIIFKFQLA

SEQ ID NO: 1985 - protein, 485 aa, synthetic construct
MTKKVAIYTRVSTANQAEEGFSIDEQVDRLTKYAEAMGWQVSDTYTDAGFSGAKLERPAMQRLINDIENKAFDTVLVYKLDRLSRSVRDTLYLVKEVFTKNKIDFISLNESIDTSSAMGSLFLTILSAINEFERENIKERMTMGKLGRAKSGKSMMWTKTAFGYYHNRTTGILEIVPLQAAIVEQIFTDYLSGISLTKLRDKLNESGHIGKDIPWSYRTLRQTLDNPVYCGYIKFKDSLFEGMHKPIIPHETYLEVQKELEERQRQTYERNNNPRPFQAKYMLSGMARCGYCGAPLKIVLGRKRKDGSRTMKYHCANRFPRKTKGVTVYNDNKRCDSGTYDLSSLENTVIDSLIGFQENNDSLLKIINGNSQPILDTSSFRKQISQIDKKIQKNSDLYLNDFITMDELRDRTDSLQAEKKLLEAKISENKFNDSTDVFELVKTQLGSIPINELSYDNKKKIVNNLVSKVDVTADNVDIIFKFQLA

SEQ ID NO: 1986 - protein, 469 aa, synthetic construct
MSYTTPVRAAVYLRISEDRSGEQLGVARQREDCLKLCDQRKWVPVEYLDNDVSASTGKRRPAYEQMLADITAGKIAAVVAWDLDRLHRRPIELEAFMSLADEKRLALATVAGDVDLATPQGRLVARLKGCVAAHETEHKKARQRRAARQKAERGHPNWSKAFGYLPGPDGPEPDPRTAPLVKQAYADILAGASLGDVCRQWNDAGAFTITGRPWTTTALSKFLRKPRNAGLRAYKGARYGPVDRDAIVGKAQWSPLVDEATFWAAQAVLDAPGRAPGRKSVRRHLLTGLAGCGKCGNHLAGSYRTDGQVVYVCKACHGVSILAVNIEPILYHIVAERLAMPDAVDMLRREIHDAAEAETIRLELETLYGELDCLAVERAEGLLTARQVKISTDIVNAKITELRARQLDQERLRVLNGIPLGTPQAAGMIAELSPDRFRAVLDVLAEVVVQPVGKSGRIFNPERVQVNWR

SEQ ID NO: 1987 - protein, 452 aa, synthetic construct
MKAAIYIRVSTREQVENYSIQAQTEKLTALCRSKGWDVYDIFIDGGYSGSNMNRPALNEMLSKLHEIDAVVVYRLDRLSRSQRDTVTLIEEYFLKNNVEFVSLSETLDTSSPFGRAMIGILSVFAQLERETIRDRMVMGKIKRIEAGLPLTTAKGRTFGYDVIDTKLYINEEEAKQLQLIYDIFEEEQSITSLQKRLKKLGFKVHTYNRYINWLTNDLYCGYVSYKDRVHVKGIHEPIISEEQFYRVQEIFTRIGKNPNMNRDSASLLNGLVVCSKCGLGFVHRRKDTTSRGKKYHYRYYSCKTYKHIHELEKCGNKIWRADKLEELVINRVNNYSVASRNADKEDELDSLNEKLNIEHAKRRRLFDLYINGSYEVSELDCMMNDIDARISYYESQIEANEELKKDKKIQETLADLATVDFDSLEFREKQLYLRSLISRIYIDGEQVTIEWL

SEQ ID NO: 1988 - protein, 452 aa, synthetic construct
MKAAIYIRVSTQEQVGNYSIQAQTEKLTALCRSKGWDVYDIFIDGGYSGSNMNRPALNEMLSKLHEIDAVVVYRLDRLSRSQRDTTTLIEEYFLKNNVEFVSLSETLDTSSPFGRAMIGILSVFAQLERETIRDRMVMGKIKRIEAGLPLTTAKGRTFGYDVIDTKLYINEEEAKQLQLIYDIFEEEQSITSLQKRLKKLGFKVRTYNRYNNWLTNDLYCGYVSYKDKVHVKGIHEPIISEEQFYRVQEIFTRMGKNPNMNRDSTSLLNNLVVCSKCGLGFVHRSKDTMCRGKKYHYRYYSCKTYKHAHELEKCGNKTWRADKLEELVINRVNNYSFASRNADKEDELDSLNEKLKIEHARKKRLFDLYINGSYEVSELDSMMNDIDAQINYYESQIEASEELKKNKKVQENLANLAAVDLDSLEFREKQLYLKSLINKIYIDGEQVTIDWL

SEQ ID NO: 1989 - protein, 469 aa, synthetic construct; identical to SEQ ID NO: 1703

SEQ ID NO: 1990 - protein, 452 aa, synthetic construct
MKAAIYIRVSTREQVENYSIQAQTERLSALCRSKGWDVYDIFIDGGYSGSNMNRPALNEMLSKLHEIDAVVVYRLDRLSRSQRDTITLIEEYFLKNNVEFVSLSETLDTSSPFGRAMIGILSVFAQLERETIRDRMVMGKIKRIEAGLPLTTAKGRTFGYDVIDAKLYINEEEAKQLQLIYDIFEEEQSITFLQKRLKKLGFKVRTYNRYNNWLTNDLYCGYVSYKDKVHVKGIHEPIISEEQFYRVQEIFTRMGKNPNMNRGSASLLNNLVVCGKCGLGFVHRRKDAMSRDKKYHYRYYSCKTYKHIHELEKCGNKVWRADKLEELIINRVNNYSLASRNVDKEDELGSLNEKLEIEHAKKKRLFELYINGSFEVSELDSMMNDIDTQINYYESRIEANEELKKNKKIQENLAHLAIVDFDSLEFREKQLYLKSLINKIYIDGEQVTIEWL

SEQ ID NO: 1991 - protein, 469 aa, synthetic construct
MSYTTPMRAAMYLRISEDRSGEQLGVARQREDCLKLCAQRKWVPVEYLDNDVSASTGKRRPAYEQMLADITAGKIAAVVAWDLDRLHRRPVELEAFMSLADEKRLALATVAGDVDLATPQGRLVARLKGCVAAHETEHKKARQRRAARQKAERGLPNWSKAFGYLPGPNGPEPDPRTAPLVKRAYADILAGASLGDVCRRWNDAGAFTITGRPWTTTTLSKFLRKPRNAGLRAYKGARYGPVDRDAIVGKAQWSPLVDEATFWAAQAVLDAPGRAPGRKSVRRHLLTGLAGCGKCGNHLAGSYRTDGRVVYVCKACHGIAILADNIEPILYHIVAERLAMPDAVGLLRREIHDAAEAETIRLELETLYGELDRLAVERAEGLLTARQVKISTDIVNAKITNLQACQLDQERLRVFDGIPLGTPQVAGMIAGLSPDRFRAVLDVLAEVVVQPVGKGGRIFNPERVQVNWR

SEQ ID NO: 1992 - protein, 452 aa, synthetic construct
MKAAIYIRVSTREQVENYSIQAQTEKLTALCRSKDWDVYDVFIDGGYSGSNMNRPALNEMLGKLHEIDAVVVYRLDRLSRSQRDTITLIEEYFLKNNVEFVSLSETLDTSSPFGRAMIGILSVFAQLERETIRDRMVMGKIKRVEAGLPLTTAKGRTYGYDVIDTKLYINEEEAKQLQLIYDIFEEEQSITSLQKRLKKLGFKVRTYSRYISWLTNDLYCGYVRYKDKVHVKGIHEPIISEEQFYRVQEIFTRTGKNPNMNRDSASLLNNLVVCSKCGLGFVHRRKDTVSRGKKYHYRYYSCKTYKHTHELEKCGNKIWRADKLEELIINRVHNYSFASRNVDKVDELDSLNEKLKIEHAKKKRLFDLYINGSYEVSELDSTMSDIDAQINYYESQIEANEELKKNKKIQENLANLATVDFDSLEFREKQLYLKSLINKIYIDGEQVTIEWL

SEQ ID NO: 1993 - protein, 469 aa, synthetic construct
MSYTTPVRAAVYLRISEDRSGEQLGVARQREDCLKLCGQRKWVPVEYLDNDVSASTGKRRPAYEQMLADITAGKITAVVAWDLDRLHRRPIELEAFMSLADEKRLALATVAGDVDLATPQGRLVARLKGSVAAHETEHKKARQRRAARQKAERGHPNWSKAFGYLPGPNGPEPDPRTAPLVKQAYADILAGASLGDVCRQWNDAGAFTITGRPWTTTTLSKFLRKPRNAGLRAYKGARYGPVDRDAIVGKAQWSPLVDEATFWAAQAVLDAPGRAPGRKSVRRHLLTGLAGCGKCGNHLAGSYRTDGRVVYVCKACHGVAILADNIEPILYHIVAERLAMPDAVGLLRREIHDAAEAETVRLELETLYGELDRLAVERAEGLLTARQVKISTDIVSAKITKLQARQLDQERLRVFDGIPLGTPQVAGVIAELSPDRFRAVLDVLAEVVVQPVGKSGRIFNPERVQVNWR

SEQ ID NO: 1994 - protein, 485 aa, synthetic construct
MSKKVAIYTRVSTTNQADEGFSIDEQIDRLTKYAEAMGWQVSDTYTDAGVSGAKLERPAMQRLINDIENKAFDTVLVYKLDRLSRSVRDTLHLVKDVFTKNKIDFISLNESIDTSSAMGSLFLTILSAINEFERENIKERMTMGKLGRAKSGKSMMWTKTAFGYYHNRKTGILEIVPLQAAIVEQIFTDYLSGISLTKLRDKLNESGHIGKDIPWSYRTLRQTLDNPVYCGYIKFKDSLFEGMHKPIIPYETYLKVQKELEERQQQTYERNNNPRPFQAKYMLSGIARCGYCGAPLRVVLSHKRKDGSRTMKYHCANRFPRKTKGITVYNDNKKCDSGTYDLSNLENTVIDNLVGFQENDDSLLKIINGNNQPILDTSSFKKQISQIDKKIRKNSDLYLNDFITMDELKDRTDSLQAEKKLLKAKVSENKFNDSTDVFELVKTQLGSIPINELSYDNKKKIVNNLVSKVDVTADNVDIIFKFQLT

SEQ ID NO: 1995 - protein, 469 aa, synthetic construct
MSYTTPVRAAVYLRISEDRSGEQLGVARQREDCLKLCGQRKWVPVEYLDNDVSASTGKRRPAYEQMLADITAGKIAAVVAWDLDRLHRRPVELEAFMSMADEKRLALATVAGDVDLATPQGRLVARLKGCVAAHETEHKKARQRRAARQKAERGLPNWSKAFGYLPGPNGPEPDPRTAPLVKQAYADILAGASLGDVCRQWNGAGAFTITGRPWTTTALSKFLRKPRNAGLRAYKGARYGPVDRDAIVGKAQWSPLVDEATFWAAQAVLDAPGRAPGRKSVRRHLLTGLAGCGKCGNHLAGSYRTDGRVVYVCKACHGVAILADNIEPILYHIVAERLAMPGAVDLLRHEIHDAAEAEAIRLELETLYGELDRLAVERAEGLLTARQVKISTDIVNAKITKLQARRLDQERLRVFDGIPLGTPQVAGMIAELSPNRFRAVLDVLAEVVVRPVGKGGRMFNPERVQVNWR

SEQ ID NO: 1996 - protein, 469 aa, synthetic construct
MSYTTPVRAAVYLRISEDRSGEQLGVARQREDCLKLCDQRKWVPVEYLDNDVSASTGKRRPAYEQMLADITAGKIAAVVAWDLDRLHRRPVELEAFMSLADEKRLALATVAGDVDLATPQGRLVARLKGSVAAHETEHKKARQRRAARQKAERGYPNWSKAFGYLPGPNGPEPDPRTAPLVKQAYTDILAGASLGDVCRQWNDAGAFTITGRPWTTTTLSKFLRKPRNAGLRAYKGARYGPVDRDAIVGEAQWSPLVDEGTFWAAQAVLDAPGRAPGRKSVRRHLLTGLAGCGKCGNHLAGSCRTDGRVVYVCKACHGVSILAVNIEPILYHIVAERLAKPDAMDLLRREIHDAAEAETIRLELETLYGELDRLAVERAEGLLTARQVKISTDIVNAKITKLQIRQLNQERLRVFDGIPLGTPQVAGTIAELSPDRFRAVLDVLAEVVVQPVGKSGRIFNPERVQVNWR

SEQ ID NO: 1997 - protein, 485 aa, synthetic construct
MTKKVAIYTRVSTTNQAEEGFSIDEQIDRLTKYAEAMGWQVSDTYTDAGFSGAKLERPAMRRLINDIENRAFDTVLVYKLDRLSRSVRDTLYLVKDVFTKNKIDFVSLNESIDTSSAMGSLFLTILSAINEFERENIKERTTMGKLGRAKSGKSMMWTKTAFGYYHNRKTGILEIVPLQATIVEQIFTDYLSGISLTKLRDKLNESGHIGKDIPWSYRTLRQTLDNPVYCGYIKFKDSLFEGMHKPIIPYETYLKVQKELEERQQQTYERNNNPRPFQAKYMLSGMARCGYCGAPLRIVLGHKRKDGSRTMKYHCANRFPRKTKGVTVYNDNKKCDSGTYDLSNLENTVIDNLIGFQENNDSLLKIINGNNQPILDTSSLKKQISQIDKKIQKNSDLYLNDFITMDELKDRTDSLQAEKKLLRAKISENKLNDSADVFELVKTQLGSIPINELSYDNKKRIVNNLVSRVDVTADNVDIIFKFQLA

SEQ ID NO: 1998 - protein, 485 aa, synthetic construct
MTKKVAIYTRVSTTNQAEEGFSIDEQIDRLTKYAEAMGWQVSDTYTDAGFSGAKLGRPAMQRLINDIENKAFDTVLVYKLDRLSRSVRDTLYLVKDVFTKSKIDFISLNESIDTSSAMGSLFLTILSAINEFERENIKERMTMGKLGRAKSGKSMMWTKTAFGYYHNRKTGVLEIVPLQATIVEQIFTDYLSGISLTKLRDKLNESGHIGKDIPWSYRTLRQTLDNPVYCGYIKFKDSLFEGMHKPIIPYETYLKVQKELEERQQQTYERNNNPRPFQAKYMLSGMARCGYCGAPLRIVLGHKRKDGSRTMKYHCANRFPRKTKGVTVYNDNKKCVSGTYDLSNLENTVIDNLIGFQENNDSLLKIINGNNQPIQDTNSFRKQISQIDRKIQKNSDLYLNDFITMDELKDRTDSLQAEKKLLEAKISENKFNDSTDVFELVKTQLGSIPINELSYDNKKKIVNNLVSKVDVTADNVDIIFKFQLA

SEQ ID NO: 1999 - protein, 452 aa, synthetic construct
MKAAIYIRVSTREQVENYSIQAQTEKLTALCRSKDWDVYDIFIDGGYSGSNMNRPALNEMLSKLHEIDAVVVYRLDRLSRSQRDTITLIEEYFLKNNVEFVSLSETLDTSSPFGRAMIGILSVFAQLERETIRDRMVMGKIKRIEAGLPLTTAKGRTFGYDVIDTKLYINEEEAKQLQLIYDIFEEEQSITSLQKRLKKLGFKVRTYNRYNNWLTNDLYCGYVSYKDKVHVKGIHEPIISEEQFYRVQEIFARMGKNPNMNRDSASLLNNLVVCSKCGLGFVHRRKDAMSRDKKYHYRYYSCKTYKHIHELEKCGNKIWRADKLEELIINRVNNYSITSRNADKEDELDSLSEKLKIEHAKKKRLFELYINGSYEVSELDSMMNDIDAQINYYESQIEANEELKKNKKIQENLAYLATVDFDSLEFREKQLYLKSLINKIYVDGEQVTIEWL

SEQ ID NO: 2000 - protein, 485 aa, synthetic construct
MTKKVAIYTRVSTTNQAEEGFSIDEQIDRLTKYAEAMGWQVSDTYTDAGFSGAKLERPAMQRLINDIENEAFDTVLVYKLDRLSRSVRDTLYLVKEVFTKNKIDFISLNESIDTSSAMGSLFLTILSAINEFERENIRERMTMGKLGRAKSGKSMMWTKTAFGYYHNRKTGILEIVPPQATIVEQIFTDYLSGISLTKLRDKLNESGHIGKDIPWSYRTLRQTLDNPVYCGYIKFKDSLFEGMHKPIIPYETYLKVQKELEERQQQTYERNNNPRPFQAKYMLSGMARCGYCGAPLRIVLGHKRKGGSRTMKYHCANRFPRKTRGVTVYNDNKKCDSGTYDLGNLENTVIDNLIGFQENNDSLLRIINGNNQPILDTSSLKKQISQIDKKIQKNSELYLNDFITMDELKDRTDSLQAEKKLLKAKISENKFNDSTDVFELVKAQLGSIPINELSYDDKKKIVNNLVSKVDVTADNVNIIFKFQLA

SEQ ID NO: 2001 - protein, 452 aa, synthetic construct
MKAAIYIRVSTQEQVGNYSIQAQTEKLTALCRSKDWDVYDIFIDGGYSGSNMNRPALNEMLSKLHEIDAVVVYRLDRLSRSQRDTTTLIEEYFLKNNVEFVSLSETLDTSSPFGRAMIGILSVFAQLERETIRDRMVMGKIKRIEAGLPLTTAKGRTFGYDVIDTRLYINEEEAKQLQLIYDIFEEEQSITFLQKRLKKLGFKVRTYNRYHKWLTNDLYCGYVSYKDKVHVKGIHEPIISEEQFYRVQEIFTRMGKNPNMSRGSASLLNNLVVCSKCGLGFVHRSKDTMNRGKKYHYRYYSCKTYKHTHELEKCGNKTWRADKLEELIINRVNNYSFASRNVDKEGELDSLSEKLKIEHAKKKRLFDLYINGGYEVSELDSMMNDIDAQINYYESQIEANEELKKNKKIQENLADLATVDFDSLEFREKQLYLKSLISKIYIDGEQVTIEWL

SEQ ID NO: 2002 - protein, 469 aa, synthetic construct
MSYTTPVRAAVYLRISEDRSGEQLGVARQREDCLELCDQRKWVPVEYLDNDVSASTGKRRPAYEQMLADIAAGKIAAVVAWDLDRLHRRPIELEAFMSLADEKRLALATVAGDVDLATPQGRLVARLKGSVAAHETEHKKARQRRAARQKAERGYPNWSKAFGYLPGPNGPEPDPRTAPLVKQAYTDILAGASLGDVCRQWNDAGAFTITGRPWTTTTLSKFLRKPRNAGLRAYKGARYGPVDRDAIVGKAQWSPLVDEATFWAAQAVLDAPGRAPGRKSVRRHLLTGLAGCGKCGNHLAGSYRTDGQVVYVCKVCHGVSILAVNIVPILYHIVAERLAMPDAVDLLCREIHDAAEAETIRLELESLYDELDHLAVERAEGLLTARQVKISTDIVNAKITKLQARQLDQERLRVLDGIPLGTPQVAGMIAELSPDRFRAVLDVLAEVVVQPAGKSGRVFNPERVQVNWR

SEQ ID NO: 2003 - protein, 452 aa, synthetic construct
MKAAIYIRVSTREQVENYSIQAQTEKLTALCRSKDWDVYDIFIDGGYSGSNMNRPALNEMLSKLHEIDAVVVYRLDRLSRSQRDTITLIEEYFLKNNVEFVSLSETLDTSSPFGRAMIGILSVFAQLERETIRDRMVMGKIKRIEAGLPLTTAKGRTFGYDVIDTKLYINEEEAKQLQLIYDIFEEEQSITSLQKRLKKLGFEVRTYNRYNNWLTNDLYCGYVSYKDKVHVKGIHEPIISEEQFYRVQEIFARMGKNPNMNRDSASLLNNLVVCSKCGLGFVHRRKDTMSRGKKYHYRYYSCKTYKHIHELEKCGNKIWRADKLEELIINRVNNYSFTSRNVDKEDELDSLNERLKIEHAKKKRLFDLYINGSYEVSELDSMMNDIDAQISYYESQIEANEEQKKNKKIQENLANLATVDYDSLEFREKQLYLKSLINKIYIDGEQVTIEWL

SEQ ID NO: 2004 - protein, 452 aa, synthetic construct
MKAAIYIRVSTREQVENYSIQAQTEKLTALCRSKDWDVYDIFVDGGYSGSNMNRPALNEMLSKLHEIDAVVVYRLDRLSRSQRDTITLIEEYFLKNNVEFVSLSETLDTSSPFGRAMIGILSVFAQLERETIRDRMVMGKIKRIEAGLPLTTAKGRTFGYNVIDTKLYINEEEAKQLQLIYDIFEEEQSITFLQKRLKKLGFKVRTYNRYNNWLTNDLYCGYVSYKDKVHVKGIHEPIISEEQFYRVQEIFTRMGKNPNMNRDSASLLSNLVVCSKCGLGYVHRRKDTMSRDKKYHYRYYSCKTYKHIHELEKCGNKIWRADELEELIINRVNNYSFASRNADKEDELDSLNEKLKIEHAKKRRLFDLYINGRYEASELDSMMNDIDAQINYYESQIGANEELKKNKKIQENLANLATVDFDSLEFREKQLYLKSLINKIYIDGEQVTIEWV

SEQ ID NO: 2005 - protein, 469 aa, synthetic construct
MSYITPMRAAVYLRISEDRSGEQLGVARQREDCLKLCGQRKWVPVEYLDNDVSASTGKRRPAYEQMLADITAGKIAAVVAWDLDRLHRRPVELEAFMSLADEKRLALATVAGDVDLATPQGRLVARLKGSVAAHETEHKRARQRRAARQKAERGLPNWSEAFGYLPGPNGPEPDPRTAPLVRQAYADILAGASLGDVCRRWNDAGAFTITGRPWTTTTLSKFLRKPRNAGLRAYKGARYGPVDRDAIVGRAQWSPLVDEATFWAAQAVLDAPGRAPGRKSVRRHLLTGLAGCGKCGYHLAGSYRTDGKVVYVCKACHGVAILADNIEPILYHIVAERLAMPDAVGLLRREIHDVAEAETIRLELETLCGELDRLAVERAEGLLTARQVKISTDIVNAKITKLQARQLDQERLRVFGGIPLGTPQVAGMIAELSPDRFRAVLDVLAEVVVQPVGKSGRIFNPERVQVNWR

SEQ ID NO: 2006 - protein, 452 aa, synthetic construct
MKAAIYIRVSTREQVENYSIQAQTEKLTALCRSKDWDVYDIFIDGGYSGSNMNRPALNEMLSKLHEIDAVVVYRLDRLSRSQRDTITLIEEYFLKNNVEFVSLSETLDTSSPFGRAMIGILSVFAQLERETIRDRMVMGKIKRIEAGLPLTTAKGRTFGYDVIDTKLYINEEEAKQLQLIYDIFEEEQSITFLQKRLKKLGFKVRTYSRYNSWLTNDLYCGYVSYKDKVHVKGIHEPIVSEEQFYRVQEIFTRMGKNPNMNRDSASLLNNLVVCSKCGLSFVHRRKDTMSRGKKYHYRYYSCKTYKHTHELEKCGNKIWRADKLEELIINRVDNYSLASRNVDKEDELDSLNEKLKIEHAKKKRLFDLYISGSYEVSELDSMMSEIDAQINYYESQIEANEELKRNKKIQENLANRATVDYDSLEFREKQLYLKSLINKIYIDGEQVTIEWL

SEQ ID NO: 2007 - protein, 452 aa, synthetic construct
MKAAIYIRVSTQEQVGNYSIQAQTEKLTALCRSKGWDVYDIFIDGGYSGSNMNRPALNEMLSKLHEIDAVVVYRLDRLSRSQRDTTTLIEEYFLKNNVEFVSLSETLDTSSPFGRAMIGILSVFAQLERETIRDRMVMGKIKRIEAGLPLTTAKGRTFGYDVIDTKLYINEEEAKQLQLIYDIFEEEQSITSLQKRLKKLGFKVRTYNRYNNWLTNDLYCGYVSYKDKVHVKGIHEPIISEEQFYRVQEIFTRIGKNPNMNRDSASLLNNLVVCGKCGLSFVHRSKDTMSRGKKYHYRYYSCKTYKHTHELEKCGNKTWRADKLEELIINRVNNYSFAGRNVGREDELDSLNEKLKTEHAKKKRLFDLYINGSYEASELDCMMNDIDAQISYYESQIEANEERKETKKIKENLADLATVDFGSLEFRGKQLYLKSLINKIYIDGEQVTIEWL

SEQ ID NO: 2008 - protein, 452 aa, synthetic construct
MKAAIYIRVSTREQVENYSIQAQTEKLTALCRSKDWDVYDIFIDGGYSGSNMSRPALNEMLSKLHEIDAVVVYRLDRLSRSQRDTITLIEEYFLKNNVEFVSLSETLDTSSPFGRAMIGILSVFAQLERETIRDRMVMGKIKRIEAGLPLTTAKGRTFGYDVIDTKLYINEEEAKQLRLIYDIFEEEQSITLLQKRLKKLGFKVRTYNRYNNWLTNDLYCGYVSYKDKVHVKGIHEPIISEEQFYRVQEIFTRMGKNPNMNRDSASLLSSLVVCSKCGLGFVHRRKDAMSRDKKYHYRYYSCKTYKHIHELEKCGNKIWRADKLEELIINRVNNYSFASRNADKEDELDSLNEKLKIEHAKKKRLFDLYISGSYEVSELDSMMNDIDAQINYYESQIEANEELKKNKKIQENLADLATVDFDSLEFREKQLYLKSLINKIYIDGEQVTIEWL

SEQ ID NO: 2009 - protein, 452 aa, synthetic construct
MKAAIYIRVSTREQVENYSIQAQTEKLTALCRSRDWDVYDIFIDGGYSGSNTNRPALNEMLSRLHEIDAVVVYRLDRLSRSQRDTITLIEEYFLKNNVEFVSLSETLDTSSPFGRAMIGILSVFAQLERETIRDRMVMGKIKRIEAGLPLTTAKGRTFGYDVVDTKLYINEEEAKQLRLIYDIFEEEQSITFLQKRLKKLGFKVRTYNRYNNWLTNDLYCGYVSYKDKVRVKGIHEPIISEEQFYRVQEIFTRMGKNPNMNRDSASLLNNLVVCSKCGLGFVHRRKDAMSRDKKYHYRYYSCKTYKHIHELEKCGNKIWRADKLEELIINRVNDYSLASRNVDKEDELDSLNEKLKTEHAKKKRLFDLYINGSYEVSELDSMMSDIDAQINYYESQIEANEELKKNRKIQENLANLATVDFDSLEFREKQLYLKSLINKIYIDGEQVTIEWL

SEQ ID NO: 2010 - protein, 469 aa, synthetic construct
MSYTTPVRAAVYLRISEDRSGEQLGVARQREDCLKLCGQRKWVPVEYLDNDVSASTGKRRPAYEQMLADIAAGKIAAVVAWDLDRLHRRPIELEAFMSLADEKRLALATVAGDVDLSTPQGRLVARLKGCVAAHETEHKKARQRRAARQKAERGLPNWSKAFGYLPGPNGPEPDPRTAPLVKQAYADILAGASLGDVCRQWNDAGAFTITGRPWTTTTLSKFLRKPRNAGLRAYKGARYGPVDRDAIVGKAQWSPLVDEATFWAAQAVLDAPGRAPGRKSVRRHLLTGLAGCGKCGSHLAGSYRTDGRVVYVCKACHGVAILADNIEPILYHIVAERLAMPDAVDLLCREIHDAAEAETIRLELETLYGELDRLAVERAEGLLTARQVKISTDIVNAKITKLQARQLDQERLRVFDGIPLGTPQVAGMIAELSPDRFRAVLDVLAEVVVQPVGKSGRIFNPERVQVNWR

SEQ ID NO: 2011 - protein, 485 aa, synthetic construct
MTKKVAIYTRVSTTNQAEEGFSIDEQIDRLTKYAEAMGWQVSDTYTDAGSSGAKLERPAMQRLINDIGNKAFDTVLVYKLDRLSRSVRDTLYLVKDVFTKNKIDFISLNESIDTSSAMGSLFLTILSAINEFERENIKERMTMGKLGRAKSGKSMMWTKTAFGYHHNRKTGILEIVPLQATVVEQIFTDYLSGISLTKLRDKLNENGHIGKDIPWSYRTLRQTLDNPVYCGYIKFKDSLFEGMHKPIIPYETYLKVQKELEERQQQTYERNNNPRPFQAKYMLSGMARCGYCGAPLKIVLGHKRKDGSRTMKYHCANRFPRKTKGVTVYNDNKKCDSGTYDLSNLENTVIDNLIGFQENNDSLLKIINGNNQPILDASSLKEQISQIDKKIQKNSDLYLNDFITMDELKDRTDSLQAEKKLLKAKISENEFNDSTDVFELVKTQLGSIPINELSYDNKKKIVNNLVSKVDVTADNVDIIFKFQLA

SEQ ID NO: 2012 - protein, 469 aa, synthetic construct
MSYTTPVRAAVYLRISEDRSGEQLGVARQREDCLKLCNQRKWVPVEYLDNDVSASTGKRRPAYEQMLADITEGKIAAVVAWDLDRLHRRPIELEAFMSLADEKRLALATVAGDVDLTTPQGRLVARLKGSVAAHETEHKRARQRRAARQKAERGHPNWSKAFGYLPGPNGPEPDPRTAPLVKQAYADILTGASLGDVCRQWNNVGAFTITGRPWTTTTLSKFLRKPRNAGLRAYKGARYGPVDRDAIVGKAQWSPLVDEATFWAAQAVLDAPGRAPGRKSVRRHLLTGLAGCGKCGNHLAGSYRTDGRVAYVCKACHGVAILADNIEPFLYRIVAERLAMPDAVDLLRREIHDAAEAETIRLELETLYGELDRLAIERAEGLLTARQVKISTDIVSAKITKLQARQLDQERLRVFDGIPLGTPQVAGTIAELSPDRFRAVLDVLAEVVVQPVGKSGRIFNPERVQVNWR

SEQ ID NO: 2013 - protein, 469 aa, synthetic construct
MSYTTPVRAAVYLRISEDRSGEQLGVARQREDCLKLCDQRKWVPVEYLDNDVSASTGKRRPAYEQMLADITAGKIAAVVAWDLDRLHRRPIELEAFMSLADEKRLALATVAGDVDLATPQGRLVARLKGCVAAHETEHKKARQRRAARQKAERGHPNWSKAFGYLPGPNGPEPDPRTAPLVKQAYTDILAGASLGDVCRQWNDAGAFTITGRPWTATTLSKFLRKPRNAGLRAYKGARYGPVDRDAIVGKAQWSPLVDEATFWAAQAVLDAPGRAPGRKSVRRHLLTGLAGCGKCGNRLAGSYRTDGRVVYVCKACHGVAILADNIEPTLYHIVAERLAVPDAVDLLRREIHDVVEAETIRLELETLYGELDRLAVERAEGLLTARQVKISTDIVNAKITKLQARQLDQERLRVLDGIPLGTPQVAGTIAGLSPDRFRAVLDVLAEVVVQPVGKSGRIFNPERVQVNWR

SEQ ID NO: 2014 - protein, 452 aa, synthetic construct
MKAAIYIRVSTQEQVGNYSIQAQTEKLTALCRSKDWDVYDIFVDGGYSGSNMNRPALNEMLSKLHEIDAVVVYRLDRLSRSQRDTTTLIEEYFLKNNVEFVSLSETLDTSSPFGRAMIGILSVFAQLERETIHDRMVMGKIKRIEAGLPLTTAKGRTFGYDVIDTKLYINEEEAKQLQLIYDIFEEEQSITSLQRRLKKLGFKVRTYSRYNNWLTNDLYCGYVSYKDKVHVKGIHEPIISEEQFYRVQEIFTRMGKNPNMNRDSASLLNSLVVCSKCGLSFVHRSKDTMSRGKKYHYRYYSCKTYKHTHELEKCGNKTWRADKLEELIINRVNNYSFASRNVDKDDELDSLNERLKIEHAKKRRLFDLYINGSYEVSELDSMMNDIDAQINYYESQIEANEELRKNKKIQENLADLAAVDFDSLGLREKRLYLKSLINKIYIDGEQVTIEWL

SEQ ID NO: 2015 - protein, 469 aa, synthetic construct
MSYTTPVRAAVYLRISEDRSGEQLGVARQREDCLKLCDQRKWVPVEYLDNDVSASTGKRRPAYEQMLADITAGKIAAVVAWDLDRLHRRPIELEAFMSLADEKRLALATVAGDVDLATPQGRLVARMKASVAAHETEHKKARQRRAARQKAERGYPNWSKAFGYLPGPNGPEPDPRTAPLVKQAYADILAGASLGDVCRQWNDAGAFTITGRPWTTTTLSKFLRKPRNAGLRAYKGARYGPVDRDAIVGKAQWSPLVDEATFWAAQAVLDAPGRAPGRKSVRRHLLTGLAGCGKCGNHLAGSYRTDGRVVYVCKACHGVAILADNIEPILYHIVAERLAMPDAVDLLRREIHDAAEAETIRLELGTLYGELDRLAVERAEGLLTARQVKISTDIVNAKITKLQARQLDQERLRVFDGIPLGTPLAAGMIAELSPDRFRAVLDVLVEVVVQPVGKGGRIFNPERVKVNWR

SEQ ID NO: 2016 - protein, 469 aa, synthetic construct
MSYTTPVRAAVYLRISEDRSGEQLGVARQREDCLKLCGQRKWEPVEYLDNDVSASTGKRRPAYEQMLADITAGKIAAVVAWDLDRLHRRPIELEAFMSLADEKRLALATVAGDVDLATPQGRLVARLKGSVAAHETEHKKARQRRAARQKAERGHPNWSKAFGYLPGPNGPEPDPRTAPLVKQAYADILAGASLGDVCRQWDDAGAFTITGRPWTTTTLSKFLRKPRNAGLREYKGARYGPVDRDAIVGKAQWSPLVDEATFWAAQAVLDAPGRAPGRKSVRRHLLTGLAGCGKCGNHLAGSYRTDGKVVYVCKACHGVAILADNIEPILYHIVAERLAMPDAVDLLRRGTHDAVEAETIRLELETLYGELDRLAVERAEGLLTARQVKISTDIVNAKITKLQACQLDQERLRVLDGIPLGTPQVAGKIAELSPDRFRAVLDVLAEVVVQPVGKSGRIFNPERVQVNWR

SEQ ID NO: 2017 - protein, 452 aa, synthetic construct
MKAAIYIRVSTREQVENYSIQAQTEKLTALCRSKDWDVYDIFIDGGYSGSNMSRPALNEMLSKLHEIDAVVVYRLDRLSRSQRDTITLIEEYFLKNNVEFVSLSETLDTSSPFGRAMIGILSVFAQLERETIRDRMVMGKIKRIEAGLPLTTAKGRTFGYDVIDTKLYINEEEAKQLQLIYDIFEEEQSITFLQKRLKKLGFKVRTYNCYNSWLTNDLYCGYVSYKDKVHVKGIHEPIISEEQFYRVQEIFARMGKNPNMNRDSASLLNNLVVCGKCGLGFVHRRKDAMSRDKKYHYRYYSCKTYKHIHELEKCGNKIWRADKLEELIINRVNNYSLASRNVDKEDELDGLNEKLKIEHAKKRRLFDLYINGSYEVSELDSMMNDIDAQINYYESQIEASGELRKNKKTRENLANLATVDFDSLEFREKQLYLKSLINKIYIDGEQVTIEWK

SEQ ID NO: 2018 - protein, 485 aa, synthetic construct
MTKKVAIYTRVSTTNQAEEGFSIDEQIDRLTKYAEAMGWQVSDTYTDAGFSGAKLERPAMQRLINDIENKAFDTVLVYKLDRLSRSVRDTLYLVKDVFTKNKIDFISLNESIDTSSAMGSLFLTILSAINEFERENIKERMTMGKLGRAKSGKSMMWTKTAFGYYHNRKTGILEVVPLQATIVEQIFTDYLNGISLTKLRDKLNESGHIGKDIPWSYRTLRQTLDNPVYCGYIKFKDSLFEGMHKPIIPYETYLKVQKELEERQQQTYERNNNPRPFQAKYMLSGMARCGYCGAPLRIVLGHKRKDGSRTMKYHCANRFPRKTKGVTVYNDNKKCDSGTYDLSNLENTVIDNLIGFQVNNDSLLKIINGNNQPILDTSSFKKQISQIDKKIQKNSDLYLNDFITMDELKDRTGSLQAEKKLLKAKISENKFNDSTDVFELVKTQLGSIPINELSYDNKKKIVNSLVSKVDVTADNVDIIFKFQLA

SEQ ID NO: 2019 - protein, 452 aa, synthetic construct
MKAAIYIRVSTREQVENYSIQAQTEKLTALCRSKDWDVYDIFIDGGYSGSNMNRPALNEMLSKLHEIDAVVVYRLDRLSRSQRDTITLIEEYFLKNNVEFVSLSETLDTSSPFGRAMIGILSVFAQLERETIRDRMVMGKIKRIEAGLPLTTAKGRTFGYDVIDTKLYINEEEAKQLQLIYDIFEEEQSITFLQKRLKKLGFKVRTYNRYNNWLTNDLYCGYVSYKDKVHVKGIHEPIISEEQFYRVQEIFTRMGKNPNMNRDSASLLNNLVVCSKCGLGFVHRRKDIMSHGKKYHYRYYSCKTYKHIHELEKCGNKIWRADKLEELIINRVNNYSFASRNVDKEDELDSLNEKLKIEHAKKRRLFDLYINGSYEVSELDSMMNDIDAQINYYESRIEASEELKKNEKIQENLAYLATVDFDSLEFREKQLYLKSLINKIYIDGEQVTIEWL

SEQ ID NO: 2020 - protein, 452 aa, synthetic construct
MKAAIYIRVSTQEQVENYSIQAQAEKLTALCRSKDWDVYDIFIDGGYSGSNMNRPALNKMLSRLHEIDAVVVYRLDRLSRSQRDTITLIEEYFLKNNVEFVSLSETLDTSSPFGRAMIGILSVFAQLERETIRDRMVMGKIKRIEAGLPLTTAKGRTFGYDVIDTKLYINEEEAKQLRLIYDIFEEEQSITLLQKRLKKLGFEVRTYNRYSSWLTNDLYCGYVSYKDKVHVKGIHEPIISEEQFYRVQEIFTRMGKNPNMNRDSASLLNNLVVCSKCGLGFVHRRKDTVSRGKKYHYRYYSCKTYKHIHELEKCGNKIWRADELEKLIINRVNNYSFASRNVDKEDELDSLNEKLKIEHAKRKRLFDLYINGSYEVSELDSMMNDIDAQINYYEGQIEASEELKKNKKIQENLANLATVDYDSLEFREKQLYLKSLINKIYIDGEQVTIEWL

SEQ ID NO: 2021 - protein, 452 aa, synthetic construct
MKAAIYIRVSTQEQVENYSIQAQTERLTALCRSKDWDVYDIFIDGGYSGSNMNRPALNEMLSKLHEIDAVVVYRLDRLSRSQRDTTTLIEEYFLKNNVEFVSLSETLDTSSPFGRAMIGILSVFAQLERETIRDRMVMGKIKRIEAGLPLTTAKGRTFGYDVIDTKLYINEEEAKQLRLIYDIFEEEQSITSLQKRLKKLGLKVRTYNRYSSWLTNDLYCGYVSYKDKVHVKGIHEPIISEEQFYRVQEIFTRMGKNPNMNRDSASLLNNLVVCGKCGLGFVHRSKDTMSRGKKYHYRYYSCKTYKHTHELEKCGNKTWRADKLEELIINRVNNYSFASRNVDKEDELDSLNEKLSIEHAKKKRLFDLYINGSYEVSELDSMMSDIDAQINHYESQIEANEKLKKNKKIQENLADLATVDFDSLEFREKQQYLKSLINKIYIDGEQVTIEWL

SEQ ID NO: 2022 - protein, 486 aa, synthetic construct
MTKKVAIYTRVSTTNQAEEGFSIDEQIDRLTKYAEAMGWQVSDTYTDAGLSGAKLERPAMQRLINDIENKAFDTVLVYKLDRLSRSVRDTLYLVKDVFTKNKIDFVSLNESIDTSSAMGSLFLTILSAINEFERENIKERMTMGKLGRAKSGKSMMWTKTAFGYYHNRKTGILEVVPLQATIVEQIFTDYLSGISLTKLRDKLNESGHIGKDIPWSYRTLRQTLDNPVYCGYIKFKGSLFEGMHRPIIPYETYLRVQKELEERQQQTYERNNNPRPFQAKYMLSGMARCGYCGAPLKIVLGHKRKDGSRTTKYRCANRFPRKTKGVTVYNENKKCDSGTYDLSNLENTVIDNLIGFQEDNDSLLKIISGNNQPILDTSSFKKQISQIDRKIQKNSDLYLNDLITMDELKDRTDSLQAEKKLLKAKISENKFNDSTDVFELVKTQLGSIPINELSYDNKKKIVNNLVSKVDVTADNVDIIFKFQLAQ

SEQ ID NO: 2023 - protein, 485 aa, synthetic construct
MTKKVAIYTRVSTTNQAEEGFSIDEQIDRLTKYAEAMGWQVSDTYTDAGFSGAKLERPAMQRLINDIENKAFDTVLVYKLDRLSRSVRDTLYLVKDVFTKNKIDFISLNESIDTSSAMGSLFLTILSAINEFERENIKERMTMGKLGRAKSGKSMMWTKTAFGYYHNRKTGILEIVPLQATIVEQIFTDYLSGISLTKLRDKLNESGHIGKDIPWSYRTLRQTLDNPVYCGYIKFKDSLFEGMHKPIIPYETYLKAQKELEERQQQTYERNNNPRPFQAKYLLSGMARCGYCGAPLRIVLGHKRKDGSRTMKYHCANRFPRKTKGVTVYNDNKKCDSGTYDLNNLENTVIDSLIGFQENNDSLLKIINGNNQPIPDTSSFKKQISQIDKKIQKNSDLYLNDFITMDELKDRTDSLQAEKKLLKAKISENKSNDSTDVFELVKTQLGSIPINELSYDNKKKIVNNLVSKVDVTADNVDIIFKFQLA

SEQ ID NO: 2024 - protein, 452 aa, synthetic construct
MKAAVYIRVSTREQVENYSIQAQTEKLTALCRSKGWDVYGIFIDGGYSGSNMNRPALNEMLSKLHEIDAVVVYRLDRLSRSQRDTITLIEEYFLKNNVEFVSLSETLDTSSPFGRAMIGILSVFAQLERETIRDRMVMGKIKRIEAGLPLTTAKGRTFGYDVIDTKLYINEEEAKQLQLIYDIFEEEQSITFLQKRLKKLGFKVRTYSHYNNWLTNDLYCGYVSYKDIVHVKGIHEPIISEEQFYRVQEIFARMGKNPNMNRGSASLLNNLVVCSKCGLGFVHRRKDTMSRGKKYHYRYYSCKTYKHTHELEKCGNKIWRADKLEELIINRVNNYSFASRNVDKAEELDSLNEKLKVEHAKKKRLFDLYINGSYNVSELDSMMNGIDAQINYYESQIEANEELKKNKEIQGNLANLATVDFDSLEFREKQLYLKSLINKIYIDGEQVTIEWQ

SEQ ID NO: 2025 - protein, 452 aa, synthetic construct
MKAAIYIRVSTREQVENYSIQAQTEKLTALCRSKDWDVYDIFIDGGYSGSNMNRPALNEMLSKLHEIDAVVVYRLDRLSRSQRDTITLIEEYFLKNNVEFVSLSETLDTSSPFGRAMIGILSVFAQLERETIRDRMVMGKIKRIEAGLPLTTAKGRTFGYDVIDTKLYINEEEARQLQLIYDIFEEEQSITFLQKRLKKLGFKVRTYNRYRNWLTNDLYCGYVSYKDKVHVKGIHEPIISEEQFYRVQEIFTRMGKNPNMNRDSASLLNNLVVCSKCGLGFVHRRKDAKSRDKKYHYRYYSCKTYKHIHELEKCGNKIWRADKLEELIINRVNNYSFASRNADKEDELDSLNEKLKIEHAKKKRLFDLYINGSYEVSELDNMMNDIDAQINYYESLIEASEELKKNKKIQENLAYLATVDFDSLEFREKQLYLKSLINKVYIDGEQVTIEWL

SEQ ID NO: 2026 - protein, 485 aa, synthetic construct
MTKKVAIYTRVSTTNQAEEGFSIDEQIDRLTKYAEAMGWQVSDTYTDAGFSGAKLERPAMQRLINDIENKAFDTVLVYKLDRLSRSVRDTLYLVKEVFTKNKIDFISLNESIDTSSAMGSLFLTILSAINEFERENIKERMTMGKLGRAKSGKSMMWTRTAFGYYHNRKTGILEIVPLQATIVEQIFTDYLSGISLTKLRDKLNESGHIGKDIPWSYRTLRQTLDNPVYCGYIKFKDSLFEGMHKPIIPYETYLKVQKELEERQQQTYERNNNPRPFQAKYMLSGTARCGYCGAPLRIVLGHKRKDGSRTMKYHCANRFPRKTKGITVYNDNKKCDSGTYDLSNLENTVIDNLIGFQENNDSLLKIINGNSQPILDTSSFKKQISRIDKKIQKNSDLYLNDFITMDELKERTDSLRAEKKLLKAKISENKFNDSTDVFELVKTQLGSIPINELSYDNKKKIVNNLVSKVNVTADNVDIIFKFQLA

SEQ ID NO: 2027 - protein, 452 aa, synthetic construct
MKAAIYIRVSTREQVENYSIQAQTERLTALCRSKDWDVYDVFIDGGYSGSNMNRPALNEMLSKLHEIDAVVVYRLDRLSRSQRDTITLIEEYFLKNNVEFVSLSETLDTSSPFGRAMIGILSVFAQLERETIRDRMVMGKIKRIEAGLPLTTAKGRTFGYDVIDTKLYINEEEAKQLRLIYDIFEEEQSITFLQRRLKELGFKVHTYNRYNNWLTNDLYCGYVSYKDKVHVKGIHEPIISEEQFCRVQEIFTRMGKNPNMNRDSASLLNNLVVCSKCGLGFVHRRKDTMSRDKKYHYRYYSCKTYKHIHELEKCGNKIWRADKLEELIINRVSNYSLASRNVDKEDELDSLNEKLKTEHAKKKRLFDLYINGSYEVGELDSMMSDIDAQINYYESQIEANEELKENKKIQENLAGLATVDFDSLEFREKQLYLKSLINKIYIDGEQVTIEWL

SEQ ID NO: 2028 - protein, 485 aa, synthetic construct
MTKKVAIYTRVSTTNQAEEGFSIDEQIDRLTKYAEAMGWQVGDTYTDAGVSGAKLERPAMQRLINDIENKAFDTVLVYKLDRLSRSVRDTLYLVKDVFTKNKIDFVSLSESIDTSSAMGSLFLTILSAINEFERENIKERMTMGKLGRAKSGKSMMWTRTAFGYYHNRKTGILEIVPLQATIVEQIFTDYLSGISLTKLRDKLNESGHIGKDIPWSYRTLRQTLDNPVYCGYIKFKDSLFEGMHKPIIPYETYLKVQKELEERQQQTYVRNNNPRPFQAKYMLSGMARCGYCGAPLKVVLGHKRKDGSRTMKYHCANRFPRKTKGITVYNDNKKCDSGTYDLSNLENTVIDNLIGLQENNDSLLRIINGINQPILDTSSFKEQISQIDREIQKNSDLYLNDFITMDELKDRTDSLQAEKKLLKVKISENKFNDSTDVFELVKTQLGSIPINELSYDNKKKIVNNLVSKVDVTADNVDIIFKFQLA

SEQ ID NO: 2029 - protein, 485 aa, synthetic construct
MTRKVAIYTRVSTTNQAEEGFSIDEQIDRLTKYAEAMGWQVSDTYTDAGFSGAKLERPAMQRLINDIENKAFDTVLVYKLDRLSRSARDTLYLVKDVFTKNKIDFISLNESIDTSSAMGSLFLTILSAINEFERENIKERMTMGKLGRAKSGKSMMWTKTAFGYYHNRKTGILEIVPLQATIVEQIFTDYLSGTSLTKLRDKLNEGGHIGKDIPWSYRTLRQTLDNPVYCGYIKFKDSLFEGMHKPIIPYETYLKVQEELEKRQQQTYERNNNPRPFQAKYMLSGMARCGYCGAPLRIVLGHKRKDGSRTMKYHCANRFPRKTKGTTVYNDNEKCDSGTYDLNNLENTVIDNLIDIQENNNSLLKIINGNNQPILDTSSFKKQISQIDKKIQKNSDLYLNDFITMDELKDRTDSLQAEKKLLEAKISENKSNDSADVFELVKTQLGSIPINELSYDNKKKIVNNLVSKVDVTADNVDIIFKFQLA

SEQ ID NO: 2030 - protein, 452 aa, synthetic construct
MKAAIYIRVSTQEQVGNYSIQAQTEKLTALCRSKDWDVYDIFIDGGYSGSNMNRPALNKMLSKLHEIDAVVVYRLDRLSRSQRDTTTLIEEYFLKNNVEFVSLSETLDTSSPFGRAMIGILSVFAQLERETIRDRMVMGKIKRIEAGLPLTTAKGRTFGYDVIDTKLYINEEEAKQLQLIYNIFEEEQSITSLQKRLKKLGLKVRTYNRYNNWLTNDLYCGYVSYKDKVHVKGIHEPIISEEQFYRVQEIFTRMGKNPNMNRDSASLLNNLVVCSKCGLSFVHRSKDTMSRGKKYHYRYYSCKTYKHTHELEKCGNKIWRADELEELIINRVNNYSFASRNVDKEDELDSLNEKLETERAKKKRLFDLYINGSYEVSELDSMMNDIDAQINYYESQIEANEELRKNRKIQENLADLATVDFDGLEFRDKQLYLKSLINKVYIDGEQVTIEWL

SEQ ID NO: 2031 - protein, 452 aa, synthetic construct
MKAAIYIRVSTREQVENYSIQAQTEKLTALCRSKDWDVYDIFIDGGYSGSNMNRPALNEMLSKLHEIDAVVVYRLDRLSRSQRDTITLIEEYFLKNNVEFVSLSETLDTSSPFGRAMIGILSVFAQLERETIRDRMVMGKIKRIEAGLPLTTAKGRTFGYDVIDTKLYINEEEAKQLQLIYDIFEEERSITFLQKRLKGLGFKVRTYNCYNNWLTNDLYCGYVSYKDKVHVKGIHEPIISEEQFYRVQEIFTRMGKNPNMNRDSASLLNNLVVCSKCGLGFVHRRKDTVSRGKKYHYRYYSCKTYKHTHELEKCGNKIWRADKLEELIINRVNNYSLASRNVDKEDELDSLNEKLKIEHAKKKRLFDLYINGSYEVSELDSMMSDIDAQINHYESQIEASEELKKNKKIQENLADLVTVDFDSLEFREKQLYLKSLINKIYIDGEQVTIEWL

SEQ ID NO: 2032 - protein, 485 aa, synthetic construct
MTKKVAIYTRVSTTNQAEEGFSIDEQIDRLTKYAEAMGWQVSDTYTDAGFSGAKLERPAMQRLINDIENKAFDTVLVYKLDRLSRSVRDTLYLVKDVFTKNKIDFISLNESINTGSAMGSLFLTILSAINEFERENIRERMTMGKLGRAKSGKSMMWTKTAFGYYHNRKTGILEIVPLQATIVEQIFTDYLGGISLTKLRDRLNESGHIGKDIPWSYRTLRQTLDNPVYCGYIKFKDSLFEGKHKPIIPYETYRKVQKELEERQQQTYERNNNPRPFQAKYMLSGMARCGYCGAPLKIVLGHKRKDGSRTMRYHCANRFPRKTKGVTVYNDNKKCNSGTYDLSDLENTVIDNLIGFQENNDSLLKVINGNNQPILDTSSFEKQISQIDKKIQRNSDLYLNDFITMEELRDRTDSLQAEKKLLKAKISENKFNDSTDVFELVKTQLGSIPINELSYDNKKKIVNNLVSKVDVTADNVDIIFKFQLA

SEQ ID NO: 2033 - protein, 469 aa, synthetic construct
MSYTTPVRAAVYLRISEDRSGEQLGVARQREDCLKLCDQRKWEPVEYLDNDVSASTGKRRPAYEQMLADITAGKIAAVVAWDLDRLHRRPIELEAFMSLADEKRLALATVAGDVDLATPQGRLVARLKGSVAAHETEHKKARQRRAARQKAERGLPNWSKAFGYLPGPNGPEPDPRTAPLVEQAYADILAGASLGDVCRQWNDAGAFTITGRLWTTTTLSKFLRKPRNAGLRAYKGARYGPVDRDAIVGKAQWSPLVDEATFWAAQAVLDAPGRAPGRKSVRRHLLTGLAGCGKCGNHLAGSYRTDGRVVYVCKACHGVAILADNIEPILYRIVAERLAMPDAVDLLRREIHDAAEAETIRLELETLYGELDRLAVERAEGLLTARQVKISTDIVNAKITKLQARQLDQERLRVFDGIPLGTPQVAGMIAELSPDRFRAVLDVLAEVVVQPVGKSGKIFNPERVQVNWR

SEQ ID NO: 2034 - protein, 452 aa, synthetic construct
MKAAIYIRVSTQEQVENYSIQAQTEKLTALCRSKDWDVYDIFIDGGYSGSNMNRPALNEMLSKLHEIDAVVVYRLDRLSRSQRDTTTLIEEYFLKNNVEFVSLSETLDTSSPFGRAMIGILSVFAQLERETIRDRMVMGKIKRIEAGLPLTTAKGRTFGYDVIDTKLYINEEEAKQLQLIYDIFEEEQSITSLQKRLKKLGFKVRTYNRYNNWLTNDLYCGYVSYKDKVHVKGIHEPIISEEQFYRVQEIFTRMGKNPNMNRDSASLLNNLVVCSKCGLGFVHRSKDTISRGKKYHYRYYSCRTYKHTHELEKCGNKIWRADRLEELIVNRVNNYSFASRNMDKEDELDSLNEKLKIEHAKKRRLFDLYINGSYEVSELDSMMNDIDAQINYYESQIEASEELKKNKKIQETLADLATVDFDSLEFREKQLYLKSLINKIYIDGEQVTIEWL

SEQ ID NO: 2035 - protein, 452 aa, synthetic construct
MKAAIYIRVSTREQVENYSIQAQTEKLTALCRSKGWDVYDIFIDGGYSGSNTNRPALNEMLSKLHEIDAVVVYRLDRLSRSQRDTITLIEEYFLKNNVEFVSLSETLDTSSPFGRAMIGILSVFAQLERETIRDRMVMGKIKRIEAGLPLTTAKGRTFGYDVIDTKLYINEEEAKQLQLIYDIFEEEQSITSLQKRLKKLGFKVRTYSRYNNWLTNDLYCGYVSYKDKVHVKGIHEPIISEEQFYRVQEIFTSMGKNPNMNRDSASLLNNLVVCSKCGLGFVHRRKDAMSRDKKYHYRYYSCKTYKHIHELEKCGNKIWRADKLEELIINRVNNYSIASRDADKEDELDSLNEKLKIEHAKKKRLFELYINGSYEVSELDSLMNDIDAQINYYESQIEANEELRKNRKIQENLAHLATVDFDSLEFREKQRYLKSLINKIYIDGEQVTIEWL

SEQ ID NO: 2036 - protein, 452 aa, synthetic construct
MKAAIYIRVSTREQVENYSIQAQTEKLTALCRSKDWDVYDIFIDGGYSGSNLNRPALNEMLSKLHEIDAVVVYRLDRLSRSQRDTITLIEEYFLKNNVEFASLSETLDTSSPFGRAMIGILSVFAQLERETIRDRMVMGKIKRIEAGLPLTTAKGRTFGYDVIDTKLYINEEEAKQLRLIYDIFEEEQSITFLQKRLKKLGFKVRTYNRYNNWLTNDLYCGYVSYKDKVHVKGIHEPIISEEQFYRVQEIFTRMGKNPNMNRDSASLLNNLVVCSKCGLGFVHRRKDAMSRSKKYHYRYYSCKTYKHIHELEKCGNKIWRADKLEELIINRVNNYSLASRNVDKEDELDSLNEKLKIEHAKKKRLFDLYINGSYEVSELDSMMSDIDAQINYYESQIDANRELKKNKKIQENLAHLATVDFDSLEFREKQLYLKSLINKIYIDGEQVTIEWL

SEQ ID NO: 2037 - protein, 485 aa, synthetic construct
MTKKVAIYTRVSTTNQAEEGFSIDEQVDRLTKYAEAMGWQVSDTYTDAGFSGAKLRRPAMQRLINDIENKAFDTVLVYKLDRLSRSVRDTLYLVKEVFTKNKIDFISLNESIDTSSAMGSLFLTILSAINEFERENIKERMTMGKLGRAKSGKSMMWTKTAFGYYHNRKTGILEIVPLQATIVEQIFTDYLSGISLTKLRDKLNESGHIGKEIPWSYRTLRQTLDNPVYCGYIKFKDSLFEGMHKPIIPYETFLKVQRELEERQQQTYGRNNNPRPFQAKYMLSGMARCGYCGAPLRIVLGHKRKDGSRTMKYHCANRFPRKTKGVTVYNDNKKCDSGTYDLSNLENTVIDNLIGFQENNDSLLKIINGNNQPILDTSSFKKQISQIDKKIQKNSDLYLNDFITMDELKDRTDSLQAEKKLLKAKISENKFNDSTVVFELVKTQLGSTPINELSYDNKKKIVNNLVSKVDVTADNVDIIFKFQLA

SEQ ID NO: 2038 - protein, 469 aa, synthetic construct
MSYTTPVRAAVYLRISEDRSGEQLGVARQREDCLKLCDQRKWAPVEYLDNDVSASTGKRRPAYEQMLADITAGKIAAVVAWDLDRLHRRPIELEAFMSLADEKRLALATVAGDVDLATPQGRLVARLKGSVAAHETEHKKARQRRAARQKAERGHPNWSKAFGYLPGPNGPEPDPRTAPLVKRAYADILAGASLGDVCRQWNDAGAFTITGRPWTTTTLSKFLRKPRNAGLRAYKGARYGPVDRDAIVGKAQWSPLVDEATFWAAQAVLDAPGRAPGRKSVRRHLLTGLAGCGKCGYHLAGSYRADGRVVYVCKACHGVAILADNIEPFLYHIVAERLAMPDAEDLLRREIHDAAEAETIRLELETLYGELDRLAVERAEGLLTARQVKISTDIVNMKITKLRAHQLDQERLRVFDGIPLGTPQVASMIAELSPDRFRAVLDVLAEVVVQPVGKSGRILNPERVQVNWR

SEQ ID NO: 2039 - protein, 452 aa, synthetic construct
MKAAIYIRVSTREQVENYSIQAQTEKLTALCRSKDWEVYDIFVDGGYSGSNMNRPALNEMLSKLHEIDAVVVYRLDRLSRSQRDTITLIEEYFLKNNVEFVSLSETLDTSSPFGRAMIGILSVFAQLERETIRDRMVMGKIKRIEAGLPLTTAKGRTFGYDVIDSKLYINEEEAKQLRLIYDIFEEEQSITFLQKRLKKLGLKVRTYNRYNNWLTNDLYCGYVSYKDKVHVKGIHEPIISEEQFYRVQEIFTRMGKNPNMNRDSASLLNNLVVCSKCGLGFVHRRKDATSRDKKYHYRYYSCKTYKHIHELEKCGNKIWRADKLEELVINRVNNYSFASRNADKEDELDSLNEKLKIEHAKKKRLFDLYINGRYEVSELDSMMSDIDAQINYYESQIEANEELRKNKKIQENLAYLATVDFDSLEFREKQLYLKSLINKIYIDGEQVTIEWL

SEQ ID NO: 2040 - protein, 452 aa, synthetic construct
MKAAIYIRVSTREQVENYSIQAQTERLTALCRSKDWDVYDIFIDGGYSGSNMNRPALNEMLGKLHEIDAVVVYRLDRLSRSQRDTITLIEEYFLKNNVEFVSLSETLDTSSPFGRAMIGILSVFAQLERETIRDRMVMGKIKRIEAGLPLTTAKGRTFGYDVIDTKLYINEEEARQLQLIYDIFEEEQSITFLQKRLKKLGFKVRTYNRYISWLTNDLYCGYVSYKDKVHVKGIHEPIISEEQFYRVQEIFTRMGKNPNMNRDSASLLNSLVVCSKCGLGFVHRRKDTTSRGKKYHYRYYSCKTYKHTHELEKCGNKIWRADKLEELIINRVNNYSLASRNVDKEDELDSLNEKLKIEHAKKKRLFDLYINGSYEVSELDSMMNDIDAQINYYESQIEANEELRKNKKIQEDLADLATVDFDSLEFREKQLYLKSLINKIYIDGEQVAIEWL

SEQ ID NO: 2041 - protein, 452 aa, synthetic construct
MKAAIYIRVSTREQVENYSIQAQTEKLTALCRSKDWDVYDIFIDGGYSGSNMNRPALNEMLSKLHEIDAVVVYRLDRLSRSQRDTITLIEEYFLKNNVEFVSLSETLDTSSPFGRAMIGILSVFAQLERETIRDRMVMGKIKRIEAGLPLTTAKGRTFGYDVIDTKLYINEEEAKQLRLIYDIFEEEQSITSLQKRLKELGFKVRAYNRYNNWLTNDLYCGYVSYKDKVHVKGIHEPIISEEQFYRVQEIFTRMGKSPNMNRDSASLLNNLVVCSKCGLGFVHRRKDIMSHGKKYHYRYYSCKTYKHIHELEKCGNKIWRADKLEELIINRVNNYSLAGRNVDKGDELDSLNEKLKIEHAKKKRLFGLYINGSYEVSELDSMMNDIDAQINYYESQIEANEELRKNRKIQENLAHLATVDFDSLEFREKQLYLKSLINKIYIDGEQVTIEWL

SEQ ID NO: 2042 - protein, 485 aa, synthetic construct
MTKKVAIYTRVSTTNQAEEGFSIDEQIDRLTKYAEAMGWQVSDTYTDAGSSGAKLERPAMQRLINDIENKAFDTVLVYKLDRLSRSVRDTLYLVKDVFTKNRIDFISLNESIDTSSAMGSLFLTILSAINEFERENIKERMTMGKLGRAKSGKSMMWTKTAFGYNHNRKTGILEIVPLQAAIVEQIFTDYLSGISLTKLRDKLNESGHIGKDIPWSYRTLRQTLDNPVYCGYIKFKDSLFEGMHKPIIPYETYLKVQKELEERQQQTYERNNNPRPFQAKYMLSGMARCGYCGAPLEIVLGHRRKDGSRTMKYHCANRFPRKTRGVTVYSDNKKCDSGTYDLSNLENTVIDNLIGFQENNDSLLKVINGNNQPILDTSSFKRQISQIDKKIQKNSDLYLNDFITMDELKARTDSLQAEKKLLKAKISENKFNDSTDVFELVKTQLGSIPINELSYDNKKKIVNNLVSKVDVTADNVDIIFKFQLA

SEQ ID NO: 2043 - protein, 452 aa, synthetic construct
MKAAIYIRVSTREQVENYSIQAQTEKLTALCRSKDWDVYDIFIDGGYSGSNMNRPALNEMLSKLHEIDAVVVYRLDRLSRSQRDTITLIEEYFLKNNVEFVSLSETLDTSSPFGRAMTGILSVFAQLERETIRDRMVMGKIKRIEAGLPLTTAKGRTFGYDVIDTKLYINEEEAKQLQLIYDIFEEEQSITFLQKRLKELGFKVRTYNRYSNWLTNDLYCGYVSYKDKVHVKGIHEPIISEEQFYRVQEIFTRMGKNPNMNRDSASLLNNLVVCSKCGLGFVHRRKDTTSRGKKYHYRYYSCKTYKHTHELEKCGNKIWRADKLEELIINRVNNYSFASRNVDKAEELDSLNEKLKVEHAKKKRLFDLYINGSYNVSELDSMMSDIDAQINYYESQIEADEELKKNKKIQETLAELATVDFDSLEFREKQQYLKSLINKIYIDGEQVTIEWL

SEQ ID NO: 2044 - protein, 452 aa, synthetic construct
MKAAIYIRVSTREQVENYSIQAQTEKLTALCRSKDWDVYDIFIDGGYSGSNMNRPALNEMLSKLHEIDAVVVYRLDRLSRSQRDTITLIEEYFLKNNVEFVSLSETLDTSSPFGRAMIGILSVFAQLERETIRDRMVMGKIKRVEAGLPLTTAKGRTFGYDVIDTKLYINEEEAKQLRLIYDIFEEEQSITLLQKRLKELGFKVRTYSRYNNWLTNDLYCGYVSYKDKVHVKGIHEPIISEEQFYRVQEIFARMGKNPNMNRDSASLLNNLVVCSKCGLGFVHRRKDTKSRGKKYHYRYYSCKTYKHTHELEKCGNKIWRADKLEELIINRVNNYSLACRNVDKEDELDSLNEKLRIEHAKKKRLFDLYINGSCEVSELDSMMSDIDAQINYYESQIVANEELRKNKKIQENLADLATVDYDSLEFREKQLYLKSLINKIYIDGEQVTIEWL

SEQ ID NO: 2045 - protein, 485 aa, synthetic construct
MTRKVAIYTRVSTTNQAEEGFSIDEQIDRLTKYADAMGWQVSDTYTDAGLSGAKLERPAMQRLINDIENKAFDTVLVYKLDRLSRSVRDTLYLVKDVFTKNKIDFISLNESIDTSSAMGSLFLTILSAINEFERENIKERMTMGKLGRAKSGKSMMWTKTAFGYHHNRKTGILEIVPLQATIVEQIFTDYLCGISLTKLRDKLNESGHIGKDIPWSYRTLRQTLDNPVYCGYIKFKDSLFEGMHKPIIPYETYLKVQKELEERQQQTYERNNNPRPFQAKYMLSGMARCGYCGAPLRIVLGHKRKDGSRTMKYHCANRFPRKTKGITVYNDNKKCDSGTYDLSNLENIVIDNLIGFQENNDSLLKIINGNNQPILDTSSFKKQISQIDKKIQKNSDLYLNDFITMDELKGRTDSLQAEKKLLKAKISENKFNDSTDVFELVKTQLGSIPINELSYDNKKKIVNSLVSKVDVTADNVDIIFKFQLA

SEQ ID NO: 2046 - protein, 452 aa, synthetic construct
MKAAIYIRVSTQEQVGNYSIQAQTEKLTALCRSKDWDVYDIFVDGGYSGSNMNRPALNEMLSKLHEIDAVVVYRLDRLSRSQRDTTTLIEEYFLKNNVEFVSLSETLDTSSPFGRAMIGILSVFAQLERETIRDRMVMGKIKRIEAGLPLTTAKGRTFGYDVIDTKLYINEEEAKQLQLIYDIFEEEQSITSLQKRLKKLGFKVRTYNRYNNWLTNDLYCGYVSYKDKVHVKGIHEPIISEEQFYRVQEIFTRMGKNPNMNRDSASLLNSLVVCSKCGLGFVHRSKDTMSRGKKYHYRYYSCKTYKHTHELEKCGNKTWRADKLEELVINRVNNYSFASRNVDKEGELDSMNEKLKIEHAKKKRLFDLYINGSCEVSELDSMMNDIDAQINYYESQIEANEELKKNKKIQESLADLATVDFDSLGFREKQLYLKSLINKIYIDGEQVTIEWL

SEQ ID NO: 2047 - protein, 485 aa, synthetic construct
MTRKVAIYTRVSTTNQAEEGFSIDEQIDRLTKYAEAMGWQVSDTYTDAGLSGAKLERPAMQRLINDIENKAFDTVLVYKLDRLSRSVRDTLYLVKDVFTKNKIDFISLNESIDTSSAMGSLFLTILSAINEFERENIKERMTMGKLGRAKSGKSMMWTKTAFGYHHNRKTGILEIVPLQATIVEQIFTDYLSGTSLTKLRDKLNESGHIGKDIPWSYRTLRQTLDNPVYCGYIKFKDSLFEGMHKPIIPYETYLKVQKELEERQRQTYERNNNPRPFQAKYMLSGMARCGYCGAPLRIVLGHKRKDGSRTMKYHCANRFPRKTKGVTVYNDNKKCDSGTYDLSNLENTVIDNLIGFQENSDSLLKIINGNNQPILDTSSFRKQISQIDEKIRKNSDLYLNDFITMDELKDRTDSLQAEKKLLKAKMSENKFNDSTDVFELVKTQLGSIPINELSYDNKKKIVNNLVSKVHVTADNVDIIFKFQLA

SEQ ID NO: 2048 - protein, 469 aa, synthetic construct
MSYTTPVRAAVYLRISEDRSGEQLGVARQREDCLKLCDHRRWVPVEYLDNDVSASTGKRRPAYEQMLADIAAGKIAAVVAWDLDRLHRRPVELEAFMSLADEKRLALATVAGDVDLATPQGRLVARLKASVAAHETEHKKARQRRAARQKAERGLPNWSKAFGYLPGLNGPEPDPRTAPLVKQAYADILAGASLGDVCRQWNDAGALTITGRLWTTTTLSKFLRKPRNAGLRAYKGARYGPVDRGAIVGKAQWSPLVDEATFWAAQAVLDAPGRAPGIKSVRRHLLTGLAGCGKCGNHLAGSYRTDGRVVYVCKACHGVAILADNIEPILYHIVAERLAMPDAVDLLRREIHDAAEAETVRLELEALYGELDRLAVERAEGLLTARQVKISTDIVNAKITKLQARQLDQGRLRVFDGIPLGTPQVAGVIAELSPDRFRAVLDVLAEVVVQPVGKSGRIFNPERVQVNWR

SEQ ID NO: 2049 - protein, 485 aa, synthetic construct
MTKKVAIYTRVSTTNQAEEGFSIGEQIDRLTKYAEAMGWQVSDTYTDAGYSGAKLERPAMQRLINDIENKAFDTVLVYKLDRLSRSVRDTLYLVKDVFTKNKIDFISLNESIDTSSAMGSLFLTILSAINEFERENIKERMTMGKLGRAKSGKSMMWTKTAFGYYHNRKTGILEIVPLQATIVEQIFTDYLSGISLTKLRDKLNESGHIGKDIPWSYRTLRQTLDNPVYCGYIKFKGSLFEGMHKPIIPYETYLKVQKELEERQQQTYERNNNPRPFQAKYMLSGMARCGYCGAPLRIVLGHKRKDGSRTMKYHCTNRFPRKTKGITVYNDNKKCDSGTYDLSNLESTVIDSLIGFQENNDSLLKIINGNNQPILDTSSFKKQISQIDKKIQKNSDLYLNDFITMDELKDRTDSLQAEKKLLKAKISENEFNDGTDVFELVKTQLGSIPINELSYDDKKKIVNNLVSKVDVTADSVDIIFKFHLA

SEQ ID NO: 2050 - protein, 485 aa, synthetic construct
MTKKVAIYTRVSTTHQAEEGFSIDEQIDRLTKYAEAMGWQVSDTYTDAGSSGAKLERPAMQRLINDIESKAFDTVLVYKLDRLSRSVRDTLYLVKDVFTKNKIDFISLSESIDTSSAMGSLFLTILSAINEFERENIKERMTMGKLGRAKSGKSMMWTKTAFGYYHNRKTGILEIVPLQATIVEQIFTDYLSGISLTKLRDRLNESGHIGKDIPWSYRTLRQTLDNPVYCGYIKFKDSLFEGMHKPIIPYETYLKVQKELEERQQQTYERNNNPRPFQAKYMLSGMARCGYCDAPLRIVLGHKRKDGSRTMKYHCANRFPRKTKGVTVYNDNKKCDSGTYDLSNLENTVIDNLIGLQENDDSLLKIINGNNQPILDTSSFKEQISQIDKKIQKNSDLYLNDFITMDELKDRTDSLQAEKKLLKAKISENRFNDSTGVFELVKTQLGSIPINELSYDNKKKIVNNLVSKVDVTADNVDIIFKFQLA

SEQ ID NO: 2051 - protein, 485 aa, synthetic construct
MTKKVAIYTRVSTTNQAEEGFSIDEQIDRLTKYAEAMGWQVSDTYTDAGFSGAKLERPAMQRLINDIENKAFDTVLVYKLDRLSRSVRDTLYLVKDVFTKNEIDFISLNECIDTSSAMGSLFLTILSAINEFERENIKERMTMGKLGRAKSGKSMMWTKTAFGYYHNRKTGILEIVPLQATIVEQIFTDYLSGISLTKLRDKLNESGHIGKDIPWSYRTLRQTLDNPVYCGYIKFKDSLFEGMHKPIIPYETYLKVQKELEERQQQTYERNNNPRPFQAKYMLSGMARCGYCGAPLRIVLGHKRKDGSRTMKYHCANRFPRKTKGVTAYNDNKKCDSGTYDLSNLENTVIDNLIGFQENNDSLLKIINGDNQPILDISGLKKQISQIDKKIQKNSDLYLNDFITMDELKDRTDSLQAEKKLLKAKISENRFDDSTDVFELVKTQLGSIPINELSYDNKKKIVNNLVSKVDVTADSVDIIFKFQLA

SEQ ID NO: 2052 - protein, 469 aa, synthetic construct
MSYTTPVRAAVYLRISEDRSGEQLGVARQREDCLKLCGQRKWVPVEYLDNDVSASTGKRRPAYEQMLADITAGKIAAVVAWDLDRLHRRPIELEAFMSLADEKRLALATVAGDIDLATPQGRLVARLKGSVAAHETEHKKARQRRAARQKAERGHPNWSKAFGYLPGPNGPEPDPRTAPLVEQAYADILAGASLGDVCRQWNDAGALTITGRPWTTTTLSKFLRKPRNAGLRAYKGARYGPVDRDAIVGKAQWSPLVDEATFWAAQAVLDAPGRAPGRKSVRRHLLTGLAGCGKCGNHLAGSYRTDGKVVYVCKACHGVAILADNIEPILYHIVAERLAMPDAVDLLRREIHDAAEAETIRLGLETLYGELDRLAVERAEGLLTARQVKICTDIVNAKITKLQARQLDQERLRVFDGIPLGTPQVVGTIAELSPDRFRAVLDVLAEVVVQPVGKSSRIFNPERVQVNWR

SEQ ID NO: 2053 - protein, 485 aa, synthetic construct
MTKKVAIYTRVSTTNQAEEGFSIDEQIDRLTKYAEAMGWQVSDTYTDAGFSGAKLERPAMQRLINDIENKAFDTVLVYKLDRLSRSVRDTLYLVKHVFTKNKIDFISLNESIDTSSAMGSLFLTILSAINEFERENIKERMTMGKLGRAKSGKSMMWTKTAFGYYHNRKTGILEIVPLQATIVEQIFTDYLSGISLTKLRDKLNESGHIGKDIPWSYRTLRQTLDNPVYCGYIKFKDSLFEGMHKPIIPYETYLKVQKELEERQRQTYERNNNPRPFQAKYMLSGMARCGYCGAPLRIVLGHKRKDGSRTMKYHCANRFPRKTKGVTVYNDNKKCDSGTYDLSNLENTVIDILIGFQEDNDSLLKIINGNNQPILDTSSIKKQISQIDEKIQKNSDLYLNDFITMDELKDRTDSLQAKKKLLKAKISENKFNDSTGVFELVKAQLGSIPISELSYDNKKKIVNNLVSKVDVTADNVDIIFKFQLA

SEQ ID NO: 2054 - protein, 485 aa, synthetic construct
MTKKVAIYTRVSTTNQAEEGFSIDEQIDRLTKYAEAMGWQVSGTYTDAGLSGAKLERPAMQRLINDIENKAFDTVLVYKLDRLSRSVRDTLYLVKDVFTKNKIDFISLNESIDTSSAMGSLFLTILSAINEFERENIKERMTMGKLGRAKSGKSMMWTKTAFGYYHNRKTGILEIVPLQATIVEQIFTDYLSGISLTKLRDKLNKSGHIGKDIPWSYRTLRQTLDNPVYCGYIKFKDSLFEGMHKPIIPYETYLKVQKELEERQQQTYERNNNPRPFQAKYMLSGMARCGYCGAPLRIVLGHKRKDGSRTMKYHCANRFPRKTKGATVYNDNKKCDSGTYDLSNLESTVIDHLVGLQENHDSLLKIINGNNQPILDTSSFKKQISQIDKKIQKNSDLYLNDFITMDELRDRTDSLQAEKKLLKAKISENKFNGSTDVFELVKTQLGSIPINELSYDNKKKIVNSLVSKVDVTADNVDIIFKFQLA

SEQ ID NO: 2055 - protein, 452 aa, synthetic construct
MKAAIYIRVSTREQVENYSIQAQTEKLTALCRSKDWDVYDIFIDGGYSGSNMNRPALNEMLSKLHEIDAVVVYRLDRLSRSQRDTITLIEEYFLKNNVEFVSLSETLDTSSPFGRAMIGILSVFAQLERETIRDRMVMGKIKRIEAGLPLTTAKGRTFGYDVIDTKLYINEEEAKQLQLIYDIFEEEQSITFLQKRLKKLGFKVRTYNRYNNWLTNDLYCGYVSYKDKVRVKGIHEPIISEEQFYRVQEIFTRMGKNPNMNRDSASLLSNLVVCSKCGLGFVHRRKDATSRDKKYHYRYYSCKTYKHIHELEKCGNKIWRADKLEELIINRVNDYSLAGRNVDKEDGLDSLNEKLKIEHAKKKRLFDLYINGRYEVSELDSMMSDIDALINYYESQIEANEELKRNRKIQENLADLATVDFDSLEFREKQLYLKRLINKIYIDGEQVTIEWL

SEQ ID NO: 2056 - protein, 452 aa, synthetic construct
MKAAIYIRVSTQEQVGNYSIQAQTEKLTALCRSKDWDVYDIFIDGGYSGSNMNRPALNEMLSKLHEIDAVVVYRLDRLSRSQRDTTTLIEEYFLKNNVEFVSLSETLDTSSPFGRAMIGILSVFAQLERETIRDRMVMGKIKRIEAGLPLTTAKGRTFGYDVIDTKLYVNEEEAKQLQLIYDIFEEEQSITSLQKRLKKLGFKVRTYNRYNSWLTNDLYCGYVSYKDKVHVKGIHEPIISEEQFYRVQEIFTRMGKNPNMNRGSASLLNNLVVCSKCGLGFVHRSKDTMCRGKKYHYRYYSCKTYKHTHELEKCGNKIWRADKLEELIINRVDNYSFASRNADKEDELDSLNEKLKIEHAKKKRLFDLYINGSCEMSELDSMMNDIDAQINYYESQIEANEELKKNKRIQGNLADLTTVDFDSLEFREKQLYLKSLINKIYIDGEQVTIEWL

SEQ ID NO: 2057 - protein, 452 aa, synthetic construct
MKAAIYIRVSTREQVENYSIQAQTEKLTALCRSKDWDVYDIFIDGGYSGSNVNRPALNEMLSKLHEIDAVVVYRLDRLSRSQRDTITLIEEYFLKNNVEFVSLSETLDTSSPFGRAMIGILSVFAQLERETIRDRMVMGKIKRIEAGLPLTTAKGRTFGYDVIDTKLYINEEEAKQLRLIYDIFEEEQSITFLQKRLKRLGLKVRTYNRYNSWLTNDLYCGYVSYKDKVHVKGIHEPIISEEQFYRVQEIFTRMGKNPNMNRDSASLLNNLVVCSKCGLGFVHRRKDTVSRGKKYHYRYYSCKTYKHTHELDKCGNKIWRADKLEELIINRVNNYSFASRNADKGDELDSLNEKLKIEHAKKKRLFDLYINGSYEVSELDSMMNDIDAQINYYESQIEASEELKKNKKIQEGLADLATVDYDSLEFREKQLYLKSLINKIYIDGEQVTIEWL

SEQ ID NO: 2058 - protein, 485 aa, synthetic construct
MTRKVAIYTRVSTTNQAEEGFSIDEQIDRLTKYAEAMGWQVSDTYTDAGCSGAKLERPAMQRLINDIENKAFDTVLVYKLDRLSRSVRDTLYLVKDVFTRNKVDFISLNESIDTSSAMGSLFLTILSAINEFERENIKERMTMGKLGRAKSGKSMMWTKTAFGYYHNRKTGILEIVPLQATIVEQIFTDYLSGISLTKLRDKLNESGHIGKDIPWSYRTLRQTLDNPVYCGYIKFKGSLFEGMHKPIIPYEAYLKAQKELEERQQQTYERNNNPRPFQAKYMLSGMARCGYCGAPLRIVLGHRRKDGSRTVKYHCANRFPRKTKGVTVYNDNKKCDSGTYDLSNLENTVIDNLIGFQENNDSLLKIINGNNQSILDTSSLKRQISQIDKKIQKNSDLYLNDFITMDELRERTDSLQAEKKLLKARISENNYNDSTDVFELVKTQLGSIPISELSYDNKKKIVNNLVSKVDVTADNVDIIFKFQLA

SEQ ID NO: 2059 - protein, 485 aa, synthetic construct
MTKKVAIYTRVSTTNQAEEGFSIDEQIDRLTKYAEAMGWQVSDTYTDAGFSGAKLERPAMQRLINDIENKAFDTVLVYKLDRLSRSVRDTLYLVKDVFTKNKIDFISLSESIDTSSAMGSLFLTILSAINEFERENIKERMTMGKLGRAKSGKSMMWTKTAFGYYHNRKTGILEIVPLQATIVEQIFTDYLSGISLTKLRDKLNESGHIGKDIPWSYRTLRQTLDNPVYCGYIKFKDSLFEGMHKPIIPYETYLKVQKELEERQQQTYERNNNSRPFQAKYMLSGMARCGYCGAPLKIVLGRKRKDGSRTMKYHCANRFPRKTKGVTVYNDNKKCDSGTYDLSNLENTVIDNLIGFQENNDSLLKIINGNNQPILDTSSFKKQISQIDKKIQKNSDLYLNDFITMDELKARTDSLLAEKKLLKAKINENKFNDSTDVFELVKTQLGSIPINELSYDNKKKIVNNLVSKVDVTADNVDIIFKFQLA

SEQ ID NO: 2060 - protein, 485 aa, synthetic construct
MTKKVAIYTRVSTTNQAEEGFSIDEQIDRLTKYAEAMGWQVSDTYTDAGFSGAKLERPAMRRLINDIENKAFDTVLVYKLDRLSRSVRDTLYLVKDVFTKNKIDFISLSESIDTSCAMGSLFLTILSAINEFERENIKERMTMGKLGRAKSGKSMMWTKTAFGYYHNRKTGILEIVPLQATIVEQIFTDYLSGISLTKLRDKLNESGHIGKDIPWSYRTLRQTLDNPVYCGYIKFKDSLFEGMHKPIIPYETYLKVQKELEERQQQAYERNNNPRPFQAKYMLSGMARCGYCGAPLRIVLGHKRKDGSRTMKYHCANRFPRKTKGVTVYNDNKKCDSGTYDLSNLENTVIDNLIGFQENNDSLLKIINGNNQPILDTSGFKEQISQIDKKIQKNSDLYLNDFITMDELKDRTDSLQAEKKLLRAKISENKFNDSTDVFELVKTQLGSIPISELSYDNKKKIVNNLVSKVDVTADNVDIIFKFQLA

SEQ ID NO: 2061 - protein, 469 aa, synthetic construct
MSYTTPVRAAVYLRISEDRSGEQLGVARQREDCLKLCGQRKWEPVEYLDNDVSASTGKRRPAYEQMLADITAGKIAAVVAWDLDRLHRRPIELEAFMSLADEKRLALATVAGDVDLATPQGRLVARLKGSVAAHETEHKKARQRRAARQKAERGYPNWSKAFGYLPGPNGPEPDPRTAPLVKQAYADILAGASLGDVCRRWNDAGAFTITGRPWTTTTLSKFLRKPRNAGLRAYKGARYGPVDRDAIVGKAQWSPLVDEATFWAAQAVLDAPGRAPGRKSVRRHLLTGLAGCGKCGYHLAGSYRTDGRVVYVCKACHGVAILADNIEPILYRIVAERLAMPDAVGLLRREIHDAAEAETIRLELETLYGELDCLAAERAEGLLTARQVKISTDIVNAKITKLQARQQDQERLRVLEGIPLGTPQVAGMIAELSPDRFRAVLDVLAEVVVQPVGKSGRIFNPERVQVNWR

SEQ ID NO: 2062 - protein, 452 aa, synthetic construct
MKAAIYIRVSTREQVENYSIQAQTEKLTALCRSKDWDVYDIFIDGGYSGSNMNRPALNEMLSKLPEIDAVVVYRLDRLSRSQRDTITLIEEYFLKNNVEFVSLSETLDTSSPFGRAMIGILSVFAQLERETIRDRMVMGKIKRIEAGLPLTTAKGRTFGYDVIDTKLYINEEEAKQLQLIYDIFEEEQSITSLQKRLKKLGFKVRTYNRYNSWLTNDLYCGYVSYKDKVHVKGIHEPIISEEQFYRVQEIFTRMGKNPNMNRDSASLLNNLVVCSKCGLGFVHRRKDTTSRGKKYHYRYYSCKTYKHTHELEKCGNKIWRADKLEELIINRVSNYSFASRNADKEGELDSLNEKLKIERAKKKRLFDLYINGSYEVSELDSMMNDIDAQISYYESQIEANEELRRNKKIQESLADLASVDYDSLEFREKQLYLKSLINKIYIDGEQVIIEWL

SEQ ID NO: 2063 - protein, 452 aa, synthetic construct
MKAAIYIRVSTREQVENYSIQAQTEKLTALCRSKDWDVYDIFIDGGYSGSNMNRPALNEMLSKLHEIDAVVVYRLDRLSRSQRDTITLIEEYFLKNNVEFVSLSETLDTSSPFGRAMIGILSVFAQLERETIRDRMVMGKIKRIEAGLPLTTAKGRTFGYDVIDTKLYINEEEAKQLQLIYDIFEEEQSITLLQKRLKKLGFKVRSYSRYNNWLTNDLYCGYVSYKDKVHVKGIHEPIISEEQFYRVQEIFTRMGKNPNMNRDSASLLNNLVVCSKCGLGFVHRRKDTTSRGKKYHYRYYSCKTYKHTHELEKCGNKIWRADKLEELIINRVSNYSFASRGEDKEGELDSLNEKLKIEYAKKKRLFDLYINGSYEVSELDSMMNDIDAQISYYESQIEANEELKKDKKIQENLANLATVDYDSLEFREKQLYLKSLINKIYIDGEQVTIEWL

SEQ ID NO: 2064 - protein, 469 aa, synthetic construct
MSYTTPVRAAVYLRISEDRSGEQLGVARQREDCLKLCGQRKWVPVEYLDNDVSASTGKRRPAYEQMLADITAGKIAAVVAWDLDRLHRRPIELEAFMSLADEKRLALATVAGDVDLATPQGRLVARLKGCVAAHETEHKKARQRRAARQKAERGYPNWSKAFGYLPGPNGPEPDPRTAPLVKQAYADILAGASLGDVCRQWNDAGAFTITGRPWTTTTLSKFLRKPRNAGLRAYKGARYGPVDHDAIVGKAQWSPLVDEATFWAAQAVLDAPGRAPGRKSVRRHLLTGLAGCGKCGNHLAGSYRTDGQVVYVCKACHGVSILAVNIVPILYHIVAERLAMPDAADLLCREIHDAAEAETIRLELEALYGELDRLAVERAEGLLTARQVKISTDIVNAKITKLQARQLDQERLRVFDGIPLGTPQVAGTIAELSPDRFRAVLDVLAEVVVQPVGKSGRIFNPERVQVNWR

SEQ ID NO: 2065 - protein, 452 aa, synthetic construct
MKAAIYIRVSTREQVENYSIQAQTEKLTALCRSKDWDVYDIFIDGGYSGSNMNRPALNEMLSRLREIDAVVVYRLDRLSRSQRDTITLIEEYFLKNNVEFVSLSETLDTSSPFGRAMIGILSVFAQLERETIRDRMVMGKIKRIEAGLPLTTAKGRTFGYDVIDTKLYINEEEAKQLQLIYDIFEEEQSITFLQKRLKQLGFRVRTYSCYNNWLTNDLYCGYVSYKDKVHVKGIHEPIISEEQFYRVQEIFARMGKNPNMNRDSASLLNNLVVCSKCGLGFVHRRKDAMSRDKKYHYRYYSCKTYKHIHELEKCGNKIWRADKLEELIINRVNNYSFASRNVDKENELDSLNEKLRIEHAKKKRLFDLYINGSYEVSELDSMMNDIDAQINYYESQIEANEELKKNKKIQENLANLATVDFDSLEFREKQQYLKSLINKIYIDGEQVTIEWL

SEQ ID NO: 2066 - protein, 485 aa, synthetic construct
MTRKVAIYTRVSTTNQAEEGFSIDEQTDRLTKYAEAMGWQVSDTYTDAGFSGAKLERPAMQRLINDIENKAFDTVLVYKLDRLSRSVRDTLYLVKDVFTKNKIDFISLNESIDTSSAMGSLFLTILSAINEFERENIKERMTMGKLGRAKSGKSMMWTKTAFGYHHNRKTGILETVPLQATIVEQIFTDYLSGISLTKLRDKLNESGHIGKDIPWSYRTLRQTLDNPVYCGYIKFKGSLFEGMHKPIIPYETYLKVQKELEERQQQTYERNNNPRPFQAKYMLSGMARCGYCGAPLKVVLGHKRKDGSRTMKYHCANRSLRKTKGVTVYNGNKKCDSGTYDLSNLENAVIDNLIGFQENNDSLLKIINGNNQPILDTSSFKNQISQIDKKIQKNSDLYLNDFITMDELKERTDSLQAEKKLLKAKISENKFNDSTDVFELVKTQLGSVPINELSYDNKKKIVNNLVSKVDVTADNVDIIFKFQLA

SEQ ID NO: 2067 - protein, 469 aa, synthetic construct
MSYTTPVRAAVYLRISEDRSGEQLGVARQREDCLKLCGQRKWVPVEYLDNDVSATTGKRRPAYEQMLADITAGKIAAVVAWDLDRLHRRPIELEAFMSLADEKRLALATVAGDVDLATPQGRLVARLKGSVAAHETEHKKARQRRAARQKAERGLPNWNKAFGYLPGPNGPEPDPRTAPLVKQAYADILAGASLGDVCRQWNDAGAFTITGRPWTTTTLSKFLRKPRNAGLRTYKGARYGPVDRDAIVGKAQWSPLVDEATFWAAQAVLDAPGRAPGRKSVRRHLLTGLAGCGKCGNHLAGSYRADGRVVYVCKACHGVAILADNIEPILYHIVAERLAMPDAVDLLRCEIHDAAEAETIRLELETLYGELDRLAVERAEGLLTARQVKISTDIVDAKITKLQARQLDQERLRVFDGIPLGTPQVAGMIAELSPDRFRAVLDVLAEVVVRPVGKRGRVCNPERVQVNWR

SEQ ID NO: 2068 - protein, 485 aa, synthetic construct
MTKKVAIYTRVSTTNQAEEGFSIDEQIDRLTKYAEAMGWQVSDTYTDAGLSGAKLERPAMQRLINDIENKAFDTVLVYKLDRLSRSVRDTLYLVKDVFTKNKIDFISLNESIDTSSAMGSLFLTILSAINEFERENIKERMTMGKLGRAKSGKSMMWTKTAFGYYHNRKTGILEIVPLQATIVEQIFTDYLSGISLTKLRDKLNESGHIGKDIPWSYRTLRQTLDNPVYCGYIKFKDSLFEGMHKPIIPYETYLKVQKELEERQQQTYERNNNPRPFQAKYMLSGTARCGYCGAPLRIVLGHKRKDGSRTMKYHCANRFPRKTKGVTVYNDNKKCDSSTYDLSNLENTVIDSLIGFQENNDSLLKIINGNNQPILDTSSIKKQISQIDKKIQKNSDLYLNDFITMDELKDRTDSLQAEKKLLKAKISENKFNDSTDVFELVKTQLGSIPINELSYDNKKEIVNNLVSKVDVTADNVNIIFKFQLA

SEQ ID NO: 2069 - protein, 485 aa, synthetic construct
MTKKVAIYTRVSTTNQAEEGFSIDEQIDRLTKYAEAMGWQVSDTYTDAGLSGAKLERPAMQRLINDIENKAFDTVLVYKLDRLSRSVRDTLYLVKDVFTKNKIDFISLNESIDTSSAMGSLFLTILSAINEFERENIKERMTMGKLGRAKSGKSMMWTRTAFGYHHNRKTGILEIVPLQATIVEQIFTDYLSGISLTKLRDKLNESGHIGKDIPWSYRTLRQTLDNPVYCGYIKFKDSLFEGMHKPIIPYETYLKVQKELGERQQQTYERNNNPRPFQAKYMLSGMARCGYCGAPLKIVLGHKRKDGSRTMKYHCANRFPRKTKGVTVYNDNKNCDSGTYDLSNLENTVIDNLIGFQEDDDSLLKIINGNNQPILDTSNFEKQISQIDKKIQKNSDLYLNDFITMDELKVRTDSLQAEKKLLKAKISENKFNDSTDVFELVKTQLGSIPINELSYDNKKKIVNNLVSKVDVTADNVDIIFKFQLA

SEQ ID NO: 2070 - protein, 469 aa, synthetic construct
MSYTTPVRAAVYLRISEDRSGEQLGVARQREDCLKLCDQRKWVPVEYLDNDVSASTGKRRPAYEQMLADITAGKIAAVVAWDLDRLHRRPIELEAFMSLADEKRLALATVAGDVDLATPQGRLVARLKGSVAAHETEHKKARQRRAARQKAERGYPNWSKAFGYLPGPNGPEPDPRTAPLVKQAYADILAGASLGDVCRQWNDAGAFTITGRPWTTTTLSKFLRKPRNAGLRAYRGARYGPVDRDAIVGKAQWSPLVDEATFWAAQAVLDAPGRAPGRKSVRRHLLTGLAGCGKCGNHLAGSYRTDGRVVYVCKACYGIAILADNIEPILYHIVAERLAMPDAVDLLCREIHDAAEAETIRLELETLCGELDRLAVERAEGLLTARQVKISTDIVNAKIAELQACQLDQERLRVLDGIPLGTPRVAGAIAELSPDRFRAVLDVLAEVVVQPVGKSGRIFSPERVQVNWR

SEQ ID NO: 2071 - protein, 469 aa, synthetic construct
MSYTTPVRAAVYLRISEDRSGEQLGVARQREDCLKLCDQHKWVPVEYLDNDVSASTGKRRPAYEQMLADITAGKIAAVVAWDLDRLHRRPIELEAFMSLADEKRLALATVAGDVDLATPQGRLVARLKGCVAAHETEHKKARQRRAARQKAERGLPNWSKAFGYLPGPDGPEPDPRTAPLVKQAYADILAGASLGDVCRQWNDAGAFTITGRLWTTTTLSKFLRKPRNAGLRAYKGARYGPVDRDAIVGKAQWSPLVDEATFWAAQAVLDAPGRAPGRKSVRRHLLTGLAGCGKCGNHLAGSCRTDGQVVYVCKACHGVAILADIIEPMLYHIVAERLAMPDAVDLLRREIHDAAEAETIRLELESLYGELDRLAVERAEGLLTARQVKISTDIVNAKITKLQARQLDQERLRVLDGIPLGTPQVAGMIAELSPDRFRAVLDVLAEVVVQPVGKSGRIFNPERVQVNWR

SEQ ID NO: 2072 - protein, 485 aa, synthetic construct
MTKKVAIYTRVSTTNQAEEGFSIDEQIDRLTKYAEAMGWQVSDTYTDAGFSGAKLERPAMQRLISDIGNKAFDTVLVYKLDRLSRSVRDTLYLVKDVFTKNKIDFISLNESINTSSAMGSLFLTILSAINEFERENIKERMTMGKLGRAKSGKSMMWTKTAFGYYHNRKTGILEIVPLQATIVEQIFTDYLSGISLTKLRDKLNESGHIGKDIPWSYRTLRQTLDNPVYCGYIKFKDSLFEGMHKPIIPYETYLKVQKELEERQQQTYERNNNPRPFQAKYMLSGMARCGYCGAPLRIVLGHKRKDGSRTMKYHCANRFPRKTQGVTVYNDNKKCDSGSYDLRSLENTVIDNLIGLQENNDSLLKIINGNNQPILDTSSFKEQISQIDKKIQKNGDLYLNDLITMDELRDRTDSLQAEKKLLRAKISENKFNDSTDVFELVKTQLGSIPINELSYDSKKKIVNNLVSKVDVTADNVDIIFKFQLA

SEQ ID NO: 2073 - protein, 485 aa, synthetic construct
MTKKVAIYTRVSTANQAEEGFSIDEQIDRLTKYAEAMGWQVSDTYTDAGFSGAKLERPAMQRLINDIENKAFDTVLVYKLDRLSRSVRDTLYLVKDVFTKNKIDFISLNESIDTSSAMGSLFLTILSAINEFERENIKERMAMGKLGRAKSGKSMMWTKTAFGYYHNRKTGILEIVPLQATIVEQIFTDYLSGISLTKLRDKLNESGHIGKDIPWSYRTLRQTLDNPVYCGYIKFKGSLSEGMHKPIIPYETYLKVQKELEERQQQTYERNNNPRPFQAKYMLSGVARCGYCGAPLRIVLGHKRKDGSRTMKYHCANRFPRKTKGVTVYNDNKKCDSGTYDLSSLENTVIDNLIGFQENSDSLLKIINGDNQPILDTCSFKKQISQIDKKIQKNSELYLNDFITMDELKDRTDSLQAEKKLLKAKISENKFNDSTDVFELVKTQLGSIPINELSYDNKKKIVNNLVSKVDVTADNVDIIFKFQLA

SEQ ID NO: 2074 - protein, 452 aa, synthetic construct
MKAAIYIRVSTREQVENYSIQAQTEKLTALCRSKDWDVYDIFIDGGYSGSNMNRPALNEMLSKLHEIDAVVVYRLDRLSRSQRDTITLIEEYFLKNNVEFVSLSETLDTSSPFGRAMIGILSVFAQLERETIRDRMVMGKIKRIEAGLPLTTAKGRTFGYDVIDAKLYINEEEAKQLQLIYDIFEEEQSITFLQKRLKKLGLKVRTYNRYNNWLTNDLYCGYVSYKDKVHVRGIHEPIISEEQFYRVQEIFARMGKNPNMNRDSASLLNNLVVCGKCGLGFVHRRKDAMSRDKKYHYRYYSCKTYKHIHELEKCGNKIWRADKLEELIINRVNNYSLASRNADKEDELDSLNEKLRIEHAKKKRLFDLYINGSYEVSELDSMMNDIDTQINYYESRIEANEELRKNKKIQENLAVLATVDFDSLEFREKQLYLKSLINKIYIDGEQVTIEWL

SEQ ID NO: 2075 - protein, 452 aa, synthetic construct
MKAAIYIRVSTQEQVGNYSIQAQTEKLTALCRSKDWDVYDIFIDGGYSGSNMNRPALNEMLSKLHEIDAVVVYRLDRLSRSQRDTTTLIEEYFLKNNVEFVSLSETLDTSSPFGRAMIGILSVFAQLERETIRDRMVMGKIKRIEAGLPLTTAKGRTFGYDVIDTKLYINEEEAKQLRLIYDIFEEEQSITSLQKRLKKLGFKVRTYNRYNNWLTNDLYCGYVSYKDKVHVKGIHEPIISEEQFYRVQEIFTRMGKNPNMNRDSASLLNNLVVCSKCGLGFVHRSKDTMSRGKKYHYRYYSCKTYKHTHELEKCGNKTWRADKLEELIISRVNNYSFASRSVDKEDELDSLNEKLKIEHAKKKRLFDLYINGSYEASELDGMMNDIDAQINYYESQIEANKELRRNRKIQENLAGLATVDFDSLEFREKQLYLKSLINKIYVDGEQVTIEWL

SEQ ID NO: 2076 - protein, 485 aa, synthetic construct
MTKKVAIYTRVSTTSQAEEGFSIDEQIDRLTKYAEAMGWQVSDTYTDAGSSGAKLERPAMQRLINDIENKAFDTVLVYKLDRLSRSVRDTLYLVKDVFTKNKIDFISLNESIDTSSAMGSLFLTILSAINEFERENIKERMTMGKLGRAKSGKSMMWTKTAFGYYHNRKTGILEIVPLQATIVEQIFTDYLSGISLTKLRDKLNESGHIGKDIPWSYRTLRQTLDNPVYCGYIKFKGSLFEGMHKPIIPYETYLKVQKELEERQQQTYERNNNPRPFQAKYMLSGMARCGYCGAPLRIVLGHKRKDGSRTMKYHCANRFPRKTRGITVYNDNKKCDSGTYDLSNLENTVVDNLIGLQENDDSLLKIINGNNQPILDTSSLKKQISQIDKKIQKNSDLYLNGFITMDELKDRTDSLQAEKKLLKAKISENKFNDSTDVFELVKTQLGSIPINELSYDNKKKIVNNLVSKVDVTADNVDIIFKFQLA

SEQ ID NO: 2077 - protein, 452 aa, synthetic construct
MKAAIYIRVSTREQVENYSIQAQTEKLTALCRSKDWDVYDIFIDGGYSGSNMNRPALNEMLSKLHEIDAVVVYRLDRLSRSQRDTITLIEEYFLKNDVEFVSLSETLDTSSPFGRAMIGILSVFAQLERETIRDRMVMGKIKRIEAGLPLTTAKGRTFGYDVIDTKLYINEEEARQLQLIYDIFEEEQSITFLQRRLKKLGYKVRTYNRYNNWLTNDLYCGYVSYKDKVHVKGVHEPIISEEQFYRVQEIFTRMGKNPNMNRDSASLLNNLVVCSKCGLSFVHRRKDSTSRAKKYHYRYYSCKTYKHIHELEKCGNKIWRADELEELIINRVNNYSLASRNVDKEDELDSLNEKLKTEHAKKKRLFDLYINGSYEVSELDSMMNDIDAQISYYESQIEANEELKKSKKIQGNLAYLATVDFDSLEFREKQLYLKSLINKIYIDGEQVTIEWL

SEQ ID NO: 2078 - protein, 485 aa, synthetic construct
MSKKVAIYTRVSTTNQAEDGFSIDEQIDRLTKYAEAMGWQVSDTYTDAGVSGAKLERPAMQRLINDIGNKAFDTVLVYKLDRLSRSVRDTLYLVKDVFTKNKIDFISLNESIDTSSAMGSLFLTILSAINEFERENIKERMTMGKLGRAKSGKSMMWTKTAFGYYHNRKTGILEIVPLQATIVEQIFTDYLSGISLTKLRDKLNESGHIGKDIPWSYRTLRQTLDNPVYCGYIKFKDSLFEGMHKPIIPYETYLKVQKELEERQQQTCERNNNPRPFQAKYMLSGMARCGYCGAPLRIVLGRKRKDGSRTMKYHCANRFPRKTKGVTVYNDNKKCDSGTYDLSNLENTVIDNLIGFQENNDSLLKIINGNNQPTLDASSFKEQISQIDKKIQKNSDLYLNDFITMDELKDRTDSLQAEKKLLKAKISENKFNGSTNVFELVKTQLGSIPINELSYDNKKKIVNNLVSKVDVTADNVDIIFKFQLA

SEQ ID NO: 2079 - protein, 469 aa, synthetic construct
MCYTTPVRAAVYLRISEDRSGEQLGVARQREDCLKLCDQRKWVPVEYLDNDVSASTGKRRPAYEQMLADITAGKIAAVVAWDLDRLHRRPTELEAFMCLADEKRLALATVAGDVDLATPQGRLVARLKGSVAAHETEHKKARQRRAARQKAERGHPNWSKAFGYLPGPNGPEPDPRTAPLVKQAYADILAGASLGDVCRRWNDAGAYTITGRLWTTTTLSKFLRKPRNAGLRAYKGARYGPVDRDAIVGKARWSPLVDEATFWAAQAVLDAPGRAPGRKSVRRHLLTGLAGCGKCGNHLAGSYRTDGRVVYVCKACHGVAILADNIEPILYHIVAERLAMPDAVDLLRREIHDAAEAETIRLELETLYGELDRLAVERAEGLLTARQVKISTDIVNAKITKLQARQLDQERLRVFDGIPLGTPQVASMIAELSPNRFRAVLDVLAEVVVQPVGKSGRIFNPKRVQVNWR

SEQ ID NO: 2080 - protein, 485 aa, synthetic construct
MTKKVAIYTRVSTTNQAEEGFSIDEQVDRLTKYAEAMGWQVSSTYTDAGFSGAKLERPAMQRLINDIENKAFDTVLVYKLDRLSRSVRDTLHLVKDVFTKNKIDFVSLNESIDTSSAMGSLFLTILSAINEFERENIKERMTMGKLGRAKSGKSMMWTKTAFGYYHNRETGILEIVPLQATIVEQIFTDYLSGISLTKLRDKLNESGHIGKEIPWSYRTLRQTLDNPVYCGYIKFKDSLFEGMHKPIIPYETYLKVQKELEERQRQTYERNHNPRPFQAKYMLSGMARCGYCGAPLKIVLGHKRKDGSRTMKYHCANRFPRKTKGVTVYNDNKKCDSGAYDLSNLENTVIDNLIGFQENNDSLLNIINGNNQPILDTSSFKKQISQIDKKIQKNSDLYLNDFITMDELKDRTDSLQAEKKLLKAKISESKFNDSTDVFELVKTQLGSIPINELSYDNKKKIVNNLVSKVDVTADSVDIIFKFQLA

SEQ ID NO: 2081 - protein, 452 aa, synthetic construct
MKAAIYIRVSTREQVENYSIQAQTERLTALCRSKDWDVYDIFVDGGYSGSNMNRPALNEMLSKLHEIDAVVVYRLDRLSRSQRDTITLIEEYFLKNNVEFVSLSETLDTSSPFGRAMIGILSVFAQLERETIRDRMVMGKIKRIEAGLPLTTAKGRTFGYDVIDTKLYINEEEAKQLRLIYDIFEEVQSITLLQKRLKKLGFKVRTYNRYNNWLTNDLYCGYVSYKDKVHVKGIHEPIISEEQFYRVQEIFTRMGKNPNMNRDSASLLNNLVVCSKCGLGFVHRRKDAMSRDKKYHYRYYSCKTYKHIHELEKCGNKIWRADKLEELIINRVNSYSLVSRNVDKEDELDSLNEKLKIEHAKKKRLFNLYINGSYEVSELDSMMSDIDAQINYYESRIEANEELRKNEKIQENLADLATVDFDSLEFREKRLYLKSLINKIYIDGEQVTIEWL

SEQ ID NO: 2082 - protein, 485 aa, synthetic construct
MTKKVAIYTRVSTTNQAEEGFSIDEQIDRLTKYAEAMGWQVSDTYTDAGLSGAKLERPAMQRLINDIENKAFDTVLVHKLDRLSRSVRDTLYLVKDVFTKNKIDFISLNESIDTSSAMGSLFLTILSAINEFERENIKERMTMGKLGRAKSGKSMMWTKTAFGYHHNRETGILEIVPLQATIVEQIFTDYLSGISLTKLRDKLNESGHIGKDIPWSYRTLRQTLDNPVYCGYIKFKDSLFEGMHKPIIPYETYLKVQKELEGRQQQTYERNNNPRPFQAKYMLSGMARCGYCGAPLKIVLGHKRKDGSRTMKYHCANRFPRKTKGVTVYNDNKKCDSGTYDLSSLENTVIDNLIGFQENNDSLLKIINGDDQPILDTSSIKEQISQIDKKIQKNGDLYLNDFITMDELRDRTDSLQAEKKLLKAKISENKFNDSTDVFELVKTQLGSIPINELSYDNKKKIVNNLVSKVDVTADNVDIIFKFQLA

SEQ ID NO: 2083 - protein, 485 aa, synthetic construct
MTKKVAIYTRVSTTNQADEGFSIDEQIDRLTKYAEAMGWQVSDTYTDAGFSGAKLERPAMQRLINDIENKAFDTVLVYKLDRLSRSVRDTLYLVKEVFTKNKIDFISLSESIDTSSAMGSLFLTILSAINEFERENIKERMTMGKLGRAKSGKSMMWTKTAFGYYHNRKTGILEIVPLQATIVEQIFTDYLSGISLTKLRDKLNESGHIGKDIPWSYRTLRQTLDNPVYCGYIKFKDSLFEGMHKPIIPYETYLKVQKELEERQQQTYERNNNPRPFQAKYMLSGMARCGYCGAPLRIVLGHKRKDGSRTMRYHCANRFPRKTKGVTVYNDNKKCDNGAYDLSNLENIVIDSLIGFQENNDSLLKIINGNNQPILDTSSFKEQISQIDKKIQKNSDLYLNDFITMDELKDRTDSLQAEKKRLKAKISGNKFNDSTDVFELVKTQLGSIPINELSYDNKKKIVNNLVSKVDVTADNVDIIFKFQLA

SEQ ID NO: 2084 - protein, 469 aa, synthetic construct
MSYTTPVRAAVYLRISEDRSGEQLGVARQREDCLELCCQRKWVPVEYLDNDVSASTGKRRPAYEQMLADIAAGKITAVVAWDLDRLHRRPIELEAFMSLADEKRLALATVAGDVDLATPQGRLVARLKGSVAAHETEHKRARQRRAARQKAERGYPNWSKAFGYLPGPNGPEPDPRTAPLVKQAYADILAGASLGDVCRRWNDAGAFTITGRPWTTTALSKFLRKPRNAGLRAYKGARYGPVDRDAIVGKAQWSPLVDEATFWAAQAVLDAPGRAPGRKSVRRHLLTGLAGCGKCGNHLAGSYRTDGRVVYVCKACHGVAILADNIEPILYHIVAERLAMPDAVDLLRREIHDAAEAETIRLELETLHGELDRLAVERAEGLLTARQVKISTDIVSAKITKLQACQLDQERLRVFDGIPLGTPQVAGMIAELSPDRFRAVLDVLAEVVVQPVGKSGRVFSPERVQVNWR

SEQ ID NO: 2085 - protein, 485 aa, synthetic construct
MTKKVAIYTRVSTTSQAEEGFSIDEQIDRLTKYAEAMGWQVSDTYTDAGFSGAKLERPAMQRLINDIENKAFDTVLVYKLDRLSRSVRDTLYLVKDVFTKNKIDFISLNESINTSSAMGSLFLTILSAINEFERENIKERMTMGKLGRAKSGKSMMWTKTAFGYYHNRKTGILEIVPLQATIVEQIFTDYLSGISLTKLRDKLNESGHIGKDIPWSYRTLRQTLDNPVYCGYIKFKDSLFEGRHEPIIPYETYLKVQKELEERQRQTYERNNNPRPFQAKYMLSGMARCGYCGAPLRIVLGHKRKDGSRTMKYHCANRFPRKTKGVTVYNDNRKCDSGTYDLSNLENTVIDNLIGLQENNDSLLKIINGNNQPILDTSSFKEQISQIDKKIQKNSDLYLNDLITMDELKDRTDSLQAEKKLLKAKISENKFNDSTDVFELVKAQLGSIPISELSYDDKKKIVNNLVSKVDVTADNVDIIFKFQLA

SEQ ID NO: 2086 - protein, 452 aa, synthetic construct
MKAAIYIRVSTQEQVGNYSIQAQTEKLTALCRSKDWDVYDIFIDGGYSGSNMNRPALNEMLSKLHEIDAVVVYRLDRLSRSQRDTTTLIEEYFLKNNVEFVSLSETLDTSSPFGRAMIGILSVFAQLERETIRDRMVMGKIKRVEAGLPLTTAKGRTFGYDVIDTKLYINEEEAKQLQLIYDIFEEEQSITSLQKRLKKLGFKVRTYNRYNNWLTNDLYCGYVSYKDKVHVKGIHEPIISEEQFYRVQEIFTRMGKNPNMNRDSASLLNNLVVCSKCGLSFVHRSKDTTSRGKKYHYRYYSCKTYKHAHELEKCGNKTWRADKLEELIINRVSDYSFASRNVDKEDELDSLNEKLKIEHAKKRRLFDLYIDGSYEVSELDSMMNDIDAQISYYESQIEANEELVKNRKIQENLANLATVDFDSLEFREKQLYLKSLINKIYIDGEQVTIEWL

SEQ ID NO: 2087 - protein, 485 aa, synthetic construct
MTKKVAIYTRVSTTNQAEEGFSIDEQIDRLTKYAEAMGWQVSDTYTDAGSSGAKLERPAMQRLINDIENKAFDTVLVYKLDRLSRSVRDTLYLVKDVFTKNKIDFISLNESIDTSSAMGSLFLTILSAINEFERENIKERMTMGKLGRAKSGKSMMWTKTAFGYYHNRKTGILEIVPLQATIVEQIFTDYLSGISLTKLRDKLNESGHIGKDIPWSYRTLRQTLDNPVYCGYIKFKDSLFEGMHKPIIPYETYLKVQKELKERQQQTYERNNNPRPFQAKYMLSGMARCGYCGAPLRIVLGHKRRDGSRTMKYHCANRFPRKTKGVTVYNDNKKCDSGTYDLSNLENTVIDNLVGFQENNDSLLKIINGNNQTILDTSSFKEQISQIDEKIQRNSDLYLNNFITMDELKDRTDSLQAEKKLLKAKISENKFNDSTDVFELVKTQLGSIPINELSYDDKKKIVNNLVSKVDVTADNVDIIFKFQLA

SEQ ID NO: 2088 - protein, 469 aa, synthetic construct
MCCTTPVRAAVYLRISEDRSGEQLGVARQREDCLKLCDQRKWEPVEYLDNDVSASTGKRRPAYEQMLADITAGKIAAVVAWDLDRLHRRPIELEAFMSLADEKRLALATVAGDVDLATPQGRLVARLKGSVAAHETEHKKARQRRAARQKAERGHPNWSKAFGYLSGPNGPEPDPRTAPLVKQAYADILAGASLGDVCRQWNDAGAFTITGRPWTTTTLSKFLRKPRNAGLRAYKGARYGPVDRDAIVGKAQWSPLVDEATFWAAQAVLDAPGRAPGRKSVRRHLLTGLAGCGKCGNHLAGSYRTDGRVVYVCKACHGVAILADNIEPILYHIVAGRLAMPDAVDLLRREIHDAAEAETIRLELETLYGELDRLAVERAEGLLTARQVKISTDIVNAKITKLRAGQLDQERLRVFDGIPLGTPQVAGVIAELSPDRFRAVLDVLAEVVVQPVGKGGRIFNPERVQVNWR

SEQ ID NO: 2089 - protein, 469 aa, synthetic construct
MCYTTPVRAAVYLRISEDRSGEQLGVARQREDCLKLCDQRKWVPVEYLDNDVSASTGKRRPAYERMLADITAGKIAAVVAWDLDRLHRRPIELEAFMSLADEKRLALATVAGDVDLATPQGRLVARLKGSVAAHETEHKKARQRRAARQKAERGHPNWSKAFGYLPGPNGPEPDPRTAPLVKQAYADILAGASLGDVCRQWNDAGAFTITGRPWTTTALSKFLRKPRNAGLRAYKGARYGPVDRDAIVGKAQWSPLVDEATFWAAQAVLDAPGRAPGRKSVRRHLLTGLAGCGKCGNHLAGSYRADGRVVYVCKACHGVAILADNIEPILYHIVAERLAMPDAVDLLRREIHDAAEAETIRLELKTLYGELDRLAVERAEGLLTARQVKISTDIVNAKITKLQARQQDQERLRVLDGIPLGTPQVAGVIAELSPDRFRAVLDVLAEVVVQPVGKSGRIFNPERVQVNWR

SEQ ID NO: 2090 - protein, 469 aa, synthetic construct
MSFTTPVRAAVYLRISEDRSGEQLGVARQREDCLKLCGQRKWVPVEYLDNDVSASTGKRRPAYEQMLADITAGKIAAVVAWDLDRLHRRPVELEAFMSLADEKRLALATVAGDVDLATPQGRLVARLKGVVAAHETEHKKARQRRAARQKAERGYPNWSKAFGYLPGPNGPEPDPRTAPLVKQAYADILAGASLGDVCRRWNDAGAFTITGRPWTTTTLSKFLRKPRNAGLRAYKGARYGPVDRDAIVGKAQWGPLVDEATFWAAQAVLDAPGRAPGRKSVRRHLLTGLAGCGKCGNHLAGSYRTDGRVVYVCKACHGVAILAENIEPILYHIVAERLAMPDAVDLLRREIHDAAEAETIRLELETLYGELDRLAVERAEGLLTARQVKISTDIVNAKITKLQARQLDQERLRVFDGIPLGTPQVASMIAELSPDRFRAVLDVLAEVVVRPVGKSGRIFNPERVQVNWR

SEQ ID NO: 2091 - protein, 485 aa, synthetic construct
MTKKVAIYTRVSTTSQAEEGFSIDEQIDRLTKYAEAMGWQVSDTYTDAGFSGARLERPAMQRLINDIENKAFDTVLVYKLDRLSRSVRDTLYLVKDVFTKNKIDFISLNECIDTSSAMGSLFLTILSAINEFERENIKERMTMGKLGRAKSGKSMMWTRTAFGYYHNRKTGILEVVPLQATIVEQIFTDYLSGISLTKLRDKLNESGHIGKDIPWSYRTLRQTLDNPVYCGYIKFKGSLFEGMHKPIIPYETYLKVQKELEERQQQTYERNNNPRPFQAKYMLSGMARCGYCGAPLRIVLGHRRKDGSRTMKYHCANRFPRKTKGVTVYSDNKKCDSGTYDLSDLESAVIDNLIGFQENNDSLLKIINGNNQPILDTSSFKEQISQIDKKIQKNSDLYLNDFITMDELKDRTDSLQAEKKLLKAKISENKFNDSTEVFELVKTQLGSIPINELSYDNKKKIVNNLVSKVDVTADNVDIIFKFQLA

SEQ ID NO: 2092 - protein, 485 aa, synthetic construct
MTKKVAIYTRVSTTNQAEEGFSIDEQIDRLTKYAEAMGWQVSGTYTDAGLSGAKLERPAMQRLINDIENKAFDTVLVYKLDRLSRSVRDTLYLVKDVFTKNRIDFISLDESIDTSSAMGSLFLTILSAINEFERENIKERMTMGKLGRAKSGKSMMWTKTAFGYHHNRKTGILEIVPLQATIVEQIFTDYLSGISLTKLRDKLNESGHIGKDIPWSYRTLRQTLDNPVYCGYIKFKDSLFEGMHKPIIPYETYLKVQKELEERQRQTYERNNNPRPFQAKYMLSGMARCGYCGAPLRIVLGHKRKDGSRTMKYHCANRFPRKTGGVTVYNDNKKCDSGTYDLSNLENTVIDNLIGLQENNDCLLKIINGNNQPILDTSSFKKQISQIDKKIQKNSDLYLNDFITMDELKDRTDSLQAEKKLLKAKISENKFNDSTDVFELVKTQLGNIPINELSYDNKKKIVNNLVSKVDVTADNVDIIFKFQLA

SEQ ID NO: 2093 - protein, 469 aa, synthetic construct
MCYTTPVRAAVYLRISEDRSGEQLGVARQREDCLNLCDQRKWVPVEYLDNDVSASTGKRRPAYEQMLADITAGKIEAVVAWDLDRLHRRPIELEAFMSLADEKRLALATVAGDVDLATPQGRLVARLKGCVAAHETEHKKARQRRAARQKAERGLPNWSKAFGYLPGPSGPEPDPRTAPLVKQAYADILAGASLGDVCRQWNDAGAFTTTGRPWTTTTLSKFLRKPRNAGLRAYKGARYGPVDRNAIVGKARWSPLVDEATFWAAQAVLDAPGRAPGRKSVRRHLLTGLAGCGKCGNHLAGSYRTDGRVVYVCKTCHGVAILADNIEPILYHIVAERLAMPDAVDLLRREIHDAAEAETIRLELETLHGELDRLAVERAEGLLTARQVKISTDIVNAKITKLQARQLDQERLRVFGGIPLGTPQVADVIAELSPDRFRAVLDVLAEVVVRPVGKSGRIFNPERVQVNWR

SEQ ID NO: 2094 - protein, 485 aa, synthetic construct
MTKKVAIYTRVSTTNQAEEGFSIDEQIDRLTKYAEAMGWQVSDTYTDAGFSGAKLERPAMQRLINDIENKAFDTVLVYKLDRLSRSVRDTLYLVKDVFTKNKIDFISLNESIDTSSAMGSLFLTILSAINEFERENIRERMTMGKLGRAKGGKSMMWTKTAFGYYHNRKTGILEIVPLQATIVEQIFTDYLSGISLTKLRDKLNESGHIGKDIPWSYRTLRQTLDNPVYCGYIKFKDSLFEGMHKPIIPYETYLKVQKELEERQQQTYERNNNPRPFQAKYMLSGMARCGYCGAPLRIVLGHKRKDGSRTMKYHCANRFPRKTKGITVYNDNKKCGSGAYDLSNLENTVIDNLIGFQENNDSLLKIINGNNQPILDTSSFKEQISQIDKKIQKNSDLYLNDFITMDELKDRTDSLQAEKKLLEAKISENKLNDSTDVFELVKTQLGSIPINELSYDDKKRIVNNLVSKVDVTADNVDIIFKFQLA

SEQ ID NO: 2095 - protein, 485 aa, synthetic construct
MTKKVAIYTRVSTTNQAEEGFSIDEQIDRLTKYAEAMGWQVSDTYTDAGLSGAKLERPAMQRLINDIENKAFDTVLVYKLDRLSRSVRDTLYLVKDVFTKNKIDFISLNESIDTSSAMGSLFLTILSAINEFERENIKERMTMGKLGRAKSGKSMMWTKTAFGYYHNRKTGILEIVPLQATIVEQIFTDYLSGISLTKLRDKLNESGHIGKDIPWSYRTLRQTLDNPVYCGYIKFKGSLFEGMHKPIIPYETYLKVQKELEERQQQTYERNNNPRPFQAKYMLSGVARCGYCGAPLRIVLGHKRKDGSRTMKYHCANRFPRKTKGITVYNDNKRCDSGTYDLSNLENTVIDNLIGFQENDDSLLKIINGNNQPILDTSSFKKQISQIDKKIQKHSDLYLNDFITMDELKDRTDSLQAEKRLLKAKISENKFNDSTDVFELVKTQLGSIPINELSYDNKKKVVNNLVSKVDVTADNVDIIFKFQLA

SEQ ID NO: 2096 - protein, 452 aa, synthetic construct
MKAAIYIRVSTQEQVGNYSIQAQTEKLTALCRSKDWDVYDIFVDGGYSGSNMNRPALNEMLSKLHEIDAVVVYRLDRLSRSQRDTTTLIEEYFLKNNVEFVSLSETLDTSSPFGRAMIGILSVFAQLERETIRDRMVMGKIKRIEAGLPLTTAKGRTFGYDVIDTKLYINEEEAKQLRLIYDIFEEEQSITFLQKRLKKLGFKVRTYNRYNSWLTNDLYCGYVSYKDKVHVKGIHEPIISEEQFYRVQEIFTRMGKNPNTNRDSASLLNNLVVCSKCGLGFVHRSKDTMCRGKKYHYRYYSCKTYKHTHELEKCGNKTWRADKLEELIINRVNNYSFASRNVDKEDELDSLNEKLKTEHAKKKRLFDLYINGSYEVSELDSMMNDIDAQINYYESQIEANEELKKNKKIQENLAGLATMDFDSLEFREKQLYLKSLISKIYIDGEQVTIEWL

SEQ ID NO: 2097 - protein, 452 aa, synthetic construct
MKAAIYIRVSTREQVENYSIQAQTEKLTALCRSKDWDVYDIFVDGGYSGSNMNRPALNEMLSKLHEIDAVVVYRLDRLSRSQRDTITLIEEYFLKNNVEFVSLSETLDTSSPFGRAMIGILSVFAQLERETIRDRMVMGKIKRIEAGLPLTTAKGRTFGYDVIDTKLYINEEEAKQLRLIYDIFEEEQSITFLQKRLKKLGLKVRTYNRYNSWLTNDLYCGYVSYKDKVHVKGIHEPIISEEQFYRVQEIFTRMGKNPNMNRDSASLLNNLVVCSKCGRGFVHRRKDAKGRDKKYHYRYYSCKTYKHIHELEKCGNKIWRADKLEELIINRVNNYSIGSRNADKEDELDSLNEKLKIEHAKKKRLFELYINGSYEVSELDSMMNDIDAQINYYESQIEANKELKKNKKIQENLADLTTVDFDSLEFREKQLYLKSLINKIYIDGEQVTIEWL

SEQ ID NO: 2098 - protein, 485 aa, synthetic construct
MTKKVAIYTRVSTTNQAEEGFSIDGQIDRLTKYAEAMGWQVSDTYTDAGFSGAKLERPAMQRLISDIENKAFDTVLVYKLDRLSRNVRDTLYLVKDVFTKNKIDFISLSESIDTSSAMGSLFLTILSAINEFERENIKERMTMGKLGRAKSGKSMMWTKTAFGYYHNRKTGILEIVPLQATIVEQIFTDYLSGISLTKLRDKLNESGHIGKDIPWSYRTLRQTLDNPVYCGYIKFKDSLFEGMHKPIIPYETYLKVQKELEERQQQAYERNNNPRPFQAKYMLSGMARCGYCGAPLKIVLGHKRKDGSRAMKYHCANRFPRKTKGITVYNDNKKCDSGTYDLSNLENTVIDNLIGFQENNDSLLKIINGNNQPILDTSSLKKQISQIDRKIQKSSDLYLNDFITMDELKDRIDSLQAEKKLLKAKMSENKFNDSTDVFELVKTQLGSIPINELSYDNKKKIVNNLVSKVDVTADNVDIIFKFQLA

SEQ ID NO: 2099 - protein, 485 aa, synthetic construct
MTKKVAIYTRVSTTNQAEEGFSIDEQIDRLTKYAEAMGWQVSDTYTDAGLSGAKLERPAMQRLINDIEDKAFDTVLVYKLDRLSRSVRDTLYLVKDVFTKNKIDFISLDESIDTSSAMGSLFLTILSAINEFERENIKERMTMGKLGRAKSGKSMMWTRTAFGYHHNRETGILEIVPLQATIVEQIFTDYLSGISLTKLRDKLNESGHIGKDIPWSYRTLRQTLDNPVYCGYIKFKDSLFEGMHKPIIPYETYLKVQKELEERQQQTYERNNNPRPFQAKYMLSGMARCGYCGAPLKIVLGHKRKDGSRTMKYHCANRFPRKTKGVTVYNDNKRCDSGTYVLSNLENTVIDNLIGFQEDNDSLLKIINGSNQPILDTSSFERQISQIDKKIQKNTDLYLNDFITMDELRDRTDSLRAEKKLLKAKISENKFNDSTDVFELVKTQLGSIPINELSYDNKKKIVNNLVSKVDVTADNVDIIFKFQLA

SEQ ID NO: 2100 - protein, 452 aa, synthetic construct
MKAAIYIRVSTREQVENYSIQAQTEKLTALCRSKDWDVYDVFIDGGYSGSNMNRPALNEMLSKLHEIDAVVVYRLDRLSRSQRDTITLIEEYFLKNNVEFVSLSETLDTSSPFGRAMIGILSVFAQLERETIRDRMVMGKIKRIEAGLPLTTAKGRTFGYDVIDTKLYINEEEAKQLQLIYDIFEEEQSITFLQKRLKKLGFKVRTYNRYNNWLTNDLYCGYVSYKDKVHVKGIHEPIISEEQFYRVQEIFARMGKNPNMNRDSASLLNNLVVCSKCGLGFVHRRKDAMSRDKKYHYRYYSCKTYKHIHELEKCGNKIWRADKLEELIIKRVNNYSLASRNVDKEDELDSLSEKLKIEHAKKKRLFDLYINGSYGVSELDSMMNDIDAQISYYESQIEANEELKKDKKIQENLADLATVDFDSLGFREKQLYLKSLINKIYIDGEQVTIEWL

SEQ ID NO: 2101 - protein, 452 aa, synthetic construct
MKAAIYIRVSTREQVENYSIQAQTEKLTALCRSKDWDVYDIFIDGGYSGSNMNRPALNEMLSKLHEIDAVVVYRLDRLSRSQRDTITLIEEYFLKNNVEFVSLSETLDTSSPFGRAMIGILSVFAQLERETIRDRMVMGKIKRIEAGLPLTTAKGRTFGYDVIDTKLYVNEEEAKQLQLIYDIFEEEQSITFLQKRLKKLGFKVRTYNRYNNWLTNDLYCGYVSYKDKVHVKGIHEPIISEEQFYRVQEIFTRMGKNPNMNRDSASLLNNLVVCSKCGLGFVHRRKDAMSRDKKYHYRYYSCKTYKHIHELEKCGNKIWRADKLEELIINRVNNYSFASRNADKEAELDSLNEKLKIEHAKKKRLFDLYINGSYEVSELDSMMSDIDAQINYYESQIEANEELKRNKKIQENLADLATVDFDSLEFREKQLYLKSLINKIYIDGEQVTIDWL

SEQ ID NO: 2102 - protein, 452 aa, synthetic construct
MKAAIYIRVSTQEQVGNYSIQAQTEKLTALCRSKDWDVYDIFVDGGYSGSNMNRPALNEMLSKLHEIDAVVVYRLDRLSRSQRDTTTLIEEYFLKNNVEFVSLSETLDTSSPFGRAMIGILSVFAQLERETIRDRMVMGKIKRIEAGLPLTTAKGRTFGYDVIDTKLYINEEEAKQLQLIYDIFEEEQSITSLQKRLKKLGFKVRAYNRYSNWLTNDLYCGYVSYKDKVHVKGIHEPIISEEQFHRVQEIFTRMGKNPNMNRDSASLLSNLVVCSKCGLGFVHRSKDTVSRGKRYHYRYYSCKTYKHTHELEKCGNRTWRADKLEELVINRVNNYSFASRNVDKEDELDSLNEKLKIEHAKKKRLFDLYINGSYEVSELDSMMNDIDAQINYYESQVEAKEELRKNKRIQENLADLATVDFDSLEFREKQLYLKSLINKIYIDGEQVTIEWL

SEQ ID NO: 2103 - protein, 469 aa, synthetic construct
MCYTTPVRAAVYLRISEDRSGEQLGVARQREDCLKLCDQRKWVPVEYLDNDVSASTGKRRPAYEQMLADITAGKIAAVVAWDLDRLHRRPIELEAFMSLADEKRLALATVAGDVDLATPQGRLVARLKGSVAAHETEHKKARQRRAARQKAERGHPNWSKAFGYLSGPNGPEPDPRTAPLVKQAYADILAGASLGDVCRQWNDAGAFTITGRPWTTTALSKFLRKPRNAGLRAYKGARYGPVDRDAIVGKAQWSPLVDEATFWAAQAVLDAPGRVPGRKSVRRHLLTGLAGCGKCGNHLAGSYRTDGRVVYVCKACHGVAILADNIEPILYHIVAERLAMPDAVDLLRRETHDAAEAETIRLELETLYSELDYLAVERAEGLLTARQVKISTDIVNAKITKLQARQLDQERLRVFDGIPLGTPQVAGMIAELSPDRFRAVLDVLAEVVVQPVGKSGRIFNPERVQVNWR

SEQ ID NO: 2104 - protein, 452 aa, synthetic construct
MKAAIYIRVSTREQVENYSIQAQTEKLTALCRSKDWDVYDIFIDGGYSGSNMNRPALNEMLSKLHEIDAVVVYRLDRLSRSQRDTITLIEEYFLKNNVEFVSLSETLDTSSPFGRAMIGILSVFAQLERETIRDRMVMGKIKRIEAGLPLTTAKGRTFGYDVIDTKLYINEEEAKQLQLIYDIFEEEQSITFLQKRLKKLGFKVRTYNCYNNWLTNDLYCGYVSYKDKVHVKGIHEPIISEEQFYRVQEIFTRMGKNPNMNRDSASLLNNLVVCSKCGLGFVHRRKDAMSRDKKYHYRYYSCKTYKHIHELEKCGNKIWRADKLEELIINRVNNYSLASRNVDKGDELDSLNEKLKIEHAKKRRLFDLYINGSYEVSELDSMMNDIDAQINYYESQIEANEELKENKKIQGNLADLATVDFDSLEFREKQRYLKSLINKIYIDGEQVTIEWL

SEQ ID NO: 2105 - protein, 452 aa, synthetic construct
MKAAIYIRVSTREQVENYSIQAQTEKLTALCRSKDWDVYDIFIDGGYSGGNMNRPALNEMLSKLHEIDAVVVYRLDRLSRSQRDTITLIEEYFLKNNVEFVSLSETLDTSSPFGRAMIGILSVFAQLERETIRDRMVMGKIKRIEAGLPLTTAKGRTFGYDVIDTKLYINEEEAKQLQLIYDIFEEEQSITFLQKRLKKLGFKVRTYNRYISWLTNDLYCGYVSYKDKVHVKGIHEPIISEEQFYRVQEIFTRTGKNPNMNRDSASLLNNLVVCSKCGLGFVHRRKDTMSRGKKYHYRYYSCKTYKHIHELEKCGNKIWRADKLEELVIDRVNNYSIASRNVDKEDELDSLNEKLRIEHAKKKRLFDLYINGSYEVSELDSMMNDIGAQINHYESQIEANEELKKNKKIQENLANLATVDFDSLEFREKQLYLRSLINKIYIDGEQVTIEWL

SEQ ID NO: 2106 - protein, 452 aa, synthetic construct
MKAAIYIRVSTREQVENYSIQAQTEKLTALCRSKDWDVYDIFIDGGYSGSNMNRPALDEMLSKLHEIDAVVVYRLDRLSRSQRDTITLIEEYFLKNNVEFVSLSETLDTSSPFGRAMIGILSVFAQLERETIRDRMVMGKIKRIEAGLPLTTAKGRTFGYDVIGTKLYINEEEAKQLQLIYDIFEEEQSITFLQKRLKKLGFKVRTYNRYNSWLTNDLYCGYVSYKDKVHVKGIHEPIISEEQFYRVQEIFTRMGKNPNMNRDSASLLNNLVVCSKCGLGFVHRRKDTMSRGKKYHYRYYSCKTYKHIHELEKCGNKIWRADKLEELIINRVNNYSFASRNVDKEDELDSLNEKLKIEHAKKKRLFDLYINGSYEVSELDSMMNDIDAQIDYYESLIEANEELRKNKKIQENLAGLATVDFDSLEFREKQLYLKSLINKIYIDGEQVTIDWL

SEQ ID NO: 2107 - protein, 469 aa, synthetic construct
MSYTTPVRAAVYLRISEDRSGEQLGVARQREDCLKLCGQRKWVPVEYLDNDVSASTGKRRPAYEQMLVDITAGKIAAVVAWDLDRLHRRPIELEAFMNLADEKRLALATVAGDVDLATPQGRLVARLKGSVAAHETEHKRARQRRAARQKAERGHPNWSKAFGYLPGPNGPEPDPRTAPLVKQAYADILAGASLGDVCRQWNDAGAFTITGRPWATTALSKFLRKPRNAGLRAYRGARYGPVDRDAIVGKAQWSPLVDEATFWAAQAVLDAPGRAPGRKSVRRHLLTGLAGCGKCGNHLAGSYRTDGRVVYVCKACHGIAILADNIEPILYHIVAERLAMPDAVDLLRSEVHDTAEAETIRLELETLYGELDRLAVERAEGLLTARQVKISTDIVNAKITKLRARQLDQERLRVFDGIPLGTPQVAGMIAELSPDRFRAVLDVLAEVVVQPVGKSGRIFNPERVQVNWR

SEQ ID NO: 2108 - protein, 452 aa, synthetic construct
MKAAIYIRVSTQEQVGNYSIQAQTEKLTALCRSKDWDVYDIFVDGGYSGSNMNRPALNEMLSKLHEIDAVVVYRLDRLSRSQRDTTTLIEEYFLKNNVEFVSLSETLDTSSPFGRAMIGILSVFAQLERETIRDRMVMGKIKRIEAGLPLTTAKGRTFGYDVIDTKLYINEEEAKQLRLIYDIFEEEQSITFLQKRLKKLGLKVRTYNRYNNWLTNDLYCGYVSYKDKVHVKGIHEPIISEEQFYRVQEIFTRMGKNPNMNRDSASLLNNLVVCSKCGLGFVHRSKDTMSRGKKYHYRYYSCKTYKHTHELEKCGNKTWRADRLEELIINRVNNYSFASRNADKEDELDSLNEKLKIEHARKKRLFDLYINGSYEVSELDSMMNDIDARINYYESQIEASEELKKNKKIQENLADLATVDFDSLGFREKQLYLKSLINKIYIDGEQVTIEWL

SEQ ID NO: 2109 - protein, 485 aa, synthetic construct
MTKKVAIYTRVSTTNQAEEGFSIDEQIDRLTKYAEAMGWQVSDTYTDAGLSGAKLERPAMQRLINDIENKAFDTVLVYKLDRLSRSVRDTLYLVKDVFTKNKIDFISLNESIDTSSAMGSLFLTILSAINEFERENIKERMTMGKLGRAKSGKSMMWTKTAFGYHHNRKTGILEIVPLQATIVEQIFTDYLSGISLTKLRDKLNESGHIGKDIPWSYRTLRQTLDNPVYCGYIKFKGSLFEGMHKPIIPYETYLKVQKELEERQQQTYERNSNPRPFQAKYMLSGMARCGYCGAPLRVVLGHKRKDGSRTMKYHCANRSPRKTKGVTVYNDNKKCDSGTYDLSNLEDTVIDNLIGFQENNDSLLKIINGNNQPTLDTSSFKEQISQIDKRIQKNSDLYLNDFITMDELKDRTDGLQAEKKLLKAKISENKLNDSTDVFELVKAQLGSIPINELSYDNKKKIVNNLVSKVDVTADNVDIIFKFQLA

SEQ ID NO: 2110 - protein, 485 aa, synthetic construct
MTKKVAIYTRVSTTNQAEEGFSIDEQIDRLTKYAEAMGWQVSDTYTDAGFSGAKLERPAMQRLINDIENKAFDTVLVYKLDRLSRSVRDTLYLVKDVFTKSKIDFISLNESIDTSSAMGSLFLTILSAINEFERENIKERMTMGKLGRAKSGKSMMWTKTAFGYHHNRKTGILEIVPLQATIVEQIFTDYLSGISLTKLRDKLNESGHIGKDIPWSYRTLRQTLDNPVYCGYIKFKDSLFEGMHKPIIPYETYLKVQKELEERQQQTYERNNNPRPFQAKYMLSGMARCGYCGAPLRIVLGHKRKDGSRTMKYHCANRFPRKTKGITVYNDNKKCNSGTYDLSNLENTVIDNLIGFQENNDSLLKIVSGNNRPTLDTSSFKKQISQIDKKIQKNSDLYLNDFITMGELKDRTDSLQAEKKLLKAKISENKFNDSTDVFELVKTQLGSIPINELSYDNKKKIVNNLVSKVDVTADNVAIIFKFQLA

SEQ ID NO: 2111 - protein, 485 aa, synthetic construct
MTKKVAIYTRVSTTNQAEEGFSIDEQIDRLTKYAEAMGWQVSDTYTDAGFSGAKLERPAMQRLINDIENRAFDTVLVYKLDRLSRSVRDTLYLVKDVFTNSKIDFISLNESIDTSSAMGSLFLTILSAINEFERENIKERMTMGKLGRAKSGKSMMWTKTAFGYYHNRKTGILEIVPLQATIVEQIFTDYLSGISLTKLRDKLNESGHIGKDIPWSYRALRQTLDNPVYCGYIKFKDSLFEGMHKPIIPYETYLKVQKELEERQQQTYERNNNPRPFQAKYMLSGMARCGYCGAPLRIVLGHKRKDGSRTMKYHCANRFPRKTKGITVYNDNKKCNSGTYGLSDLENTVIDNLIGFQENNDSLLKIINGNNQPILDTGSFEKQISQIDKKIQKNSDLYLNDFITMDELKDRTDSLQAEKKLLKAKISENKFNDSTDVFELVKTQLGSIPINELSYDNKKKIVNNLVSKVDVTADNVVIIFKFQLA

SEQ ID NO: 2112 - protein, 469 aa, synthetic construct
MSYITPVRAAVYLRISEDRSGEQLGVARQREDCLKLCGQRKWVPVEYLDNDVSASTGKRRPAYEQMLADITAGKIAAVVAWDLDRLHRRPVELEAFMSLADERHLALATVAGDVDLATPQGRLVARLKGSVAAHETEHKKARQRRAARQKAERGYPNWSKAFGYLPGPNGPEPDPRTAPLVKQAYADILAGASLGDVCRQWNDAGAFTITGRPWTTTTLSKFLRKPRNAGLRAYKGARYGPVDCDAIVGKAQWSPLVDEAIFWAAQAVLDAPGRAPGRKSVRRHLLTSLAGCGKCGNHLAGSYRTDGRVVYVCKACHGVSILAVNIEPILYRIVAERLAMPDAVDLLRREIHDAAEAETIRLELETLYGELDRLAVERAEGLLTARQVKISTDIVNAKITKLQAHQLDQERLRVLDGIPLGTPQVAGVIAELSPDRFRAVLDALAEVVVQPVGKSGRIFNRERVQVNWR

SEQ ID NO: 2113 - protein, 469 aa, synthetic construct
MSYTTPVRAAVYLRISEDRSGEQLGVARQREDCLKLCDQRKWEPVEYLDNDVSASTGKRRPAYEQMLADITAGKIAAVVAWDLDRLHRRPMELEAFMSLADEKRLALATVAGDVDLATPQGRLVARLKGSVAAHETEHKKARQRRAARQKAERGLPNWSKAFGYLPGPNGPEPDPRTAPLVKQAYADILAGASLGDVCRQWNDAGAFTITGRPWTTTTLSKFLRKPRNAGLRAYKGARYGPVDRDAIVGKAQWSPLVDEATFWAAQAVLDAPGRAPGRKSVRRHLLTGLAGCGKCGNRLAGSYRTGGKVVYVCKACHGVAILADNIEPILYRIVAERLAMPDAADLLRREIHDAAEADTIRLELETLYGELDRLAVERAEGLLTARQVKISTDIVNAKITKLQARQLDQERLRVLDGIPLGAPQVAGMIAELSPDRFRAVLDVLAEVVVQPVGKSGKIFNPERVQVNWR

SEQ ID NO: 2114 - protein, 485 aa, synthetic construct
MTKKVAIYTRVSTTNQAEEGFSIDEQIDRLTKYAEAMGWQVSGTYTDAGFSGAKLERPAMQRLINDIENKAFDTVLVYKLDRLSRSVRDTLYLVKDVFTKNKIDFISLNESINTSSAMGSLFLTILSAINEFERENIKERMTMGKLGRAKSGKSMMWTKTAFGYYHNRKTGILEIVPLQATIVEQIFTDYLSGISLTKLRDKLNESGHIGKDIPWSYRTLRQTLDNPVYCGYTKFKDSLFEGMHKPIIPYETYLKVQKELEERQQQTYERNNNPRPFQAKYMLSGMARCGYCGAPLKIVLGHKRKDGSRTMKYHCTNRFPRKTKGVTVYNDSKKCDSGTYDLSDLENTVIDNLIGFQENNDSLLKIINGNNQPILDTSSFKRRISQIDKKIQKNSDLYLNDLITMEELKDRTDSLQAEKKLLKAKISENKFNDSTDAFELVKAQLGSIPINELSYDNKKKIVNNLVSKVDVTADNVDIIFKFQLA

SEQ ID NO: 2115 - protein, 452 aa, synthetic construct
MKAAIYVRVSTQEQVGNYSIQAQTEKLTALCRSKDWDVYDIFIDGGYSGSNMNRPALNEMLSKLHEIDAVVVYRLDRLSRSQRDTTTLIEEYFLKNNVEFVSLSETLDTSSPFGRAMIGILSVFAQLERETIRDRMVMGKIKRIEAGLPLTTAKGRTFGYDVIDTKLYINEEEAKQLQLIYDIFEEEQSITSLQKRLKKLGFKVRTYNRYNNWLTNDLYCGYVSYKDKVHVKGIHEPIISEEQFYRVQEIFTRMGKNPNMNRDSASLLSNLVVCSKCGLGFVHRSKDTMSRGKKYHYRYYSCKTYKHTHELEKCGNKTWRADKLEELIINRVINYSFASRNVDKEDELDSLNEKLKIELAKRKRLFDLYINGSYEVSELDSMMNDIDAQINYYESQIEASEELRKNKKIQENLADLAAVDFDSLEFREKRLYLKSLINKIYIDGEQVTIEWL

SEQ ID NO: 2116 - protein, 485 aa, synthetic construct
MTKKVAIYTRVSTTNQAEEGFSIDEQIDRLTKYAEAMGWQVSDTYTDAGFSGAKLERPAMQRLINDIENKAFDTVLVYKLDRLSRSVRDTLYLVKEVFTKNKIDFISLNESIDTSSAMGSLFLTILSAINEFERENIKERMTMGKLGRAKSGKSMMWTKTAFGYYHNRKTGILEIVPLQATIVEQIFTDYLSGISLTRLRDKLNESGHIGKDIPWSYRTLRQTLDNPVYCGYIKFKGSLFEGMHKPIIPYETYLKVQKELEERQQRTYERNNNPRPFQAKYMLSGMARCGYCGAPLRIVLGHKRKDGSRTMKYHCANRFPRKTKGITVYNDNKKCDSGTYDLSNLENTVIDNLIGFQENNDSLLKIINDNNQPILDTSSFEEQISQIDKKIQKNSDLYLNDFISMDELKDRTDCLQAEKKLLKAKISENKFNDSTDVFELVKTQLGSIPINELSYDDKKKIVNNLVSKVDVTADNVDIIFKFQLA

SEQ ID NO: 2117 - protein, 452 aa, synthetic construct
MKAAIYIRVSTREQVENYSIQAQTEKLTALCRSKDWDVYDIFIDGGYSGSNMNRPALNEMLSKLHEIDAVVVYRLDRLSRSQRDTITLIEEYFLKNNVEFASLSETLDTSSPFGRAMIGILSVFAQLERETIRDRMVMGKIKRIEAGLPLTTAKGRTFGYDVIDTKLYINEEEAKQLQLIYDIFEEEQSITSLQKRLKKLGFKVRTYNRYNNWLTNDLYCGYVSYKDKVHVKGIHEPIISEEQFYRVQEIFARMGKNPNMNRDSASLLNNLVVCSKCGLGFVHRRKDAMSRDKKYHYRYYSCKTYKHIHELEKCGNKIWRADKLEELIIDRVNNYSLASRNVDKEDELGSLNEKLKAEHAKKKRLFDLYINGNYEVSELDSMMNDIDVQINYYESQIEANEELRKNKKIQENLAHLATVDFDSLEFREKQLYLKSLINKIYIDGEQVTIEWL

SEQ ID NO: 2118 - protein, 469 aa, synthetic construct
MSYTTPMRAAVYLRISEDRSGEQLGVARQREDCLKLCDQRKWVPVEYLDNDVSASTGKRRPAYEQMLADITAGKIAAVVAWDLDRLHRRPIELEAFMSLADEKRLALATVAGDVDLATPQGRLVARLKGCVAAHETEHKKARQRRAARQKAERGYPNWSKAFGYLPGPNGPEPDPRTAPLVKQAYADILSGASLGDVCRQWNDAGAVTITGRLWTTTTLSKFLRKPRNAGLRAYKGARYGPVDRDAIVGKAQWSPLVDEATFWAAQAVLDAPGRAPGRKSVRRHLLTGLAGCGKCGNHLAGSYRTDGRVVYVCKACHGVAILADNIEPILHHVVAERLAMPDAVDLLRREIHDAAEAETIRLELEALYGELDRLAVERAEGLLTARQVKISTDIVNAKITKLQARQLDQERLRVFDGIPLGTRQVAGTIAELSPDRFRAVLDVLAEVVVQPVGKNGRISNPERVQVNWR

SEQ ID NO: 2119 - protein, 485 aa, synthetic construct
MTKKVAIYTRVSTTNQAEEGFSIDEQIDRLTKYAEAMGWQVSDTYTDAGFSGAKLERPAMQRLISDIENKAFDTVLVYKLDRLSRSVRDTLYLVKDVFTKNKIDFISLNESIDTSSAMGSLFLTILSAINEFERENIKERMTMGKLGRAKSGKSMMWTKTAFGYYHNRKTGILEIVPLQATIVEQIFTDYLSGISLTKLRDKLNESGHIGKDIPWSYRTLRQTLDNPVYCGYIKFKGSLFEGMHKPIIPYETYLKVQKELEERQQQTYERNNNPRPFQAKYMLSGMARCGYCGAPLRIVLGHKRKDGSRTMKYHCTNRFPRKTKGVTVYNDNKKCDSGTYDLSNLENTVIDNLIGFQENNGSLLKIINGNNQPILDISSFKKQISQIDKKIQKNSDLYLNDFITMDELKDRTDSLQAEKKLLKAKISENKFNDSTDVFELVKTQLGSIPINELSYDNKKKIVNNLVSKVDVTADNVDIIFKFQLA

SEQ ID NO: 2120 - protein, 469 aa, synthetic construct
MSHTTPVRAAVYLRISEDRSGEQLGVARQREDCLKLCDQRKWEPVEYLDNDVSASTGKRRPAYEQMLADITAGKIAAVVAWDLDRLHRRPIELEAFMSLADEKRLALATVAGDVDLATPQGRLVARLKGSVAAHETEHKKARQRRAARQKAERGHPNWSKAFGYLPGPNGPEPDPRTAPLVKQAYADILAGASLGDVCRQWNGAGAFTITGRPWTTTTLSKFLRKPRNAGLRAYKGARYGPVDRDAIVGKAQWSPLVDEATFWAAQAVLDAPGRAPGRKSVRRHLLTGLAGCGKCGSHLAGSYRTDGRVVYVCKACYGVAILADNIEPILYHIVAERLAMPDAVDLLRRETHDAAEAETIRLELETLYGELDRLAVERAEGLLTARQVKISTDIVNAKITKLQARQLDQERLRVFEGIPLGTPQAAGIIAGLSPDRFRAVLDVLAEVVVQPVGKSGSIFNPERVQVNWR

SEQ ID NO: 2121 - protein, 485 aa, synthetic construct
MTKKVAIYTRVSTTNQAEEGFSIDEQIDRLTKYAEAMGWQVSDTYTDAGLSGAKLERPAMQRLINDIENKAFDTVLVYKLDRLSRSVRDTLYLVKDVFTKNKIDFISLNESIDTSSAMGSLFLTILSAINEFERENIKERMTMGKLGRAKSGKSMMWTKTAFGYYHNRKTGILEIVPLQATIVEQIFTDYLSGISLTKLRDKLNESGHIGKDIPWSYRTLRQTLDNPVYCGYIKFKGSLFEGMHKPIIPYETYLKVQKELEERQQQTYERNNNPRPFQAKYMLSSMARCGYCGAPLRIVLGHKRKDGSRTMKYHCANRFPRKTKGVTVYNDNKKCDSGTYDLSNLENTVIDDLIGLQENNDGLLKIINGNNQPTLDTSSFEKQISQIDKKIQKNSDLYLNDFITMDELKDRTDSLQAEKRLLKAKISENKFNDSIDVFERVKTQLGSIPINELSYDNKKKIVNNLVSKVVVTADNVDIIFKFQLA

SEQ ID NO: 2122 - protein, 469 aa, synthetic construct
MSYTTPVRAAVYLRISEDRSGEQLGVARQREDCLKLCDQRKWVPVEYLDNDVSASTGKRRPAYEQMLADIAAGKIAAVVAWDLDRLHRRPIELEAFMSLADEKRLALATVAGDVDLATPQGRLVARLKGSVAAHETEHKKARQRRAARQKAERGYPNWSKAFGYLPGPDGPEPDPRTALLVKQAYADILAGASLGDVCRQWNDAGAFTITGRPWTTTILSKFLRKPRNAGLRAYNGARYGPVDRDAIVGKAQWSPLVDEATFWAAQAVLDAPGRAPGRKSVRRHLLTGLAGCGKCGNHLAGSYRADGRVVYVCKACHGVAILADNIEPILYHIVAERLALPDAVDLLRREIHDAAEAETIRLELETLYGELDRLAVERAEGLLTARQVKISTDIVNAKITKLQARQLDQERLRVLDGIPLGTPRVEGMIAELSPDRFRAVLDVLAEVVVQPVGKGGRIFNPERVQVNWR

SEQ ID NO: 2123 - protein, 452 aa, synthetic construct
MKAAIYIRVSTQEQVGNYSIQAQTEKLTALCRSKDWDVYDIFVDGGYSGSNMNRPALNEMLSRLHEIDAVVVYRLDRLSRSQRDTTTLIEEYFLKNNVEFVSLSETLDTSSPFGRAMIGILSVFAQLERETIRDRMVMGKIKRIEAGLPLTTAKGRTFGYDVIDTKLYINEEEAKQLQLIYDIFEEEQSITSLQKRLKKLGFKVRTYNRYNNWLTNDLYCGYVSYKDKVHVKGIHEPIISEEQFYRVQEIFARMGKNPNMNRDSASLLSSLVVCSKCGLGFVHRSKDTMSRGKKYHYRYYSCKTYKHTHELEKCGNKIWRADKLEELIINRVNNYSFASRNVDKGDELNSLNERLKIEHAKKKRLFDLYINGSYEVSELDSMMNDIDAQINYYESQIEANKELKKNKKIQENLADLATVDFDSLGFREKQLYLKSLISKIYIDGEQVTIEWL

SEQ ID NO: 2124 - protein, 469 aa, synthetic construct
MCYTTPVRAAVYLRISEDRSGEQLGVARQREDCLKLCDQRKWVPVEYLDNDVSASTGKRRPAYEQMLADITAGKIAAVVAWDLDRLHRRPIELEAFMSLADEKRLALATVAGDVDLATPQGRLVARLKGSVAAHETEHKKARQRRAARQKAERGLPNWSEAFGYLPGPNGPEPDPRTAPLVKQAYADILAGASLGDVCRQWNGAGAFTITGRPWTTTTLSKFLRKPRNAGLRAYKGARYGPVDRDAIVGKAQWSPLVDEATFWAAQAVLDAPGRAPGRKSVRRHLLTGLAGCGKCGNHLAGSYRTDGRVVYVCKACHGVAILADNIEPILYHIVAERLAMPDAVDLLRREIHDVAEAETIRLELKTLYSELDCLAVERAEGLLTARQVKISTDIVNARITKLLARQLDQERLRVFDGIPLGTPQVAGKIAELSPDRFRAVLDVLAEVVVQPVGKGGRIFNPERVQVNWR

SEQ ID NO: 2125 - protein, 469 aa, synthetic construct
MSYITPVCAAVYLRISEDRSGEQLGVARQREDCLKLCDQRKWVPVEYLDNDVSASTGKRRPAYEQMLADITAGKIAAVVAWDLDRLHRRPIELEAFMSLADEKRLALATVAGDVDLATPQGRLVARLKGSVAAHETEHKKARQRRAARQKAERGHPNWSKAFGYLPGPNGPEPDPRTAPLVKQAYADILAGASLGDVCRQWNAAGAFTITGRPWATTTLSKFLRKPRNAGLRAYKGARYGPVDRDAIVGKAQWSPLVDEATFWAAQAVLDAPGRAPGRKSVRRHLLTGLAGCGKCGNHLAGSCRTDGRVVYVCKACHGVAILADNIEPILYHIVAERLATPDAVDLLRREIHDAAEAETIRLELETLYGELDRLAVERAEGQLTARQVKICTDIVNAKITKLQARQLDQERLRVFDGIPLGTPQVAGMIAELSPDRFRAVLDVLAEVVVQPVGKSGRIFNPERVQVNWR

SEQ ID NO: 2126 - protein, 485 aa, synthetic construct
MTKKVAIYTRVSTTNQAEEGFSIDEQIDRLTKYAEAMGWQVSDTYTDAGLSGAKLERPAMQRLINDIENKAFDTVLVYKLDRLSRSVRDTLYLVKDVFAKNKIDFISLNESIDTSSAMGSLFLTILSAINEFERENIKERMTMGKLGRAKSGKSMMWTKTAFGYYHNSKTGILEIVPLQATIVEQIFTDYLSGISLTKLRDKLNESGHIGKDIPWSYRTLRQTLDNPVYCGYIKFKGSLFEGMHEPIIPYETYLKVQKELEERQQQTYERNNNPRPFQAKYMLSGMARCGYCGAPLRIVLGHKRKDGSRTMRYHCANRFPRKTKGVTVYNDNKKCDSGTYDLSNLENTVIDNLIGFQENNDSLLKIISGNNQPIMDTSSFKEQISQIDKKIQKNNDLYLNDFITMDELKDRTDSLQAEKKLLEAKISENKFNDSTDVFELVKTQLGSIPINELSYDNKKKIVNNLVSKVDVTADDVDIIFKFQLA

SEQ ID NO: 2127 - protein, 452 aa, synthetic construct
MKAAIYIRVSTREQVENYSIQAQTEKLTALCRSRDWDVYDIFVDGGYSGSNMNRPALNEMLSKLHEIDAVVVYRLDRLSRSQRDTITLIEEYFLKNNVEFVSLSETLDTSSPFGRAMIGILSVFAQLERETIRDRMVMGKIKRIEAGLPLTTAKGRTYGYDVIDTKLYINEEEAKQLRLIYDIFEEERSITFLQKRLKKLGFKVRTYNRYSNWLTNDLYCGYVSYKDKVHVKGIHEPIISEEQFYRVQEIFARMGKSPNMNRDSASLLNNLVVCGKCGLGFVHRRKDAMSRDKKYHYRYYSCKTYKHIHELEKCGNKIWRADKLEELIINRVNSYSLASRNVDKEDELDSLNEKLKTEHAKKKRLFDLYINGNYEVSELDSMMNDIDAQINYYESQIEANEELKKNKKIQENLAYLATVDFDSLEFREKQLYLKSLINKIYIDGEQVTIEWL

SEQ ID NO: 2128 - protein, 452 aa, synthetic construct
MKAAIYIRVSTQEQVGNYSIQAQTEKLTALCRSKDWDVYDIFIDGGYSGSNMNRPALNEMLSKLHEIDAVVVYRLDRLSRSQRDTTTLIEEYFLKNNVEFVSLSETLDTSSPFGRAMIGILSVFAQLERETIRDRMVMGKIKRIEAGLPLTTAKGRTFGYDVIDTKLYINEEEAKQLQLIYDIFEEEQSITSLQKRLKKLGFKVRTYNRYNNWLTNDLYCGYVSYKDKVHVRGIHEPIISEEQFYRVQEIFTRMGKNPNMNRDSASLLSNLVVCSKCGLGFVHRSKDTMSRGKKYHYRYYSCKTYKHTHELEKCGNKIWRADKLEELIIYRVNNYSFASRNVDKEDELDSLNEKLKIEHAKKKRLFDLYINGSYEVSELDSMMNNIDAQINYYESQIEANEGLKKNKKIQENLADLATVDFDSLEFREKQLYLKSLINKIYIDGEQVTIEWL

SEQ ID NO: 2129 - protein, 452 aa, synthetic construct
MKAAIYIRVSTREQVENYSIQAQTEKLTALCRSKDWDVYDIFIDGGYSGSNMNRPALNEMLSKLHEIDAVVVYRLDRLSRSQRDTITLIEEYFLKNNVEFVSLSETLDTSSPFGRAMIGILSVFAQLERETIRDRMVMGKIKRIEAGLPLTTAKGRTFGYDVIDTKLYINEEEAKQLRLIYDIFEEERSITFLQKRLKKLGFKVRTYNCYNNWLTNDLYCGYVSYKDRVHVKGIHEPIISEEQFYRVQEIFTRMAKNPNMNRDSASLLNNLVVCSKCGLGFVHRRKDAMSRDKKYHYRYYSCKTYKHIHELEKCGNKIWRADELEELIINRVNNYSLASRNVDKEDGLDSLNEKLKIEHAKKKRLLDLYINGSYEVSELGSMMNDINAQIDYYESQIEANEELKKNKKIQENLADLAAVDFDSLEFRGKQLYLKSLINKIYIDGEQVTIEWL

SEQ ID NO: 2130 - protein, 485 aa, synthetic construct
MTKKVAIYTRVSTTNQAEEGFSIDEQIDRLTKYAEAMGWQVSDTYTDAGFSGAKLERPAMQRLINDIENKAFDTVLVYKLDRLSRSVRDTLYLVKDVFTKNKIDFISLNESINTSSAMGSLFLTILSAINEFERENIKERMTMGKLGRAKSGKSMMWTKTAFGYYHNRKTGILEIVPLQATIVEQIFTDYLSGISLTKLRDKLNESGHIGKDIPWSYRTLRQTLDNPVYCGYIKFKGSLFEGMHKPIIPYETYLKVQKELEERQQQAYERNNNPRPFQAKYMLSGMARCGYCGAPLKIVLGHKRKDGSRTMKYHCTNRFPRKTKGVTVYNDNKKCDSGTYDLSDLENTVIDNLIGFQENNDSLLKIINGDNQPVLDTSSFKKQISQIDKKIQKNSDLYLNDFITMDELKDRTDSLQAEKRLLKAKISENKFCDNTDVFELVKTQLGSIPIDELSYDNKKKIVNNLVSKVDVTADNVDIIFKFQLA

SEQ ID NO: 2131 - protein, 485 aa, synthetic construct
MTKKVAIYTRVSTTNQAEEGFSIDEQIDRLTKYAEAMGWQVSDTYTDAGSSGAKLERPAMQRLINDIENKAFDTVLVYKLDRLSRSVRDTLYLVKDVFTKNKIDFISLNESIDTSSAMGSLFLTILSAINEFERENIKERMTMGKLGRAKSGKSMMWAKTAFGYCHNRKTGILEVVPLQATIVEQIFTDYLSGISLTKLRDKLNESGHIGKDIPWSYRTLRQTLDNPVYCGYIKFKDSLFEGMHKPIIPYETYLKVQKELKERQQRTYERNNNPRPFQAKYMLSGTARCGYCGAPLRIVLGHKRKDGSRTMKYHCANRFPRKTKGVTVYNDNKKCDSGTYDLSNLENTVIDSLLGFQENNDSLLKIINGDNQPILDTSSLKKQIGQIDKKIQKNSDLYLNDFITMDELKDRTDSLQAEKRLLEAKISENKFNDSTGVFELVKTQLGSIPINELSYDNKKKIVNSLVSKVDVTADNVDIIFKFQPA

SEQ ID NO: 2132 - protein, 469 aa, synthetic construct
MSYTTPVRAAVYLRISEDRSGEQLGVARQREDCLKLCGQRKWVPVEYLDNDVSASTGKRRPAYEQMLADITAGKIAAVVAWDLDRLHRRPIELEAFMSLADEKRLALATVAGDVDLATPQGRLVARLKGSVAAHETEHKRARQRRAARQKAERGHPNWSKAFGYLPGPNGPEPDPRTAPLVKQAYADILAGASLGDVCRRWNDAGAFTITGRPWTTTTLSKFLRKPRNAGLRTYKGARYGPVDRDAIVGKAQWGPLVDEATFWAAQAVLDAPGRAPGRKSVRRHLLTGLAGCGKCGNHLAGSYRTDGRVVYVCKACHGVAILADNIEPILYRIVAERLAMPDAVDLLRREIHDAAEAETIRLELETLYGELDRLAVERAEGLLTARQVKISTDIVNAKITKLQACQLDQERLRVFDGIPLGTPQVAGKIAELSPDRFRAVLDVLAEVVVQPVGKSGRIFNPERVQVNWR

SEQ ID NO: 2133 - protein, 485 aa, synthetic construct
MTKKVAIYTRVSTTNQAEEGFSIDEQIDRLTKYAEAMGWQVSDTYTDAGFSGAKLERPAMQRLINDIENKAFDTVLVYKLDRLSRSVRDTLYLVKDVFTKNKIDFISLNESIDTSSAMGSLFLTILSAINEFERENIKERMTMGKLGRAKSGKSMMWTKTAFGYHHNRKTGILEIVPLQAAIVEQIFTDYLSGISLTKLRDKLNESGHIGKDIPWSYRTLRQTLDNPVYCGYIKFKDSLFEGMHKPIIPYETYLKVQKELEERQQQTYERNNNPRPFQAKYMLSGMARCGYCGAPLRIVLGHKRKDGSRTMKYHCANRFPRKTRGVTVYNDNKKCDSGTYDLSNLENTVVDYLIGFQENNDSLLKIINGNNQPILDTSSLKKQISQIDKKIQKNSDLYLNDLITMDELRDRTDSLQAEKKLLKAKISENKFNDSTDVFELVKTQLGSIPINELSYDNKKKIVNNLVSKVDVTADNVDIIFKFQLA

SEQ ID NO: 2134 - protein, 485 aa, synthetic construct
MTKKVAIYTRVSTTNQAEEGFSIDEQIDRLTKYAEAMGWQVSDTYTDAGLSGAKLERPAMQRLINDIENKAFDTVLVYKLDRLSRSVRDTLYLVKDVFTKNKIDFISLSESIDTSSAMGSLFLTILSAINEFERENIKERMTMGKLGRAKSGKSMMWTKTAFGYYHNRKTGILEIVPLQATIVEQIFTDYLSGISLTKLRDKLNESGHIGKDIPWSYRTLRQTLDNPVYCGYIKFKDSLFEGMHKPIIPYETYLRVQKELEERQQQTYERNNNPRPFQAKYMLSGMARCGYCGAPLRIVLGHKRKDGSRTMKYHCTNRFPRKTKGATVYNDNKKCDSGTYDLSNLENTVIDNLIGFQENNDSLLKIINGDNQPILDTSSFEKQISQIDKKIQKNSDLYLNDLITMDELRDRTDSLQAEKKLLKAKISENKFNNSTDVFELVKAQLGSIPINELSYDNKKKIVNNLVSKVDVTADNVDIIFKFQLA

SEQ ID NO: 2135 - protein, 485 aa, synthetic construct
MTKKVAIYTRVSTTNQAEEGFSIDEQIDRLTKYAEAMGWQVSGTYTDAGFSGAKLERPAMQRLINDIENKAFDTVLVYKLDRLSRSVRDTLYLVKDVFTKNKIDFISLNESINTSSAMGSLFLTILSAINEFERENIKERMTMGKLGRAKSGKSMMWTKTAFGYYHNRKTGILEIVPLQATIVEQIFTDYLSGISLTKLRDRLNESGHIGKDIPWSYRTLRQTLDNPVYCGYIRFKDSLFEGMHKPIIPYETYLKVQKELEERQRQTYERNNNPRPFQAKYMLSGMARCGYCGAPLKIVLGHKRKDGSRTMKYHCANRFPRKAKGVTVYNDNKKCDSGTYDLSNLENTVIDNLIGFQENNDSLLKIINGNNQPILDTSSSIKQISQIDKRIQKNSDLYLNGFITMDELKDRTDSLRAEKKLLRAKISENKLNDSTDVFELVKTQLGSIPINELSYDDKKKIVNNLVSKVDVTADNVDIIFKFQLA

SEQ ID NO: 2136 - protein, 469 aa, synthetic construct
MSYTTPVRAAVYLRISEDRSGEQLGVARQREDCLKLCDQRKWVPVEYLDNDVSASTGKRRPAYEQMLADITAGKIAAVVAWDLDRLHRRPIELEAFMSLADEQRLALATVAGDVDLATPQGRLVARLKGSVAAHETEHKRARQRRAARQKAERGHPNWSKAFGYLPGPNGPEPDPRTAPLVKQAYADILAGASLGDVCRQWNDAGAFTITGRPWATTTLSKFLRKPRNAGLRAYKGARYGPVDRDAIVGKAQWSPLVDEATFWAAQAVLDAPGRAPGRKSVRRHLLTGLAGCGKCGNHLAGSYRTDGRVVYVCKACHGVAVLADNIEPILYRIVAERLAMPDAVGLLRREIHDAAEAETIRLGLEALYGELDRLAVERAEGLLTARQVKISTDIVNAKITKLQACQLDQERLRVFDGIPLGTPQVAGVIAGLSPNRFRAVLDVLAEVVVQPVGKSGRIFNPERVQVNWR

SEQ ID NO: 2137 - protein, 452 aa, synthetic construct
MKAAIYIRVSTREQVENYSIQAQTEKLTALCRSKDWDVYDIFIDGGYSGSNMNRPALNEMLSKLHEIDAVVVYRLDRLSRSQRDTITLIEEYFLKNNVEFVSLSETLDTSSPFGRAMIGILSVFAQLERETIRDRMVMGKIKRIEAGLPLTTAKGRTFGYDVIDTKLYINEEEAKQLQLIYDIFEEERSITFLQKRLKELGFKVRTYNCYNSWLTNDLYCGYVSYKDKVHVKGIHEPIISEEQFYRVQEIFARMSKNPNMNRDSASLLSNLVVCSKCGLGFVHRRKDTTSRGKKYHYRYYSCKTYKHTNELEKCGNKIWRADKLEELIINRVNNYSFASRNVDKEDELDSLNEKLRIEHAKKKRLFDLYINGSYEVSELDSMMNDIDAQISYYESQIEANEEQKKNKKIQENLANLATVDYDSLEFREKQLYLKSLINKIYIDGEQVTIEWL

SEQ ID NO: 2138 - protein, 486 aa, synthetic construct
MTKKVAIYTRVSTTNQAEEGFSIGEQIDRLTKYAEAMGWQVSDTYTDAGLSGAKLERPAMQRLINDIENKTFDTVLVYKLDRLSRSVRDTLYLVKDVFTKNKIDFISLNESIDTSSAMGSLFLTILSAINEFERENIKERMTMGKLGRAKSGKSMMWTKTAFGYYHNRKTGILEIVPLQAAIVEQIFTDYLSGISLTKLRDKLNESGHIGKDIPWSYRTLRQTLDNPVYCGYIKFKDSLFEGMHKPIIPYETYLKVQKELEKRQQQTYERNNNPRPFQAKYMLSGMARCGYCGAPLRIVLGHKRKDGSRTMKYHCANRFPRKTKGVTVYNDNKKCDSGTYDLSNLENTVIDSLIGFQENNDSLLKIINGNNQPILDTSNLKKQISQIDKKIQKNSDLYLNDFITMDELKDRTGSLQAEKKLLKAKISENKFNDSTDVFELVKTQLGSIPISELSYDNKKKIVNNLVSKVDVTADNVDIIFKFQLAQ

SEQ ID NO: 2139 - protein, 469 aa, synthetic construct
MSYTTPVRAAVYLRISEDRSGEQLGVARQREDCLKLCDQRRWVPVEYLDNDVSASTGKRRPAYEQMLADIAAGKIAAVVAWDLDRLHRRPIELEAFMSLADEKRLALATVAGDVDLATPQGRLVARLKGSVAAHETEHKKARQRRAARQKAERGLPNWSKAFGYLSGPNGPEPDPRTAPLVKQAYADILAGASLGDVCRQWNDAGAFTITGRPWSTTALSKFLRKPRNAGLRAYKGARYGPVDRDAIVGKAQWSPLVDEATFWAAQAVLDAPGRAPGRKSVRRHLLTGLAGCGKCGNYLAGSYRTDGRVVYVCKACHGVAILADNIEPILYHIVAERLAMPDAADLLRREIHDAAEAETIRLELETLYGELDRLAVERAEGLLTARQVKISTDIVNAKITKLQARQLDQERLRVLDGIPLGTPQVAGMIAELSPDRFRAVLDALAEVVVQPVGKSGRIFNPERVQVNWR

SEQ ID NO: 2140 - protein, 484 aa, synthetic construct
MTKKVAIYTRVSTTNQAEEGFSIDEQTDRLTKYAEAMGWQVSDTYTDAGFSGAKLERPAMQRLINDIENKAFDTVLVYRLDRLSRSVRDTLYLVKDVFTKNKVDFISLNECIDTSSAMGSLFLTILSAINEFERENIKERMTMGKLGRAKSGKSMMWTKTAFGYYHNRKTGILEIVPLQAAIVEQIFTDYLSGISLTKLRDKLNESGHIGKDIPWSYRTLRTLNNPVYCGYIKFKDSLFEGMHKPIIPYETYLKVQKELEERQQQTYERNNNPRPFQAKYMLSGMARCGYCGAPLRVVLGHKRKDGSRTMKYHCANRFPRKTKGVTVYNDNKKCDSGTYDLRNLENTVIDNLIGFQENNDSLLRIINGNNQPILDTSSFKKQISQIDKKIQKNSDLYLNDFITMDELKDRTDSLQAEKKLLKAKIRENKFNDSTDVFELVKAQLGSIPINELSYDNKKKIVNNLVSKVDVTADNVDIIFKFQLA

SEQ ID NO: 2141 - protein, 485 aa, synthetic construct
MTKKVAIYTRVSTTNQAEEGFSIDEQIDRLTKYAEVMGWQVSDTYTDAGFSGAKLERPAMRRLINDIENKAFDTVLVYKLDRLSRSVRDTLYLVKDVFTKNKIDFISLNESIDTSSAMGSLFLTILSAINEFERENIKERMTMGKLGRAKSGKSMMWTKTAFGYHHNRKTGILEIVPLQATIVEQIFTDYLSGISLTKLRDKLNESGHIGKDIPWSYRTLRQTLDNPVYCGYIKFKDSLFEGMHKPIIPYETYLKVQKELEERQQRTYERNNNPRPFQAKYMLSGMARCGYCGAPLRIVLGHKRKDGSRTMKYHCTNRYPRKTRGITVYNDNKKCDSGTYDLSNLENTVIDNLIGFQENNDSLLEIINGNNQSILDTSSFKKRISQIDKKIQKNSDLYLNDFITMDELKDRTDSLQAEKRLLKAKISENKFNDSTDVFELVKTQLGSIPINELSYDNKKKIVNNLVSKVDVTADNVDIIFKFQLA

SEQ ID NO: 2142 - protein, 452 aa, synthetic construct
MKAAIYIRVSTREQVENYSIQAQTEKLTALCRSKDWDVYDIFIDGGYSGSNMNRPALNEMLSKLHEIDAVVVYRLDRLSRSQRDTVTLIEEYFLKNNVEFVSLSETLDTSSPFGRAMIGILSVFAQLERETIRDRMVMGKIKRIEAGLPLTTAKGRTFGYDVIGTKLYINEEEAKQLQLIYDIFEEEQSITFLQKRLKKLGFKVRTYNRYYDWLTNDLYCGYVSYKDKVHVKGVHEPIISEEQFYRVQEIFTRMGKNPNMNRDSASLLNNMVVCSKCGLGFVHRRKDTTSRGKKYHYRYYSCKTYKHTHELEKCGNKIWRADKLEELIIERVNNYSLASRNADKDDELYGLNEKLKIEHAKKKRLFDLYINGSYEVSELDSMMYDIDAQINYYERQIEANEELKKNKKIQENLANLATVDYDSLEFREKQLYLKSLINKIYIDGEQVTIEWL

SEQ ID NO: 2143 - protein, 452 aa, synthetic construct
MKAAIYIRVSTQEQVENYSIQAQTEKLTALCRSKDWDVYDIFIDGGFSGSNMNRPALIEMLSKLHEIDAVVVYRLDRLSRSQRDTIILIEEYFLKNNVEFVSLSETLDTSSPFGRAMIGILSVFAQLERETIRDRMVMGKIKRIEAGLPLTTAKGRTFGYDVIDTKLYINEEEAKQLQLIYDIFEEERSITFLQKRLKKLGFKVHTYSRYNNWLTNDLYCGYVSYKDKVHVKGIHEPIISEKQFYRVQEIFTRMGKNPNMNRDSASLLSNLVVCSKCGLGFVHRRKDTMIRGKKYHYRYYSCKTYKHIHELEKCGNKIWRADKLEELIINRVNNYSFASRNVDKEDELGSLNEKLKTEHAKKKRLFDLYINGNYEVSELDSMMNDIDAQINYYESQIVATEELKKNKKIQENLADLATVDFDSLEFREKQLYLKSLINKIYIDGEQVTIEWL

SEQ ID NO: 2144 - protein, 452 aa, synthetic construct
MKAAIYIRVSTREQVENYSIQAQTEKLTALCRSKDWDVYDIFIDGGYSGSNMNRPALNEMLSKLHEIDAVVVYRLDRLSRSQRDTITLIEGYFLKNNVEFVSLSETLDTSSPFGRAMIGILSVFAQLERETIRDRMVMGKIKRIEAGLPLTTAKGRTFGYDVIDTKLYINEEEARQLRLIYDIFEEEQSITFLQKRLKKLGFKVHTYSRYNNWLTNDLYCGYVSYKDRVHAKGIHEPIISEEQFYRVQEIFTRMGKSPNMNRDSASLLSSLVVCSKCGLGFVHRRKDAASRDKKYHYRYYSCKTYKHIHELEKCGNKIWRADKLEELIINRVNNYSLASRNVDKEDELDSLNEKLKIEHAKKKRLFDLYLNGSYEVSELDGMMNDIDAQISYYESQIEANEALIKNKKIQENLANLATVDFDSLEFREKQLYLKSLINKIYIDGEQVTIEWL

SEQ ID NO: 2145 - protein, 452 aa, synthetic construct
MKAAIYIRVSTREQVENYSIQAQTEKLTALCRSKDWDVYDIFIDGGYSGSNMNRPALNEMLSKLHEIDAVVVYRLDRLSRSQRDTITLIEEYFLKNNVEFVSLSETLDTSSPFGRAMIGILSVFAQLERETIRDRMVMGKIKRIEAGLPLTTAKGRTFGYDVIDTKLYINEEEAKQLQLIYDIFEEERSITSLQKRLKKLGFKVRTYNCYNNWLTNDLYCGYVSYKDKVHVKGIHEPIISEEQFYRVQEIFTRMGKNPNMNRDSASLLNNLVVCSKCGLSFVHRRKDAMGRDKKYHYRYYSCKTYKHIHELEKCGNKIWRADKLEELVISRVNNYSFASRNADKEDELDSLNEKLRVEHAKKKRLFDLYISGRYEVSELDSMMNDIDAQINYYESRIEANEELKKNKQIQENLANLATVDYDSLEFREKQLYLKSLINKIYIDGEQVTIEWL

SEQ ID NO: 2146 - protein, 469 aa, synthetic construct
MSYTTPVRAAVYLRISEDRSGEQLGVARQREDCLKLCDQRKWVPVEYLDNDVSASTGKRRPAYEQMLADITAGKIAAVVAWDLDRLHRRPIELEAFMSLADEKRLALATVAGDVDLATPQGRLVARLKGSVAAHETEHKKARQRRAARQKAERGYPNWSKAFGYLPGPNGPEPDPRTAPLVKQAYADILAGASLGDVCRQWNGAGALTITGRLWTTTTLSKFLRKPRNAGLRAYKGARYGPADRDAIVGKAQWSPLVDEATFWAAQAVLDAPGRAPGRKSVRRHLLTGLAGCGKCGNHLAGSHRTDGRVVYVCKACHGVAILADNIEPILYHIVAERLAMPDAVDLLRRETHDVAEAETIRLELETLYGELDRLAVERAEGLLTARQVKISTDIVNAKIIELQARQLDQERLRVFDGIPLGTPQVAGMIEELSPNRFRAVLDVLAEVVVQPVGKRGRIFSRERVQVNWR

SEQ ID NO: 2147 - protein, 485 aa, synthetic construct
MTKKVAIYTRVSTTNQAEEGFSIDEQIDRLTRYAEAMGWQVSDTYTDAGFSGAKLERPAMQRLINDIENKAFDTVLVYKLDRLSRSVRDTLHLVKDVFTKNKIDFISLNESIDTSSAMGSLFLTILSAINEFERENIKERMTMGKLGRARSGKSMMWTKTAFGYYHNRKTGILEIVPLQATIVEQIFTDYLSGISLTKLRDKLNESGHIGKDIPWSYRTLRQTLDNPVYCGYIKFKGSLFEGMHKPIIPYETYLKVQKELEERQQQTYERNNNPRPFQAKYMLSGMARCGYCGAPLRIVLGHKRKDGSRTMKYHCANRFPRKTKGITVYNDNEKCDSGTYDLNYLENTVIDNLIGFQEDNDSLLKIINGNNQPILDTSSFKKQISQIDKKIQKNSDLYLNDFITMDELKDRTDSLQAEKELLKAKISENKFNDSTDVVELVKTQLGSIPINELAYDDKKKIVNNLVSKVDVTADNVDIIFKFQLA

SEQ ID NO: 2148 - protein, 452 aa, synthetic construct
MKAAIYIRVSTREQVENYSIQAQTEKLTALCRSKDWDVYDIFIDGGYSGSNMNRPALNEMLSKLHEIDAVVVYRLDRLSRSQRDTITLIEEYFLKNNVEFVSLSETLDTSSPFGRAMIGILSVFAQLERETIRDRMVMGKIKRIEAGLPLTTAKGRTFGYDVIDTKLYINEEEAKQLRLIYDIFEEEQSITLLQKRLKKLGFKVRTYNRYSNWLTNDLYCGYVSYKDKVHVKGIHEPIISEEQFYRVQEIFARMGKNPNMNRDSASLLNSLVVCSKCGLGFVHRRKDTMSRDKKYHYRYYSCKTYKHIHELEKCGNKIWRADKLEELIINRVSNYSFASRNVDKENELDSLNEKLRIEHAKKKRLFDLYINGSYEVSELDSMMNDIDAQINYYESQIEANEELKRNKKVQENLAYLATVDFDSLEFREKQLYLKSLINKIYIDGEQVTIEWL

SEQ ID NO: 2149 - protein, 485 aa, synthetic construct
MTKKVAIYTRVSTTNQAEEGFSIDEQVDRLTKYAEAMGWQVSDTYTDAGLSGAKLERPAMQRLINDIENRAFDTVLVYKLDRLSRSVRDTLYLVKEVFTKNKIDFISLNESIDTSSAMGSLFLTILSAINEFERENIKERMTMGKLGRAKSGKSMMWTKTAFGYYHNRKTGILEIVPLQATIVEQIFADYLSGISLTKLRDKLNESGHIGKDIPWSYRTLRQTLVNPVYCGYIKFKDSLFEGMHKPIIPYETYLKVQKELEERQQQTYERNNNPRPFQAKYMLSGMARCGYCGAPLRIVLGHKRRDGSRTMKYHCANRFPRKTKGVTVYNDNKKCDSGTYDLSDLENTVIDNLIGFQENNDSLLKIINGNNQPILDTSSFENQISQIDKKIQKNSDLYLNDFITLDELKDRTDSLQAEKKLLKAKISENKFNDSTDVFELVKTQLGSIPINELSYDNKKKIVNNLVSRVDVTADNVDIIFKFRLA

SEQ ID NO: 2150 - protein, 469 aa, synthetic construct
MSYTTPVRAAVYLRISEDRSGEQLGVARQREDCLKLCGQRKWVPVEYLDNDVSASTGKRRPAYEQMLADIVAGKIAAVVAWDLDRLHRRPVELEAFMSLADEKRLALATVAGDVDLATPQGRLVARLKGSVAAHETEHKKARQRRAARQKAERGHPNWSKAFGYLPGPNGPEPDPRTAPLVKQAYADILAGASLGDVCRQWNDAGAFTITGRPWTATTLSKFLRKPRNAGLRAYKGARYGPVDRDAIVGKAQWSPLVDEATFWAAQAVLDAPGRAPGRKSVRRHLLTGLAGCGKCGNRLAGSYRTDGRVVYVCKACHGVAILADNIEPILYHVVAERLAMPDAVDLLRREIHDAAEAETIRLGLDTLYGELDRLAVERAEGLLTARQVKISTDIVNAKITKLQARQLDQERLRVLDGIPLGTPQVAGVIAKLSPDRFRAVLDVLAEVVVQPVGKSGRIFNPERVQVNWR

SEQ ID NO: 2151 - protein, 485 aa, synthetic construct
MTEKVAIYTRVSTTNQAEEGFSIDEQIDRLTKYAEAMGWQVSDTYTDAGFSGAKLERPAMQRLINDIENKAFDTVLVYKLDRLSRSVRDTLYLVKDVFTKHKIDFISLNESIDTSSAMGSLFLTILSAINEFERENIKERMTMGKLGRAKSGKSMMWTKTAFGYYHNRKTGILEIVPLQATIVEQIFTDYLSGISLTKLRDKLNESGHIGKDIPWSYRTLRQTLDNPVYCGYIKFKGSLFEGMHKPIIPYETYLKVQKELEERQQQTYERNNNPRPFQAKYMLSGIARCGYCGAPLRIVLGHKRKDGSRTMKYHCANRFPRKTKGVTVYNDNKKCDSGTYDLSNLENTVIDNLIGFQENNNSLLKIINGNNRPILDTSSFKKQISQIDKKIQKNTDLYLNDFITMDELKDRTDSLQAEKKLLEAKISENKFNDSTDVFELVKTQLGNIPINELSYDNKKKIVNDLVSKVDVTADSVDIIFKFQLA

SEQ ID NO: 2152 - protein, 485 aa, synthetic construct
MTKKVAIYTRVSTTNQAEGGFSIDEQTDRLTKYAEAMGWQVSDTYTDAGFSGAKLERPAMQRLINDIENKAFDTVLVYKLDRLSRSVRDTLYLVEDVFTKNKIDFISLNESIDTSSAMGSLFLTILSAINEFERENIKERMTMGKLGRAKSGKSMMWTKTSFGYYHNRKTGILEIEPLQATIVEQIFTDYLSGISLTKLRDKLNESGHIGKDIPWSYRTLRQTLGNPVYCGYIKFKDSLYEGMHKPIIPYETYLKVQKELEERQQQTYERNNNPRPFQAKYMLSGMARCGYCGAPLRIVLGHKRKDGSRTMKYHCTNRFPRKTKGVTVYNDNKKCDSGTYDLSNLENTVIDNLIDLQENNDNLLKIINGNNKPILDTSSFKRQISQIDKKIQKNSDLYLNDFITMDELKDRTESLQAEKQLLKAKISENKFIDGTDVFEQVKTQLGSIPINELSYDDKKKIVNNLVSKVDVTADNVDIIFKFQLA

SEQ ID NO: 2153 - protein, 485 aa, synthetic construct
MTKKVAIYTRVSTTNQAEEGFSIGEQIERLTKYAEAMGWQVSDTYTDAGLSGAKLERPAMQRLINDIENKAFDTVLVYKLDRLSRSVRDTLYLVKDVFTKNKIDFISLSESIDTSSAMGSLFLTILSAINEFERENIKERMTMGKLGRAKSGKSMMWTKTAFGYYHNRKTGILEIVPLQATVVEQIFTDYLSGISLTKLRDKLNESGHIGKDIPWSYRTLRQTLDNPVYCGYIKFKDSLFEGMHKPIIPYETYLKVQRELEERQRQTYERNNNPRPFQAKYMLSGVARCGYCGAPLRIVLGHKRKDGSRTMKYHCANRFPRKTKGVTVYNDNKKCDSGTYDLSSLENTVIDNLIGFQENNDSLPKIINGNNLPILDTSSFEKQISQIDKKIQKNSDLYLNDFITMDELKGRTDSLQAEKKLLKAKISENKFNDNADVFEQVKTQLGSIPINELSYENKKKIVNNLVSKVDVTADNVDIIFKFQLA

SEQ ID NO: 2154 - protein, 485 aa, synthetic construct
MTKKVAIYTRVSTTNQAEEGFSIDEQIGRLTKYAEAMGWQVSDTYTDAGFSGAKLERPAMQRLVNDIENKAFDTVLVYKLDRLSRSVRDTLYLVKDVFTKNKIDFISLNESIDTSSAMGSLFLTILSAINEFERENIKERMTMGKLGRAKSGKSMMWTKTAFGYYHNRKTGILEIVPPQATIVEQIFTDYLSGISLTKLRDKLNESGHIGKDIPWSYRTLRQTLDNPVYCGYIEFKGSLFEGMHKPIIPYETYLKVQKELEERQQQTYERNNNPRPFQAKYMLSGMARCGYCGAPLRIVLGHKRKDGSRTMKYHCANRFPRKTKGVTVYNDNKKCDSGTYDLSDLENTVIENLIGFQENNDSLLKIINGNNPPILDTSSFKRQISQIDKKIQKNSDLYLNDFITMDELKDRTDSLQAEKKRLKAKISENKFNDSTGVFELVKTQLGSIPINELSYDNKKKIVNNLVSKVDVTADNVDIIFKFQLA

SEQ ID NO: 2155 - protein, 485 aa, synthetic construct
MTKKVAIYTRVSTTNQAEEGFSIDEQIDRLTKYAEAMGWQVSDTYTDAGLSGAKLERPAMQRLINDIENKAFDTVLVYKLDRLSRSVRDTLYLVKDVFTKNKIDFISLSECIDTSSAMGSLFLTILSAINEFERENIKERMTMGKLGRAKSGKSMMWTKAAFGYYHNRKTGILEIVPLQATIVEQIFTDYLSGTSLTKLRDKLNESGHIGKDIPWSYRTLRQTLDNPVYCGYIKFKGSLFEGMHKPIIPYETYLKVQKELEERQQQTYERNNNPRPFQAKYMLSGMARCGYCGAPLRIVLGHKRKDGSRTMKYHCANRFPRKTKGITVYNDNKKCDSGTYDLSNLENTVIDNLIGFQENSDSLLKIINGNNQPILDTSSFKEQISQIGKKIQKNSDLYLNDFITMDELKVRTDSLQAEKKLLKAKISENKFNDSTDVFELVKAQLGSIPINELSYDDKKKIVNNLVSKVDVTADNVDIIFKFQLA

SEQ ID NO: 2156 - protein, 452 aa, synthetic construct
MKAAIYIRVSTREQVENYSIQAQTEKLTALCRSKDWDVYDIFIDGGYSGSNLNRPALNEMLSKLHEIDAVVVYRLDRLSRSQRDTITLIEEYFLKNNVEFVSLSETLDTSSPFGRAMIGILSVFAQLERETIRDRMVMGKIKRIEAGLPLTTAKGRTFGYDVIDTKLYINEEEAKQLRLIYDIFEEEQSITFLQKRLKELGFRVRTYSCYNNWLTNDLYCGYVSYKDKVHVKGIHEPIISEEQFYRVQAIFTRMGKNPNMNRDSASLLNNLVVCSKCGQGFVHRRKDTTSRRKKYHYRYYSCKTYKHAHELEKCGNKIWRADKLEELIINRVNNYSFASRNVDKEDELDSLNEKLKIEHAKKKRLFDLYINGSYEVSELDCMMNDIDAQINYYESRIEANEELKKDKKIQESLANLATVDYDSLEFREKQLYLKSLINKIYVDGEQVTIEWL

SEQ ID NO: 2157 - protein, 485 aa, synthetic construct
MTKKVAIYTRVSTTNQVEEGFSIDEQIDRLTKYAEAMGWQVSDTYTDAGFSGAKLERPAMQRLINDIENKAFDTVLVYKLDRLSRSVRDTLYLVKDVFTKNKIDFISLNESIDTSSAMGSLFLTILSAINEFERENIKERMTMGKLGRARSGKSMMWTKTAFGYYHNRKTGILEIVPLQATIVEQIFTDYLSGISLTKLRDKLNESGHIGKDIPWSYRTLRQTLDNPVYCGYIKFKDSLFEGMHKPIIPYETYLKVQKELEERQQQTYERNNNPRPFQAKYMLSGMARCGYCGAPLRIVLGHKRKDGSRTMKYHCANRFPRKTEGVTVYNDNKKCDSGTYDLSNLENTVIDNLIGFQEDNDSLLKIINGNNQPILDTSSFKKQISLIDKKIQKNSDLYLNDFITMDELKDRTDSLQAEKKLLKAKISENKFNDSTDVFELVKTQLGSIPINELSYDNKKKIVNNLVSKVDVTADNVDIIFKFQLA

SEQ ID NO: 2158 - protein, 484 aa, synthetic construct
MAKKVAIYTRVSTANQAEEGFSIDEQIDRLTKYAEAMGWVSDTYTDAGFSGAKLERPAMQRLINDIENKAFDTVLVYKLDRLSRSARDTLYLVKDVFTKNKIDFISLSESIDTSSAMGSLFLTILSAINEFERENIKERMTMGKLGRAKSGKSMMWTKTAFGYYHNRKTGILEIVPLQATIVEQIFTDYLSGISLTKLRDKLNESGHIGKDIPWSYRTLRQILDNPVYCGYIKFKGSLFEGMHKPIIPYETYLKVQKELEERQQQTYERNNNPRPFQAKYMLSGVARCGYCGAPLKIVLGHKRKDGSRTMKYHCANRFPRKTKGVTVYNDNKKCDSGTYDLSSLENTVIDNLIGFQENDDSLLKIINGNNQPILDTSSFKKQISQIDEKIQKNSDLYLNDFITMDELKARTDSLQAEKKLLKAKISENKFNDSTDVFELVKTQLGSIPINGLSYDNKKKIVNNLVSKVDVTADNVDIIFKFQLA

SEQ ID NO: 2159 - protein, 452 aa, synthetic construct
MKAAIYIRVSTREQVENYSIQAQTDKLTALCRSKDWDVYDIFIDGGYSGSNMNRPALNEMLSKLHEIDAVVVYRLDRLSRSQRDTITLIEEYFLKNNVEFVSLSETLDTSSPFGRAMIGILSVFAQLERETIRDRMVMGKIKRIEAGLPLTTAKGRTFGYDVIDTKLYINKEEAKQLQLIYDIFEEEQSITFLQKRLKKLGLKVHTYNRYNNWLTNDLYCGYVSYKDKVHVKGIHEPIISEEQFYRVQEIFTRKGKNPNVNRDSASLLNNLVVCSKCGLGFVHRRKDAMSRDKKYHYRYYSCKTYKHIHELEKCGNKIWRADKLEELIIDRVNNYSIASRNADKEDELGSLNEKLKIEHAKKKRLFELYINGSYEVSELDSMMSDIDAQINYYEGQIEANEELRKNKKIQENLANLATVDFDSLEFREKQLYLKSLINKIYIDGEQVTIEWL

SEQ ID NO: 2160 - protein, 469 aa, synthetic construct
MSYTTPVRAAVYLRISEDRSGEQLGVARQREDCLKLCGQRKWVPVEYLDNDVSASTGKRRPAYEQMLADIAAGKIAAVVAWDLDRLHRRPIELEAFMSLADEKRLALATVAGDVDLATPQGRLVARLKGSVAAHETEHKKTRQRRAARQKAERGHPNWSKAFGYLPGPNGPEPDPRTAPLVKQAYADILAGASLGDVCRRWNDAGAFTITGRPWTTTTLSKFLRKPRNAGLRAYKGARYGPVDRDAIVGKAQWSPLVDEATFWAAQAVLDAPGRAPGRKSVRRHLLTGLAGCGKCGNHLAGSYRTDGRVVYVCKACHGVAILADNIEPILYHIVAERLAMPDAVDLLRREIHDAAEAETIRLELETLYGELDCLAVERAEGLLTARQVKICTDIVNAKITKLRARQLDQERLRVFDGIPLGTPQVAGMIAELSPDRFRAVLDVLAEVVVQPVGKSGRIFNPKRVQVNWR

SEQ ID NO: 2161 - protein, 452 aa, synthetic construct
MKAAIYIRVSTREQVENYSIQAQTEKLTALCRSKDWDVYDIFIDGGYSGSNMNRPALNEMLSKLHEIDAVVVYRLDRLSRSQRDTITLIEEYFLKNNVEFVSLSETLDTSSPFGRAMIGILSVFAQLERETIRDRMVMGKIKRIEAGLPLTTAKGRTFGYDVIDSRLYINEEEAKQLQLIYDIFEEEQSITFLQKRLKKLGFKVHTYNRYNNWLTNDLYCGYVSYKDKVHVKGIHEPIISEEQFYRVQEIFTRMGKNPNMNRDSASLLNNLVVCSKCGLGFVHRRKDTMSRGKKYHYRYYSCKTYKHTHELEKCGNKIWRADKLEELIINRVNNYSFASRNVDKADELDSLNGKLKIEHAKKKRLFDLYINGSYEVSELDSMMSDIDAQISYYESQIEANEELKRNKKIQENLADLATVDYDSLEFREKQLYLKSLINKIYIDGEQVTIEWL

SEQ ID NO: 2162 - protein, 485 aa, synthetic construct
MTKKVAIYTRVSTTNQAEEGFSIDEQIDRLTKYAEALGWQVSDTYTDAGLSGAKLERPAMQRLINDIENKAFDTVLVYKLDRLSRSVRDTLYLVKDVFIKNKIDFISLNENIDTSSAMGSLFLTILSAINEFERENIKERMTMGKLGRAKSGKSMMWTKTAFGYYHNRETGILEIVPLQATIVEQIFTDYLCGISLTKLRDKLNESGHIGKDIPWSYRTLRQTLDNPVYCGYIKFKDSLFEGMHKPIIPYETYLKVQKELEERQQQTYERNNNPRPFQAKYMLSGMARCGYCGAPLRIVLGHKRKDGSRTMKYHCANRFPRKTKGVTVYNDNKKCDSGIYDLSNLENTVIDNLIGFQEDNDSLLKIINGNNQPILDTSSFKEQISQIDKKIQKNSDLYLNDFITMDELKDRTDSLQAEKVLLKAKISENKFNDSTDVFELVKTQLGSIPINELSYDNKKKIVNNLVSKVDVTADNVNIIFKFQLA

SEQ ID NO: 2163 - protein, 452 aa, synthetic construct
MKAAIYIRVSTREQVENYSIQAQTEKLTALCRSKDWDVYDTFIDGGYSGSNMNRPALNEMLSKLHEIDAVVVYRLDRLSRSQRDTITLIEEYFLKNNVEFVSLSETLDTSSPFGRAMIGILSVFAQLERETIRDRMVMGKIKRIEAGLPLTTAKGRTFGYDVIDTKLYINEEEAKQLRLIYDIFEEEQSITFLQKRLKKLGFKVRSYNRYNNWLTNDLYCGYVSYKDRVHVKGIHEPIISEEQFYRVQEIFTRMGKNPNMNRDSASLLNNLVVCSKCGLGFVHRRKDIVSRGKKYHYRYYSCKTYKHIHELEKCGNKIWRADKLEELIIDRVNNYSFASRNADKEDELDSLNEKLRIEHAKKKRLFDLYVNGSYEVSELDSMMNDIDARINYYESQVKANEELRKNKKIQENLADLATVDFDSLEFREKQLYLKSLINKIYIDGEQVTIEWL

SEQ ID NO: 2164 - protein, 452 aa, synthetic construct
MKAAIYIRVSTREQVENYSIQAQTEKLTALCRSKDWDVYDIFIDGGYSGSNMNRPALNEMLNKLHEIDAVVVYRLDRLSRSQRDTITLIEEYFLKNNVEFVSLSETLDTSSPFGRAMIGILSVFAQLERETIRDRMVMGKIKRIEAGLPLTTAKGRTFGYDVIDTRLYINEEEAKQLQLIYDIFEEEQSITSLQKRLKKLGFKVRTYSRYNNWLTNDLYCGYVSYKDKVHVKGIHEPIISEEQFYRVQEIFTRMGKNPNMNRDSASLLNNLVVCSKCGLGFVHRRKDAMSRDKKYHYRYYSCKTYKHIHELEKCGNKIWRADKLEELVINRVNNYSLACRNVDKEDELDSLYEKLKIEHAKKRRLFDLYINGGYEVGELDSMMNDIDTQINYYEGQIEANEELKRNKKIQENLADLATVDFDSLEFREKQLYLKSLINKIYIDGEQVTIEWL

SEQ ID NO: 2165 - protein, 452 aa, synthetic construct
MRAAIYIRVSTREQVENYSIQAQTEKLTALCRSKDWDVYDIFIDGGYSGSNMNRPALNEMLSRLHEIDAVVVYRLDRLSRSQRDTITLIEEYFLKNNVEFVSLSETLDTSSPFGRAMIGILSVFAQLERETIRDRMVMGKIKRIEAGLPLTTAKGRTFGYDVIDTKLYINEEEAKQLQLIYDIFEEEQSITFLQKRLKELGFKVRTYNRYNNWLTNDLYCGYVSYKDKVHVKGIHEPIISEEQFYRVQEIFTRMGKNPNMNRDSASLLNNLVVCSKCGLGFVHRRKDAMSRDKKYHYRYYSCKTYKHIHELEKCGNKIWRADKLEELIINRVNNYSLANRNVDKEDELDSLNEKLKVEHAKKKRLFDLYINGSYEVSELDSMMSDIDAQINYYESRIEANEELKKNKKIQENLAGLATVDFDSLEFREKQLYLKSLINKIYIDGEQVTIEWL

SEQ ID NO: 2166 - protein, 485 aa, synthetic construct
MTKKVAIYTRVSTTNQAEEGFSIDEQIDRLTKYAEAMGWQVGDTYTDAGYSGAKLERPAMQRLINDIENKAFDTVLVYKLDRLSRSVRDTLHLVKDVFTKNKIDFISLNESIDTSSAMGSLFLTILSAINEFERENIKERMTMGKLGRAKSGKSMMWTKTAFGYHHNRKTGILEIVPLQATIVEQIFTDYLSGISLTKLRDKLNESGHIGKDIPWSYRTLRQTLDNPVYCGYIKFKDSLFEGMHKPIIPYETYLRVQKELEERQQQAYERNNNPRPFQAKYMLSGMARCGYCGAPLKIVLGHKRKDGSRTMKYHCANRFPRKTRGITVYNDNKKCDSGTYDLSSLENTVIDSLIGFQENNDSLLKIISGNNQPTLDTSSFKKQISQIDRKIQKNSDLYLNDFITMDELKARTDSLQAEKKLLKAEISENKFNDSTGVLELVKTQLGSIPINELSYDNKRKIVNNLVSKVDVTADNVDIIFKFQLA

SEQ ID NO: 2167 - protein, 452 aa, synthetic construct
MKAAIYIRVSTQEQVGNYSIQAQTEKLTALCRSKGWDVYDIFIDGGYSGSNMNRPALNEMLSRLHEIDAVVVYRLDRLSRSQRDTTTLIEEYFLKNNVEFVSLSETLDTSSPFGRAMIGILSVFAQLERETIRDRMVMGKIKRIEAGLPLTTAKGRTFGYDVIDTKLYINEEEARQLQLIYDIFEEEQSITSLQKRLKKLGFKVRTYNRYNNWLTNDLYCGYVSYKDEVHVKGIHEPIISEEQFYRVQEIFTRMGKNPNMNRDSASLLNSLVVCSKCGLSFVHRSKDTMSRGKKYHYRYYSCKTYKHTHELEKCGNKTWRADKLEELIINRVNNYSFASRNADKEDELDSLNEKLKIEHARKKRLFDLYINGSYEVSELDSMMNDIDAQINYYESQIEASEELKKNRKIQENLADLATADFDSLEFREKQLYLKSLINKIYIDGEQVTIEWL

SEQ ID NO: 2168 - protein, 452 aa, synthetic construct
MKAAIYIRVSTQEQVGNYSIQAQTEKLTALCHSKDWDVYDIFIDGGYSGSNMNRPALNEMLSKLHEIDAVVVYRLDRLSRSQRDTTTLIEEYFLKNNVEFVSLSETLDTSSPFGRAMIGILSVFAQLERETIRDRMVMGKIKRIEAGLPLTTAKGRTFGYDVIDTKLYINEEEAKQLQLIYDIFEEEQSITFLQKRLKKLGFKVRTYNRYNNWLTNDLYCGYVSYKDKVHVKGIHEPIISEEQFYRVQEIFTRMGKNPNMNRDSASLLSNLVVCGKCGLSFVHRSKDTMSRGKKYHYRYYSCKTYKHTHELEKCGNKTWRADKLEELIINRVNNYSLASRNVDKEDEQDGLNERLKIEHAKKRRLFDLYINGSYGVSELDSMMNDIDAQINYYESQIEANEELRKNRKIQENLADLATVDFDGLEFRDKQLYLKSLINKIYIDGEQVTIEWL

SEQ ID NO: 2169 - protein, 485 aa, synthetic construct
MTKKVAIYTRVSTTNQAEEGFSIDEQIDRLTKYAEAMGWQVSDTYTDAGFSGAKLERPAMQRLINDIENKAFDTVLVYKLDRLSRSVRDTLYLVKDVFTKNKIDFISLNESIDTSSAMGSLFLTILSAINEFERENIKERMTMGKLGRAKSGKSMMWTKTAFGYYHNRETGILEIVPLQATIVEQIFTDYLSGISLTKLRDKLNESGHIGKDIPWSYRTLRQTLDNPVYCGYIKFKDSLFEGMHKPIIPHETYLKVQKELEERQQQTYERNNNPRPFQAKYMLSGVARCGYCGAPLRIVLGHKRKDGSRTMKYHCANRFPRKTRGVTVYNNNKKCDSGTYDLSNLENTVIDNLIGLQENNDSLLRIINGNNQPILDTGSLKKQISLIDKKIQKNSDLYLNDFITMDELKDRTDSLQAEKKLLKAKISENKFNDSTVVFELVKTQLGSIPINELSYDNKKKIVNNLVSKVDVTADNVDIIFKFQLA

SEQ ID NO: 2170 - protein, 485 aa, synthetic construct
MTKKVAIYTRVSTTNQAEEGFSIDEQIDRLTKYAEAMGWQVSDTYTDAGLSGAKLERPAMQRLINDIENKAFDTVLVYKLDRLSRSVRDTLYLVKDVFTKNKIDFISLSESIDTSSAMGSLFLTILSAINEFERENIKERMTMGKLGRAKSGKSMMWTKTAFGYYHNRKTGILEIVPLQATIVKQIFTDYLSGISLTKLRDKLNESGHIGKDIPWSYRTLRQTLDNPVYCGYIKFKDSLFEGMHEPIIPYETYLKVQKELEERQQRTYERNNNPRPFQAKYMLSGMARCGYCGAPLKIVLGHKRKDGSRTMKYHCANRFPRKTKGVTVYNDNKKCDSGTYDLSNLENTVIDSLIGFQENNDSLLKIINGNNQPILDTSSFEKQISQIDKKIQKISDLYLNDFITMDELEDRTDSLQAEKKLLKAKISESKFDDSTDVFELVKTQLGSIPINELSYDDKKKIVNNLVSKVDVTADNVDIIFKFQLA

SEQ ID NO: 2171 - protein, 485 aa, synthetic construct
MTKKVAIYTRVSTTNQAEEGFSIDEQIDRLTKYAEAMGWQVSDTYTDAGLSGAKLERPAMQRLINDIENKAFDTVLVYKLDRLSRSVRDTLYLVKDVFTKSKIDFISLNESIDTSSAMGSLFLTILSAINEFERENIKERMTMGKLGRAKSGKSMMWTKTAFGYCHNRKTGILEIVPLQATIVEQIFTDYLSGISLTKLRDKLNESGHIGKDIPWSYRTLRQTLDNPVYCGYIKFKDGLFEGMHKPIIPYETYLKVQKELEERQQQAYERNNNPRPFQAKYMLSGVARCGYCGAPLRIVLGHKRKDGSRTMKYHCANRFPRKTKGVTVYNDNKKCDSGTYDLSNLENTVIDNLIGLQGNNDSLLKIINGNNQPILDTGSFKEQISQIDKKIQKNSDLYLNDFITMDELKDRTDSLQAEKKLLKAKISENRFNDSTDVFELVKTQLGSIPINELSYDNKKKIVNNLVSKVDVTADNVDIIFKFQLA

SEQ ID NO: 2172 - protein, 452 aa, synthetic construct
MKAAIYIRVSTREQVENYSIQAQTEKLTALCRSKDWDVYDIFIDGGYSGSNMNRPALNEMLSKLHEIDAVVVYRLDRLSRSQRDTITLIEEYFLKNNVEFVSLSETLDTSSPFGRAMIGILSVFAQLERETIRDRMVMGKIKRIEAGLPLTTAKGRTFGYDVIDSKLYINEEEAKQLQLIYDVFEEEQSITFLQKRLKKLGFKVHTYNRYNNWLTNDLYCGYVSYKDKVHVKGIHEPIISEEQFYRVQEIFTRMGKNPNMNRDSASLLNNLVVCSKCGLGFVHRRKDAMSRDKKYHYRYYSCKTYKHIHELEKCGNKIWRADKLEELIINRVNNYSLASRNVDKDDELDSLNERLKTEHAKKKRLFDLYINGGYEVSELDSMMNDIDAQINYYESQIEANEELKKNKKIQENLADLATVDFDSLGFREKQLYLKSLINKIYIDGEQVTIEWL

SEQ ID NO: 2173 - protein, 452 aa, synthetic construct
MKAAIYIRVSTREQVENYSIQAQTEKLTALCRSKDWDVYDIFIDGGYSGSNMNRPALNEMLSKLHEIDAVVVYRLDRLSRSQRDTITLIEEHFLKNNVEFVSLSETLDTSSPFGRAMIGILSVFAQLERETIRDRMVMGKIKRIEAGLPLTTAKGRTFGYDVIDTKLYINEEEAKQLQLIYDIFEEEQSITFLQKRLKKLGFRVRTYNRYNNWLTNDLYCGYVSYKDKVHVKGIHEPIISEEQFYRVQEIFTRMGKNPNMNRGSASLLNNLVVCSKCGLGFVHRRKDVMSRSKKYHYRYYSCKTYKHIHELEKCGNKIWRADKLEELIINRVNNYSLASRNVNKEDELDSLNEKLKIEHAKKKRLFDLYISGSYEVSELDGMMNDIDAQINYYEGQIEANEGLRKNKKIQENLADLATVDFDSLEFREKQLYLKSLINKIYIDGEQVTIEWL

SEQ ID NO: 2174 - protein, 485 aa, synthetic construct
MTKKVAIYTRVSTTNQAEEGFSIDEQVDRLTKYAEAVGWQVSDTYTDAGFSGAKLERPAMQRLINDIENRAFDTVLVYKLDRLSRSVRDTLYLVKDVFTKNKIDFISLNECIDTSSAMGSLFLTILSAINEFERENIKERMTMGKLGRAKSGKSMMWTKTAFGYYHNRKTGILEIVPLQATIVEQIFTDYLSGTSLTKLRDKLNESGHIGKDIPWSYRTLRQTLDNPVYCGYIKFKGSLFEGMHKPIIPYETYLKVQKELEERQQQTYERNNNPRPFQAKYMLSGMARCGYCGAPLKIVLGHKRKDGSRTMKYHCANRFPRKTKGVTVYNDNKKCDSGTYDLSNLENTVIDILIGFQENNDSLLKIINGNNQPIRDTSSFKEQINQIDKKIQKNSDLYLNDFITMDELKDRTDSLQTEKKLLKAKISENKFNGSADVFELVKTQLGSIPINELSYDNKKRIVNNLVSKVDVTADNVDIIFKFQLA

SEQ ID NO: 2175 - protein, 485 aa, synthetic construct
MTKKVAIYTRVSTTNQAEEGFSIDEQIDRLTKYAEAMGWRVSGTYTDAGFSGAKLERPAMQRLINDIENKAFDTVLVYKLDRLSRSVCDTLYLVKDVFTKNKIDFISLNESIDTSSAMGSLFLTILSAINEFERENIKERMTMGKLGRAKSGKSMMWTKTAFGYHHNRKTGILEIVPPQATIVEQIFTDYLSGISLTKLRDKLNESGHIGKDIPWSYRTLRQTLDNPVYCGYIKFKDSLFEGMHKPIIPYETYLKVQKELEERQQQIYERNNNPRPFQAKYMLSGMARCGYCGAPLRIVLGHKRKDGSRTMKYHCANRFPRKTKGITVYNDNKKCDSGTYDLSNLENTVIDYLIGLQENNDSLLKIINGNNQPILDTSSLKKQISQIDKKIQKNSDLYLNDLITMDELKDRTDGLQAEKKLLKAKISENKLNDSTDAFELVKTQLGSIPINELSYDNKKRIVNNLVSKVDVTADNVDIIFKFQLA

SEQ ID NO: 2176 - protein, 452 aa, synthetic construct
MKAAIYIRVSTREQVENYSIQAQTEKLIALCRSKDWDVYDIFIDGGYSGSNMNRPALNEMLSKLHEIDAVVVYRLDRLSRSQRDTITLIEEYFLKNNVEFVSLSETLDTSSPFGRAMIGILSVFAQLERETIRDRMVMGKIKRIEAGLPLTTAKGRTFGYDVVDTKLYINEEEAKQLRLIYDIFEEEQSITFLQKRLKKLGFKVHTYNRYNNWLTNDLYCGYVSYKDKVHVKGIHEPIISEEQFYRVQEIFTRMGKNPNMNRESASLLNNLVVCSKCGLGFVHRRKDAMSRDKKYHYRYYSCKTYKHIHELEKCGNKIWRADKLEELIIDRVNNYSPASRYADKEDELDSLNEKLKIEHAKKKRLFDLYANGNYEASELDSMMNDIDAQINYFESQIEANEELKKNKKIQENLAHLATVDFDSLEFREKQLYLKSLINKIYIDGEQVTIEWK

SEQ ID NO: 2177 - protein, 469 aa, synthetic construct
MSYTTPVRAAVYLRISEDRSGEQLGVARQREDCLKLCDQRKWVPVEYLDNDVSASTGKRRPAYEQMLADITAGKIAAVVAWDLDRLHRRPIELEAFMSLADEKRLALATVAGDVDLATPQGRLVARLKGSVAAHETEHKKARQRRAARQKAELGHPNWSRAFGYRPGPNGPEPDPRTAPLVKQAYADILAGASLGDVCRRWNDAGAFTITGRPWTTTTLSKFLRKPRNAGLRAYKGARYGPVDLDAIVGKAQWSPLVDETTFWAAQAVLDAPGRAPGRKSVRRHLLTGLAGCGKCGNHLAGSYRTDGRVVYVCKACHGVAILADNIEPILYHIVAERLAMPNAVDLLRREIHDAAEAEAIRLELETLYGELDRLAVERAEGQLTARQVKISTGIVNAKIAKLQARQLDQERLRVFDGIPLGTPQVAGVIAELSPDRFRAVLDVLAEVVVQPVGRSGRIFNPDRVQVNWR

SEQ ID NO: 2178 - protein, 485 aa, synthetic construct
MTKKVAIYTRVSTINQAEEGFSIDEQTDRLTKYAEAMGWQVSDTYTDAGFSGAKLERPAMQRLINDIENKVFDTVLVYKLDRLSRSVRDTLYLVKEVFTKNKIDFISLNESIDTSSAMGSLFLTILSAINEFERENIKERMTMGKLGRAKSGKSMMWTKTAFGYYHNRKTGILEIVPLQATIVEQIFTDYLSGISLTKLRDKLNESGHIGKDIPWSYRTLRQTLDNPVYCGYIKFKDSLFEGMHKPIIPYETYLKVQKELEERQQQTYERNNNPRPFQAKYMLSGMARCGYCGAPLKIVLGHKRKDGSRTMEYHCVNRFPRKTKGVTVYNDNKKCDSGTYDLSNLENTVIDNLIGFQENNDSLLKIINGNNQPILDTSSFEKQISQIDKKIQKNTDLYLNDFITMDELKDRTDSLQAEKKLLKAKISENKFNDSTDVFELVKTQLGSIPINELSYDNKKKIVNNLVSKVDVTADNVDIIFKFQLA

SEQ ID NO: 2179 - protein, 485 aa, synthetic construct
MTKKVAIYTRVSTANQAEEGFSIDEQIDRLTKYAEAMGWQVSDTYTDAGFSGAKLDRPAMQRLINDIENKAFDTVLVYKLDRLSRSVRDTLYLVKDVFTKNKIDFISLNESINTSSAMGSLFLTILSAINEFERENIRERMTMGKLGRAKSGKSMMWTKTAFGYYHNRKTGILEIVPLQATIVEQIFTDYLSGISLTKLRDKLNESGHIGKDIPWSYRTLRQTLDNPVYCGYIKFKDSLFEGMHKPIIPYETYLRVQEELEERQQQTYERNNNPRPFQAKYMLSGMARCGYCGAPLRIVQGRKRKDGSRTMKYHCVNRFPRKTKGVTVYNDNKKCDSGTYDLSNLENTVIDNLIGFQENNDSLLKIINGNNQPILDTSSFKKQISQIDEKIRKNSDLYLNDFITMDELKGRTDGLQAEKKLLKAKISENKFNDSTDMFELVKTQLGSIPINELSYDNKKKIVNNLVSKVDVTADNVDIIFKFQLA

SEQ ID NO: 2180 - protein, 469 aa, synthetic construct
MSYTTPVRAAVYLRISEDRSGEQLGVARQREDCLKLCGQHKWVPVEYLDNDVSASTGKRRPAYEQMLADITAGKITAVVAWDLDRLHRRPIELEAFMSLADEKRLALATVAGDVDLATPQGRLVARLKGSVAAHETEHKKARQRRAARQKAERGYPNWSKAFGYLSGPNGPEPDPRTAPLVKQAYADILAGASLGDVCRQWNDAGALTITGRPWTTTTLSKFLRKPRNAGLRAYKGARYGPVDRDAIVGKAQWSPLVDEATFWAAQAVLDAPGRAPGRKSVRRHLLTGLAGCGKCGNHLAGSYRTDGRVVYVCKACHGVAILADNIEPILYHIVAERLAMPDAADLLRREVHDVAEAETIRLELETLYGELDRLAVERAEGLLTARQVKICTDTVNAKITELRARQLDQERLRVFGGIPLGTPQVAGMIAELSPDRFRTVLDVLAEVVVQPVGKSGRTFNPERVQVNWR

SEQ ID NO: 2181 - protein, 485 aa, synthetic construct
MTKKVAIYTRVSTTNQAEEGFSIDEQVDRLTKYAEAMGWQVSDTYTDAGLSGAKLERPAMQRLINDIKNKAFDTVLVYKLDRLSRSVRDTLYLVKDVFTKNKIDFISLNESIDTSSAMGSLFLTILSAINEFERENIKERMTMGKLGRAKSGKSMMWTKTAFGYYHNRKTGILEIVPLQATIVEQIFTDYLSGISLTKLRDKLNESGHIGKDIPWSYRTLRQTLDNPVYCGYIKFKGSLFEGMHKPIIPYETYLKVQKELEERQQQTYERNNNPRPFQAKYMLSGMARCGYCGAPLRIVLGHKRKDGSRTMKYHCANRFPRRTKGVTVYNDNKKCDSGTYDLSNLENTVTNSLIGFQENNDSLLKIINGNNQPILDTSSFKKQISQIDKKIQKISDLYLNDFITMDELKDRTESLQAEKKLLKAKISESKFNDSTDVFELVKTQLGSIPINELSYDNKKRIVNNLVSKVDVTADNVDIIFKFQLA

SEQ ID NO: 2182 - protein, 452 aa, synthetic construct
MKAAIYIRVSTQEQVGNYSIQAQTEKLTALCRSKDWDVYDIFIDGGYSGSNMNRPALNEMLSKLHEIDAVVVYRLDRLSRSQRDTTTLIEEYFLKNNVEFVSLSETLDTSSPFGRAMIGILSVFAQLERETIRDRMVMGKIKRVEAGLPLTTAKGRTFGYDVIDTKLYINEEEAKQLQLIYDIFEEEQSITSLQKRLKKLGFKVRTYNRYNNWLTNDLYCGYVSYKDKVHVKGIHEPIISEEQFYRVQEIFTRMGKNPNMNRDSASLLNNLVACSKCGLGFVHRSKDTMSRGKKYHYRYYSCKTYKHTHELEKCGNKTWRADELEGLIIDRVNNYSFASRNVDKEDELDSLNERLKIEHAKKKRLFDLYINGSYEVSELDSMMGDIDAQISYYESQIKANGELKRNKKIQENLVDLTTVDFDSLEFREKQLYLKSLINKIYIDGEQVTIDWL

SEQ ID NO: 2183 - protein, 485 aa, synthetic construct
MTKKVAIYTRVSTTNQAEEGFSIDEQIDRLTKYAEAMGWQVSDTYTDAGFSGAKLERPAMQRLINDIENKAFDTVLVYKLDRLSRSVRDTLYLVKEVFTKNKIDFISLNESIDTSSAMGSLFLTILSAINEFERENIKERMTMGKLGRAKSGKSMMWTKTAFGYYHNRKTGILEIVPLQATIVEQIFTDYLGGISLTKLRDKLNESGHIGKDIPWSYRTLRQTLDNPVYCGYIKFKDSLFKGMHKPIIPYETYLKVQKELEVRQQQTYERNNNPRPFQAKYMLSGMARCGYCGAPLRIVLGHKRKDGSRTMKYHCANRFPRKTKGVTVYNDNKKCDSGTYDLNNLENTVIDNLIGFQENNDSLLKIINGNNQPILDTSSLKRQISQIDKKIQKNSDLYLNGFITMDELKDRTDSLQAEKRLLKAKISENKFNDSTGVFELVKTQLGSIPINELSYDNKKKIVNNLVGKVDVTADNVDIIFKFQLA

SEQ ID NO: 2184 - protein, 469 aa, synthetic construct
MCYTTPVRAAVYLRISEDRSGEQLGVARQREDCLKLCDQRKWVPVEYLDNDVSASTGKRRPAYEQMLADITAGKIAAVVAWDLDRLHRRPIELEAFMSLADEKRLALATVAGDVDLATPQGRLVARLKGSVAAHETEHKKARQRRAARQKAERGHPNWSRAFGYLPGPNGPEPDPRTAPLVKQAYADILAGASLGDVCRRWNDAGAFTITGRQWTTTTLSKFLRKPRNAGLRAYKGARYGPVDRDAIVGKAQWSPLVDEATFWAAQAVLDAPGRAPGRKSVRRHLLTGLAGCGKCGNHLAGSYRTDGRVVYVCKACHGVTILADNIEPILYHIVAERLAKPDAVDLLRRGTHDAAEAETIRLELETLYGELDRLAVERAEGLLTARQVKISTDVVNAKITKLQARQLDQERLRVFDGIPLGTPQVAGMIAELSPDRFRAVLDVLAEVVVQPVGKSGRIFNPERVQVNWR

SEQ ID NO: 2185 - protein, 485 aa, synthetic construct
MTKKVAIYTRVSTTNQAEEGFSIDEQIDRLTKYAEAMGWQVSNTYTDAGFSGAKLERPAMQRLINDIENKAFDTVLVYKLDRLSRSVRDTLHLVKDVFTKNKIDFISLNESIDTSSAMGSLFLTILSAINEFERENIKERMTMGKLGRAKSGKSMMWTKTAFGYYHNRETGILEIVPLQATIVEQIFTDYLSGISLTKLRDKLNESGHIGKDIPWSYRTLRQTLDNPVYCGYIKFKDSLFEGMHKPIIPYETYLRVQKELEERQQQTYERNNNPRPFQAKYMLSGMARCGYCGAPLRIVLGHKRKDGSRTMKYHCANRFPRKTKGVTVYNGNKKCDSGTYDLSNLEDTVIDNLIGFQENNDSLLKIINGNNQPILDTSSFKEQISQIDKKIQKNSDLYLNDFITMDELKDRTDSLQAEKKLLKAKISENNFNDSTDVFELVKTQLGSIPINELSYDNKKKIVNNLVSKVDVTADNVDIIFKFQLA

SEQ ID NO: 2186 - protein, 452 aa, synthetic construct
MKAAIYIRVSTREQVENYSIQAQTERLTALCRSKDWDVYDIFIDGGYSGSNMNRPALNEMLSKLHEIDAVVVYRLDRLSRSQRDTITLIEEYFLKNNVEFVSLSETLDTSSPFGRAMIGILSVFAQLERETIRDRMVMGKIKRIEAGLPLTTAKGRTFGYDVIDTKLYINEEEAKQLQLIYDIFEEEQSITSLQKRLKKLGFKVHTYNRYNNWLTNDLYCGYVSYKDKVHVKGIHEPIISEEQFYRVQEIFTRKGKNPNMNRDSASLLNNLVVCSKCGLGFVHRRKDTMSRGKKYHYRYYSCKTYKHTHELEKCGNKIWRADKLEELIINRVNNYSLASRNVDKGDELDSLNEKLKIKHAKKKRLFDLYINGSYEVSELDSMMSDIDAQINYYESQIEANEELRKNKKIQENLANLATVDYDSLEFREKQLYLKSLINKIYIDGEQVTIEWL

SEQ ID NO: 2187 - protein, 469 aa, synthetic construct
MSYTTPVRAAVYLRISEDRSGEQLGVARQREDCLKLCDQRRWVPVEYLDNDVSASTGKRRPAYEQMLADITAGKIAAVVAWDLDRLHRRPIELEAFMSLADEKRLALATVAGDVDLATPQGRLVARLKGCVAAHETEHKKARQRRAARQKAERGHPNWSKAFGYLPGPNGPEPDPRTAPLVEQAYADILAGASIGDVCRQWNDAGAFTITGRPWTTTTLSKFLRKPRNAGLRAYKGARYGPVDRDAIVGKAQWSPLVDGATFWAAQAVLDAPGRAPGRKSVRRHLLTGLAGCGKCGNHLAGSYRTDGRIVYVCKACHGVSILADNIEPILYHIVAERLAMPDAVDLLRREVHDAAEAETIRLELETLYGELDRLAVERAEGLLTARQVKISTDIVNAKITKLQARQLDQERLRVFDGIPLGTPQVAGMIAELSPDRFRAVLDVLAEVVVQPVGKSGRIFNPERVQVNWR

SEQ ID NO: 2188 - protein, 452 aa, synthetic construct
MKAAIYIRVSTREQVENYSIQAQTEKLTALCRSKDWDVYDIFIDGGYSGSNMNRPALNEMLSKLREVDAVVVYRLDRLSRSQRDTITLIEEYFLKNNVEFVSLSETLDTSSPFGRAMIGILSVFAQLERETIRDRMVMGKIKRIEAGLPLTTAKGRTFGYDVIDTKLYINEEEAKQLQLIYDIFEEEQSITFLQKRLKKLGFKVHTYSRYNNWLTNDLYCGYVSYKDIVHVKGIHEPIISEEQFYRVQEIFARMGKNPNTNRDSASLLNNLVVCGKCGLGFVHRRKDTTSHGKKYHYRYYSCKTYKHTHELEKCGNKIWRADKLEELIINRVNNYSFASRDVDKEDELDSLNEKLKIEHAKKKRLFDLYINGSYEVSELDSMMNDIDAQINYYESQIEANEELKKNKKIQENLANLATVDYDSLEFREKQLYLKSLINKIYIDGEQVTIEWL

SEQ ID NO: 2189 - protein, 485 aa, synthetic construct
MTKKVAIYTRVSTTNQAEEGFSIDEQVDRLTKYAEAMGWQVSDTYTDAGFSGAKLERPAMLRLINDIENKAFDTVLVYKLDRLSRSVRDTLYLVKDVFTKNKIDFISLSESINTSSAMGSLFLTILSAINEFERENIKERMTMGKLGRAKSGKSMMWTKTAFGYYHNRKTGILEIVPLQATIVEQIFTDYLSGISLTKLRDKLNESGHIGKDIPWSYRTLRQTLDNPVYCGYIKFKDSLFEGMHKPIISYETYLKVQKELEERQQQTYERNNNPRPFQAKYMLSGTARCGYCGAPLQIVLGHKRKDGSRTMKYHCANRFPRKTKGITVYNDNKKCDSGTYDLSILENTVIDSLIGFQENNDSLLKIINGNNQPILDTSSFKKQISQIDKKIQKNSDLYLNDFITMDELKDRTDSLQAEKKLLEAKISENKFNDSTDVFELVKTQLGSIPINELSYDNKKKIVNSLVSKVDVTADNVDIIFKFQLA

SEQ ID NO: 2190 - protein, 469 aa, synthetic construct
MSYTTPVRAAVYLRISEDRSGEQLGVARQREDCLKLCDQRKWVPVEYLDNDVSASTGKRRPAYEQMLADITAGEIAAVVAWDLDRLHRRPIELEAFMSLADEKRLALATVAGDVDLATPQGRLVARLKASVAAHETEHKKARQRRAARQKAERGLPNWSRAFGYLPGPNGPEPDPRTAPLVKQAYADILAGASLGDVCRQWNDADAFTITGRPWTTTTLSKFLRKPRNAGLRAYKGARYGPVDRDAIVGKAQWSPLVDEATFWAAQAVLDAPGRAPGRKSVRRHLLTGLAGCGKCGNHLAGSYRTDGRVVYVCKACHGVVILADNIEPILYRIVAERLAMPDAVDLLRREIHDAAEAETIRPELEILYGELDRLAVERAEGLLTARQVKISTDIVNAKITKLRARQLDQERLRVFDGIPLGTPQVAGMIAELSPDRFRAVLDVLAEVVVRPVGKSGRTFNPERVQVNWR

SEQ ID NO: 2191 - protein, 485 aa, synthetic construct
MTKKVAIYTRVSTTNQAEEGFSIDEQIDRLTKYAEAMGWQVSDTYTDAGFSGAKLERPAMQRLINDIENKAFDTVLVYKLDRLSRSVRDTLYLVKDVFTKNKIDFISLNESIDTSSAMGSLFLTILSAINEFERENIKERMTMGKLGRAKSGKSMMWSKTAFGYYHNRKTGILEIVPLQATIVEQIFTDYLSGISLTKLRDKLNESGHIGKDIPWSYRTLRQTLDNPVYCGYIKFKDSLFEGMHKPIIPYETYLKVQKELEERQQQTYERNNNPRPFQAKYMLSGMARCGYCGAPLKIVLGHRRKDGSRTMKYHCANRFPRKTKGVTVYNDNKKCDSGTYDLSNLENTVIDNLIGFQENNDSLLKIINGNNQPILDTSSFKKQISQIDKKIQKNSDLYLNDFITMDELKDRTDSLQAEKKLLKAKISENKFNDSTDVFELVKTQLGSIPINELSYDNKKKIVNNLVSKVDVTADSVDIIFKFQLA

SEQ ID NO: 2192 - protein, 469 aa, synthetic construct
MCYTTPVRAAVYLRISEDRSGEQLGVARQREDCLKLCDQHKWVPVEYLDNDVSASTGKRRPAYEQMLADITAGKIAAVVAWDLDRLHRRPIELEAFMSLADEKRLALATVAGDVDLATPQGRLVARLKGSVAAHETEHKKARQRRAARQKAERGHPNWSKAFGYLPGPNGPEPDPRTAPLVKQAYADILAGASLGGVCRQWNGAGAFTITGRPWTATTLSKFLRKPRNAGLRAYKGARYGPVDRDAIVGKAQWSPLVDEATFWAAQAVLDAPGRAPGRKSVRRHLLTGLAGCGKCGNHLAGSYRTDGRVVYVCKACHGVAILADNIEPILYHIVAERLAMPDAVDLLRREIHDAGEAEAIRLELETLCGELDRLAVERAEGLLTARQVKISTDIVNAKITKLQACLLDQERLRVLDGIPLGTPRVAGMIAELSPNRFRAVLDVLAEVVVQPVGKSGRIFNPERVQVNWR

SEQ ID NO: 2193 - protein, 469 aa, synthetic construct
MSYTTPVRAAVYLRISEDRSGEQLGVARQREDCLKLCGQRKWVPVEYLDNDVSASTGKRRPAYEQMLADITAGKIAAVVAWDLDRLHRRPIELEAFMSLADEKRLALATVAGDVDLATPQGRLVARLKGSVAAHETEHKKARQRRAARQKAERGYPNWSKAFGYLPGPNGPEPDPRTAPLVKQAYADILAGASLGDVCRQWNDAGAFTITGRPWTTTTLSKFLRKPRNAGLRAYKGARYGPVDRDAIVGKAQWSPLVDEATFWAAQAVLDAPGRAPGRKSVRRHLLTGLAGCGKCGNHLAGSYRTDGRVVYVCKACHGVAILADNIEPILYHIVAERLAMPDAADLLRREIHDAAEAETIRLELETLYGELDRLAVERAEGLLTARQVKISTDIVNAKITKLQARQLDQERLRVFDGIPLGTPQVAGMIAELSPNRFRAVLDVLAEVVVQPVGKSGRIFNPERVQVNWR

SEQ ID NO: 2194 - protein, 469 aa, synthetic construct
MCYTTPARAAVYLRISEDRSGEQLGVARQREDCLKLCSQHKWVPVEYLDNDVSASTGKRRPAYEQMLADITAGKIAAVVAWDLDRLHRRPMELEAFMSLADEKRLALATVAGDVDLATPQGRLVARLKGSVAAHETEHKKARQRRAARQKAERGLPNWSKAFGYLPGPNGPEPDPRTAPLVKQAYADILAGASLGDVCRQWNDAGAFTITGRPWATTTLSKFLRKPRNAGLRAYKGARCGPVDRDAIVGKAQWSPLVDEATFWAAQAVLDAPGRAPGRKSVRRHLLTGLAGCGKCGNHLAGSCRTDGRVVYVCKACHGVAILADNIEPILYHIVAERLAMPDAVDLLRREIHDAAEAETIRLELETLYGELDCLAVERAEGLLTARQVKISTDIVNAKITKLRARQLDQERLRVFDGIPLGTPQAAGMIAELSPDRFRAVLDVLAEVVVQPVGKSGRIFNPERVQVNWR

SEQ ID NO: 2195 - protein, 452 aa, synthetic construct
MKAAIYIRVSTREQVENYSIQAQTEKLTALCRSKDWDVYDIFIDGGYSGSNMNRPALNEMLSKLHEIDAVVVYRLDRLSRSQHDTITLIEEYFLKNNVEFVSLSETLDTSSPFGRAMIGILSVFAQLERETIRDRMVMGKIKRIEAGLPLTTAKGRTFGYDVIDTKLYINEEEAEQLRLIYDIFEEEQSITSLQKRLKKLGFKVHTYNRYNNWLTNDLYCGYVSYKDKVHVKGIHEPIISEEQFYRVQEIFTRMGKNPNMNRDSASLLNNLVVCSKCGLGFVHRRKDAMSRDKKYHYRYYSCKTYKHIHELEKCGNKIWRADKLEELIINRVNSYSLVSRNVDKEDELDSLNEKLKIEHAKKKRLFDLYINGNYEVSELDRMMNDIDAQINYYESQIEANEELKKSKKIQENLAYLAAVDFDSLEFREKQLYLKSLINKIYIDGEQVTIEWL

SEQ ID NO: 2196 - protein, 452 aa, synthetic construct
MKAAIYIRVSTQEQVGNYSIQAQTEKLTALCRSKDWDVYDIFIDGGYSGSNMNRPALNEMLSKLHEIDAVVVYRLDRLSRSQRDTTTLIEEYFLKNNVEFVSLSETLDTSSPFGRAMIGILSVFAQLERETIRDRMVMGKIKRIEAGLPLTTAKGRTFGYDVIDTKLYINEEEAKQLQLIYDIFEEEQSITSLQKRLKKLGFKVRTYNRYNNWLTNDLYCGYVSYKDKVHVKGIHEPIISEEQFYRVQEIFTRMGRNPNMNRASASLLSNLVVCSKCGLGFVHRSKDTMSRGKKYHYRYYSCKTYKHTHELEKCGNKTWRADKLEELIINRVNNYSFAGRNVDKEGELDGLNEKLKIEHAKKRRLFDLYINGGYEVSELDSMMNDIDAQINYYESQIEANEELKKSKKIQENLADLATVDFDSLEFREKQLYLKSLINKIYIDGEQVTIEWL

SEQ ID NO: 2197 - protein, 485 aa, synthetic construct
MTKKVAIYTRVSTTNQAEEGFSIDEQIDRLTKYAEAMGWQVSDTYTDAGCSGAKLERPAMQRLINDIEDKAFDTVLVYKLDRLSRSVRDTLYLVKDVFTKNKIDFISLNESIDTSSAMGSLFLTILSAINEFERENIKERMTMGKLGRAKSGKSMMWTKTAFGYYHNCKTGILEIVPLQATIVEQIFTDYLSGISLTKLRDKLNESGHIGKDIPWSYRTLRQTLDNPVYCGYIKFKDSLFEGMHKPIIPYETYLRVQKELKERQQQTYERNNNPRPFQAKYMLSGMARCGYCGAPLRIVLGRKRKDGSRTMKYHCANRFPRKTKGVTVYNDNKKCDSGTYDLSYLENTVIDSLIGFQENNDSLLEIINGVNQPILDTSSFEKQISQIDKKIQKNSDLYLNDFITMDELKDRTDRLQAEKKLLKAKISENKFNDSTDVFEQVKTQLGSIPINELSYDNKKKVVNNLVSKVDVTADNVDIIFKFQLA

SEQ ID NO: 2198 - protein, 485 aa, synthetic construct
MTKKVAIYTRVSTTNQAEEGFSIDEQIDRLTKYAEAMGWQVSDTYTDAGFSGAKLERPAMQRLINDIENKAFDTVLVYKLDRLSRSVRDTLYLVKDVFTKNKIDFISLNESINTSSAMGSLFLTILSAINEFERENIKERMTMGKLGRAKSGKSMMWTKTAFGYYHNRKTGILEIVPQQATIVEQIFTDYLSGTSLTKLRDKLNESGHIGKDIPWSYRTLRQTLDNPVYCGYIKFKDSLFEGMHKPIIPYETYLKVQKELEERQQQTYERNNNPRPFQAKYMLSGMARCGYCGAPLIIVLGHKRRDGSRTMKYHCANRFPRKTKGVTVYNDNKKCDSGTYDLSSLENTVIDNLIGFQENNDSLLKIINGNNQPILGTSSFKEQISQIDKKIQKNSDLYLNDFITMDELKDRTNSLQAEKKLLEAKISENKFSDSTDVFELVKTQLGSIPINKLSYDDKKKIVNNLVSKVDVTADNVDIIFKFQLA

SEQ ID NO: 2199 - protein, 452 aa, synthetic construct
MKAAIYIRVSTREQVENYSIQAQTEKLTALCRSKDWDVYDIFIDGGYSGSNMNRPALNEMLSKLHEIDAVVVYRLDRLSRSQRDTITLIEEYFLKNNVEFVSLSETMDTSSPFGRAMIGILSVFAQLERETIRDRMVMGKIRRIEAGLPLTTAKGRTFGYDVIDTKLYINEEEAKQLRLIYDIFEEEQSITFLQKRLKKLGFKVRTYNRYNNWLTNDLYCGYVSYKDKVHVKGIHEPIISEEQFYRVQEIFTRMGKNPNMNRDSASLLNNLVVCSKCGLGFVHRRKDTTSRGKKYHYRYYSCKTYKHTHELEKCGNKIWRADKLEELIINRVNNYSFASRNVDKEDELDSLNEKLKIEHEKKKRLLDLYINGSYEVSELDSMMNDIDAQINYYESQIEANEELKKDKKIQENLANLATVDYDSLEFREKQLYLKSLINKIYIDGEQVTIEWL

SEQ ID NO: 2200 - protein, 469 aa, synthetic construct
MSNTTPVRAAVYLRISEDRSGEQLGVARQREDCLKLCGQRKWVPVEYLDNDVSASTGKRRPAYEQMLADITAGKIAAVVAWDLDRLHRRPVELEAFMSLADEKRLALATVAGDVDLATPQGRLVARLKGCVAAHETEHKKARQRRAARQKAERGHPNWSKAFGYLPGPNGPEPDPRIAPLVKQAYADVLAGASLGDVCRQWNDVGAFTITGRPWTTTTLSKFLRKPRNAGLRAYKGARYGPVDRDAIVGKAQWSPLVDEATFWAAQAVLDAPGRAPGRKSVRRHLLTGLAGCGKCGNHLAGSYRTDGQIVYVCKACHGVSILAVNIEPILYHIVAERLAMPDAVDLLRREVHDAAEAETIRLELETLYGELDRLAVERAEGLLTARQVKISTDIVNANITKLQARQLDQERLRVFDGIPLGTPQVAGMIAELSPDRFRAVLDVLAEVVVQPVGKSGRISNPERVQVNWR

SEQ ID NO: 2201 - protein, 452 aa, synthetic construct
MKAAIYIRVSTREQVENYSIQAQTEKLTALCRSKDWDVYDIFIDGGYSGGNMNRPALNEMLSKLHEIDAVVVYRLDRLSRSQRDTITLIEEYFLKNNVEFVSLSETLDTSSPFGRAMIGILSVFAQLERETIRDRMVMGKIKRIEAGLPLTTAKGRTFGYDVIDTKLYINKEEARQLQLIYDIFEEEQSITSLQKRLKKLGFKVRTYSRYNNWLTNDLYCGYVSYKDKVHVKGIHEPIISEEQFYRVQEIFTRMGKNPNMNRDSASLLNNLVVCGKCGLGFVHRRKDAMSRDKKYHYRYYSCKTYKHIHELEKCGNKIWRADKLEELIINRVNNYSLASRNVDKEDELVSLNEKLKIEHAKKERLFDLYINGSYEVSELDSMMNDIDAQINYYESQIEANEELKKNEKIQENLANLATADFDSLEFREKQLYLKSLINKIYIDDEQVTIEWL

SEQ ID NO: 2202 - protein, 452 aa, synthetic construct
MKAAIYIRVSTREQVENYSIQAQTEKLTALCRSKDWDVYDIFIDGGYSGSNMNRPALNEMLSKLHEIDAVVVYRLDRLSRSQRDTVTLIEEYFLKNNVEFVSLSETLDTSSPFGRAMIGILSVFAQLERETIRDRMVMGKIKRIEAGLPLTTAKGRTFGYDVIDTKLYINEEEAKQLRLIYDIFEEEQSITFLQKRLKELGSKVRTYNCYNNWLTNDLYCGYVSYKDKVHVKGIHEPIISEEQFYRVQEIFTRMGKNPNMNRASASLLNNLVVCSKCGLGFVHRRKDAMSRDKKYHYRYYSCKTYKHIHELERCGNKIWRADKLEELIINRVNNYSLASRNVDKDDELDSLNERLKMEHAKKKRLFDLYINGSYEVSELDSMMSDIDAQISYYESQIEASEELKKNKKIQENLADLATVDFDSLEFREKQRYLKSLINKIYIDGEQVAIEWL

SEQ ID NO: 2203 - protein, 485 aa, synthetic construct
MTKKVAIYTRVSTTNQAEEGFSIDEQTDRLTKYAEAMGWQVSDTYTDAGFSGAKLERPAMRRLINDIENKAFDTVLVYKLDRLSRSVRDTLYLVKDVFTKNKIDFISLNESIDTSSAMGSLFLTILSAINEFERENIKERMTMGKLGRAKSGKSMMWTKTAFGYCHNRKTGILEIVPLQATIVEQIFADYLSGISLTKLRDKLNESGHIGKDIPWSYRTLRQTLDNPVYCGYIKFKDSLFEGMHKPIIPYETYRKVQKELEERQQQTYERNNNPRPFQAKYMLSGMARCGYCGAPLRIVLGHKRKDGSRTMKYHCANRFPRKTKGVTVYNDNKKCDSGTYDLSNLENTVIDNLIGFQESNDSLLKIINGNNQPILDTNSFKEQVSQIDKKIQKNSDLYLNDFITMDELKVRTDSLQAEKKLLKAKISENKFNDSTDVFELVKTRLGSIPVNELSYDNKKKIVNSLVSKVDVTADNVDIIFKFQLA

SEQ ID NO: 2204 - protein, 452 aa, synthetic construct
MKAAIYIRVSTREQVENYSIQAQAEKLTALCRSKDWDVYDIFIDGGYSGSNMNRPALNEMLSKLHEIDAVVVYRLDRLSRSQRDTITLIEEYFLKNNVEFVSLSETLDTSSPFGRAMIGILSVFAQLERETIRDRMVMGKIKRIEAGLPLTTAKGRTFGYDVIDTKLYINEEEAKQLRLIYDIFEEEQSITFLQKRLKKLGFKVHTYNRYNNWLTNDLYCGYVSYKDKVHVKGIHEPIISEEQFYRVQEIFTRMGKNPNMNRGSASLLNNLVVCSKCGLGFVHRRKDAMSRDKKYHYRYYSCKTYKHIHELEKCGNKIWRADKLEELIINRVNNYSFASRNAGKEDELDSLNEKLKIEHAKKRRLFELYINGRYEVSELDSMMNDIDAQINYYESQIEANEGLKESKKIQENLANLATVDFDSLEFREKQLYLKSLINKIYIDGEQVTIEWL

SEQ ID NO: 2205 - protein, 486 aa, synthetic construct
MTKKVAIYTRVSTTNQAEEGFSIDEQIDRLTKYAEAMGWQVSDTYTDAGFSGAKLERPAMQRLINDIENKAFDTVLVYKLDRLSRSVRDTLYLVKDVFTKNKIDFISLSESIDTSSAMGSLFLTILSAINEFERENIKERMTMGKLGRAKSGKSMMWTKTAFGYYHNRKTGILEIVPPQATIVEQIFTDYLSGISLTKLRDKLNESGHIGKDIPWSYRTLRQTLDNPVYCGYIKFKDSLFEGMHKPIIPYETYLKVQKELKERQQQTYERNNNPRPFQAKYMLSGMARCGYCGAPLRIVLGHKRKDGSRTMRYHCANRFPRKTMGITVYNDNKKCDSGTYGLSNLENTVIDNLIGFQENNDILLKIINGYNQPILDTSSLKKQISQIDKKIQKNSDLYLNDFITMDELKDRTDSLQAEKKLLKAKISENKSNDSTDVFELVKTQLGSIPINELSYDDKKKIVNNLVSKVDVTADNVDIIFKFQLAQ

SEQ ID NO: 2206 - protein, 485 aa, synthetic construct
MTKKVAIYTRVSTTNQAEEGFSIDEQIDRLTKYVEAMGWQVSDIYTDAGSSGAKLERPAMQRLINDIENKAFDTVLVYKLDRLSRSVRDTLYLVKDVFTKNKIDFISLNESIDTSSAMGSLFLTILSAINEFERENIKERMTMGKLGRAKSGKSMMWTKTAFGYYHNRKTGILEIVPLQAAIVEQIFTDYLSGISLTKLRDKLNESGHIGKDIPWSYRTLRQTLDNPVYCGYIKFKGSLFEGMHKPIIPYETYLKVQKELEERQQQAYERNNNPRPFQAKYMLSGMARCGYCGAPLKIVLGHKRKDGSRTMKYHCANRFPRKTKGVTVYNDNKKCDSGTYDLSNLENTVIDNLIGFQENNDSLLKIINGNNQPILDTSSFIKQIGRIDKKIQKNSDLYLNDFITMDELKDRTDSLQAEKRLLKAKISENKFNDSTDVFELVKTQLGSIPINELSYDNKKKIVNNLVSKVDVTADNVDIIFKFQLA

SEQ ID NO: 2207 - protein, 469 aa, synthetic construct
MSYTTPVRAAVYLRISEDRSGEQLGVARQREDCLKLCGQRKWVPVEYLDNDVSASTGKRRPAYEQMLADITAGKIAAVVAWDLDRLHRRPIELEAFMSLADEKRLALATVAGDVDLATPQGRLVARLKGSVAAHETEHKKARQRRAARQKAERGLPNWSKAFGYLPGPNGPEPDPRTAPLVKQAYADILAGASLGDVCRQWNDAGALTITGRPWTTTTLSKFLRKPRNAGLRAYKGARYGPVDRDAIVGKAQWSPLVDEATFWAAQAVLDAPGRAPGRKSVRRHLLTGLAGCGKCGNHLAGSYRTDGKVVYVCKACHGVAILADNIEPILYHIVAERLAMPDAVDLLRREIHDAAEAETIRLELETLYGELDRLAVERAEGLLTARQVKISTDIVNAKITKLQARQLDQERLRVFDGIPLGTPRVAGVIAELSPDRFRAVLDVLAEVVVQPVGKSGRIFNPERVRVNWR

SEQ ID NO: 2208 - protein, 452 aa, synthetic construct
MKAAIYIRVSTQEQVENYSIQAQTEKLTALCRSKDWDVYDIFIDGGYSGSNMNRPALNEMLSKLHEIDAVVVYRLDRLSRSQRDTTTLIEEYFLKNNVEFVSLSETLDTSSPFGRAMIGILSVFAQLERETIRDRMVMGKIKRIEAGLPLTTAKGRTFGYDVIDTRLYINEEEAKQLRLIYDIFEEEQSITSLQKRLKKLGFKVRTYNRYNNWLTNDLYCGYVSYKDKVHVKGIHEPIISEEQFYRVQEIFTRMGKSPNTNRDSASLLNNLVVCSKCGLGFVHRSKDTMSRGKKYHYRYYSCKTYKHTHELEKCGNKTWRADKLEELIINRVNSYSYASRNVDKEDELDGLDEKLKIEHARKKRLFDLYINGSYEVSELDSMMDDIDAQINYYESQIEANEELKKNKKIQENLADLATVDFDSLEFREKQLYLKSLISKIYIDGEQVTIEWL

SEQ ID NO: 2209 - protein, 485 aa, synthetic construct
MTKKVAIYTRVSTTNQAEEGFSIDEQIDRLTKYAEAMGWQVSDTYTDAGTSGAKLERPAMQRLINDIENKAFDTVLVYKLDRLSRSVRDTLYLVKDVFTKNKIDFISLNESIDTSSAMGSLFLTILSAINEFERENIKERMAMGKLGRAKSGKSMMWTKTAFGYYHNRKTGILEIVPLQATIVEQIFTDYLSGISLTKLRDKLNESGHIGKDIPWSYRTLRQTLDNPVYCGYIKFKDSLYEGMHKPIIPYETYLKVQKELEERQQQTYERNNNPRPFQAKYMLSGMARCGYCGAPLRIVLGHKRKDGSRTMKYHCANRFPRKTRGITVYNDDKKCDSGTYDLSDLENTVIDNLIGLQENNDSLLKIISGNSQPILDTSSFKEQISQIDKKIQKNSDLYLNDFITMDELKDRTDSLQAEKKLLKAKISENKFNDSTDVFELVKTQLGSIPINELSYDNKKRIVNNLVSKVDVTADNVDIIFKFQLA

SEQ ID NO: 2210 - protein, 452 aa, synthetic construct
MKAAIYIRVSTREQVENYSIQAQTEKLTALCRSKDWDVYDIFIDGGYSGSNMNRPALNEMLSKLHEIDAVVVYRLDRLSRSQRDTITLIEEYFLKNNVEFVSLSETLDTSSPFGRAMIGILSVFAQLERETIRDRMVMGKIKRIEAGLPLTTAKGRTFGYDVIDTKLYINEEEAKQLQLIYDIFEEEQSITSLQKRLKKLGFKVRTYNRYNNWLTNDLYCGYVSYKDKVHVKGIHEPIISEEQFYRVQEIFARMGKNPNMNRDSASLLNNLVVCSKCGLGFVHRRKDAMSRDKKYHYRYYSCKTYKHIHELEKCGNKIWRADKLEELIINRVNSYSLAGRNVDKEDELDSLSEKLKIEHAKKKRLFDLYINGNYEVGELDSMMNDIDAQINYYESQIEANEGLRKNKKIQENLAYLATVDFDSLEFREKQLYLKSLINKIYIDGEQVTIEWL

SEQ ID NO: 2211 - protein, 452 aa, synthetic construct
MKAAIYIRVSTREQVENYSIQAQTEKLTALCRSKDWDVYDIFIDGGYSGSNMNRPALNEMLSKLHEIDAVVVYRLDRLSRSQRDTITLIEEYFLKNNVEFVSLSETLDTSSPFGRAMIGILSVFAQLERETIRDRMVMGKIKRIEAGLPLTTAKGRTFGYDVIDTKLYINEEEARQLQLIYDIFEEERSITFLQKRLKKLGFKVRTYNRYSNWLTNDLYCGYVSYKDKVHVKGIHEPIISEEQFYRVQEIFARMGKNPNMNRDSASLLNNLVVCSKCGLGFVHRRKDIVSRGKKYHYRYYCCKTYKHIHELEKCGNKIWRADKLEELVINRVNDYSFASRNADKEDELDSLNEKLKVEHAKKKRLFDLYISGRYEVSELDSMMNDIDAQINCYESQIEANEELKKNKKIQENLAHLATVDFDSLEFREKQLYLKSLINKIYIDGEQVTIEWL

SEQ ID NO: 2212 - protein, 485 aa, synthetic construct
MTKKVAIYTRVSTTNQAEEGFSIDEQIDRLTKYAEAMGWQVSDTYTDAGISGAKLERPAMQRLINDIENKAFDTVLVYKLDRLSRSVRDTLYLVKDVFTKNKIDFISLNESIDTSSAMGSLFLTILSAINEFERENIRERMSMGKLGRAKSGKSMMWTKTAFGYYHNRKTGILEIVPLQATIVEQIFTDYLSGISLTKLRDKLNESGHTGKDIPWSYRTLRQTLDNPVYCGYIKFKDSLFEGMHKPIIPYETYLKVQKELEERQQQTYERNNNPRPFQAKYMLSGVARCGYCGAPLKIVLGHKRKDGSRTMKYHCANRFPRKTKGVTVYNDNKKCNSGTYDLSNLENTVIDNLIGLQENNDSLLKIINGNNQPILDISSLKEQISQIDKKIQKNSDLYLNDFITMDELKDRTDSLQAEKKLLKAKISENKFNDSTDVFELVKTQLGSIPINELSYDDKKKIVNNLVSKVDVTADNVDIIFKFQLA

SEQ ID NO: 2213 - protein, 485 aa, synthetic construct
MTKKVAIYTRVSTTNQAEEGFSIDEQIDRLTKYAEAMGWQVSDTYTDAGLSGAKLERPAMQRLINDIGNKAFDTVLVYKLDRLSRSVRDTLYLVKDVFTKNKIDFISLNESIDTSSAMGSLFLTILSAINEFERENIKERMTMGKLGRAKSGKSMMWTKTAFGYYHNRKTGILEIVPLQATIVEQIFTDYLSGISLTKLRDKLNESGHIGKDIPWSHRTLRQTLDNPVYCGYIKFKGSLFEGMHRPIIPYETYLKVQKELEERQQQTYERNNNPRPFQAKYMLSGMARCGYCGAPLRIVLGHKRKDGSRTMKYHCANRFPRKTRGITVYNDNKKCDSGTYDLSDLENTVIDNLIGFQENNESLLKIINGNNQPIPDTSSLEEQISQIDKKIQKNSDLYLNDFITMDELKDRTDSLQAEKKLLKAKISENKFNDCTDVFELVKTQLGSIPINELSYENKKKIVNNLVSKVDVTADNVDIIFKFQLA

SEQ ID NO: 2214 - protein, 469 aa, synthetic construct
MSYTTPVRAAVYLRISEDRSGEQLGVARQREDCLELCGQRKWVPVEYLDNDVSASTGKRRPAYEQMLADITAGKIAAVVAWDLDRLHRRPIELEAFMSLADEKRLALATVAGDVDLATPQGRLVARLKGSVAAHETEHKKARQRRAARQKAERGYPNWSKAFGYLPGPDGPEPDPRTAPLVKQAYADILAGASLGDVCRQWNAAGAFTITGRPWTTTTLSKFLRKPRNAGLRAYKGARYGPVDRDAIVGKAQWSPLVDEATFWAAQAVLDAPGRAPGRKSVRRHLLTGLAGCGKCGNHLAGSYRTDGRVVYVCKACHGVAILADNIEPILYRIVAERLAMPDAVDLLRREIHDAAEAETIRLELETLYGELDRLAVERAEGLLTARQVKISTDIVSAKITKLQARQLDQERLRVFDGIPLGTPQVAGKIAELSPDRFRAVLDVLAEVVVQPVGKSGRIFNPERVQVNWR

SEQ ID NO: 2215 - protein, 485 aa, synthetic construct
MTKKVAIYTRVSTTNQAEEGFSIDEQIDRLTKYAEAMGWQVSDTYTDAGSSGAKLERPAMQRLINDIENKAFDTVLVYKLDRLSRSVRDTLYLVKDVFTKNKIDFISLNESIDTSSAMGSLFLTILSAINEFERENIKERMTMGKLGRAKSGKSMMWTKTAFGYYHNRKTGILEIVPLQATIVEQIFTDYLSGISLTKLRDKLNESGHIGKDIPWSYRTLRQTLDNPVYCGYIKFKDSLFEGMHKPIIPYETYLKVQKELEGRQQQTYERNNNPRPFQAKYMLSGMARCGYCGAPLRIVLGHKRKDGSRTMKYHCANRFPRKTKGVTVYNDNKKCDSGTYELSNLENTVIDILTGFQENNDSLLKTINGDNQPILDTSSLKKQISQIDKKIQKNSDLYLNDFITMDELKDRTDSLQAEKKLLKAKISENKFNDSTDVFELVKTQLGSIPINELSYDNKKKIVNNLVSKVDVTADNVDIIFKFQLA

SEQ ID NO: 2216 - protein, 486 aa, synthetic construct
MTKRVAIYTRVSTTNQAEEGFSIDEQIDRLTKYAEAMGWQVSDTYTDAGFSGAKLERPAMQRLVNDIENKAFDTVLVYKLDRLSRSVRDTLYLVKDVFTKNKIDFISLNESIDTSSAMGSLFLTILSAINEFERENIKERMTMGKLGRAKSGKSMMWTKTAFGYYHNRETGILEIVPLQATIVEQIFTDYLSGISLTKLRDKLNESGHIGKDIPWSYRTLRQTLDNPVYCGYIKFKDSLFEGMHKPIIPYETYLKVQKELGERQQQTYERNNNPRPFQAKYMLSGMARCGYCGAPLRIVLGHKRKDGSRTMKYHCANRFPRKTKGVTVYNNNKKCDSGTYDLSNLENTVIDTLIGLQENDDSLLKIINGNNQPILDTSSFKEQISQIDKKIQKNSDLYLNDFITMDELKDRTDSLQAEKKLLKAKISENKFNDNTDVFELVKTQLGSIPINELSYDNKKKIVNNLVSKVDVTADNVDIIFKFQLAQ

SEQ ID NO: 2217 - protein, 452 aa, synthetic construct
MKAAIYIRVSTQEQVGNYSIQAQTEKLIALCRSKDWDVYDIFIDGGYSGSNMNRPALNEMLSKLHEIDAVVVYRLDRLSRSQRDTTTLIEEYFLKNNVEFVSLSETLDTSSPFGRAMIGILSVFAQLERETIRDRMVMGKIKRIEAGLPLTTAKGRTFGYDVIDTKLYINEEEAKQLRLIYDIFEEERSITSLQKRLKKLGFKVRSYNRYNNWLTNDLYCGYVSYKDKVHVKGIHEPIISEEQFYRVQEIFTRMGKNPNMNRDSASLLSNLVVCSKCGLGFVHRSKDTMSRGKKYHYRYYSCKTYKHTHELEKCGNKTWRADKLEELIINRVNNYSFASRNVVKEDELDSLREKLRIEHAKKKRLFDLYINGSYEASELDGMMSDIDAQINYYESQIEANEELKKNKKIQENLADLATVDFDSLEFREKQLYLKSLISKIYIDGEQVTIEWL

SEQ ID NO: 2218 - protein, 469 aa, synthetic construct
MCYTTPVRAAVYLRISEDRSGEQLGVARQREDCLKLCDQRKWVPVEYLDNDVSASTGRRRPAYEQMLADITAGKIAAVVAWDLDRLHRRPIELEAFMSLADEKRLALATVAGDVDLATPQGRLVARLKGSVAAHETEHKKARQRRAARQKAERGHPNWSKAFGYLPGPNGPEPDPRTAPLVKQAYADILAGASLGDVCRQWNGAGAFTITGRPWTATTLSKFLRKPRNAGLRAYKGARYGPVDRDAIVGKAQWSPLVDEATFWAAQAVLDAPGRAPGRKSVRRHLLTGLAGCGKCGNHLAGSYRTDGRVVYVCKACHGVAILADNIEPILYHIVAERLAMPNAVDLLRREIHDAAEAETIRQELEALYDELDRLAVERAEGLLTARQVKISTDIVNAKITKLQACQQDQERLRVLDGIPLGTPQVAGMITELSPNRFRAVLDVLVEVVVQPVGKSGRIFNPERVQVNWR

SEQ ID NO: 2219 - protein, 485 aa, synthetic construct
MTKKVAIYTRVSTTNQAEEGFSIDEQIDRLTKYAEAMGWQVSDTYTDAGFSGAKLERPAMQRLINDIESKAFDTVLVYKLDRLSRSVRDTLYLVKDVFTKNKIDFISLNESIDTSSAMGSLFLTILSAINEFERENIKERMTMGKLGRAKSGKSMMWTKTAFGYYHNRKTGILEIVPLQATIVEQIFTDYLSGISLTKLRDKLNESGHIGKDIPWSYRTLRQTLGNPVYCGYIKFKDSLFEGMHKPIIPYETYLKVQKELEERQQQTYERNNSPRPFQAKYMLSGMARCGYCGAPLRIVLGHKRKDGSRTMKYHCANRFPRKTKGITVYNDNKKCDSGTYDLSDLENTVIDILIGFQENNDSPLKIINGNNQPILDISSIKKQISQIDRKIQKNSDLYLNDFITMDELKARTDSLQAEKKLLKAKIGENKFNDSTDVFELVKTQLGSIPINELSYDNKKKIVNNLVSKVDVTADNVDIIFKFQLA

SEQ ID NO: 2220 - protein, 485 aa, synthetic construct
MTKKVAIYTRVSTTNQAEEGFSIDEQIDRLTKYAEAMGWQVSDTYTDAGISGAKLERPAMQRLISDIENKAFDTVLVYKLDRLSRSVRDTLYLVKDVFTKNKIDFISLNESIDTSSAMGSLFLTILSAINEFERENIKERMAMGKLGRAKSGKSMMWTKTAFGYYHNRKTGILEIVPLQATIVEQIFTDYLSGTSLTKLRDKLNERGHIGKDIPWSYRTLRQTLDNPVYCGYIKFKDSLFEGMHKPIIPYETYLKVQKELEKRQQQTYERNNNPRPFQAKYMLSGMARCGYCGAPLRIVLGHKRKDGSRTMKYHCANRFPRKTKGVTVYNDNKKCDSGTYDLSNLENTVIDNLIGFQVDNESLLKIINGNNRPILDTSSLKEQISQIDKKIQKNSDLYLNDFITMDELKDRTDSLQAKKKLLKANISENKFNDSTDVFELVKAQLGSIPINELSYDNKKKIVNNLVSKVDVTADNVDIIFKFQLA

SEQ ID NO: 2221 - protein, 452 aa, synthetic construct
MKAAIYIRVSTREQVENYSIQAQTEKLTALCRSKDWDVYDIFIDGGYSGSNMNRPALNEMLSKLHEIDAVVVYRLDRLSRSQRDTITLIEEYFLKNDVEFVSLSETLDTSSPFGRAMIGILSVFAQLERETIRDRMVMGKIKRVEAGLPLTTAKGRTFGYDVIDTKLYINEEEAKQLQLIYDIFEEEQSITFLQKRLKKLGFKVRTYSRYNNWLTNDLYCGYVSYKGKVHVKGIHEPIISEEQFYRVQEIFTRMGKNPNMNRDSASLLNNLVVCSKCGLSFVHRRKDTMSRGKKYHYRYYSCKTYKHTHELVKCGNKIWRADKLEELIISRVNNYSLASRNVDKEDELDSLGEKLKIEHAKKKRLFDLYINGSYNVSELDSMMNDIDAQINYYESQIEANEELKKDKKVQENLAGLATVDFDSLEFREKQLYLKSLINKIYIDGEQVTIEWL

SEQ ID NO: 2222 - protein, 452 aa, synthetic construct
MKAAIYIRVSTREQVENYSIQAQTEKLTALCRSKDWDVYDIFIDGGYSGSNMNRPALNEMLSRLHEIDAVVVYRLDRLSRSQRDTITLIEEYFLKNNVEFVSLSETLDTSSPFGRAMIGILSVFAQLERETIRDRMVMGKIKRIEAGLPLTTAKGRTFGYDVIDTKLYINEEEAKQLQLIYDIFEEEQSITFLQKRLKKLGFKVRTYSCYNNWLTNDLYCGYVSYKDKVHVKGIHEPIISEEQFYRVQEIFTRMGKNPNMNRGSASLLNNLVVCSKCGLGFVHRRKDTMSRGKKYHYRYYSCKTYKHTHELEKCGNKIWRADKLEELIINRVNNYSLAGRNVDKEDELDSLNEKLEIEHAKRKRLFDLYMNGSYEVSELDSMMNDIDAQINYYESQIEENEELKKNKKIQENLAELATVDFDSLEFREKQLYLKSLISKIYIDGEQVTIEWL

SEQ ID NO: 2223 - protein, 485 aa, synthetic construct
MTKKVAIYTRVSTTNQAEEGFSIDEQIDRLTKYAEAMGWQVSDTYTDAGFSGAKLERPAMQRLINDIENKAFDTVLVYKLDRLSRSVRDTLYLVKDVFTKNKIDFISLNESIDTSSAMGSLFLTILSAINEFERENIKERMTMGKLGRAKSGKSMMWTKTAFGYYHNRKTGILEIVPQQATIVEQIFTDYLSGISLTKLRDKLNESGHIGKDIPWSYRTLRQTLDNPVYCGYIKFKDSLFEGMHKPIIPYETYLKVQKELEERQQQTYERNNNPRPFQAKYMLSGKARCGYCGVPLRIVLGHKRKDGSRTMKYHCANRFPRKTKGVTVYNDNKKCDSGTYDLRSLEDTVIDILIGFQENNDSLLKIINGNNQPILDTSSFKEQISQIDKKIQKNSDLYLNDFITMDELKDRTDSLQAEKKLLKAKISENKFNDSTDVFELVKTQLGSIPINELSYDNKRKIVNNLVSKVDVTADNVDIIFKFQLA

SEQ ID NO: 2224 - protein, 452 aa, synthetic construct
MKAAIYIRVSTREQVENYSIQAQTEKLTALCRSKDWDVYDIFIDGGYSGSNMNRPALNEMLSKLHEIDAVVVYRLDRLSRSQRDTITLIEEYFLKNNVEFVSLSETLDTSSPFGRAMIGILSVFAQLERETIRDRMVMGKIKRIEAGLPLTTAKGRTFGYDVIDTKLYINEEEAKQLQLIYDIFEEEQSITFLQKRLKELGSKVRTYNCYNNWLTNDLYCGYVSYKDKVHVKGIHEPIISEEQFYRVQEIFTRMGKNPNVNRDSASLLNNLVVCSKCGLGFVHRRKDTVSRGKKYRYRYYSCKTYKHIHELEKCGNKIWRADKLEELIINRVNNYSFASRNVDKEDELDSLNEKLKIEHAKKKRLFDLYINGSYEVSELDSMMNDIDAQINYYESQIEANEELRKNKKIQENLAYLATVDFDSLEFREKQLYLKSLINKIYIDGEQVTIEWR

SEQ ID NO: 2225 - protein, 485 aa, synthetic construct
MTKKVAIYTRVSTTNQAEEGFSIDEQVDRLTKYAEAMGWQVSDTYTDAGLSGAKLERPAMQRLINDIENKAFDTVLVYKLDRLSRSVRDTLYLVKDVFTKNKIDFISLNESIDTSSAMGSLFLTILSAINEFERENIKERMAMGKLGRAKSGKSMMWTKTAFGYYHNRKTGILEIVPLQAAIVEQIFTDYLSGISLTKLRDKLNESGHIGKDIPWSYRTLRQTLDNPVYCGYIKFKDSLFEGMHKPIIPYETYLKVQKELEERQQQTYERNNNPRPFQAKYMLSGMARCGYCGAPLRIVLGHKRKDGSRTMRYHCANRFPRKTKGVTVYNDNKKCDSGTYDLSSLENTVIDNLIGLQENNDSLLKIINGNNQPILDTSSFRKRISQIDKKIQKNSDLYLNDFITMDELKNRTDSLQAEKRLLRAKISENKFNDSTDVFELVKTQLGSIPINELSYDNKKKIVNNLVSKVDVTADNVDIIFKFQLT

SEQ ID NO: 2226 - protein, 469 aa, synthetic construct
MSYTTPVRAAVYLRISEDRSGEQLGVARQREDCLKLCGQRKWVPVEYLDNDVSASTGKRRPAYEQMLADITAGKIAAVVAWDLDRLHRRPVELEAFMSLADEKRLALATVAGDVDLATPQGRLVARLKGCVAAHETEHKKARQRRAARQKAERGLPNWSKAFGYLPGPNGPEPDPQTAPLVKQAYADILAGASLGDVCRQWNDAGASTITGRPWTTTALSKFLRKPRNAGLRAYKGARYGPVDRDAIVGKAQWSPLVDEATFWAAQAVLDAPGRAPGRKSVRRHLLTGLAGCGKCGNHLAGSCRTDGRVVYVCKACHGVAILADNIEPILYHIVAERLAMPDAVGLMRREIHDAAEAETIRLELETLYGELDRLAVERAEGLLTARQVKISTDIVNAKITKLQAYQLDQERLRVFDGIPLGTPRVAGMIAELSPDRFRAVLDVLAEVVVQPVGKSGRIFNPERVQVNWR

SEQ ID NO: 2227 - protein, 469 aa, synthetic construct
MCYTTPVRAAVYLRISEDRSGEQLGVARQREDCLKLCDQRKWVPVEYLDNDVSASTGKRRPAYEQMLADITAGKIAAVVAWDLDRLHRRPIELEAFMSLADEKRLALATVAGDVDLATPQGRLVARLKGSVAAHETEHKRARQRRAARQKAERGHPNWSKAFGYLPSPNGPEPDPRTAPLVKQAYADILAGASLGDVCRQWNGAGALTITGRPWTTTALSKFLRKPRNAGLRAYKGARYGPVDRDAIVGIAQWSPLVDEATFWAAQAVLDAPGRAPGRKSVRRHLLTGLAGCGKCGNRLAGSYRTDGRVVYVCKACHGVAILADNIEPILYHIVAERLAMPDAVDLLRREIHDAAEAETIRLELETLYGELDRLAVERAEGLLTARQVKISTDIVNAKIAELQARQLDQERLRVFDGIPLGTPQVAGMIAELSPDRFRAVLVVLAEVVVQPVGKGGRIFNPERVQVSWR

SEQ ID NO: 2228 - protein, 452 aa, synthetic construct
MKAAIYIRVSTREQVENYSIQAQTEKLTALCRSKDWDVYDIFVDGGYSGSNMNRPALNEMLSKLHEIDAVVVYRLDRLSRSQRDTITLIEEYFLKNNVEFVSLSETLDTSSPFGRAMIGILSVFAQLERETIRDRMVMGKIKRIEAGLPLTTAKGRTFGYDVIDTKLYINEEEAKQLQLIYDIFEEEQSITSLQKRLKKLGFKVRTYNRYNSWLTNDLYCGYVSYKDKVHVKGIHEPIISEEQFYRVQEIFTRMGKNPNMNRDSASLLNNLVVCSKCGLGFVHRRKDTVNRGKKYHYRYYSCKTYKHTHELEKCGNKIWRADKLEELIINRVNNYSLASRNVDKEDELDSLSEKLKIEHAKKKRLFDLYIDGSYEVSELDSMMDAIDAQINYYESQIEANEGLKRNKKIQENLANLATVDYDSLEFREKQLYLKSLINKIYIDGEQVTIEWL

SEQ ID NO: 2229 - protein, 452 aa, synthetic construct
MKAAIYIRVSTQEQVGNYSIQAQTEKLTALCRSKGWDVYDIFIDGGYSGSNMNRPALNEMLSKLHEIDAVVVYRLDRLSRSQRDTTTLIEEYFLKNNVEFVSLSETLDTSSPFGRAMIGILSVFAQLERETIRDRMVMGKIKRIEAGLPLTTAKGRTFGYDVIDTKLYINEEEAKQLQLIYDIFEEEQSITSLQKRLKKLGFKVRTYNRYNNWLTNDLYCGYVSYKDKVHVKGIHEPIISEEQFYRVQEIFTRMGKNPNMNRDSASLLNNLVVCSKCGLGFVHRSKDTMSRGKKYHYRYYSCKTYKHTHELEKCGNKTWRADKLEELIINRVNNYSFASRSVDKEDELDSLNEKLKIEHAKKKRLFDLYINGSYEVSELDSMMSDIDAQINYYESQIGAYEELKKTKKIQENLADLATVDFDSLEFREKQLYLKSLISKIYIDGEQVTIEWL

SEQ ID NO: 2230 - protein, 452 aa, synthetic construct
MKAAIYIRVSTQEQVENYSIQAQTERLTALCRSKDWDVYDIFIDGGYSGSNMNRPALNEMLSKLHEIDAVVVYRLDRLSRSQRDTTTLIEEYFLKNNVEFVSLSETLDTSSPFGRAMIGILSVFAQLERETIRDRMVMGKIKRIEAGLPLTTAKGRTFGYDVIDTKLYINEEEAKQLQLIYDIFEEEQSITFLQKRLKKLGFKVRTYNRYNSWLTNDLYCGYVSYKDKVHVKGIHEPIISEEQFYRVQEIFTRMGKNPNMNRDSASLLNNLVVCSKCGQGFVHRRKDTMSGGKKYHYRYYSCKTYKHTHELEKCGNKIWRADKLEELIIDRVNNHSFASRNVDKEGELDSLNEKLKIERARKKRLFDLYINGSYEVSELDSMMNDIDAQINYYESQIEANEELKKNKKIQENLAELATVDFDSLEFREKQLYLKSLINKIYIDGEQVTIEWL

SEQ ID NO: 2231 - protein, 485 aa, synthetic construct
MTKKVAIYTRVSTTNQAEEGFSIDEQIDRLTKYAEAMGWQVSDTYTDAGLSGAKLERPAMQRLINDIENKAFDTVLVYKLDRLSRSVRDTLYLVKDVFTKNKIDFISLNESIDTSSAMGSLFLTILSAINEFERENIKERMTMGKLGRAKSGKSMMWTKTAFGYYHNRKTGILEIVPLQATIVEQIFTDYLSGISLTKLRDKLNESGHIGKDIPWSYRTLRQTLDNPVYCGYIKFKDSLFEGMHKPIIPYETYLKVQKELEERQQQTYERNNNPRPFQAKYMLSGMARCGYCGAPLKIVLGHKRKDGSRTMKYHCANRFPRKTKGVTVYNDNKKCDSGTYDLSNLENTVIDNLIGFQESNDSLLKIIIGNNQPILDTSSFEKRISQIDKKIQKNSDLYLNDFITMDELKDRTDSLQAEKKLLEAKISEDKFNDSTDVFELVKTQLGSIPINELSYDNKKKIVNNLVSKVDVTADSVDIVFKFQLA

SEQ ID NO: 2232 - protein, 452 aa, synthetic construct
MKAAIYIRVSTREQVENYSIQAQTEKLTALCRSKGWDVYDIFIDGGYSGSNMNRPALNEMLSRLHEIDAVVVYRLDRLSRSQRDTITLIEEYFLKNNVEFVSLSETLDTSSPFGRAMIGILSVFAQLERETIRDRMVMGKIKRIEAGLPLTTAKGRTFGYDVIDTKLYINEEEAKQLQLIYDIFEEEQSITFLQKRLKELGFKVRTYNRYNNWLTNDLYCGYVSYKDKVHVKGIHEPIISEEQFYRVQEIFTRMGKNPNMNRDSASLLNNLVVCSKCGLGFVHRRKDAMSRDKKYHYRYYSCKTYKHIHELEKCGNKIWRADKLEELIINRVSNYSVASRNVDKEDELNSLNEKLKIEHAKRKRLFDLYITGSYEVSELDSMMNDIDAQINYYESQIEANEELKKNKKIQENLADLATVDFDGLEFREKQLYLKSLINKIYIDGEQVTIEWL

SEQ ID NO: 2233 - protein, 469 aa, synthetic construct
MCYTTPVRAAVYLRISEDRSGEQLGVARQREDCLKLCGQRKWEPVEYLDNDVSASTGKRRPAYEQMLADITAGRIAAVVAWDLDRLHRRPIELEAFMSLADEKRLALATVAGDVDLATPQGRLVARLKGSVAAHETEHKKVRQRRAARQKAERGHPNWSKAFGYLPGPNGPEPDPRTAPLVKQAYADILAGASLGDVCRQWNDAGAFTITGRPWTTTTLSKFLRKPRNAGLRAYKGARYGPVDRDAIVGKAQWSPLVDEATFWAAQAVLDAPGRAPGRKSVRRHLLTGLAGCGKCGNHLAGSYRTDGRVVYVCKACHGVVILADNIEPVLYHIVAERLAMPDAVDLLRREVHDAAEAETIRLELEALYGELDRLAVERAEGLLTARQVKISTDIVNAKITKLQARQQDQERLRVLGGIPLGTPQVAGMIAELSPDRFRAVLDVLAEVVVQPVGKGGRIFNPERVQVNWR

SEQ ID NO: 2234 - protein, 485 aa, synthetic construct
MTKKVAIYTRVSTTNQAEEGFSIDEQIDRLTKYAEAMGWQVSDTYTDAGLSGAKLERPAMQRLINDIENKAFDTVLVYKLDRLSRSVRDTLHLVKDVFTNNKIDFISLNESIDTSSAMGSLFLTILSAINEFERENIKERMTMGKLGRAKSGKSMMWTKTAFGYYHNRKTGILEVVPLQATIVEQIFTDYLSGISLTKLRDKLNESGHIGKDIPWSYRTLRQTLDNPVYCGYIKFKGSLFEGMHKPIIPYETYLKVQKELEERQQQTYERNNNPRPFQAKYMLSGMARCGYCGAPLRIVLGHKRKDGSRTMKYHCANRLPRKTKGVTVYNDNKKCDSGTYDLSNLENTVIDNLIGFQENDDSLLKIINGNNQPILDTSSFKKQISQIDKKIQKNSDLYLNDFITMDELKDRTDSLQAEKKLLKAKISENKFNDSTDVFELVRTQLGSIPINELSYDNKKKIVNNLVSKVDVTADSVDIIFKFQLA

SEQ ID NO: 2235 - protein, 485 aa, synthetic construct
MTKKVAIYTRVSTTNQAEEGFSIDEQIDRLTKYAEAMGWQVSDTYTDAGFSGAKLERPAMQRLINDIENKAFDTVLVYKLDRLSRSVRDTLYLVKDVFTKNKIDFISLNESIDTSSAMGSLFLTILSAINEFERENIKERMTMGKLGRAKSGKSMMWTKTAFGYYHNRKTGILEIVPLQATIVEQIFTDYLSGISLTKLRDKLNESGHIGKDIPWSYRTLRQTLDNPVYCGYIKFKDSLFEGMHKPIIPYETYLKVQKELEERQQQAYERNNNPRPFQAKYMLSGMARCGYCGAPLKIVLGHKRKDGSRTMKYHCANRFPRKTKGVTVYNDNKKCDSGTYDLNNLEDTVIDSLIGFQEDNESLLKIINSNNQPTLDTSSIKEQISQIDKKIQKNSDLYLNDFITMDELKDRTDSLQAEKRLLEAKISENKFNDSADVFELVKTQLGSIPISELSYDNKKKIVNNLVSKVDVTADNVDIIFKFQLA

SEQ ID NO: 2236 - protein, 452 aa, synthetic construct
MKAAIYIRVSTREQVENYSIQAQTEKLTALCRSKDWDVYDIFIDGGYSGSNMNRPALNEMLSKLHEIDAVVVYRLDRLSRSQRDTVTLIEEYFLKNNVEFVSLSETLDTSSPFGRAMIGILSVFAQLERETIRDRMVMGKIKRIEAGLPLTTAKGRTFGYDVIDTKLYINEEEAKQLQLIYDIFEEERSITSLQRRLKKLGFKVHTYNRYNNWLTNDLYCGYVSYKDKVHVKGIHEPIISEEQFYRVQGIFTRMGKNPNMNRGSVSLLNNLVVCGKCGLGFVHRRKDAMSRDKKYHYRYYSCKTYKHIHELEKCGNKIWRADKLEELIIDRVNNYSIASRNADKEDELDSLNEKLKIEHAKKKRLFELYINGSYEVSELDSMMNDIDAQINYYESQIEANKELKKSKRIQENLADLATVDFDSLEFREKQLYLKSLINKIYIDGEQVTIDWL

SEQ ID NO: 2237 - protein, 469 aa, synthetic construct
MSYTTPVRAAVYLRISEDRSGEQLGVARQREDCLELCGQRKWVPVEYLDNDVSASTGKRRPAYEQMLADITAGKIAAVVAWDLDRLHRRPIELEAFMSLADEKRLALATVAGDVDLATPQGRLVARLKGSVAAHETEHKKARQRRAARQKAERGYPNWSKAFGYLPGPNGPEPDPRTAPLVKQAYADILAGASLGDVCRQWNDAGAFTITGRPWTTTTLSKFLRKPRNAGLRAYKGARYGPVDRNAIVGKAQWSPLVDEATFWAAQAVLDAPGRAPGRKSVRRHLLTGLAGCGKCGNHLAGSYRTDGKVVYVCKACHGVAILADNIEPILYHIVAERLAMPDAVDLLRREIHDAAEAETIRLELETLYSELDHLAVERAEGLLTARQVKISTDIVNAKITKLQAYQLDQERLRVLDGIPLGTPQVAGMIAELSPDRFRAVLDVLAEVVVQPVGKSGRVFNPERVQVNWR

SEQ ID NO: 2238 - protein, 485 aa, synthetic construct
MTKKVAIYTRVSTTNQAEEGFSIDEQIDRLTKYAEAMGWQVSDTYTDAGLSGAKLERPAMQRLINDIENKAFDTVLVYKLDRLSRSVRDTLYLVKDVFTKNKIDFISLNESIDTSSAMGSLFLTILSAINEFERENIKERMTMGKLGRAKSGKSMMWTKTAFGYHHNRKTGILEIVPLQATIVEQIFTDYLSGISLTKLRDKLNESGHIGKDIPWSYRTLRQTLDNPVYCGYIKFKDSLFGGMHKPIIPYETYLKVQKELEERQQRAYERNNNPRPFQAKYMLSGMARCGYCGAPLRIVLGHRRKDGSRTMKYHCTNRFPRKTKGVTVYNDNKKCDSGTYDLCNLENTVIDNLIGLQENNDSLLKIINGNNQPILDTSSFKEQISQIDKKIQKNSDLYLNDFITMDELKDRTDRLQAEKKLLKAKISENKFNDSTDVFELVKTQLGSIPINELSYDNKKKIVNNLVSRVDVTAENVDIIFKFQLA

SEQ ID NO: 2239 - protein, 452 aa, synthetic construct
MKAAIYIRVSTREQVENYSIQAQTEKLTALCRSKDWDVYDIFIDGGYSGSNMNRPALNEMLSKLHEIDAVVVYRLDRLSRSQRDTITLIEEYFLKNSVEFVSLSETLDTSSPFGRAMIGILSVFAQLERETIRDRMVMGKIKRIEAGLPLTTAKGRTFGYDVVDTKLYINEEEAKQLQLIYDIFEEEQSITSLQKRLKKLGFKVRTYNRYNSWLTNDLYCGYVSYKDKVHVKGIHEPIISEEQFYRVQEIFTRMGKNPNINRDSASLLNNLVVCSKCGLGFVHRRKDTMSRGKKYHYRYYSCKTYKHTHELEKCGNKIWRADKLEELIINRVNNYSIASRNVDKEDELGSLNERLKIEHANKKRLFDLYINGSYEVSELDSMMNDIDAQINYYESQIEANEELRKNKKIQENLANLATVDYDSLEFREKQLYLKSLINKIYIDGEQVTIEWL

SEQ ID NO: 2240 - protein, 452 aa, synthetic construct
MKAAIYIRVSTQEQVENYSIQAQTEKLTALCRSKDWDVYDIFIDGGYSGSNMNRPALNEMLSKLHEIDAVVVYRLDRLSRSQRDTTTLIEEYFLKNNVEFVSLSETLDTSSPFGRAMIGILSVFAQLERETIRDRMVMGKIKRIEAGLPLTTAKGRTFGYDVIDTKLYINEEEAKQLQLIYDIFEEEQSITFLQKRLKELGFKVRSYNRYNNWLTNDLYCGYVSYKDEVHVKGIHEPIISEEQFYRVQEIFTRMGKNPNMNRDSASLLNNLVVCSKCGLSFVHRSKDTMSRGKKYHYRYYSCKTYKHTHELEKCGNKTWRADKLEELVINRVNNYSSASHSVDKEDELDGLNEKLKIEHAKRKRLFDLYVNGSYEVSELDSMMNDIDAQINYYESQIKANEELKKNRKIQENLADLATGDFDSLEFREKQLYLKSLINKIYIDGEQVTIEWL

SEQ ID NO: 2241 - protein, 485 aa, synthetic construct
MTKKVAIYTRVSTTNQAEEGFSIDEQIDRLTKYAEAMGWQVSDTYTDAGFSGARLERPAMQRLINDIKNKAFDTVLVYKLDRLSRSVRDTLYLVKDVFAKNRIDFISLNECIDTSSAMGSLFLTILSAINEFERENIKERMTMGKLGRAKSGKSMMWAKTAFGYYHNRKTGILEIVPLQATIVEQIFTDYLSGISLTKLRDKLNESGHIGKDIPWSYRTLRQTLDNPVYCGYIKFKDSLFEGMHKPIIPYETYLKVQKELEERQQQTYERNNNPRPFQAKYMLSGMARCGYCGAPLRIVLGHKRKDGSRTMKYHCANRFPRKTKGVTVYNDNKKCDSGTYDLSNLENTVIDNLVGFQENDDGLLKIINGNNRPTLDTSSFKKQISQIDKKIRKNSDLYLNDFITMDELKDRTDSLQAEKKLLIAKISENKFNDSTDVSELVKTQLGSIPINELSYDDKKKIVNNLVSRVDVTADNVDIIFKFQPA

SEQ ID NO: 2242 - protein, 485 aa, synthetic construct
MTKKVAIYTRVSTTNQAEEGFSIDEQTDRLTKYAEAMGWQVSDTYTDAGFSGAKLERPAMQRLISDIENRAFDTVLVYKLDRLSRSVRDTLHLVKDVFTKNKIDFISLSESIDTSSAMGSLFLTILSAINEFERENIKERMTMGKLGRAKSGKSMMWTKTAFGYHHNRKTGILEIVPLQATIVEQIFTDYLSGISLTKLRDKLNESGHIGKDIPWSYRTLRQTLDNPVYCGYIKFKDSLFEGMHKPIIPYETYLKVQKELEERQQQTYERNNNPRPFQAKYMLSGMARCGYCGAPLRIVLGHKRKDGSRTVKYRCANRFPRKTRGVTVYNDNKKCDSGTYDLSNLESTVIDNLIGFQENNDSLLKIINGNNQPILDTSSFKRQISQIDKKIQKNSDLYLNDFITMDELKDRTDSLQAEKKLLKAKISENKFNDSADVFERVKTQLGSIPINELSYDNKKKIVNNLVSKVDVTADNVDIIFKFQLA

SEQ ID NO: 2243 - protein, 452 aa, synthetic construct
MKAAIYIRVSTREQVENYSIQAQTEKLTALCRSKDWGVYDIFIDGGYSGSNMNRPALNEMLSKLHEIDAVVVYRLDRLSRSQRDTITLIEEYFLKNDVEFVSLSETLDTSSPFGRAMIGILSVFAQLERETIRDRMVMGKIKRVEAGLPLTTAKGRTFGYDVIDTRLYINEEEAKQLQLIYDIFEEEQSITFLQKRLKKLGFKVRTYNCYNNWLTNDLYCGYVSYRDKVHVKGIHEPIISEEQFYRVQEIFARMGKNPNMNRGSASLLNNLVVCSKCGLGFVHRRKDTTSRGKKYHYRYYSCKTYKHTHELEKCGNKIWRADKLEELIINRVNNYSFANRDVNKEDELDSLNEKLKIEHAKRKRLFDLYINGSYAVSELDSMMNDMDAQIDYYESQIEAIVELKKDKKIQENLADLATVDYDSLGFREKQRYLKSLINKIYIDGEQVTIEWL

SEQ ID NO: 2244 - protein, 469 aa, synthetic construct
MSYTTPMRAAVYLRISEDRSGEQLGVARQREDCLKLCGQRKWVPVEYLDNDVSASTGKRRPAYEQMLADITAGKIAAVVAWDLDRLHRRPIELEAFMSLADEKRLALATVAGDVDLATPQGRLVARLKGCVAAHETEHKKARQRRAARQKAERGLPNWSKAFGYLPGPNGPEPDPRTAPLVKQAYADILAGASLGDVCRRWNGAGASTITGRPWTTTTLSKFLRKPRNAGLRAYKGARYGPVDRDAIVGKAQWSPLVDEATFWAAQAVLDAPGRAPGRKSVRRHLLTGLAGCGKCGNHLAGSYRTDGRVVYVCKACHGVAILADNIEPILHRIVVERLAMPDAADLLRREIHDAAEAETIRLELETLYGELDRLAVERAEGLLTARQVKISTDIVNAKIGKLLARQLDQERLRVFDGIPLGTPQVAGMIAELSPDRFRAVLDVLAEVVVQPAGKSGRIFNPERVQVNWR

SEQ ID NO: 2245 - protein, 469 aa, synthetic construct
MSYTTPVRAAVYLRISEDRSGEQLGVARQREDCLELCGQRKWVPVEYLDNDVSASTGKRRPAYEQMLADITAGKIAAVVAWDLDRLHRRPIELEAFMSLADEKHLALATVAGDVDLATPQGRLVARLKGCVAAHETEHKKARQRRAARQKAERGHPNWSKAFGYLPGPNGPEPDPRTAPLVKQAYADILAGASLGDVCRQWNDAGAFTITGRPWTTTTLSKFLRKPRNAGLRAYRGARYGPVDRDAIVGKAQWSPLVDEATFWAAQAVLDAPGRAPGRKSVRRHLLTGLAGCGKCGNHLAGSYRTDGRVVYVCKACHGVAILAGNIEPMLYHIVAERLAMPDAVDLLRRETHDTAEAETIRLELETLYGELDRLAVERAEGLLTARQVKICTDIVNAKITKLQACQLDQERLRVFDGIPLGTPQVAGMIAELSPDRFRAVLDVLAEVVVQPVGKGSGIFNPERVQVNWR

SEQ ID NO: 2246 - protein, 485 aa, synthetic construct; identical to SEQ ID NO: 1544

SEQ ID NO: 2247 - protein, 485 aa, synthetic construct
MTKKVAIYTRVSTTNQAEEGFSIDEQIDRLTKYAEAMGWQVSDTYTDAGYSGAKLERPAMRRLINDIENKAFDTVLVYKLDRLSRSVRDTLYLVKDVFTKNKIDFISLNESIDTSSAMGSLFLTILSAINEFERENIKERMTMGKLGRAKSGKSMMWTKTAFGYYHNRKTGILEIVPLQATIVEQIFTDYLSGISLTKLRDKLNESGHIGKDIPWSYRTLRQTLDNPVYCGYIKFKDSLFEGMHKPIIPYETYLKVQKELGERQQQTYERNNNPRPFQAKYMLSGMARCGYCGAPLRIVLGHKRKDGSRTMKYHCANRFPRRTKGVTVYNDNKKCDSGTYDLSNLENTVIDNLIGFQENNDSLLKIINGNNQPILDTSSFKKQISQIDKKIQKNSDLYLNDFITMDELKDRTDSLQAEKKLLKAKISENKFNDSTDVFELVKTQLGSIPINELSYDDKKKIVNNLVSKVDVTADNVDIIFKFQLT

SEQ ID NO: 2248 - protein, 469 aa, synthetic construct
MSYTTPVRAAVYLRISEDRSGEQLGVARQREDCLKLCDQRKWMPVEYLDNDVSASTGKRRPAYEQMLADISAGKIAAVVAWDLDRLHRRPIELEAFMCLADEKRLALATVAGDVDLATPQGRLVARLKGSVAAHETEHKKARQRRAARQKAERGHPNWSKAFGYLPGPNGPEPDPRTAPLVRQAYADILAGASLGDVCRRWNDAGALTITGRPWTTTTLSKFLRKPRNAGLRAYRGARYGPVDRDAIVGKAQWSPLVDEATFWAAQAVLDAPGRAPGKKSVRRHLLTGLAGCGKCGNHLAGSYRTDGRVVYVCKACHGVAILADNIEPILYHIVAERLAMPDAVDLLRREIHDAAEAETIRLELETLYGELDRLAVERAEGLLTARQVKISTDIVNAKITKLQARQLDQERLRVLDGVPLGTPQVAGMIAELSPDRFRAVLDVLAEVVVQPVGKGGRIFNPERVQVNWR

SEQ ID NO: 2249 - protein, 452 aa, synthetic construct
MKAAIYIRVSTREQVENYSIQAQTEKLTALCRSKDWDVYDIFIDGGYSGSNMNRPALNEMLSKLYEIDAVVVYRLDRLSRSQRDTITLIEEYFLKNNVEFVSLSETLDTSSPFGRAMIGILSVFAQLERETIRDRMVMGKIKRIEAGLPLTTAKGRTFGYDVIDTKLYINEEEARQLRLVYDIFEEEQSITFLQKRLKKLGFKVHTYNRYNNWLTNDLYCGYVSYKDKVHVKGIHEPIISEEQFYRVQEIFTRMGKNPNMNRDSASLLNNLVVCSKCGLGFVHRRKDTMSRGKKYHYRYYSCKTYKHTHELEKCGNKIWRADKLEELIINRVNNYSFASRNVDKEGELDSLNEKLRIEHAKKKRLFDLYINGSYEVSELDSIMNDIDAQINYYESQIETNEELKKNKKIQENLAKLATVDFDSLEFREKQLYLKSLINKIYIDGEQVTIEWL

SEQ ID NO: 2250 - protein, 485 aa, synthetic construct
MTKKVAIYTRVSTTNQAEEGFSIDEQIDRLTKYAEAMGWQVSDTYTDAGFSGAKLERPAMQRLINDIENKAFDTVLVYKLDRLSRSVRDTLYLVKEVFTKNKIDFISLNESIDTSSAMGSLFLTILSAINEFERENIKERMTMGKLGRAKSGKSMMWTKTAFGYYHNRKTGVLEVVPLQATIVEQIFTDYLSGISLTKLRDKLNESGHIGKDIPWSYRTLRQTLDNPVYCGYIKFKDSLFEGMHKPIIPYETYLKVQKELEERQQRAYERNNNPRPFQAKYMLSGMARCGYCGAPLKIVLGHKRKDGSRTMKYHCANRFPRKTRGITVYNDNKKCDSGTYDLSILENTVIDNLIGFQENNDSLLELINGNNQPILDTSSLKEQISQIDKKIQKNSDLYLNDFITLDELKDRTDSLQAEKKLLKAKISENKSNDSIGVFELVKTQLGSIPINELSYDNKKKIVNNLVSKVDVTANNVDIIFKFQLA

SEQ ID NO: 2251 - protein, 452 aa, synthetic construct
MKAAIYIRVSTREQVENYSIQAQTEKLTALCRSKDWDVYDIFIDGGYSGSNMNRPALNEMLSKLHEIDAVVVYRLDRLSRSQRDTITLIEEYFLKNNVEFVSLSETLDTSSPFGRAMIGILSVFAQLERETIRDRMVMGKIKRIEAGLPLTTAKGRTFGYDVIDTKLYINEEEAKQLRLVYDIFEEEQSITFLQKRLKKLGFKVRTYSCYNSWLTNDLYCGYVSYKDKVHVKGIHEPIICEEQFRRVQEIFTRSGKNPNMNRDSASLLNNLVVCSKCGLGFVHRRKDTMSRGKKYHYRYYSCKTYKHIHELEKCGNKIWRADKLEELIINRVNNYSFASRNADKEDELDGLNEKLKIERAKRKRLFDLYINGSYEVNELDSMMNDIDAQINYYESQIEANEELKRNKKIQENLANLATVDYDSLEFREKQLYLKSLINKIYIDGDQVTIEWL

SEQ ID NO: 2252 - protein, 452 aa, synthetic construct
MKAAIYIRVSTREQVENYSIQAQTEKLTALCRSKDWDVYDIFIDGGYSGSSMNRPALNEMLSKLHEIDAVVVYRLDRLSRSQRDTITLIEEYFLKNNVEFVSLSETLDTSSPFGRAMIGILSVFAQLERETIRDRMVMGKIKRIEAGLPLTTAKGRTFGYDVIDTKLYINKEEAKQLRLIYDIFEEEQSITLLQKRLKKLGFKVRTYNRYNSWLTNDLYCGYVSYKDKVHVKGIHEPIISEEQFYRVQEIFARMGRNPNMNRDSASLLNNLVVCSKCGLGFVHRRKDTTSRGKKYHYRYYSCKTYKHIHELEKCGNKIWRADKLEELIINRVNNYSFASRNVDKEDELDSLYEKLKIEHAKKKRLFDLYINGSYEVSELDSMMNDIDAQTNYYESQIEANEELRKNKKIQENLADLATVDFDSLEFREKQLYLKSLINKIYIDGEQVTIEWL

SEQ ID NO: 2253 - protein, 485 aa, synthetic construct
MTKKVAIYTRVSTTNQAEEGFSIDEQIDRLTKYAEAMGWQVSDTYTDAGFSGAKLERPAMQRLINGIENKAFDTVLVYKLDRLSRSVRDTLYLVKDVFTKNKIDFISLNESIDTSSAMGSLFLTILSAINEFERENIKERMTMGKLGRAKSGKSMMWTKTAFGYYHNRKTGILEIAPLQATIVEQIFTDYLSGISLTKLRDKLNESGHIGKDIPWSYRTLRQTLDNPVYCGYIKFKDSLFEGMHKPIIPYETYLKVQKELKERQQQTYERNNNPRPFQAKYMLSGMARCGYCGAPLRIVLGHKRKDGSRTMKYHCANRFPRKTKGVTVYNDDKKCDSGTYDLSNLENTVIDNLIGFQENNGSLLKAINGNDQLILDTSSFKKQISQIDEKIQKNSDLYLNDFITMDELKERTDSLQAEKKLLKAKISENKFNDSTDVFELVKTQLGSIPINELSYDNKKKIVNNLVSKVDVTADNVDIIFKFQVA

SEQ ID NO: 2254 - protein, 485 aa, synthetic construct
MTKKVAIYTRVSTTNQAEEGFSIDEQTDRLTKYAEAMGWQVSDTYTDAGFSGAKLERPAMQRLINDIEDKAFDTVLVYKLDRLSRSVRDTLYLVKDVFTKNKIDFISLNESIDTSSAMGSLFLTILSAINEFERENIKERMAMGKLGRAKSGKSMMWTKTAFGYYHNRKTGILEIVPLQATIVEQIFTDYLSGISLTKLRDKLNEGGHIGKNIPWSYRTLRQTLDNPVYCGYIKFKDSLFEGMHKPIIPYETYLRVQKELEERQQQTYERNNNPRPFQAKYMLSGMARCGYCGAPLRIVLGRRRKDGSRTMKYHCANRFPRKTKGVTVYNDNKKCDSGTYDLSNLENTVIDNLISFQGNDDSLLKVINGNDQPILDTSSFKKQISQIDKKIRKNSDLYLNDFITMDELKDRTDSLQAEKKLLKAKISENKFNDSTDVFELVKTQLGSIPINELSYDDRKKIVNNLVSKVDVTADNVDIIFKFQLA

SEQ ID NO: 2255 - protein, 485 aa, synthetic construct
MTKKVAIYTRVSTTNQAEEGFSIVEQIDRLTKYAEAMGWQVSDTYTDAGFSGAKLERPAMQRLINDIENKAFDAVLVYKLDRLSRSVRDTLHLVKEVFTKNKIDFISLNESIDTSSAMGSLFLTILSAINEFERENIKERMTMGKLGRAKSGKSMMWTKTAFGYYHNRKTGILEIVPLQATIVEQIFTEYLSGISLTKLRDKLNESGHIGKDIPWSYRTLRQTLDNPVYCGYIKFKDSLFEGMHKPIIPYETYLKVQRELEERQQQTYERNNNPRPFQAKYMLSGMARCGYCGAPLRIVLGRKRKDGSRTMKYHCANRFPRRTKGVTVYNDNKKCDSGTYDLGNLENTVIDNLIGFQENNDSLLKIINGNNQPVLDTSSIKKQISQIDKKIQKNSDLYLNDFITMDELKDRTDSLQAEKKLLKAKISENKFNDSTDVFELVKTQLGSIPINELSYDNKKKIVNNLVSKVDVTADNVDIIFKFQLA

SEQ ID NO: 2256 - protein, 485 aa, synthetic construct
MTRKVAIYTRVSTTNQAEEGFSIDEQIDRLTKYAEAMGWQVSDTYTDAGFSGAELERPAMQRLINDIENKAFDTVLVYKLDRLSRSVRDTLYLVKDVFTKNKIDFISLNESIDTSSAMGSLFLTILSAINEFERENIKERMTMGKLGRAKSGKSMMWTKTAFGYYHNRKTGILEIVPLQATIVEQIFTDYLSGISLTKLRDKLNESGHIGKDIPWSYRTLRQTLDNPVYCGYIKFKDSLYEGMHEPIIPYETYLKVQKELEERQQQTYERNNNPRPFQAKYMLSGMARCGYCGAPLRIVLGHKRKDGSRTMKYHCANRFPRKTKGVTVYNDNKKCDSGTYDLSNLENTVIDNLIGFQENNDSLLKIINGNNQPILDTSSLKKQISQIDKKIQKNSDLYLNDFITMDELKDRTDSLQAEKELLKAKICENKLNDSTDVFELVKTQLGSIPINELSYDNKKKIVNNLVSKVDVTADNVDIIFKFQLA

SEQ ID NO: 2257 - protein, 452 aa, synthetic construct
MKAAIYIRVSTREQVENYSIQAQTEKLTALCRSKDWDVYDIFIDGGYSGSNMNRPALNEMLSKLHEIDAVVVYRLDRLSRSQRDTITLIEEYFLKNNVEFVSLSETLDTSSPFGRAMIGILSVFAQLERETIRDRMVMGKIKRIEAGLPLTTAKGRTFGYDVIDTKLYINEEEAKQLQLIYDIFEEEQSITLLQKRLKKLGFKVRTYNRYNNWLTNDLYCGYVSYKDKVHVKGIHEPIISEEQFYRVQEIFTRMGKNPNMNRDSASLLNNLVVCSKCGLGFVHRRKDAMSRDKKYHYRYYSCKTYKHIHELEKCGNKIWRADKLEELIINRVNDYSLASRNVDKEDELDSLNERLKIEHAKKKRLFELYINGSYEVGELDSMMKDIDAQINYYESLIEANEELKKNKKIQENLAELATVDFDSLEFREKQLYLKSLINKIYIDGEQVTIEWL

SEQ ID NO: 2258 - protein, 469 aa, synthetic construct
MCYTTPVRAAVYLRISEDRSGEQLGVARQREDCLKLCGQRKWVPVEYLDNDVSASTGKRRPAYEQMLADITAGKIAAVVAWDLDRLHRRPIELEAFMSLADEKRLALATVAGDVDLATPQGRLVARLKGSVAAHETEHKKARQRRAARQKAERGHPNWSKAFGYLPGPNGPEPDPRTAPLVKQAYADILAGASLGDVCRQWNDAGAFTITGRLWTTTALSKFLRKPRNAGLRAYKGARYGPVDRDAIVGKAQWSPLVDEATFWAAQAVLDAPGRAPGRKSVRRHLLTGLAGCGKCGNRLAGSYRTDGRVVYVCKACHGVAILADNIEPILYHIVAERLAMPDAVDLLRREIHDAAEAETIRLELETLYGELDRLAVERAEGLLTARQVKIATDIVNAKVTKLQARQLDQERLRVFDGIPLGTPQVAGMIAALSPDRFRAVLDVLAEVVVQPVGKSGRISNPERVQVNWR

SEQ ID NO: 2259 - protein, 485 aa, synthetic construct
MTKKVAIYTRVSTTNQAEEGFSIDEQIDHLTKYAEAMGWQVSDTYTDAGLSGAKLERPAMQRLINDIENKAFDTVLVYKLDRLSRSVRDTLYLVKDVFTKNKIDFISLNESIDTSSAMGSLFLTILSAINEFERENIKERMTMGKLGRAKSGKSMMWTKTAFGYYHNRKTGILEIVPPQATIVEQIFTDYLSGISLTKLRDKLNESGHIGKDIPWSYRTLRQTLDNPVYCGYIKFKDSLFEGMHKPIIPYETYLKVQKELEERQQQTYERNNNPRPFQAKYMLSGMARCGYCGAPLKIVLGHRRKDGSRTMKYHCANRFPRKTRGVTVYNDNKKCDSGTYDLSDLENTVIGNLIGLQEDNDSLLKIINGNNQPILDTSSFKKQISQIDKKIRKNSDLYLNDFITMDELKERTDSLQAEKNLLKAKISENKFNDSTDVFELVKTQLGSIPINELSYDDKKKIVNNLVSKVDVTADNVDIIFKFQLA

SEQ ID NO: 2260 - protein, 468 aa, synthetic construct
MSYTTPVCAAVYLRISEDRSGEQLGVARQREDCLKLCGQRKWVPVEYLDNDVSASTGKRRPAYEQMLADITAGKITAVVAWDLDRLHRRPTELEAFMSLADEKHLALATVAGDVDLATPQGRLVARLKASVAAHETEHKKARQRRAARQKAERGLPNWSKAFGYLPGPNGPEPDPTAPLVKQAYADILAGASLGDVCRQWNDVGAFTITGRPWTTTTLSKFLRKPRNAGLRAYKGARYGPVDRDAIVGKAQWSPLVDEATFWAAQAVLDAPGRAPGRKSVRRHLLTGLAGCGKCGNHLAGSYRTDGRVVYVCKTCHGVAILADNIEPVLYHIVAERLAMPDAVDLLRREIHDAAEAETIRLELEALYGELDRLAVERAEGLLTARQVKISTDIVNAKITKLQARQLDQERLRVFDGIPLGTPQVAGMIAELSPDRFRAVLDVLAEVVVRPVGKGGGVFNPERVQVNWR

SEQ ID NO: 2261 - protein, 485 aa, synthetic construct
MTKKVAIYTRVSTTNQAEEGFSIDEQIDRLTKYAEAMGWQVSDTYTDAGISGAKLERPAMQRLINDIENRAFDTVLVYKLDRLSRSVRDTLYLVKDVFTKNKIDFISLNESIDTSSAMGSLFLTILSAINEFERENIKERMTMGKLGRAKSGKSMMWTKTAFGYYHNRKTGILEIVPLQATVVKQIFTDYLSGISLTKLRDKLNESGHIGKDIPWSYRTLRQTLDNPVYCGYIKFKGSLYEGMHKPIIPYETYLKVQRELEERQQQTYERNNNPRPFQAKYMLSGMARCGYCGAPLRIVLGHKRKDGSRTMKYHCAYRFPRKTKGVTVYNDNKKCDSGTYDLSNLENTVIDILIGFQEDNDSLLKIINGNNQPILDTSSFKEQISQIDKKIQKNSDLYLNDFITMDELKDRTDSLQAEKKLLKAKISENKFNDSTDVFELVKTQLGSIPINELSYDNKKKIVNNLVSKVDVTADNVDIIFKFQLA

SEQ ID NO: 2262 - protein, 452 aa, synthetic construct
MKAAIYIRVSTREQVENYSIQAQTEKLTALCRSKDWDVYDIFIDGGYSGSNMNRPALNEMLSKLPEIDAVVVYRLDRLSRSQRDTITLIEEYFLKNNVEFVSLSETLDTSSPFGRAMIGILSVFAQLERETIRDRMVMGKIKRIEAGLPLTTAKGRTFGYDVIDTKLYINEEEAKQLQLIYDIFEEEQSITFLQKRLKELGFKVRTYSCYNNWLTNDLYCGYVSYKDKVHVKGIHEPIISEEQFYRVQEIFTRMGKNPNMNRDSASLLNSLVVCSKCGLGFVHRRKDTMSRGKKYHYRYYSCKTYKHTHELEKCGNKIWRADKLEELIINRVNNYSLASRNVDKEDELDSLNEKLKIEHAKKKRLFDLYINGSYEVSELDSMMNDIDVQINYYESQIEANEELRKNKKIQESLADLATVDYDNLGFREKQLYLKSLINKIYIDGEQVTIEWL

SEQ ID NO: 2263 - protein, 469 aa, synthetic construct
MSYTTPVRAAVYLRISEDRSGEQLGVARQREDCLKLCDQRKWVPVEYLDNDVSASAGKRRPAYEQMLADITAGNIAAVVAWDLDRLHRRPVELEAFMSLADEKRLALATVAGDVDLATPQGRLVARLKGSVAAHETEHKKARQRRAARQKAERGYPNWSKAFGYLPGPNGPEPDPRTAPLVKRAYADILAGASLGDVCRQWNDAGAFTITGRPWTTTTLSKFLRKPRNAGLREYRGARYGPVDHDAIVSKAQWSPLVDEATFWAAQAVLDAPGRAPGRKSVRRHLLTGLAGCGKCGSHLAGSYRTDGQVVYVCKVCHGVSILAVNIVPILYHIVAERLAMPDAVDLLRREIHDAAEAETIRLELEALYGELDRLAVERAEGLLTARQVKISTDIVNAKITKLQARQLDQERLRVLDGIPLGTPQVAGTIAELSPDRFRAVLDVLAEVVVQPVGKSGRIFNPERVQVNWR

SEQ ID NO: 2264 - protein, 452 aa, synthetic construct
MKAAIYIRVSTREQVENYSIQAQTEKLTALCRSKDWDVYDIFIDGGYSGSNMNRPALNEMLSKLHEIDAVVVYRLDRLSRSQRDTITLIEEYFLKNNVEFVSLSETLDTSSPFGRAMIGILSVFAQLERETIRDRMVMGKIKRVEAGLPLTTAKGRTFGYDVIDAKLYINEEEAKQLQLIYDIFEEEQSITFLQRRLKKLGFKVRTYSCYNNWLTNDLYCGYVSYKDKVHVKGIHEPIISEEQFYRVQEIFTHMGRNPNMNRDSASLLNNLVVCSKCGLGFVHRRKDTMSRGKKYHYRYYSCKTYKHTHELEKCGNKIWRADKLEELIINRVNSYSFASRNADKEDELDSLNEKLKIEHARKKRLFDLYINGSYEVSELDSMMNDIDAQINYYESQIEANEELKKHKKIQENLAGLPTVDFDSLEFREKQLYLKSLINKIYIDGEQVTIEWL

SEQ ID NO: 2265 - protein, 452 aa, synthetic construct
MKAAIYIRVSTQEQVGNYSIQAQTEKLTALCRSKGWDVYDIFIDGGYSGSNMNRPALNEMLSKLHEIDAVVVYRLDRLSRSQRDTTTLIEEYFLKNNVEFVSLSETLDTSSPFGRAMIGILSVFAQLERETIRDRMVMGKIKRIEAGLPLTTAKGRTFGYDVVDTKLYINEEEAKQLQLIYDIFEEEQSITSLQKRLKKLGFKVRTYNRYNNWLTNDLYCGYVSYKDKVHVKGIHEPIISEEQFYRVQEIFTRMGKNSNMNRDSASLLNNLVVCSKCGLGFVHRSKDTMSRGKKYHYRYYSCKTYKHTHELEKCGNKTWRADKLEELIINRVNNYSFASRNVDKEDELDSLSEKLETERAKKERLFDLYINGSYEVSELDRMMNDIEAQINYYESQIEANVELKKSKKVRENLVDLATVDFDSLEFREKQLYLKSLINKIYIDGEQVTIEWR

SEQ ID NO: 2266 - protein, 452 aa, synthetic construct
MKAAIYIRVSTQEQVENYSIQAQTEKLTALCRSKDWDVYDIFIDGGYSGSNMNRPALNEMLSKLHEIDAVVVYRLDRLSRSQRDTTTLIEEYFLKNNVEFVSLSETLDTSSPFGRAMIGILSVFAQLERETIRDRMVMGKIKRIEAGLPLTTAKGRTFGYDVIDTKLYINEEEAKQLQLIYDIFEEEQSITSLQKRLKKLGFKVRTYNRYNNWLTNDLYCGYVSYKDKVHVKGIHEPIISEEQFYRVQEIFTRMGKNPNMNRESASLLSNLVVCSKCGLGFVHRSKDTMSRGKKYHYRYYSCKTYKHTHELEKCGNKTWRADKLEELIINRVNNYSFASRNVDKEDELDSLNEKLKIEHAKKKRLFDLYISGSYEVSELDNMMNDIDARINYYESQIEANEELRRNKKIQENLADLATVDFDSLEFREKQLYLKSLINKIYIDDEQVTIEWL

SEQ ID NO: 2267 - protein, 469 aa, synthetic construct
MSYTTPVRAAVYLRISEDRSGEQLGVARQREDCLKLCGQRKWVPVEYLDNDVSASTGKRRPAYEQMLADITAGKIAAVVAWDLDRLHRRPTELEAFMSLADEKHLALATVAGDVDLATPQGRLVARLKASVAAHETEHKKARQRRAARQKAERGLPNWSKAFGYLPGPNGPEPDPRTAPLVKQAYADILAGASLGDVCRQWNDAGAFTITGRPWTTTTLSKFLRKPRNAGLRAYKGARYGPVDRDAIVGKAQWSPLVDEATFWAAQAVLDAPGRAPGRKSVRRHLLTGLAGCGKCGNHLAGSYRTDGQVVYVCKACYGVAILADNIVPILYHVVAERLAMPDAVDLLRHEIHDAAEAEAIRLELETLYGELDRLAVERAEGLLTARQVKISTDIVNAKITKLQARQLDQERLRVFNGIPLGTPQVAGVIAELSPDRFRAVLDALAEVVVQPVGRSGRNFNPERVRVNWR

SEQ ID NO: 2268 - protein, 485 aa, synthetic construct
MTKRVAIYTRVSTTNQAEEGFSIDEQIDRLTKYAEAMGWQVSGTYTDAGFSGAKLERPAMQRLINDIEYKAFDTVLVYKLDRLSRSVRDTLYLVKDVFTKSKIDFISLNESIDTSSAMGSLFLTILSAINEFERENIKERMTMGKLGRAKSGKSMMWTKTAFGYYHNRETGVLEIVPLQATIVEQIFTDYLSGISLTKLRDKLNESGHIGKDIPWSYRTLRQTLDNPVYCGYIKFKDSLFEGMHKPIIPYETYLKVQKELEERQQQTYERNNNPRPFQAKYMLSGMARCGYCGAPLKIVLGHKRKDGSRTMKYHCANRFPRKTKGITVYNDNKKCDSGTYDLSSLENTVIDSLIGFQENNDSLLKIINGSNQPILDTSSFKEQISQIDKKIQKNSDLYLNDFITMDELKDRTDSLQAEKKLLKSKISENKFNGSTDVFELVKTQLGSIPINELSYDNKKKIVNNLVSKVDVTADNVDIIFKFQLA

SEQ ID NO: 2269 - protein, 469 aa, synthetic construct
MSYTTPVRAAVYLRISEDRSGEQLGVARQREDCLNLCDQRKWVPVEYLDNDVSASTGKRRPAYEQMLADITAGKIAAVVAWDLDRLHRRPIELEAFMSLADEKRLALATVAGDVDLATPQGRLVARLKGSVAAHETEHKKARQRRAARQKAERGHPNWSKAFGYLPGPNGPEPDPRTAPLVKQAYADILAGASLGDVCRRWNNAGAFTITGRPWTTTTLSKFLRKPRNAGLRAYKGARYGPVDRDAIVGKAQWSPLVDEATFWAAQAVLDAPGRAPGRKSVRRHLLTGLAGCGKCGNHLAGSYRTDGKVVYVCKACHGVAILADNIEPILYHIVAERLATPDAVDLLRREIHDAAEAETIHLELETLYGELDRLAVERAEGLLTARQVKISTDIVNAKITKLQACQLDQERLRVFDGIPLGTPQVAGVIAELSPDRFRAVLNVLAEVVVQPVGKSGRIFNPERVQVSWR

SEQ ID NO: 2270 - protein, 485 aa, synthetic construct
MTKKVAIYTRVSTTNQAEEGFSIDEQIDRLTKYTEAMGWQVSDTYTDAGFSGAKLERPAMQRLINDIENKAFDTVLVYKLDRLSRSVRDTLYLVKDVFTKNKIDFISLNESINTSSAMGSLFLTILSAINEFERENIKERMTMGKLGRAKSGKSMMWTKTAFGYCHNRKTGILEIVPLQATIVEQIFTDYLSGISLTKLRDKLNESGHIGKDIPWSYRTLRQTLDNPVYCGYIKFKDSLFEGMHKQIIPYETYLKVQKELEERQRQTYERNNNPRPFQAKYMLSGMARCGYCGAPLRIVLGHKRKDGSRTMKYHCANRFPRKTKGVTVYNDNKKCDSGTYDLSNLENTVIDNLISFQEDNDSLLKIINGNNQPTLDTSSFKEQISQIDKKIQKNSDLYLNDFITMDELKDRTDSLQAEKRLLKAKISENKFNDRTDVFELVKTQLGSIPINELSYDDKKKIVNNLVSKVDVTADNVDIIFKFQLA

SEQ ID NO: 2271 - protein, 452 aa, synthetic construct
MKAAIYIRVSTREQVENYSIQAQTEKLTALCRSKDWDVYDIFTDGGYSGSNMNRPALNEMLSKLHEIDAVVVYRLDRLSRSQRDTITLIEEYFLKNNVEFVSLSETLDTSSPFGRAMIGILSVFAQLERETIRDRMVMGKIKRVEAGLPLTTAKGRTFGYDVVDTRLYINEEEARQLQLIYDIFEEEQSITFLQKRLKKLGLKVRTYSCYNNWLTNDLYCGYVSYKDKVHVKGIHEPIISEEQFYRVQEIFTRMGKNPNMNRDSASLLNNLVVCSKCGLGFVHRRKDTMSRGKKYHYRYYSCKTYKHTYELEKCGNKIWRADKLEELIVNHVNNYSFASRNADKEDELDSLNEKLKIEHAKRKRLFDLYINGSYEVSELDSMMNDIDAQINYYESQIEANEELKKNKKIQENLADLATVDFGSLEFREKQLYLKSLISKIYIDGEQVTIEWQ

SEQ ID NO: 2272 - protein, 469 aa, synthetic construct
MCYTTPVRAAVYLRISEDRSGEQLGVARQREDCLKLCDQRKWVPVEYLDNDVSASTGKRRPAYEQMLADITAGKIAAVVAWDLDRLHRRPIELEAFMSLADEKRLALATVAGDVDLATPQGRLVARLKGSVAAHETEHKKARQRRAARQKAERGHPNWSKAFGYLPGPNGPEPDPRTAPLVKQAYADILAGASLGDVCRRWNDAGAFTITGRPWTSTTLSKFLRKPRNAGLRAYKGARYGPVDRDAIVGKAQWSPLVDKATFWAAQAVLDAPGRAPGRKSVRRHLLTGLAGCGKCGNHLAGSYRTDGRVVYVCKACHGVAILADNIEPVLYHIVAERLAMPDAADLLRREIHDAAEAEAIRLELETLYGELDRLAVERAEGLLTARQVKISTDIVNAKITKLQARQLDQERLRVFGGIPLGTPQVASMIAELSPDRFRAVLDVLAEVVVQPVGKGGRIFNPERVQVNWR

SEQ ID NO: 2273 - protein, 485 aa, synthetic construct
MTKKVAIYTRVSTTNQAEEGFSIDEQTDRLTKYAEAMGWRVSDTYTDAGFSGAKLERPAMQRLINDIENEAFDTVLVYKLDRLSRSVRDTLYLVKDVFTKNKIDFISLSESIDTSSAMGSLFLTILSAINEFERENIKERMTMGKLGRAKSGKSMMWTKTAFGYYHNRKTGILEIVPLQATIVEQIFTDYLSGISLTKLRDKLNESGHIGKDIPWSYRTLRQTLDNPVYCGYIKFKDSLFEGMHKPIIPYETYLKVQKELEERQRQTYERNNNPRPFQAKYMLSGMARCGYCGAPLKIVLGHKRKDGSRTMRYHCANRFPRKTRGVTVYNDNEKCDSGTYDLSNLENTVIDNLIGFQENNDSLLKIINGNNQPILDTSSLKKQISQIDKKIQKNRDLYLNDFITMDELKGRTDSLQAEKELLKAKISENKFNDSTDVFELVKTQLGTIPINELSYDNKKIIVNNLVSKVDVTADNVDIIFKFQLA

SEQ ID NO: 2274 - protein, 452 aa, synthetic construct
MKAAIYIRVSTREQVENYSIQAQTEKLTALCRSKDWDVYDIFIDGGYSGSNMNRPALNEMLSKLHEIDAVVVYRLDRLSRSQRDTITLIEEYFLKNNVEFVSLSETLDTSSPFGRAMIGILSVFAQLERETIRDRMVVGKIKRIEAGLPLTTAKGRTFGYDVIDTRLYINEEEAKQLQLIYDIFEEEQSITFLQKRLKKLGFKVRTYSRYNNWLTNDLYCGYVSYKDKVHVKGIHEPIISEEQFYRVQEIFTRMGKNPNMNRDSASLLNNLVVCSKCGLGFVHRRKDIMSRGKKYHYRYYSCKTYKHIHELEKCGNKIWRADKLEELIINRVNSYSLASRDVDKEDELDSLNEKLKAEHAKKRRLFDLYINGSYEVSELDSMMNDIDAQISYYKSQIEANEELKKNKKIRETLANLATMDFDSLEFREKQLYLKSLINKIYIDGEQVIIEWL

SEQ ID NO: 2275 - protein, 485 aa, synthetic construct
MTKKVAIYTRVSTTNQAEEGFSIDEQIDRLTKYAEAMGWQVSDTYTDAGFSGAKLERPAMQRLINDIENKAFDTVLVYKLDRLSRSVRDTLYLVKDVFTKNKIDFISLNESIDTSSAMGSLFLTILSAINEFERENIKERMAMGKLGRAKSGKSMMWTKTAFGYYHNRKTGILEIVPLQAAIVEQIFTDYLSGTSLTKLRDKLNESGHTGKDIPWSYRTLRQTLDNPVYCGYIKFKDSLFGGMHKPIIPYETYLKVQKELEERQQQAYERNNNPRPFQAKYMLSGMARCGYCGAPLRIVLGHKRKDGSRTMKYHCANRFPRKTKGVTVYNDNKKCDSGTYDLGSLENTVIDNLVGFQENNDSLLKVINGNNQPVLDTSSFKKQISQIDKKIQKNSDLYLNDFITMDELKDRTDSLQAEKKLLKAKISENKFNDSTDVFELVKTQLGSIPINELSYDDKKKIVNNLVSKVDVTADNVDIIFKFQLA

SEQ ID NO: 2276 - protein, 452 aa, synthetic construct
MKAAIYIRVSTREQVENYSIQAQTEKLTALCRSKDWDVYDIFIDGGYSGSNMNRPALNEMLSKLHEIDAVVVYRLDRLSRSQRDTITLIEEYFLKNNVEFVSLSETLDTSSPFGRAMIGILSVFAQLERETIRDRMVMGKIKRIEAGLPLTTAKGRTFGYDVIDTKLYINEEEARQLRLIYDIFEEEQSITFLQKRLKKLGFKVRTYNRYNNWLTNDLYCGYVSYKDKVHVKGIHEPIISEEQFYRVQEIFTRMGKNPNMNRDSASLLNNLVVCSKCGLGFVHRRKDIMGRDKRYHYRYYSCKTYKHIHELEKCGNKIWRADKLEELIINRVNNYSLVSRNVDKEDELDSLNEKLKTEHAKKKRLFELYINGSYEVSELDSMMKDIDAQISYYESQIEANEELRNNKKIQENLAGLATVDFDDLEFREKQLYLKSLINKIYIDGEQVTIEWL

SEQ ID NO: 2277 - protein, 452 aa, synthetic construct
MKAAIYIRVSTREQVENYSIQAQTEKLTALCRSKDWDVYDIFIDGGYSGSNMNRPALNEMLSKLHEIDAVVVYRLDRLSRSQRDTITLIEEYFLKNNVEFVSLSETLDTSSPFGRAMIGILSVFAQLERETIRDRMVMGKIKRVEAGLPLTTAKGRTFGYDVIDTKLYINEEEARQLQLIYDIFEEEQSITSLQKRLKKLGFKVRTYDRYNNWLTNDLYCGYVSYKDKVHVKGIHEPIISEEQFYRVQEIFTRMGKNPNMNRDSASLLNNLVVCSKCGLGFVHRRKDTMSRGKKYHYRYYSCKTYKHTHELEKCGNKIWRADKLEELIINRVNNYSFASRSVDKEDELNCLNEKLKIEHAKKKRLFALYINGSYEVSELDSMMNDIDAQINYYESQIEANEELKKNKKIQENLADLATVDYDSLEFREKQLYLKSLINKIYIDGEQVTIEWL

SEQ ID NO: 2278 - protein, 485 aa, synthetic construct
MTKKVAIYTRVSTTNQAEEGFSIDEQIDRLTKYAEAMGWQVSDTYTDAGFSGAKLERPAMQRLINDIENKAFDTVLVYKLDRLSRSVRDTLHLVKDVFTKNKIDFISLNESINTSSAMGSLFLTILSAINEFERENIKERMTMGKLGRAKSGKSMMWTKTAFGYYHNRKTGILEIVPLQATIVEQIFTDYLSGISLTKLRDKLNESGHIGKDIPWSYRTLRQTLDNPVYCGYIKFKDSLFEGMHKPIIPYETYLKVQKELEERQQQTYERNNNPRPFQAKYMLSGMARCGYCGAPLRIVLGRKRKDGSRTMKYHCANRFPRKTKGITVYNDNKKCDSGTYDLSNLENAVVDNLIDFQENNDSLLKIISGSNQPILDTNSFKKQISQIDKRIQKNSDLYLNDFITMDELKDRTDSLQAEKRLLKAKISENKSNDSTDVFELVKTQLGSIPINELSYDDKKKIVNNLVSKVDVTADNVDIIFKFQLA

SEQ ID NO: 2279 - protein, 452 aa, synthetic construct
MKAAIYIRVSTREQVENYSIQAQTEKLTALCRSKDWDVYDIFIDGGYSGSNMNRPALNEMLSKLHEIDAVVVYRLDRLSRSQRDTITLIEEYFLKNNVEFVSLSETLDTSSPFGRAMIGILSVFAQLERETIRDRMVMGKIKRIEAGLPLTTAKGRTFGYDVIDTKLYINEEEAKQLQLIYDIFEEEQSITFLQKRLKKLGFKVRTYNCYNNWLTNDLYCGYVSYKDKVHVKGIHEPIISEEQFYRVQEIFARMGKNPNINRDSASLLNNLVVCSRCGLGFVHRRKDTVSRGKKYHYRYYSCKTYKHTHELEKCGNKIWRADKLEELIINRVNNYSFASRSVDKAEELDSLNEKLKVEHAKKKRLFDLYINGSYNVSELDSMMNDIDAQINYYEGQIEAIEELKKNKNIQENLAGLATVDFDSLEFREKQLYLRSLINKIYIDGEQVTIEWL

SEQ ID NO: 2280 - protein, 469 aa, synthetic construct
MCYITPVRAAVYLRISEDRSGEQLGVARQREDCLKLCDQRKWEPVEYLDNDVSASTGKRRPAYEQMLADITAGKIAAVVAWDLDRLHRRPIELEAFMSLADEKRLALATVAGDVDLATPQGRLVARLKGSVAAHETEHKKARQRRAARQKAERGHPNWSKAFGYLPGPSGPEPDPRTAPLVRQAYADILAGASLGDVCRQWNAAGAFTITGRPWTTTTLSKFLRKPRNAGLRAYKGARYGPVDRDAIVGKAQWSPLVDEATFWAAQAVLDAPGRAPGRKSVRRHLLTGLAGCGKCGNHLAGSYRTDGKVVYVCKACHGVAILADNIEPILYHIVAERLTMSDAVDLLRREIRDAAEADTIRLELETLYSELDRLAVERAEGLLTARQVKICTDIVNAKITKLQARQQDQERLRVLDGIPLGTPRVAGVIAELSPDRFRAVLDVLAEVVVQPVGKGGRISNPERVQVNWR

SEQ ID NO: 2281 - protein, 485 aa, synthetic construct
MTKKVAIYTRVSTTNQAEEGFSIDEQIDRLTKYAEAMGWQVSDTYTDAGLSGAKLERPAMQRLINDIENKAFDTVLVYKLDRLSRSVRDTLYLVKDVFTKNKIDFISLNESIDTSSAMGSLFLTILSAINEFERENIKERMTMGKLGRARSGKSMMWTKTAFGYYHNRKTGILEIVPLQATIVEQIFTDYLSGISLTKLRDKLNESGHIGKDIPWSYRTLRQTLDNPVYCGYIKFKDSLFEGMHKPIIPYETYLKVQKELEERQQQTYERNNNPRPFQAKYMLSGMARCGYCGAPLKIVLGHKRKDGSRTMKYHCANRFPRKTKGVTVYNDNKKCDSGTYDLSNLENTVIDNLAGFQEDNDSLLKIINGNNQQILDTSSFKKQISQIDKKIQKNSDLYLNDFITMDELKDRTDSLQAERKLLKAKISENKFNDSTDVLELVKTQLGSIPINELSYDDKKKIVNNLVSKVDVTADSVDIIFKFQLA

SEQ ID NO: 2282 - protein, 452 aa, synthetic construct
MKAAIYIRVSTQEQVGNYSIQAQTEKLTALCRSKDWDVYDIFIDGGYSGSNMNRPALNEMLSKLHEIDAVVVYRLDRLSRSQRDTTTLIEEYFLKNNVEFVSLSETLDTSSPFGRAMIGILSVFAQLERETIRDRMVMGKIKRIEAGLPLTTAKGRTFGYDVIDTKLYINEEEAKQLQLVYDIFEEEQSITFLQKRLKKLGFKVRTYNRYNNWLTNDLYCGYVSYKDKVHVKGIHEPIISEEQFYRVQEIFARMGKNPNMNRDNASLLSNLVVCSKCGLGFVHRSKDTMSRGKKYHYRYYSCKTYKHTHELEKCGNKTWRADKLEELIINRVNNYSFASRNVDKEDELDSLNEKLKIEHAKKKRLFDLYINGSYEVSELDSMMNDIDAQINYYESQIEAKEELRKNNKIQENLADLATVDFDSLEFREKQLYLKSLINKIYIDGEQVTIEWL

SEQ ID NO: 2283 - protein, 452 aa, synthetic construct
MKAAIYIRVSTREQVENYSIQAQTEKLTALCRSKDWDVYDIFIDGGYSGSDMNRPALNEMLSKLHEIDAVVVYRLDRLSRSQRDTITLIEEYFLKNNVEFVSLSETLDTSSPFGRAMIGILSVFAQLERETIRDRMVMGKIKRIEAGLPLTTAKGRTFGYDVIDTKLYINEEEAKQLQLIYDIFEEEQSITFLQKRLKKLGFKVRTYSRYNNWLTNDLYCGYVSYKDKVRVKGIHEPIISEEQFNRVQAIFTRMGKNPNMNRDSASLLNNLVVCSKCGLGFVHRRKDTTSRGKKYHYRYYSCKTYKHTHELEKCGNKIWRADKLEELIINRVNNYSFASRNVDKEDELDSLNEKLKIEHAKKKRLFDLYISGSYEVSELDSMMSDIDAQINYYEGQIEANEELKKNKKIQENLANLATVDYDSLEFREKQLYLKSLINKIYIDGEQVTIEWL

SEQ ID NO: 2284 - protein, 469 aa, synthetic construct
MSYTTPVRAAVYLRISEDRSGEQLGVARQREDCLKLCDQRKWVPVEYLDNDVSASTGKRRPAYEQMLADIAAGKIAAVVAWDLDRLHRRPIELEAFMNLADEKRLALATVAGDVDLATPQGRLVARLKGCVAAHETEHKKARQRRAARQKAERGLPNWSKAFGYLPGPNGPEPDPRTAPLVKQAYANILAGASLGDVCRQWNDAGAFTITGRPWTTTALSKFLRKPRNAGLRAYKGARYGPVDRDAIVGKAQWSPLVDEATFWAAQAVLDAPGRAPGRKSVRRHLLTGLAGCGKCGNHLAGSYRTDGRVVYVCKACHGVTILAVNIEPILYHIVAERLAMPDAVDLSRREIHDTAEAETIRLELETLYGELDRLAIERAEGLLTARQVKISTDIVNAKITKLRARQLDQERLRVFDGIPLGTPQVAGVIAELSPDRFRAVLDVLAEVVVQPVGKSGRIFNPERVQVNWR

SEQ ID NO: 2285 - protein, 485 aa, synthetic construct
MTKKVAIYTRVSTTNQAEEGFSIDEQIDRLTKYAEAMGWQVSDTYTDAGFSGAKLERPAMQRLINDIENEAFDTVLVYKLDRLSRSVRDTLYLVKDVFTKNKIDFISLNESIDTSSAMGSLFLTILSAINEFERENIKERMTMGKLGRAKSGKSMMWTKTAFGYYHNRKTGILEIVPLQATIVERIFTDYLSGISLTKLRDKLNESGHIGKDIPWSYRTLRQTLDNPVYCGYIKFKGSLFEGMHKPIIPYETYLKVQKELEERQQQTYARNNNPRPFQAKYMLSGMARCGYCGAPLRIVLGRKRRDGSRTMKYHCANRFPRKTKGVTVYNDNKKCDSGTYDLSNLENTVIDILIGFQENDDSLLEIINGNNQPILDTSSFEEQISQIDKKIQKNSDLYLNDFITMDELKDRTDSLQAEKKLLEAKISESRFNDSTDVFELVKTQLGSIPINELSYDNKKKIVNNLVSKVDVTADNVDIIFKFQLA

SEQ ID NO: 2286 - protein, 485 aa, synthetic construct
MTKKVAIYTRVSTTNQAEEGFSIEEQTDRLTKYAEAMGWQVSDTYTDAGFSGAKLERPAMRRLINDIENKAFDTVLVYKLDRLSRSVRDTLYLVKDVFTKNEIDFISLNECIDTSSAMGSLFLTILSAINEFERENIKERMTMGKLGRAKSGKSMMWTKTAFGYYHNRKTGILEIVPLQATIVEQIFTDYLSGISLTKLRDKLNESGHIGKDIPWSYRTLRQTLDNPVYCGYIKFKDSLFEGMHKPIIPYETYLKVQKELEERQQQTYERNNNPRPFQAKYMLSGMARCGYCGAPLRIVLGHKRKDGSRTMKYHCANRLPRKTKGVTVYNDNKKCDSGTYDLSNLENTVIDSLIGLQEDNDSLLKIINGNNQPILDTSSFKEQISQIDKKIQKNSDLYLNDFITMDELKDRTDSLQAEKKLLKAKISENKFNDSTDVFELVKTQLGSIPINELSYGNKKKIVNNLVSKVDVTADNVDIIFKFQLA

SEQ ID NO: 2287 - protein, 452 aa, synthetic construct
MKAAIYIRVSTQEQVENYSIQAQTEKLTALCRSKGWDVYDIFIDGGYSGGNMNRPALNEMLSKLHEIDAVVVYRLDRLSRSQRDTITLIEEYFLKNNVEFVSLSETLDTSSPFGRAMIGILSVFAQLERETIRDRMVMGKIKRIEAGLPLTTAKGRTFGYDVIDTKLYINEEEAKQLQLIYDIFEEERSITFLQKRLKKLGFKVRTYNCYNSWLTNDLYCGYVSYKDKVHVKGIHEPIISEEQFYRVQEIFTRMGKNPNMNRDSASLLNNLVVCSKCGLGFVHRRKDTMSRGKKYHYRYYSCKTYKHTHELEKCGNKIWRADKLEELVINCVNNYSFASRNVDKEDELDSLHEKLKIERAKKRRLLDLYINGSYEVSELDCMMNDIDAQINYYESQIEASEELKKDKKIQESLANLATVDYDSLEFREKQLYLKSLINKIYIDGEQVTIEWL

SEQ ID NO: 2288 - protein, 452 aa, synthetic construct
MKAAIYIRVSTREQVENYSIQAQTEKLTALCRSKDWDVYDTFIDGGYSGSNMNRPALNEMLSKLHEIDAVVVYRLDRLSRSQRDTITLIEEYFLKNNVEFVSLSETLDTSSPFGRAMIGILSVFAQLERETIRDRMVMGKIKRIEAGLPLTTAKGRTFGYDVIDTKLYINEEEAKQLQLIYDIFEEEQSITSLQKRLKKLGFKVRTYNRYNNWLTNDLYCGYVSYKDKVHVKGIHEPIISEEQFYRVQEIFTRMGKNPNMNRGSASLLNNLVVCSKCGLGFVHRRKDAMSRDKKYHYRYYSCKTYKHIHELEKCGNKTWRADKLEELVIDRVNNYSVASRNVDKEGELGSLNEKLKIEHAKKKRLFELYINGSFEVSELDSMMNDIDAQISYYESQIEANEGLKKNKKIQENLAYLATVDFDSLEFREKQLYLKSLINKIYIDGEQVTIEWL

SEQ ID NO: 2289 - protein, 485 aa, synthetic construct
MTKKVAIYTRVSTTNQAEEGFSIDEQIDRLTKYAEAMGWQVSDTYTDAGLSGAKLERPAMQRLINDIENKAFDTVLVYKLDRLSRSVRDTLYLVKDVFTKNKIDFISLNESIDTSSAMGSLFLTILSAINEFEHENIKERMTMGKLGRAKSGKSMMWTKTAFGYYHNRKTGILEIVPLQATIVEQIFTDYLSGISLTKLRDKLNENGHIGKDIPWSYRTLRQTLDNPVYCGYIKFKDSLFEGMHRPIIPYETYLRVQKELEERQQQTYERNNNPRPFQAKYMLSGMARCGYCGAPLKIVLGHKRKDGSRTMKYHCANRFPRKTKGVTAYNDNKKCDSGTYDLSNLENTVIDNLIGFQENNDSLLKIINGNNQPILDTSSFKKQISQIDKKIQKNSDLYLNDFITMDELKVRTDSLQAEKKLLKAKISENKFSDSTDVFELVKTQLGSIPINELSYDNKKKIVNNLVSKVDVTADNVDIIFKFQLA

SEQ ID NO: 2290 - protein, 452 aa, synthetic construct
MKAAIYIRVSTQEQVGNYSIQAQTEKLTALCRSKDWDVYDIFIDGGYSGSNMNRPALSEMLSKLHEIDAVVVYRLDRLSRSQRDTTTLIEEYFLKNNVEFVSLSETLDTSSPFGRAMIGILSVFAQLERETIRDRMVMGKIKRIEAGLPLTTAKGRTFGYDVIDTKLYINEEEAKQLQLIYDIFEEEQSITSLQKRLKKLGFKVRTYNRYNNWLTNDLYCGYVSYKDKVHVKGIHEPIISEEQFYRVQEIFTRMGKKPNMNRDSASLLNNLVVCSKCGLGFVHRSKDTMSRGKKYHYRYYSCKTYKHTHELEKCGNKTWRADKLEELVINRVSSYSLASRDVDKEDELDSLNEKLKTEHAKKKRLFDLYINGSYEVSELDSMMDDIDAQINYYESQIEASKELKKNKKIQENLADLATVDFDSLEFREKQLYLRSLINKIYIDGEQVTIEWL

SEQ ID NO: 2291 - protein, 469 aa, synthetic construct
MCYTTPVRAAVYLRISEDRSGEQLGVARQREDCLKLCGQREWEPVEYLDNDVSASTGKRRPAYERMLADITAGKIEAVVAWDLDRLHRRPIELEAFMSLADEKRLALATVAGDVDLATPQGRLVARLKGSVAAHETEHKKARQRRAARQKAERGYPNWSKAFGYLPGPNGPEPDPRTAPLVKQAYADILAGASLGDVCRRWNDAGAFTITGRPWATTTLSKFLRKPRNAGLRAYKGARYGPVDRDAIVGKAQWSPLVDEATFWAAQAVLDAPGRAPGRKSVRRHLLTGLACCGKCGNHVAGSYRTDGRVVYVCKACHGVAILADNIEPILYHIVAERLAMPDAVDLLRREIHDAAEAETIRLELETLHGELDRLAVERAEGLLTARQVRISTDIVSAKITKLQGRQQDQERLRVLDGIPLGTPQVAGVIAELSPDRFRAVLDVLAEVVVQPVGKSGRIFNPKRVQVNWR

SEQ ID NO: 2292 - protein, 485 aa, synthetic construct
MTKKVAIYTRVSTTNQAEEGFSIDEQIDRLTKYAEAMGWQVSDTYTDAGSSGAKLERPAMQRLINDIENKAFDTVLVYKLDRLSRSVRDTLYLVKDVFTKNKIDFISLNESIDTSSAMGSLFLTILSAINEFERENIKERMTMGKLGRARSGKSMMWTKTAFGYHHNRKTGILEIVPLQATIVEQIFTDYLSGISLTKLRDKLNESGHIGKDIPWSYRTLRQTLDNPVYCGYIKFKDSLFEGMHKPIIPYETYLKVQKELEERQQQTYERNNNPRPFQAKYMLSGMARCGYCGAPLKIVLGHKRKDGSRTMKYHCANRFPRKTKGVTVYNDNKKCDSGTYDLSSLENTVVDNLIGFQENNDSLLKIINGNHQPILDTSSFKKRISQIDKKIRKNSDLYLNDFITMDELKDRTDSLQAEKKLLKAKISETKFNDSTDVFELVITQLGSIPINELSYDNKKKIVNNLVSKVDVTADNVDIIFKFQLA

SEQ ID NO: 2293 - protein, 485 aa, synthetic construct
MTKKVAIYTRVSTTNQAEEGFSIDEQIDRLTKYAEAMGWQVSDTYTDAGFSGAKLERPAMQRLINGIENKAFDTVLVYKLDRLSRSVRDTLYLVKEVFTKNKIDFISLSESIDTSSAMGSLFLTILSAINEFERENIKERMTMGKLGRAKSGKSMMWTKTAFGYYHNRKTGILEIVPLQATIVEQIFTDYLSGISLTKLRDKLNESGHIGKDIPWSYRTLRQTLDNPVYCGYIKFKDSLFEGMHKPIIPYETYLRVQKELEERQQQTYERNNNPRPFQAKYMLSGMARCGYCGAPLRIVLGHKRRDGSRTMKYHCANRFPRKTKGVTVYNDNRKCDSGTYDLSGLENTVIDNLIGFQENNDSLLKIINGNNQPILDTSSFKKQISQIDKKIQKNSDLYLNGFITMDELKDRTDSLRAEKKLLKAKISENKFNDSTDVFELVKTQLGSIPINELSYDNKKKIVNNLVSKVDVTADNVDIIFKFQLA

SEQ ID NO: 2294 - protein, 485 aa, synthetic construct
MTKKVAIYTRVSTTNQAEEGFSIDEQIDRLTKYAEAMGWQVSDTYTDAGISGAKLERPAMQRLINDIENKAFDTVLVYKLDRLSRSVRDTLYLVKDVFTKNKIDFISLNESIDTSSAMGSLFLTILSAINEFERENIKERMAMGKLGRAKSGKSMMWTKTAFGYYHNRKTGILEIVPLQATIVEQIFTDYLSGISLTKLRDKLNESGHIGKDIPWSYRTLRQTLDNPVYCGYIKFKGSLFEGMHKPIIPYETYLKVQKELEERQQQTYERNNNPRPFQAKYMLSGMARCGYCGAPLRIVLGHKRKDGSRAMKYHCANRFPRKTKGVTAYNDNKKCDSGTYDLSGLENTVIDNLIGFQENSDSLLKIINGNNQPILDTSSFKEQINQIDKKIQKNSDLYLNDFITMDELKDRTDSLQAEKRLLRAKISENKFNDSTDVFELVKTQLGSIPISELSYDNKKKIVNDLVSKVDVTADNVDIIFKFQLA

SEQ ID NO: 2295 - protein, 485 aa, synthetic construct
MTKKVAIYTRVSTTNQAEEGFSIDEQIDRLTRYAEAMGWQVSGTYTDAGFSGAKLERPAMQRLINDIENKAFDTVLVYKLDRLSRSVRDTLYLVKDVFTKNKIDFISLNESINTSSAMGSLFLTILSAINEFERENIKERMTMGKLGRAKSGKSMMWTKTAFGYYHNRKTGILEIVPPQATIVEQIFTDYLSGISLTKLRDKLNESGHIGKDIPWSYRTLRQTLDNPVYCGYIKFKGSLFEGMHKPIIPYETYLKVQKELEERQQQTYERNNNPRPFQAKYMLSGMARCGYCGAPLRIVLGHRRKDGSRTMKYHCANRFPRKTKGVTVYNDNKKCDSGTYDLSDLENTVIDNLIGFQENNDSLLKIINGNNLPILDTSSFKKQISQIDRKIQKNSDLYLNDFITMDELKDRTDRLQAEKKLLKAKISVNKFNDSTDAFELVRTQLGSIPINELSYDNKKKIVNNLVSKVDVTADNVDIIFKFQLA

SEQ ID NO: 2296 - protein, 485 aa, synthetic construct
MTKKVAIYTRVSTANQAEEGFSIDEQIDRLTKYAEAMGWQVSDTYTDAGFSGAKLERPAMQRLINDIENKTFDTVLVYKLDRLSRSVRDTLYLVKDVFTKNKIDFISLNESIDTSSAMGSLFLTILSAISEFERENIKERMTMGKLGRAKSGKSMMWTKTAFGYYHNRKTGILEIVPLQATIVKQIFTDYLSGISLTKLRDKLNEGGHIGKDIPWSYRTLRQTLDNPVYCGYIKFKDSLFEGMHKPIIPYETYLKVRKELEERQQQTYERNNNPRPFQAKYMLSGMARCGYCGAPLRIVLGHKRKDGSRTMKYHCANRFPRKTKGVTVYNDNKKCDSGTYDLSNLENTVIDNLIGFQENNDSLLKIINGIYQPILDTSSFKKQISQIDKKIQKNSDLYLNDFITMDELRDRTDSLQAEKKLLKAKISESKFNDSTDVFELVKTQLGSIPINELSYDNKKKIVNNLVSKVDVTADNVDIIFKFQLA

SEQ ID NO: 2297 - protein, 485 aa, synthetic construct
MTKKVAIYTRVSTTNQAEEGFSVDEQIDRLTKYAEAMGWQVSDTYTDAGLSGAKLERPALQRLINDIENKAFDTVLVYKLDRLSRSVRDTLYLVKDVFTKNKIDFISLNESIDTSSAMGSLFLTILSAINEFERENIKERMTMGKLGRAKSGKSMMWTKTAFGYYHNRKTGILEIVPLQATIVEQIFTDYLSGTSLTKLRDKLNESGHIGKDVPWSYRTLRQTLDNPVYCGYIKFKGSLFEGTHKPIIPYETYLKVQKELEERQQQTYERNNNPRPFQAKYMLSGMARCGYCGAPLRIVLGHKRKDGSRTMRYHCANRFPRKTKGVTVYNDNRKCDSGAYDLSSLENTVIDNLIGFQENNDSLLKIINGNNQPILDTSSFKKQISQIDKKIQKNSDLYLNDFITMDELKDRTDSLQAEKKLLKAKISENKFNDSTDVFELVKTQLGSIPINELSYDDKKKIVNNLVSKVDVTADNVDIIFKFQLA

SEQ ID NO: 2298 - protein, 452 aa, synthetic construct
MKAAIYIRVSTREQVENYSIQAQTEKLTALCRSKDWDVYDVFIDGGYSGSNMNRPALNEMLSKLREIDAVVVYRLDRLSRSQRDTITLIEEYFLKNNVEFVSLSETLDTSSPFGRAMIGILSVFAQLERETIRDRMVMGKIKRIEAGLPLTTAKGRTFGYDVIDTKLYINEEEAKQLQLIYDIFEEEQSITFLQKRLKKLGFKVRAYSCYNNWLTNDLYCGYVSYKDKVHVKGIHEPIISEEQFYRVQEIFARMSRNPNMNRDSASLLNNLVVCSKCGLGFVHRRKDAMSRDKKYHYRYYSCKTYKHIHELEKCGNKIWRADKLEELIINRVNNYSVASRNVDKEDELDSLNEKLKIEHAKKKRLFDLYINGSYEVSELDSMMNDIDAQISYYESQIEANEELKKNKKIQENLANLATVDFDSLEFREKQLHLKSLINKIYIDGEQVTIEWL

SEQ ID NO: 2299 - protein, 452 aa, synthetic construct
MKAAIYIRVSTREQVENYSIQAQTEKLTALCRSKDWDVYDIFIDGGYSGSNMNRPALNEMLSKLHEIDAVVVYRLDRLSRSQRDTITLIEEYFLKNNVEFVSLSETLDTSSPFGRAMIGILSVFAQLERETIRDRMVMGKIKRIEAGLPLTTAKGRTFGYDVIDTKLYVNEEEAKQLRLIYDIFEEEQSITSLQKRLKKLGFKVRTYNRYNSWLTNDLYCGYVSYKDKVHVKGIHEPIISEEQFYRVQEIFTRMGRNPNMNRNSASLLNNLVVCSKCGLGFVHRRKDAASRDKKYHYRYYSCKTYKHIHELEKCGNKIWRADKLEELIINRVINYSLASRNVDKEDELDSLNEKLKIEHAKKRRLFELYINGRYEVSELDSMMNDIDAQINYYESQIEANEELKKNKKIQENLAYLATVDFDSLEFREKQLYLKSLINKIYIDGEQVTIEWL

SEQ ID NO: 2300 - protein, 485 aa, synthetic construct
MTKKVAIYTRVSTTNQAEEGFSIDEQIDRLTKYAEAMGWQVSDTYTDAGFSGAKLERPAMQRLINDIETKTFDTVLVYKLDRLSRSVRDTLYLVKDVFTKNKIDFISLNESINTSSAMGSLFLTILSAINEFERESIKERMTMGKLGRAKSGKSMMWTKTAFGYYHNRKTGILEIVPLQATIVEQIFTDYLSGVSLTKLRDKLNESGHIGKDIPWSYRTLRQTLDNPVYCGYIKFKDSLFEGMHKPIIPYETYLRVQKELEERQQQTYERNNNPRPFQAKYLLSGVARCGYCGAPLRIVLGHKRKDGSRTMKYHCANRFPRKTKGVTVYNDNKKCDSGTYDLSSLENTVIDNLIGFQENNDSLLKIINGNSQPILDTSSLKEQISQIDKKIRKNSDLYLNDFITMDELKGRTDSLQAEKKLLEAKISENKFNDSTDVFELVKTQLGSIPINELSYDNKKKIVNNLVSKVDVTADNVDIIFKFQLA

SEQ ID NO: 2301 - protein, 485 aa, synthetic construct
MTKKVAIYTRVSTTNQAEEGFSVDEQIDRLTKYAEAMGWQVSDTYTDAGFSGAKLERPAMQRLINDIENKAFDTVLVYKLDRLSRSVRDTLYLVKDVFTKNEIDFISLNESIDTSSAMGSLFLTILSAINEFERENIKERMTMGKLGRARSGKSMMWTKTAFGYYHNRKTGILEIVPLQATIVEQIFTDYLSGISLTKLRDKLNESGHIGKDIPWSYRTLRQTLDNPVYCGYIRFKDSLFEGMHKPIIPYETYLKVQKELEERQQQTYERNNNPRPFQAKYMLSGMARCGYCGAPLRIVLGHKRKDGSRTMKYHCANRFPRRTKGITVYNDNRKCDSGTYDLRNLENAVIDNLIGFQENDDSLLKIINGNNQPILDTCSFKEQISQIDKKIQKNSDLYLNDFITMDELRDRTDSLQAEKKLLKAKISENKFNDSTDVFELVKTQLGSIPINELSYDNKKKIVNNLVSKVDVTADSVDIIFKFQLA

SEQ ID NO: 2302 - protein, 452 aa, synthetic construct
MKAAIYIRVSTQEQVGNYSIQAQTEKLTALCRSKDWDVYDIFTDGGYSGSNMNRPALNEMLSKLHEIDAVVVYRLDRLSRSQRDTTTLIEEYFLKNNVEFVSLSETLDTSSPFGRAMIGILSVFAQLERETIRDRMVMGKIKRIEAGLPLTTAKGRTFGYDVIDTKLYINEEEAKQLRLIYDIFEEEQSITSLQKRLKKLGFKVRTYNRYNNWLTNDLYCGYVSYKDKVHVKGIHEPIISEEQFYRVQEIFTRMGKNPNMNRDSASLLSNLVVCSKCGLGFVHRSKDTMSRGRKYHYRYYSCKTYKHTHELEKCGNKTWRADKLEELIISRVNNYSFASRSVDKEGELDSLNEKLKIEHAKKKRLFDLYINGSYEVSELDSMMNGINAQISYYESQIEANEELKENKKIQENLAELATVDFDSLEFREKRLYLKSLINKIYIDGEQVTIEWL

SEQ ID NO: 2303 - protein, 469 aa, synthetic construct
MSYTTPVRAAVYLRISEDRSGEQLGVARQREDCLKLCDQRKWVPVEYLDNDMSASTGKRRPAYEQMLADITAGKIAAVVAWDLDRLHRRPIELEAFMSLADERRLALATVAGDVDLSTPQGRLVARLKGSVAAHETEHKKARQRRAARQKAERGYPNWSKAFGYLPGPNGPEPDPRTAPLVKQAYADILAGASLGDVCRQWNDAGAFTITGRPWTTTTLSKFLRKPRNAGLRAYKGARYGPVDRDAIVGKAQWSPLVDEATFWAAQAVLDAPGRAPGRKSVRRHLLTGLAGCGKCGNHLAGSYRTDGRVVYVCKACYGVAILADNIEPILYHIVAERLAMPDAVGLLRREIHDAAEAETIRLELETLYGELDRLAVERAEGLLTARQVKISTDIVSAKITKLQARQLDQERLRVFDGIPLGTPQVAGMIAELSPDRFRAVLDVLAEVVVQPVGKSGRTFNPERVQVNWR

SEQ ID NO: 2304 - protein, 486 aa, synthetic construct
MTKKVAIYTRVSTTNQAEDGFSIDEQIDRLTKYAEAMGWQVSDTYTDAGSSGAKLERPAMQRLINDIENKAFDTVLVYKLDRLSRSVRDTLYLVKDVFTKNKIDFISLNESIDTSSAMGSLFLTILSAINEFERENIKERMTMGKLGRAKSGKSMMWTKTAFGYYHNRKTGILEIVPLQATIVEQIFTDYLSGISLTKLRDKLNESGHIGKDIPWSYRTLRQTLDNPVYCGYIKFKGSLFEGMHKPIIPYETYLKVQKELEERQQQTYERNNNPRPFQAKYMLSGMARCGYCGAPLRIVLGHKRKDGSRTMKYHCANRFPRKTKGVTVYNDNKKCDSGTYDLSNLENTVIDNLIGLQENNDSLLKIINGNNQPILDTSSFKKQISQIDKKIQKNSDLYLNDFITMDELKDRTDSLQAEKKLLKAKISENESNDSTDVFELVKTQLGSIPINELSYDNKKKIVSNLVSKVDVTADNVDITFKFQLAQ

SEQ ID NO: 2305 - protein, 469 aa, synthetic construct
MSYTTPMRVAVYLRISEDRSGEQLGVARQREDCLKLCDQRKWVPVEYLDNDVSASTGKRRPAYEQMLADITAGKIAAVVAWDLDRLHRRPIELEAFMSLADEKRLALATVAGDVDLATPQGRLVARLKGSVAAHETEHKRARQRRAARQKAERGYPNWSKAFGYLPGPNGPEPDPRTAPLVKQAYADILAGASLGDVCRQWNNVGAFTITGRPWTTTTLSKFLRRPRNAGLRAYKGARYGPVDRNAIVGKAQWSPLVDEATFWAAQAVLDAPGRAPGRKSVRRHLLTGLAGCGKCGNHLAGSYRTDGRVVYVCKACHGVAILADNVEPILYHVVAERLAMPDAVDLLRREIHDAAEAETIRLELETLYDELDRLAVERAEGLLTARQVKISTDIVNAKITKLQAHQLDQERLRVFESIPLGTPQVAGMIAGLSPDRFRAVLDVLAEVVVQPVGKSGRIFNPERVQVNWR

SEQ ID NO: 2306 - protein, 469 aa, synthetic construct
MSYTTPVRAAVYLRISEDRSGEQLGVARQREDCLKLCDQRKWVPVEYLDNDVSASTGKRRPAYEQMLADITAGKIAAVVAWDLDRLHRRPIELEAFMSLADEKRLALATVAGDVDLATPQGRLVARLKGSVAAHETEHKKARQRRAARQKAERGYPNWSKAFGYLPGPNGPEPDPRTAPLVKQAYADILAGASLGDVCRQWNDAGTLTITGRPWTTTTLSKFLRKPRNAGLRAYKGARYGPVDRDAIVGKAQWSPLVDEATFWAAQAVLDAPGRAPGRKSVRRHLLTGLAGCGKCGNHLAGSYRTDGRVVYVCKACHGVAILADNIVPILYHIVAERLAMPDAVDLLRRVTHDAAEAETIRLELETLYGELDRLAVERAEGLLTGRQVKISTDIVDAKIAKLQACQLDQERLRVLDGIPLGTPQVAGMIAELSPDRFRAVLDVLAEVVVQPVGKSGRIFNPERVQVNWR

SEQ ID NO: 2307 - protein, 469 aa, synthetic construct
MSYTTPVRAAVYLRISEDRSGEQLGVARQREDCLKLCGQRKWVPVEYLDNDVSASTGKRRPAYEQMLADITAGKIAAVVAWDLDRLHRRPIELEAFMSLADEKRLALATVAGDVDLATPQGRLVARLKGCVAAHETEHKKARQRRAARQKAERGLPNWSKAFGYQPGPNGPEPDPRTAPLVEQAYADILAGASLGDVCRQWNDAGAFTITGRPWTTTTLSKFLRKPRNAGLRAYKGARYGPVDRDAIVGKAQWSPLVDEATFWAAQAVLDAPGRAPGRKSVRRHLLTGLAGCGKCGNHLAGSYRTDGRVVYVCKACYGIAILADNIEPILYHIVAERLAMPDAVDLLCREIHDAAEAETIRLELETLCGELDRLAVERAEGLLTARQVKISTDIVNAKITKLRARQLDQERLRVLDGIPLGTPQVAGMIAELSPDRFRAVLDVLAEVVVQPVGKRGGISDPERVQVNWR

SEQ ID NO: 2308 - protein, 485 aa, synthetic construct
MTRKVAIYTRVSTTNQAEEGFSIDEQIDRLTKYAEAMGWQVSDIYTDAGFSGAKLERPAMQRLINDIENKAFDTVLVYKLDRLSRSVRDTLYLVKDVFTKNKIDFISLNESIDTSSAMGSLFLTILSAINEFERENIKERMTMGKLGRAKSGKSMMWTKTAFGYYHNRKTGILEIVPLQATIVEQIFADYLSGISLTKLRDKLNESGHIGKDIPWSYRTLRQTLDNPVYCGYIKFKDSLFEGMHKPIIPYETYLKVQKELEERQQQAYERNNNPRPFQAKYMLSGVARCGYCGAPLRIVLGHKRKDGSRTMKYHCANRFPRKTKGVTVYNDNKKCDSGTYDLSNLENTVIDYLIGFQESNDSLRKIINGNNQPILDTSSFEKQISQIDKKIQKNSDLYLNDFITMDELKDRTDSLRAEKKLLKAKISENKFNDSTDVFELVKTQLGSIPINELSYDNKKKIVNNLVSKVDVTADNVDIIFKFQLA

SEQ ID NO: 2309 - protein, 469 aa, synthetic construct
MSYTTPVRAAVYLRISEDRSGEQLGVARQREDCLKLCGQRKWAPVEYLDNDVSASTGKRRPAYEQMLADIAAGKIAAVVAWDLDRLHRRPIELEAFMSLADEKRLALATVAGDVDLATPQGRLVARLKGSVAAHETEHKKARQRRAARQKAERGHPNWSKAFGYLPGPNGPEPDPRTAPLVKQAYADILAGASLGDVCRQWNGAGASTITGRPWTTTALSKFLRKPRNAGLRAYKGARYGPVDRDAIVGKAQWSPLVDEATFWAAQAVLDAPGRAPGRKSVRRHLLTGLAGCGKCGNHLAGSYRTDGRVVYVCKACHGVAILADNIVPILYHIVAERLAMPDAVDLLRREIHDAAEAETIRLELETLYDELDRLAVERAEGLLTARQVKICTDIVNAKITKLQVRQLDQERLRVLDGIPLGTPQVAGAIAELSPDRFRAVLDVLAEVVVQPVGKSGRILNPERVQVNWR

SEQ ID NO: 2310 - protein, 469 aa, synthetic construct
MCYTTPVRAAVYLRISEDRSGEQLGVARQREDCLKLCDQRKWVPVEYLDNDVSASTGKRRPAYEQMLADITAGKIAAVVAWDLDRLHRRPIELEAFMSLADERRLALATVAGDVDLATPQGRLVARLKGSVAAHETEHKKARQRRAARQKAERGHPNWSKAFGYLPGPNGPEPDSRTAPLVKQAYADILAGASLGDVCRQWNAAGAFTITGRPWTTTTLSKFLRKPRNAGLRAYKGARYGPVDRDAIVGKAQWSPLVDEATFWAAQAVLDAPGRAPGRKSVRRHLLTGLAGCGKCGNHLAGSYRTDGRVVYVCKACHGVAILADNIEPILYHIVAERLAMPDAVDLLRREVHDAAEAETIRLELETLYGELDRLAVERAEGLLTARQVKISTDIVNAKITKLQARQLDQERLRVFDGIPLGTPQVAGRIAELSPDRFRAVLNVLAEVVVQPVGKSGRIFNPERVQVNWR

SEQ ID NO: 2311 - protein, 451 aa, synthetic construct
MKAAIYIRVSTREQVENYSIQAQTEKLTALCRSKDWDVYDIFIDGGYSGSNMNRPALNEMLSKLHEIDAVVVYRLDRLSRSQRDTITLIEEYFLKNNVEFVSLSETLDTSSPFGRAMIGILSVFAQLERETIRDRMVMGKIKRIEAGLPLTTAKGRTFGYDVIDTKLYINEEEAKQLQLIYDIFEEEQSITFLQKRLKKLGFKVHAYNRYNNWLTNDLYCGYVSYKDKVHVKGIHEPIISEEQFYRVQEIFTRMGKNPNMNRDSASLLNNLVVCSKCGLGFVHRRKDAMSRDKKYHYRYYSCKTYKHIHELEKCGNKIWRADKLEELVINRVNNYSLASRNVGKENELDSLNEKLKIEHAKKRRLFDLYINGSYEVSELDSMMNDIDAQINYYESQIEANEELRINKKIREKLADLATADFDSLEFREKQLYLKSLINKIYIDGEVTIEWL

SEQ ID NO: 2312 - protein, 452 aa, synthetic construct
MKAAIYIRVSTREQVENYSIQAQTEKLTALCRSKDWDVYDIFIDGGYSGSNMNRPALNEMLSKLHEIDAVVVYRLDRLSRSQRDTITLIEEYFLKNNVEFVSLSETLDTSSPFGRAMIGILSVFAQLERETIRDRMVMGKIKRIEAGLPLTTAKGRTFGYDVIDTKLYINEEEAKQLQLIYDIFEEEQSITFLQKRLKKLGYKVRTYNRYNNWLTNDLYCGYVSYKDKVHVKGIHEPIISEEQFYRVQEIFTRMGKNPNMNRDSASLLNNLVVCSKCGLSFVHRRKDAVTRDKKYHYRYYSCKTYKHIHELEKCGNKIWRADKLEELIINRVNNYSIASRNADKEDELDSLNEKLKIEHAKKKRLFDLYINGSYEVGELDSMMSDIDAQINYYESQIEANGELKKSKKIQENLAELATVDFDSLEFREKQLYLKSLINKIYIDGEQVTIEWL

SEQ ID NO: 2313 - protein, 485 aa, synthetic construct
MTKKVAIYTRVSTTNQAEEGFSIDEQIERLTKYAEAMGWQVSDTYTDAGCSGAKLERPAMQRLINDIENKAFDTVLVYKLDRLSRSVRDTLYLVKDVFTKNKIDFISLSESIDTSSAMGSLFLTILSAINEFERENIKERMTMGKLGRAKSGKSMMWTKTAFGYYHNRKTGILEIVPLQATIVEQIFTDYLSGISLTKLRDKLNESGHIGKDIPWSYRTLRQTLDNPVYCGYIKFKDSLFEGMHKPIIPYETYLKVQKELEERQQQTYERNNNPRPFQAKYMLSGMARCGYCGAPLRIVLGHKRKDGSRTMKYHCANRFPRKTKGVTVYNDNKKCDSGTYDLSNLENTVIDNLIGFQEDNDSLLKIINGNNQPILDTSSFKKQISQIDKKIQKNSDLYLNDFITMDELKDRTDSLQAEKKLLEARISENKFNDSTDVFELVKIQLGSIPINELSYDNKKKIVNNLVSKVDVTADNVDIIFKFQLA

SEQ ID NO: 2314 - protein, 469 aa, synthetic construct
MSNTTPVRAAVYLRISEDRSGEQLGVARQREDCLKLCGQRKWEPVEYLDNDVSASTGKRRPAYEQMLADITAGKIAAVVAWDLDRLHRRPIELEAFMSLADEKRLALATVAGDVDLATPQGRLVARLKGSVAAHETEHKKARQRRAARQKAEHGHPNWSKAFGYLPGPNGPEPDPRTAPLVKQAYADILAGASLGDVCRQWNDAGAFTTTGRPWTTTALSKFLRKPRNAGLRTYKGARHGPVDRDAIVGKAQWSPLVDEATFWAAQAVLDAPGRAPGRKSVRRHLLTGLAGCGKCGNHLAGSYRTDGRVVYVCKACHGVAILADNIEPILYHIVAGRLAMPDAVDLLRREIHDAAEAETIRLELGALYGELDRLAVERAEGLLTARQVKISTDIVEAKITKLQARQLDQERLRVFDGIPLGTPQVAGVIADLSPDRFRAVLDVLAEVVVQPVGKGGRIFNPERVQVNWR

SEQ ID NO: 2315 - protein, 485 aa, synthetic construct
MTKKVAIYTRVSTTNQAEEGFSIDEQIDRLTKYAEAMGWQVSDTYTDAGFSGAKLERPAMKRLINDIENKAFDTVLVYKLDRLSRSVRDTLYLVKDVFTKNKIDFVSLNESIDTSSAMGSLFLTILSAINEFERENIKERMTMGKLGRAKSGKSMMWTKTAFGYYHNRRTGILEVVPLQATIVEQIFTDYLSGISLTRLRDKLNESGHIGKDIPWSYRTLRQTLDNPVYCGYIKFKDSLFEGMHKPIIPYETYLRVQKELEERQQQTYERNNNPRPFQAKYMLSGMARCGYCGAPLKIVLGHKRKDGSRTMKYHCANRSPRKTKGVTVYNDNKKCDSGTYDLNNLEDTVIDNLVGFQENNDSLLKIINGNSQPILGTSSFEKQINQIDKKIQKNSDLYLNDFITMDELKERTDSLQAEKKLLEAKISENKFNDSTDVFELVKTQLGSTPINELSYDNKKKIVNSLVSKVDVTANNVDIIFKFQLA

SEQ ID NO: 2316 - protein, 452 aa, synthetic construct
MKAAIYIRVSTREQVENYSIQAQTEKLTALCRSKDWDVYDIFIDGGYSGSNMNRPALNEMLSKLHEIDAVVVYRLDRLSRSQRDTITLIEEYFLKNGVEFVSLSETLDTSSPFGRAMIGILSVFAQLERETIRDRMVMGKIKRIEAGLPLTTAKGRTFGYDVIDTKLYINEEEAKQLRLIYDIFEEEQSITFLQKRLKKLGFKVRTYNRYSNWLTNDLYCGYVSYKDKVHVKGIHEPIISEEQFCRVQEIFTRMGKNPNMNRDSASLLNNLVVCSKCGLGFVHRRKDAMSRDKKYHYRYYSCKTYKHIHELEKCGNKIWRADKLEELIINRVNNYSVASRNVDKEDELDSLNEKLRIEHAKKKRLFELYINGRYEVSELDSMMNDIDAQINYYESQIEANEELKENKKIQENLANLATVDFDSLGFREKQLYLKSLINKIYIDGEQVTIEWL

SEQ ID NO: 2317 - protein, 452 aa, synthetic construct
MKAAIYIRVSTQEQVENYSIQAQTEKLTALCRSKDWDVYDIFIDGGYSGSNMNRPALNEMLSKLHEIDAVVVYRLDRLSRSQRDTTTLIEEYFLKNNVEFVSLSETLDTSSPFGRAMIGILSVFAQLERETIRDRMVMGKIKRIEAGLPLTTAKGRTFGYDVIDTKLYVNEEEAKQLRLIYDIFEEEQSITSLQKRLKKLGFKVRTYNRYTSWLTNDLYCGYVSYKDKVHVKGIHEPIISEEQFYRVQEIFTRMGKNPNMNRDSASLLSNLVVCSKCGLGFVHRSKDTMSRGKKYHYRYYSCKTYKHTHELEKCGNKTWRADKLEELIISRVNNYSFASRSVDKEDELDSLNEKLKIEHAKKKRLFDLYINGSYEVSELDSMMNDIDAQINYYESLIEANEELKENKKIQENLAELATVDFDSLEFREKQLYLKSLINKIYIDGEQVTIEWL

SEQ ID NO: 2318 - protein, 485 aa, synthetic construct
MTRKVAIYTRVSTTNQAEEGFSIDEQVDRLTKYAEAMGWQVSDTYTDAGFSGAKLERPAMQRLINDIENKAFDAVLVYKLDRLSRSVRDTLYLVKGVFTKNKIDFISLNESIDTSSAMGSLFLTILSAINEFERENIKERMTMGKLGRAKSGKSMMWTKTAFGYYHNRKTGILEIVPLQATIVEQIFTDYLSGISLTKLRDKLNESGHIGKDIPWSYRTLRQTLDNPVYCGYIKFKDSLFEGMHKPIIPYETYLKVQKELEERQRQTYERNNNPRPFQAKYMLSGMARCGYCGAPLKIVLGHKRKDGSRAMKYHCANRFPRKTKGVTVYNDNKKCDSGTYDLNNLENTVIDNLIGFQENSDSLLKIINGNNQPILDTSSFKKQISQIDKKIQKNSDLYLNDFITMDELKDRTDSLQAEKKLLKAKISENKFNDSIGVFELVKTQLGCIPINELSYDNKKKIVNNLVSKVDVTADNVDIIFKFQLA

SEQ ID NO: 2319 - protein, 485 aa, synthetic construct
MTKKVAIYTRVSTTNQAEEGFSIDEQIDRLTKYAEAMGWQVSDTYTDAGFSGAKLERPAMQRLINDIENKAFDTVLVYKLDRLSRSVRDTLYLVKDVFTKNKVDFISLNESIDTSSAMGSLFLTILSAINEFERESIKERMTMGKLGRAKSGKSMMWTKTAFGYYHNRKTGILEIVPLQATIVEQIFTDYLSGISLTKLRDKLNESGHIGKDIPWSYRTLRQTLDNPVYCGYIKFKGSLFEGMHKPIIPYETYLKVQKELGERQQQTYERNNNPRPFQAKYMLSGMARCGYCGAPLKIVLGHKRKDGSRTMKYHCANRFPRKTKGVTVYNDNKKCDSGTYDLSNLENTVIDNLIDFQENDDSLLKIINGNDQPILDTSSFKEQISQIDKKIQKNSDLYLNDFITMDELKDRTDSLQAEKKLLKAKISESKFNDSTDVFELVKTQLGSIPISELSYENKKKIVNNLVSKVDVTADNVDIIFKFQLA

SEQ ID NO: 2320 - protein, 452 aa, synthetic construct
MKAAIYIRVSTREQVENYSIQAQTEKLTALCRSKDWDVYDIFIDGGYSGSNMNRPALNEMLSKLHEIDAVVVYRLDRLSRSQRDTIALIEEYFLKNNVEFVSLSETLDTSSPFGRAMIGILSVFAQLERETIRDRMVMGKIKRIEAGLPLTTAKGRTFGYDVIDTKLYINEEEAKQLQLIYDIFEEEQSITSLQRRLKKLGLKVRTYSRYNDWLTNDLYCGYVSYKDKVHVRGIHEPIISEEQFYRVQEIFARMGKNPNMNRDSASLLNNLVVCSKCGLGFVHRRKDTMSRGKKYHYRYYSCKTYKHTHELEKCGNKIWRADKLEELVINRVNNYSFASRNVDKEDELDSLYEKLKIEHAKKKRLFDLYINGSYEVSELDSMMSDIDAQISYYESQIEANEELRKNKKIQENLANLATVDYDSLEFREKQLYLKSLINKIYIDGEQVTIEWL

SEQ ID NO: 2321 - protein, 452 aa, synthetic construct
MKAAIYIRVSTQEQVGNYSIQAQTEKLTALCRSKDWDVYDTFVDGGYSGSNMNRPALNEMLSKLHEIDAVVVYRLDRLSRSQRDTTTLIEEYFLKNNVEFVSLSETLDTSSPFGRAMIGILSVFAQLERETIRDRMVMGKIKRIEAGLPLTTAKGRTFGYDVIDTKLYINEEEAKQLQLIYDIFEEEQSITSLQKRLKKLGFKVRTYNRYNNWLTNDLYCGYVSYKDKVHVKGIHEPIISEEQFHRVQEIFTRMGKNPNMNRDSASLLNNLVVCSKCGLSFVHRSKDTMSRGKKYHYRYYSCKTYKHTHELEKCGNKTWRADKLEELIINRVNNHSFASRNVDKEDELDCLNEKLKIEHAKKKRLFDLYINGSYEVSALDSMMNDIDAQINYYESQIEANGDLKKNKKIQENLADLATVDFNSLEFREKQLYLKSLINKIYIDGEQVTIEWL

SEQ ID NO: 2322 - protein, 469 aa, synthetic construct
MSYTTPVRAAVYLRISEDRSGEQLGVARQREDCLKLCGQRKWEPVEYLDNDVSASTGKRRPAYEQMLVDITAGKIAAVVAWDLDRLHRRPIELEAFMSLADEKRLALATVAGDVDLATPQGRLVARLKGSVAAHETEHKKARQRRAARQKAERGHPNWSKAFGYLPGPNGPEPDPRTAPLVKQAYADILTGASLGDVCRQWNGAGAFTITGRPWTTTTLSKFLRKPRNAGLRAYKGARYGPVDRDAIVGKAQWSPLVDEATFWAAQAVLDAPGRAPGRKSVRRHLLTGLAGCGKCGNHLAGSYRTDGRVVYVCKACHGVAILADNIEPILYHIVAERLAMPDAVDLLRRGTHDAAEAETIRLGLETLYGELDRLAVERAEGLLTARQVKISTDIVSAKITKLQARQLDQERLRVFDGVPLGTPQVVGMIAELSPDRFRAVLDVLAEVVVQPVGKGGRIFNPERVRVNWR

SEQ ID NO: 2323 - protein, 485 aa, synthetic construct
MTKKVAIYTRVSTTNQAEEGFSIDEQIDRLTKYAEAMGWQVSDTYTDAGFSGAKLERPAMQRLINDIENKAFDTVLVYKLDRLSRSVRDTLYLVKDVFTKNKIDFISLNESINTSSAMGSLFLTILSAINEFERENIKERMTMGKLGRAKSGKSMMWTKTAFGYYHNRKTGILEIVPLQATIVEQIFTDYLSGISLTKLRDKLNESGHIGKDIPWSYRTLRQTLDNPVYCGYIKFKDSLFEGMHKPIIPYETYLKVQKELEERQQQTYERNNNPRPFQAKYMLSGMARCGYCGAPLRIVLGHRRKDGSRTMKYHCANRFPRKTKGITVYNDNKKCDSGTYDLSNLENAVIDNLIGFQENNDSLLKIINGNNQPIPDTSSLKKQISQIDKKILKNSDLYLNDFITMDELKDRTDSLQAEKKLLEAKISENKLNDSADVFELVKTQLGSIPINELSYDNKKKIVNNLVSKVDVTADNVDIIFKFQLA

SEQ ID NO: 2324 - protein, 469 aa, synthetic construct
MSYTTPVRAAVYLRISEDRSGEQLGAARQREDCLKLCDQRKWVPVEYLDNDVSASTGKRRPAYEQMLADIAAGKIAAVVAWDLDRLHRRPIELEAFMSLADEKRLALATVAGDVDLATPQGRLVARLKGSVAAHETEHKRARQRRAARQKAERGYPNWSKAFGYLPGPNGPEPDPRTAPLVKQAYADILAGASLGDVCRQWNAAGAFTITGRPWTTTTLSKFLRKPRNAGLRAYKGARYGPVDRDAIVGKAQWSPLVDEATFWATQAVLDAPGRAPGRKSVRRHLLTGLAGCGKCGNHLAGSYRTDGRVVYVCKACHGVAILADNIEPILYHIVAERLAMPDAVDLLRCEVHDAAEAETIRLELETLYGELDRLAVERAEGLLTARQVKISTDIVNAKITKLQARQQDQERLRVLDGIPLGTPQVAGMIAELSPDRFRAVLDVLAEVVVQPVGKSGRIFNPERVQVNWR

SEQ ID NO: 2325 - protein, 485 aa, synthetic construct
MTKKVAIYTRVSTTNQAEEGFSIDEQIDRLTKYAEAMGWRVSDTYTDAGFSGAKLERPAMQRLINDIGSKAFDTVLVYKLDRLSRSVRDTLYLVKDVFTKNKIDFISLSESIDTSSAMGSLFLTILSAINEFERENIKERMTMGKLGRAKSGKSMMWTKTAFGYYHNRKTGILEIVPLQATIVEQIFTDYLSGISLTKLRDKLNESGHIGKDIPWSYRTLRQTLDNPVYCGYIKFKGSLFEGMHKPIIPYETYLKVQKELEERQQQTYERNNNPRPFQAKYMLSGMARCGYCGAPLRIVLGHRRKDGSRTMKYHCANRFPRKTKGVTVYNDNKKCDSGTYDLSNLENTVIDNLIGFQEDNDSLLKIINGNNQPILDTSSFKEQVSQIDKKIQKNSDLYLNDFITMDELKDRTDSLQAEKKLLKAKISENKFNDSTDVFELVKTQLGSIPINELSYDNKKKIVNNLVSKVDVTADNVDITFKFQLA

SEQ ID NO: 2326 - protein, 485 aa, synthetic construct
MTKKVAIYTRVSTTNQAEEGFSIDEQIDRLTKYAEAMGWQVSDTYTDAGFSGAKLERPAMQRLINDIENKAFDTVLVYKLDRLSRSVRDTLYLVKDVFTKSKIDFISLNESIDTSSAMGSLFLTILSAINEFERENIKERMTMGKLGRAKSGKSMMWTRTAFGYYHNRKTGILEIVPLQATIVEQIFTDYLSGISLTKLRDKLNESGHIGKDIPWSYRTLRQTLDNPVYCGYIKFKDSLFEGMHKPIIPYETYLKVQKELEERQQQTYERNNNPRPFQAKYMLSGMARCGYCGAPLRIVLGHKRKDGSRTMKYHCANRFPRKVKGVTVYNDNKKCDSGTYDLSNLENTVIDNLIGFQENNDSLLEIINGNNQPILDTSSLKKQISQIDKKIQKNSELYLNDFITMDELKDRTDSLQAEKKLLKAKISENKFNDSTDVFELVKTQLGSIPINELSYDNKKKIVNNLVSKVDVTADNVDIIFKFQLA

SEQ ID NO: 2327 - protein, 485 aa, synthetic construct
MTKKVAIYTRVSTTNQAEEGFSIDEQIDRLTKYAEAMGWRVSDTYTDAGFSGAKLERPAMQRLINDIESKAFDTVLVYKLDRLSRSVRDTLYLVKDVFTKNKIDFISLNESIDTSSAMGSLFLTILSAINEFERENIKERMTMGKLGRAKSGKSMMWTKTAFGYYHNRKTGILEIVPLQATIVEQIFTDYLSGISLTKLRDKLNESGHIGKDIPWSYRTLRQTLDNPVYCGYIKFKDSLFEGMHKPIIPYETYLKVQKELEERQQQTYERNNNPRPFQAKYMLSGMARCGYCGAPLRIVLGHKRKDGSRTMKYHCANRFPRKTKGITVYNDNKKCDSGTYDLSNLENTVIDNLIGFQENNDSLLKIINGNNQPILDTSSFKRQISQIDKKIQRNSDLYLNGFITMDELKDRTDSLQAEKKLLQAKISENKFNDCTDVFELVKTQLGSIPISELSYDNKKKIVNNLVSKVDVTADNVDIIFKFQLT

SEQ ID NO: 2328 - protein, 469 aa, synthetic construct
MSYTAPVRAAVYLRISEDRSGEQLGVARQREDCLKLCDQRKWVPVEYLDNDVSASTGKRRPAYEQMLADITAGKIAAVVAWDLDRLHRRPIELEAFMSLADEKRLALATVAGDVDLATPQGRLVARLKGSVAAHETEHKKARQRRAARQKAERGHPNWSKAFGYLPGPNGPEPDPRTAPLVKQAYVDILAGASLGDVCRRWNDAGAFTITGRPWTTTTLSKFLRKPRNAGLRAYKGARYGPVDRDAIVGKAQWSPLVDEATFWAAQAVLDAPGRAPGRKSVRRHLLTGLAGCGKCGNRLAGSYRTDGRVVYVCKACHGIAILADNIEPILYHVVAERLAMPDAVDLLRREIHDAAEAETIRLELATLYGELDRLAVERAEGLLTARQVKISTDIVNAKITELQARQLDQERLRVLDGIPLGTPQVAGMIAELSPDRFRAVLDVLAEVVVLPVGKGGRIPNPERVQVNWR

SEQ ID NO: 2329 - protein, 452 aa, synthetic construct
MKAAIYIRVSTQEQVENYSIQAQTEKLTALCRSKDWDVYDIFIDGGYSGSNMNRPALNEMLSKLHEIDAVVVYRLDRLSRSQRDTTTLIEEYFLKNNVEFVSLSETLDTSSPFGRAMIGILSVFAQLERETIRDRMVMGKIKRIEAGLPLTTAKGRTFGYDVIDTKLYINEEEAKQLRLIYDIFEEEQSITSLQKRLKKLGFKVRTYSRYNNWLTNDLYCGYVSYKDKVHVKGIHEPIISEEQFYRVQEIFTRMGKNPNMNRDSASLLNNLVVCSKCGLGFVHRSKDTMCRGKKYHYRYYSCKTYKHTHELEKCGNKTWRADKLEELIINRVSNYSFASRNVDKGDELDSLNEKLKIEHAKKKRLFDLYINGSYEVSELDSMMNDIDAQINCYESQIEANEELKKNREIQENLADLATVDFDSLEFREKQLYLKSLIRKIYIDGEQVTIEWL

SEQ ID NO: 2330 - protein, 469 aa, synthetic construct
MCYTTPVRAAVYLRISEDRSGEQLGVARQREDCLKLCDQRKWVPVEYLDNDVSASTDKRRPAYEQMLADITAGKIAAVVAWDLDRLHRRPIELEAFMSLADEKRLALATVAGDVDLATPQGRLVARLKGSVAAHETEHKKARQRRAARQKAERGHPNWSKAFGYLPGPNGPEPDPRTAPLVKQAYADILAGASLGDVCRQWNDAGAFTITGRPWITTTLSKFLRKPRNAGLRAYKGARYGPVDRDAIVGKAQWSPLVDEATFWAAQAVLDAPGRAPGRKSVRRHLLTGLAGCGKCGNHLAGSYRTDGQVVYVCKACHGVAILADNIEPILYHIVAERLAMPDAVDLLRREIHDATEAETIRLELEALYGELDRLAVERAEGLLTARQVKISTDIVNAKITKLQTRQLDQERLRVFDGIPLGTPQVVGMIAELSPDRFRAVLDVLAEVVVQPVGKSGRIFNPERVQVNWR

SEQ ID NO: 2331 - protein, 485 aa, synthetic construct
MTKKVAIYTRVSTTNQAEEGFSIDEQIDRLTKYAEAMGWQVSDTYTDAGSSGAKLERPAMQRLINDIENKAFDTVLVYKLDRLSRSVRDTLYLVKDVFTKNKVDFISLSESIDTSSAMGSLFLTILSAINEFERENIRERMTMGKLGRAKSGKSMMWTKTAFGYYHNRKTGILEIVPLQATIVEQIFTDYLSGISLTKLRDKLNESGHIGKDIPWSYRTLRQTLDNPVYCGYIKFKDSLFEGMHKPIIPYETYLKVQKELEERQQQTYERNNNPRPFQAKYMLSGMARCGYCGAPLRIVLGHKRKDGSRTMKYHCANRFPRKTKGVTVYNDNKKCDSGTYDLSSLENTVIDSLIGFQENNDSLLKIISGNNQPILDTSSFKEQISQIDKKIQKNSDLYLNDLITMDELKNRTDSLQAEKKLLKAKISENKFNDSTDVFELVKTQLGGIPINELSYDNKKEIVNNLVSKVDVTADSVDIIFKFQLA

SEQ ID NO: 2332 - protein, 452 aa, synthetic construct
MKAAIYIRVSTREQVENYSIQAQTEKLTALCRSKDWDVYDIFIDGGYSGSNMNRPALNEMLSKLHEIDAVVVYRLDRLSRSQRDTITLIEEYFLKNNVEFVSLSETLDTSSPFGRAMIGILSVFAQLERETIRDRMVMGKIKRVEAGLPLTTAKGRTFGYDVIDTKLYVNEEEAKQLQLIYDIFEEEQSITSLQKRLKELGFKVRTYSRYNNWLTNDLYCGYVSYKDKVHVRGIHEPIISEEQFYRVQEIFTRTGKNPNMNRDSASLLNNLVVCGKCGLGFVHRRKDTTSRGKKYHYRYYSCKTYKHTHELEKCGNKIWRADKLEELIINRVNDYSFASRSADKEDELDSLNEKLKIEHAKKKRLFDLYINGSYEVSELDSMMNDIDAQINYYESRIEANEELKKNKKIQENLANLATVDYDSLEFREKQLYLKSLINKIYIDGERVTIEWL

SEQ ID NO: 2333 - protein, 452 aa, synthetic construct
MKAAIYIRVSTQEQVGNYSIQAQTEKLTALCRSKDWDVYDIFVDGGYSGSNMNRPALNEMLSKLHEIDAVVVYRLDRLSRSQRDTTTLIEEYFLKNNVEFVSLSETLDTSSPFGRAMIGILSVFAQLERETIRDRMVMGKIKRIEAGLPLTTAKGRTFGYDVIDTKLYINEEEAKQLQLIYDIFEEEQSITFLQKRLKKLGFKVRTYNRYNSWLTNDLYCGYVSYKDKVHVKGIHEPIISEEQFYRVQEIFTRMGRNPNMNRDSASLLNNLVVCGKCGLGFVHRSKDTMSRGKKYHYRYYSCKTYKHAHELEKCGNKTWRADRLEELIINRVNNYSFASRNVDKEDELDSLNEKLKIEHAKKSRLFDLYINGSYEVSELDSMMNDIDAQINYYESQIEANEELRKNKKIQENLADLATVDFDSLEFREKQLYLKSLINKIYIDGEQVTIEWL

SEQ ID NO: 2334 - protein, 452 aa, synthetic construct
MKAAIYIRVSTREQVENYSIQAQTEKLTALCRSKDWDVYDIFIDGGYSGSNMNRPALNEMLSKLHEIDAVVVYRLDRLSRSQRDTITLIEEYFLKNSVEFVSLSETLDTSSPFGRAMIGILSVFAQLERETIRDRMVMGKIKRIEAGLPLTTAKGRTFGYDVIDTKLYINEEEAKQLQLIYDIFEEERSITLLQRRLKELGFKVRTYNRYNNWLTNDLYCGYVSYKDKVHVKGIHEPIISEEQFYRVQEIFTRMGKNPNMNRDSASLLNSLVVCSKCGLGFVHRRKDIVSRGKKYHYRYYSCKTYKHIHELEKCGNKIWRADKLEELIINRVNNYSFASRNADKEDELDSLNEKLKIEHAKKKRLFDLYINGSYEVSELDSMMNDIDAQINYYESQIEANKELRKNKKIRENLAHLATVDFDSLEFREKQLYLKSLINKIYIDGEQVTIEWL

SEQ ID NO: 2335 - protein, 452 aa, synthetic construct
MKAAIYIRVSTREQVENYSIQAQTEKLTALCRSKDWDVYDIFIDGGYSGSNMNRPALNEMLSKLHEIDAVVVYRLDRLSRSQRDTITLIEEYFLKNNVEFVSLSETLDTSSPFGRAMIGILSVFAQLERETIRDRMVMGKVKRIEAGLPLTTAKGRTFGYDVIDTKLYINEEEAKQLQLIYDIFEEEQSITFLQKRLKKLGFKVRTYNRYNNWLTNDLYCGYVSYKDKVHVKGIHEPIISEEQFYRVQEIFTRMGKSPNMNRDSASLLNNLVVCSKCGLGFVHRRKDATSRDKKYHYRYYSCKTYKHIHELEKCGNKIWRADKLEELIINRVNDYSVASRNVDKEDELDSLNEKLKIEHAKKRRLFDLYINGSYGVSELDSMMNDIDAQINYYESQIEANEELKKNKKIQENLAYLATVDFDSLEFREKQLYLKSLISKIYIDGEQVTIEWL

SEQ ID NO: 2336 - protein, 452 aa, synthetic construct
MKAAIYIRVSTREQVENYSIQAQTEKLTALCRSKDWDVYDIFIDGGYSGSNMNRPALNEMLSKLHEIDAVVVYRLDRLSRSQRDTITLIEEYFLKNNVEFVSLSETLDTSSPFGRAMIGILSVFAQLERETIRDRMVMGKIKRIEAGLPLTTAKGRTFGYDVIDTKLYINEEEARQLQLIYDIFEEEQSITFLQKRLKKLGFKVRSYNRYNNWLTNDLYCGYVSYKDKVHVKGVHEPIISEEQFYRVQEIFTRMGKNPNMNRDSASLLNNLVVCGKCGLGFVHRRKDTMSRDKKYHYRYYSCKTYKHIHELEKCGNKIWRADKLEELIINRVNNYSLANRNVDKEDELDSLNEKLKIEHAKKKRLFDLYINGSYEVSELDGMMNDIDAQINYYESQIEANEELKRNKKIQENLAYLATVDFDSLEFREKQLYLKSLINKIYIDGEQVTIEWL

SEQ ID NO: 2337 - protein, 452 aa, synthetic construct
MKAAIYIRVSTREQVENYSIQAQTEKLTALCRSKDWDVYDIFIDGGYSGSNMNRPALNEMLSRLHEIDAVVVYRLDRLSRSQRDTITLIEEYFLKNDVEFVSLSETLDTSSPFGRAMIGILSVFAQLERETIRDRMVMGKIKRIEAGLPLTTAKGRTFGYDVIDTKLYINEEEAKQLQLIYDIFEEEQSITFLQKRLKKLGFKVRTYNRYNNWLTNDLYCGYVSYKDKVHVKGIHEPIISEEQFNRVQEIFARMGKNPNMNRDSASLLNNLVVCSKCGLGFVHRRKDAMSRDKKYHYRYYSCKTYKHIHELEKCGNKIWRADKLEELVINRVNNYSLAGRNVDKEDELDSLNEKLKIEHAKKKRLFDLYINGNYEVSELDSMMNGIDAQINYYESQIEANGELKKNKKIQENLAGLATVDFDSLEFREKQLYLKSLINKIYIDGEQVTIEWL

SEQ ID NO: 2338 - protein, 469 aa, synthetic construct
MCYTTPVRAAVYLRISEDRSGEQLGVARQREDCLKLCDQRKWVPVEYLDNDVSASTGKRRPAYEQMLADITAGKIAAVVAWDLDRLHRRPIELEAFMCLADEKRLALATAAGDVDLATPQGRLVARLKGSVAAHETEHKKARQRRAARQKAERGHPNWSKAFGYLPGPNGPEPDPRTAPLVKQAYADILAGASLGDVCRQWNDAGAFTITGRPWTTTTLSKFLRKPRNAGLRAYKGARYGPVDRNAIVGKARWSPLVDEATFWAAQAVLDAPGRAPGRKSVRRHLLTGLAGCGKCGNHLAGSYRTDGRVVYVCKACHGVAILADNIEPILYHIVAERLAMPDAVDLLRREIHDAAEAETIRLELETLYGELDRLAVERAEGLLTARQVKISTDIVNAKITKLQVRQLDQERLRVFDGIPLGTPQVAGMIAVLSPDRFRAVLDVLAEVVVQPVGKSGRIFNPERVQVNWR

SEQ ID NO: 2339 - protein, 485 aa, synthetic construct
MTKKVAIYTRVSTTNQAEEGFSIDEQIDRLTKYTEAMGWQVSDTYTDAGFSGAELERPAMQRLINDIENKAFDTVLVYKLDRLSRSVRDTLYLVKDVFTKNKIDFISLNESIDTSSAMGSLFLTILSAINEFERENIKERMTMGKLGRAKSGKSMMWTKTAFGYYHNRQTGILEIVPLQATIVEQIFTDYLGGISLTKLRDKLNESGHIGKDIPWSYRTLRQTLDNPVYCGYIKFKDSLFEGMHKPIIPYETYLKVQKELEERQQQTYERNNNPRPFQAKYMLSGMARCGYCGAPLRIVLGHKRKDGSRTMKYHCANRFPRKTKGVTVYNDNKKCDSGTYDLSNLENTVIDNLIGFQENDDSLLKIINGNNQPILDTSSLEKQISQIDKKIQKNSDLYLNDFITMDELKDRTDSLQAEKKLLKAKISKNKFNGSTDVFELVKTQLGSIPINELSYDNKKKIVNNLVSKVDVTADNVDIIFKFQLA

SEQ ID NO: 2340 - protein, 452 aa, synthetic construct
MKAAIYIRVSTREQVENYSIQAQTERLTALCRSKDWDVYDIFIDGGYSGSNMNRPALNEMLSKLHEIDAVVVYRLDRLSRSQRDTITLIEEYFLKNNVEFVSLSETLDTSSPFGRAMIGILSVFAQLERETIRDRMVMGKIKRIEAGLPLTTAKGRTFGYDVIDTKLYINEEEAKQLQLIYDIFEEERSITSLQKRLKKLGCKVRTYSRYNSWLTNDLYCGYVSYKDKVHVKGIHEPIISEEQFYRVQEIFTRMGKNPNMNRDSASLLNNLVVCSKCGLGFVHRRKDTMSRGKKYHYRYYSCKTYKHTHELEKCGNKIWRADKLEELIINRVNNYSFASRNVDKEDELDSLNEKLKIEHAKKKRLFDLYINGSYEVSELDSMMNDIDAQISYYEGQIEANEELKKNKKIQENLANLATVDYDSLEFREKQLYLKSLINKIYIDGEQVTVEWL

SEQ ID NO: 2341 - protein, 485 aa, synthetic construct
MTKKVAIYTRVSTTNQAEEGFSIDEQIDRLTKYAEAMGWQVSDTYTDAGVSGAKLERPAMQRLINDIESKAFDTVLVYKLDRLSRSVRDTLYLVKDVFTKNKIDFISLNESIDTSSAMGSLFLTILSAINEFERENIKERMTMGKLGRAKSGKSMMWTKTAFGYHHNRKTGILEIVPLQATIVEQIFTDYLSGISLTKLRDKLNESGHIGKDIPWSYRTLRQTLDNPVYCGYIKFKDSLFEGMHKPIIPYETYLKVQRELEERQQQTYERNNNPRPFQAKYMLSGMARCGYCGAPLKIVLGHKRRDGSRTMKYHCANRFPRKTKGVTVYNDNKKCDSGTYDLSDLENTVIDNLIGFQENNDSLLKIINGSNQPVLDTSSFKKQVSQIDKKIQKNSDLYLNDFITMDELKARTDSLQAEKKLLQAKISENKFNDSTDVFELVKTQLGSIPINELSYDNKKKIVNNLVSKVDVTADSVDIIFKFQLA

SEQ ID NO: 2342 - protein, 452 aa, synthetic construct
MKAAIYIRVSTREQVENYSIQAQTEKLTALCRSKDWDVYDIFIDGGYSGSNMNRPALNEMLSKLHEIDAVVVYRLDRLSRSQRDTITLIEEYFLKNNVEFVSLSETLDTSSPFGRAMIGILSVFAQLERETIRDRMVMGKIKRIEAGLPLTTAKGRTFGYDVIDTKLYINEEEAKQLQLIYDIFEEEQSITFLQKRLKKLGFKVRTYNRYNNWLTNDLYCGYVSYKDKVHVKGIHEPIISEEQFYRVQEIFTRMGKNPNMNRDSASLLNNLVVCSKCGLGFVHRRKDIMSHGKKYHYRYYSCKTYKHIHELEKCGNKIWRADKLEELIINRVNDYRFASRNADKEDELDSLNEKLKIEHAKKRRLFDLYINGSYEVSELDSMMNDIDAQINYYESQIEANEEQRKNKKSQENLADLATVDFDSLGFREKQLYLKSLINKIYIDGEQVTIEWL

SEQ ID NO: 2343 - protein, 485 aa, synthetic construct
MTKKVAIYTRVSTTNQAEEGFSIDEQIDRLTKYAEAMGWQVSDTYTDAGLSGAKLERPAMQRLINDIENKAFDTVLVYKLDRLSRSVRDTLYLVKDVFTKNKIDFISLNESIDTSSAMGSLFLTILSAINEFERENIKERMTMGKLGRAKSGKSMMWTKTAFGYYHNRKTGILEIVPLQATIVKQIFTDYLSGISLTKLRDKLNESGHIGKDIPWSYRTLRQTLDNPVYCGYIKFKDSLFEGMHKPIIPYETYLKAQKELEERQQQTYERNNNPRPFQAKYMLSGVARCGYCGAPLRIVLGHKRKDGSRTMKYHCANRFPRKTKGITVYNDNKKCDSGTYDLSNLEDTVIDNLIGFQEDDDSLLKIINGNNQPILDTSSFKKQISQINKKIQKISDLYLNDFITMDELKDRTDSLQAEKKLLKAKISENEFNDSTDVFELVKTQLGSIPINELSYDNKKKIVNNLVSRVDVTADNVDIIFKFQLA

SEQ ID NO: 2344 - protein, 452 aa, synthetic construct
MKAAIYIRVSTQEQVGNYSIQAQTEKLTALCRSKDWDVYDIFIDGGYSGSNMNRPALNEMLSKLHEIDAVVVYRLDRLSRSQRDTTTLIEEYFLKNNVEFVSLSETLDTSSPFGRAMIGILSVFAQLERETIRDRMVMGKIKRIEAGLPLTTAKGRTFGYDVIDTKLYINEEEAKQLQLIYDIFEEEQSITSLQKRLKKLGFKVRTYNRYNNWLTNDLYCGYVSYKDKVHVKGIHEPIISEEQFYRVQEIFARMGKNPNMNRDSASLLNNLVMCGKCGLSFVHRCKDTMSRGKKYHYRYYSCKTYKHTHELEKCGNKTWRADKLEELIINRVNNYSFASRNADGEGELDSLNEKLKIEHAKKKRLFDLYINGSYEVSELDSMMNDIDAQINYYESQIEANEELEKNKKIRENLAGLATVDFDSLEFREKQLYLKSLINKIYIDGEQVTIEWL

SEQ ID NO: 2345 - protein, 452 aa, synthetic construct
MKAAIYIRVSTREQVENYSIQAQTEKLTALCRSKDWDVYDIFVDGGYSGSNMNRPALNEMLSKLHEVDVVVVYRLDRLSRSQRDTITLIEEYFLKNNVEFVSLSETLDTSSPFGRAMIGILSVFAQLERETIRDRMVMGKIKRIEAGLPLTTAKGRTFGYDVIDTKLYINEEEAKQLQLIYDIFEEEQSITFLQKRLKKLGFKVRTYNRYNNWLTNDLYCGYVSYKDKVHVKGIHEPIISEEQFYRVQEIFARMGKNPNMNRDSASLLNNLVVCSKCGLGFVHRRKDAMSRDKKYHYRYYSCKTYKHIHELEKCGNKIWRADKLEELIIDRVNNYSLAGRNVDKEDELDSLNEKLKIEHAKKKRLFDLYINGSYEVSELDSMMNDIDAQINYYESQIEANEELRKNKKIQETLADLATVDFDGLEFREKQLYLKSLINKIYIDGEQVTIEWL

SEQ ID NO: 2346 - protein, 469 aa, synthetic construct
MSYITPVRAAVYLRISEDRSGEQLGVARQREDCLKLCGQRKWVPVEYLDNDVSASTGKRRPAYEQMLADITTGKIAAVVAWDLDRLHRRPIELEAFMSLADEKRLALATVAGDVDLATPQGRLVARLKGCVAAHETEHKKARQRRAARQKAERGYPNWNKAFGYLPGPNGPEPDPRTAPLVKQAYADILAGASLGDVCRQWNDTGAFTITGRPWTTATLSKFLRKPRNAGLRTYKGARYGPVDRDAIVGKAQWSPLVDEATFWAAQAVLDAPGRAPGRKSVRRHLLTGLAGCGKCGNHLAGSYRTDGRVVYACKACHGVVILADNIEPILYRIVAERLAMPDAVDLLRREIHDAAEAETIRLELETLYGELDRLAVERAEGLLTARQVKISTDIVNAKITKLQACQLDQERLRVFDGIPLGTPQVAGVIAELSPDRFRAVLDVLAEVVVQPVGKNGRIFNPERVQVNWR

SEQ ID NO: 2347 - protein, 452 aa, synthetic construct
MKAAIYIRVSTQEQVENYSIQAQTEKLTALCRSKDWDVYDIFIDGGYSGSNMNRPALNEMLSKLHEIDAVVVYRLDRLSRSQRDTTTLIEEYFLKNNVEFVSLSETLDTSSPFGRAMIGILSVFAQLERETIRDRMVMGKIKRIEAGLPLTTAKGRTFGYDVIDTKLYINEEEAKQLQLIYDIFEEEQSITFLQKRLKKLGFKVRTYNRYHKWLTNDLYCGYVSYKDKVHVKGIHEPIISEEQFYRVQEIFTRMGKNPNMNRDSASLLSNLVVCSKCGLGFVHRSKDTMSRGKKYHYRYYSCKTYKHTHELEKCGNKTWRADKLEELIINRVNNYSFASRNVDKEDELDSLNEKLKIEHAKKKRLFDLYINGSYEVSELDSMMNDIDAQINYYESQIEANEELKKNKKVQENLAELATVDFDSLEFREKQLYLKSLINKIYIDGEQVTIEWL

SEQ ID NO: 2348 - protein, 485 aa, synthetic construct
MTKKVAIYTRVSTTNQAEEGFSIGEQIDRLTKYAEAMGWQVSDTYTDAGLSGAKLERPAMQRLINDIENKAFDTVLVYKLDRLSRSVRDTLYLVKDVFTKNKIDFISLNESIDTSSAMGSLFLTILSAINEFERENIKERMTMGKLGRAKSGKSMMWTKTAFGYYHNRKTGILEIVPLQATIVEQIFTDYLSGISLTKLRDKLNESGHIGKDIPWSYRTLRQTLDNPVYCGYIKFKDSLFKGMHKPIIPYETYLKVQKELEERQQQTYERNNNPRPFQAKYMLSGMARCGYCGAPLRIVLGHKRKDGSRTKKYHCANRFPRKTKSVTVYNDNKKCGSGTYDLSNLENTVIDNLIGFQENSDSLLKIISGNNQPILDTSSFKKRISQIDKKIQKNSDLYLNDFITMDELKDRTDSLQAEKKLLEAKISENKFNDSTDVFELVKTQLGSIPINELSYDNKKKIVNNLVGKVDVTAENVDIIFKFQLA

SEQ ID NO: 2349 - protein, 469 aa, synthetic construct
MSYTTPVRAAVYLRISEDRSGEQLGVARQREDCLKLCGQRKWVPVEYLDNDVSASTGKRRPAYEQMLADITAGKIAAVVAWDLDRLHRRPVELEAFMSLADEKRLALATVAGDVDLATPQGRLVARLKGSVAAHETEHKKARQRRAARQKAERGLPNWSKAFGYLPGPNGPEPDPRTAPLVKQAYADILAGASLGDVCRQWNDAGAFTITGRPWTTTTLSKFLRKPRNAGLRAYKGARYGPVDRDAIVGKAQWSPLVDEATFWAAQAVLDAPGRAPGRKSVRRHLLTGLAGCGKCGNHLAGSYRTDGRVVYVCKACHGVSILADNIEPILYHIVAERLAMPDAVDLLRREVHDAAEAETIRLELETLYGELDRLAVERAEGLLTARQVKISTDIVNAKITRLQARQLDQERLRVFNGIPLGTPQVAGMIAELSPDRFRAVLDVLAEVVVQPVGKSGRIFNPERVQVNWR

SEQ ID NO: 2350 - protein, 452 aa, synthetic construct
MKAAIYIRVSTREQVENYSIQAQTEKLTALCRSKDWDVYDIFIDGGYSGSNMNRPALNEMLSKLHEIDAVVVYRLDRLSRSQRDTITLIEEYFLKNNVEFVSLSETLDTSSPFGRAMIGILSVFAQLERETIRDRMVMGKIKRIEAGLPLTTAKGRTFGYDVIDTKLYINEEEAKQLQLIYDIFEEEQSITLLQKRLKKLGFKVRTYNRYNNWLTNDLYCGYVSYKDKVHVKGIHEPIISEEQFYRVQEIFTRMGKNPNMNRDSASLLNNLVVCSKCGLGFVHRRKDAMSRDKKYHYRYYSCKTYKHIHELEKCGNKIWRADKLEELIINRVNNYSLASRNVVKEDELDSLNEKLKVEHAKKKRLFDLYISGSYEVSELDNMMNVIDAQINYYEGQIEANEELRKNKKIQENLANLATVDFDSLEFREKQLYLKSLINKIYIDGEQVTIEWL

SEQ ID NO: 2351 - protein, 470 aa, synthetic construct
MSYTTPVRAAVYLRISEDRSGEQLGVARQREDCLKLCDQRKWVPVEYLDNDVSASTGKRRPAYEQMLADITAGKIAAVVAWDLDRLHRRPVELEAFMSLADEKRLALATVAGDVDLATPQGRLVARLKGCVAAHETEHKKARQRRAARQKAERGYPNWSKAFGYLPGPNGPEPDPRTAPLVKQAYADILAGASLGDVCRQWNDVGAFTITGRPWTTTTLSKFLRKPRNAGLRAYKGARYGPVDRDAIVGKAQWSPLVDEATFWAAQAVLDAPGRAPGRKSVRRHLLTGLAGCGKCGNHLAGSCRTDGRVVYVCKACHGVSILAVNIEPILYHIVAERLAKPDAVDLLRREIHDAAEAETIRLELETLYGELDRLAVERAEGLLTARQVKISTDIVNAKVTKLQARQLDQERLRVFDGIPLGTPQVAGMIAELSPNRFRAVLDVLAEVVVQPVGKSGGIFNPERVQVNWRQ

SEQ ID NO: 2352 - protein, 485 aa, synthetic construct
MTRKVAIYTRVSTTNQAEEGFSIDEQVDRLTKYAEAMGWQVSDTYTDAGFSGAKLVRPAMQRLINDIENKAFDTVLVYKLDRLSRSVRDTLYLVKDVFTKNKIDFISLNESIDTSSAMGSLFLTILSAINEFERENIKERMTMGKLGRAKSGKSMMWTKTAFGYYHNRKTGILEIVPLQATIVEQIFTDYLSGISLTKLRDKLNESGHIGKDIPWSYRTLRQTLDNPVYCGYIKFKDSLFEGMHKPIIPYETYLKVQKELEERQQQTYERNNNPRPFQAKYMLSGMARCGYCGAPLRIVLGHKRKDGSRTMKYHCANRYPRKTKGVTVYNDNKKCDSGTYDLSNLENTVIDNLIGFQENNDSLLKIINGDNQPILDTSSLKKQISQIDKKIQKNSGLYLNDFITMDELKARTDSLQAEKKLLEAKISENKFNDSTDVFELVKTRLGSIPINELSYDNKKKIVNNLVSKVDVTADNVDITFKFQLA

SEQ ID NO: 2353 - protein, 469 aa, synthetic construct
MSYTTPVRAAVYLRISEDRSGEQLGVARQREDCLKLCGQRKWEPVEYLDNDVSASTGKRRPAYEQMLADITAGKIAAVVAWDLDRLHRRPIELEAFMSLADEKRLALATVAGDVDLATPQGRLVARLKGSVAAHETEHKKARQRRAARQKAERGYPNWSKAFGYLPGPNGPEPDPRTAPLVKQAYADILAGASLGDVCRQWNDAGALTITGRPWTSTTLSKFLRKPRNAGLRAYKGARYGPVDRDAIVGKAQWSPLVDEVTFWAAQAVLDAPGRAPGRKSVRRHLLTGLAGCGKCGNHLAGSYRTDGRVVYVCKACHGVAILADNIEPILYHIVAERLSMPDAVDLLRRENHDAAEAETVRLELETLYSELDRLAVERAEGLLTARQVKISTDIVSAKITKLQAYQLDQERLRVLDGIPLGTPQVAGMIAELSPDRFRAVLDVLAEVVVRPVGKSGRIFNPERVQVNWR

SEQ ID NO: 2354 - protein, 452 aa, synthetic construct; identical to SEQ ID NO: 861

SEQ ID NO: 2355 - protein, 452 aa, synthetic construct
MKAAIYIRVSTREQVENYSIQAQTEKLTALCRSKDWDVYDIFIDGGYSGSNMNRPALNEMLSKLHEIDAVVVYRLDRLSRSQRDTITLIEEYFLKNNVEFVSLSETLDTSSPFGRAMIGILSVFAQLERETIRDRMVMGKIKRIEAGLPLTTAKGRTFGYDVIDTKLYINEEEAKQLQLIYDIFEEEQSITFLQKRLKKLGFKVRTYNRYNSWLTNDLYCGYVSYKDKVHVKGIHEPIISEEQFYRVQEIFTRMGKNPNMNRDSASLLSNLVVCSKCGLGFVHRRKDTVSRGKKYHYRYYSCKTYKHTHELEKCGNKIWRADKLEELIINRVNNYSVASRNVDIEDELDSLNEKLKIEHAKKRRLFDLYINGSYNVSELDSMMDDIDAQISYYESQIEANEELKKNKKIQENLAGLATVDFDSLEFREKQLYLKSLINKIYIDGEQVTIEWL

SEQ ID NO: 2356 - protein, 469 aa, synthetic construct
MSYTTPVRAAVYLRISEDRSGEQLGVARQREDCLKLCDQRKWVPVEYLDNDVSASTGKRRPAYEQMLADITAGKIAAVVAWDLDRLHRRPIELEAFMSLADEKRLALATVAGDVDLATPQGRLVARLKGSVAAHETEHKKARQRRAARQKAERGHPNWSKAFGYLPGPNGPEPDPRTAPLVKQAYADILAGASLGDVCRQWNYAGAFTITGRPWTTTALSKFLRKPRNAGLRAYKGARYGPVDRDAIVGKAQWSPLVDEATFWAAQAVLDAPGRAPGRKSVRRHLLTGLAGCGKCGNHLAGSYRTDGRVVYVCKACHGVVILADNIEPILYHIVAERLATPGAVDLLRREIHDAAEAETIRLELETLYGELDRLAVERAEGLLTARQVKISTDIVNAKIAKLQARQLDQERLRVFDGIPLGTPQVAGMIAELSPNRFRAVLDVLAEVVVQPVGKSGRISNPERVQVNWR

SEQ ID NO: 2357 - protein, 469 aa, synthetic construct
MSYTTPVRAAVYLRISEDRSGEQLGVARQREDCLKLCGQRKWVPVEYLDNDVSASTGKRRPAYEQMLADIAAGKIAAVVAWDLDRLHRRPIELEAFMSLADEKRLALATVAGDIDLATPQGRLVARLKGSVAAHETEHKKARQRRAARQKAERGYPNWSKAFGYLPGPNGPEPDPRTAPLVKQAYANILAGASLGDVCRQWNDAGAFTITGRPWTTTTLSKFLRKPRNAGLRAYKGARYGPVDRDAIVGKAQWSPLVDEATFWAAQAVLDAPGRAPGRKSVRRHLLTGLAGCGKCGNHLAGSYRTDGKVVYVCKACHGVAILADNIEPILYHIVAGRLAMPGAVDLLRREIHDAAEAETIRLELESLYGELDRLAVERAEGLLTARQVKISTDIVNAKITKLQARQLDQERLRVLDGIPLGTPQVAGVIAELSPDRFRAVLDVLAEVVVQPVGKGGRIFNPERVQVNWR

SEQ ID NO: 2358 - protein, 469 aa, synthetic construct
MSYTTPVHAAVYLRISEDRSGEQLGVARQREDCLKLCDQRKWVPVEYLDNDVSASTGKRRPAYEQMLADITAGKIAAVVAWDLDRLHRRPIELEAFMSLADEKRLALATVAGDVDLATPQGRLVARLKGSVAAHETEHKKARQRRAARQKAERGHPNWSKAFGYLPGPNGPEPDPRTAPLVEQAYADILAGASLGDVCRQWNDAGAFTITGRPWTTTTLSKFLRKPRNAGLRTYKGARYGPVDRDAIVGKAQWSPLVDEATFWAAQAVLDAPGRAPGRKSVRRHLLTGLAGCGKCGNHLAGSYRTDGRVVYVCKACHGVAILAENIEPILYHIVAERLAMPDAVDLLRREIHDAAEAGTIRLELETLYGELDRLAVERAEGLLTARQVKISTDIVNAKIAKLQARQLDQERLRVLDGIPLGTPQVAGMIAELSPDRFRAVLDVLAEVVVQPVGKGGRIFNPERVQVNWR

SEQ ID NO: 2359 - protein, 452 aa, synthetic construct
MKAAIYIRVSTREQVDNYSIQAQAEKLTALCRSKDWDVYDVFIDGGYSGSNMNRPALNEMLSKLHEIDAVVVYRLDRLSRSQRDTITLIEEYFLKNNVEFVSLSETLDTSSPFGRAMIGILSVFAQLERETIRDRMVMGKIKRIEAGLPLTTAKGRTFGYDVIDTKLYINEEEAKQLRLIYDIFEEEQSITFLQKRLKKLGFKVRTYNRYNNWLTNDLYCGYVSYKDKVHVKGIHEPIISEEQFYRVQEIFTRMGKNPNMNRGSASLLNNLVVCGKCGLGFVHRRKDAMSRDKKYHYRYYSCKTYKHIHELEKCGNKIWRAEKLEELIINRVNDYSLASRNVDKEDELDSLNEKLKIEHAKKKRLFDLYINGSYKVSELDSMMSDIDAQINYYESQIEANEELRKNKKVQEDLADLATVDFGSLEFREKQLYLKSLINKIYIDGEQVTIEWL

SEQ ID NO: 2360 - protein, 452 aa, synthetic construct
MKAAIYIRVSTREQVENYSIQAQTEKLTALCRSKDWDVYDIFIDGGYSGSNLNRPALNEMLSKLHEIDAVVVYRLDRLSRSQRDTITLIEEYFLKNNVEFVSLSETLDTSSPFGRAMIGILSVFAQLERETIRDRMVMGKIKRIEAGLPLTTAKGRTFGYDVIDTKLHINEEEAKQLQLIYDIFEEEQSITFLQKRLKKLGFKVRTYNCYNNWLTSDLYCGYVSYKDKVHVKGIHEPIISEEQFYRVQEIFTRMGKNPNMNRGSASLLNNLVVCSKCGLGFVHRRKDAMSRDKKYHYRYYSCKTYKHIHELEKCGNKIWRADKLEELIISRVNNYSLASRNVDKEDELDSLNEKLKIEHVKKKRLFDLYINGSYEVSELDSMMNDIDAQINYYEGRIKANEELRKNKKIQENLADLATVDFDSLEFREKQLYLKSLINKIYIDGEQVTIEWL

SEQ ID NO: 2361 - protein, 485 aa, synthetic construct
MTKKVAIYTRVSTTNQAEEGFSIDEQIDRLTKYAEAMGWQVSDTYTDAGLSGAKLERPAMQRLINDIENKAFDTVLVYKLDRLSRSVRDTLYLVKDVFTKNKIDFISLSESIDTSSAMGSLFLTILSAINEFERENIKERMTMGKLGRAKSGKSMMWTKTAFGYYHNRKTGILEIVPLQAAIVEQIFTDYLSGISLTKLRDKLNESGHIGKDIPWSYRTLRQTLDNPVYCGYIKFKDSLFEGMHKPIIPYETYLKVQKELEERQRQTYERNNNPRPFQAKYMLSGMARCGYCGAPLRIVLGHKRKDGSRTMKYHCANRFPRKTRGVTVYNDNKKCDSGAYDLSTLENTVIDNLIGFQENSDSLLKIINGNNQPILDTSSFKKRISQIDEKIQKNSDLYLNDFITMDELKDRTDSLQAERKLLKAKISENKFNDSTDVFELVKTQLGSIPINELSYDNKKKIVNNLVSKVDVTADNVDIIFKFQLA

SEQ ID NO: 2362 - protein, 469 aa, synthetic construct
MSYTTPVRAAVYLRISEDRSGEQLGVARQREDCLKLCDQRKWVPVEYLDNDVSASTGKRRPAYEQMLADIAAGKIAAVVAWDLDRLHRRPIELEAFMSLADEKRLALATVAGDVDLATPQGRLVARLKGSVAAHETEHKKARQRRAARQKAERGHPNWSKAFGYLPGPNGPEPDPRTAPLVKQAYADILAGASLGDVCRQWNDAGTFTITGRPWTTTTLSKFLRKPRNAGLRAYKGARYGPVDRDAIVGKAQWSPLVDEATFWAAQAVLDAPGRAPGRKSVRRHLLTGLAGCGKCGSHLAGSYRTDGKVVYVCKACHGVAILADNIEPILYHIVAERLAMPSAVDLLRREIHDAAEAETICLELETLHGELDRLAVERAEGLLTARQVKISTDIVNAKITKLQARQQDQERLRVLDGIPLGTPQVAGKIAELSPNRFRAVLDVLAEVVVQPVGKGGRILNPERVQVNWR

SEQ ID NO: 2363 - protein, 452 aa, synthetic construct
MKAAIYIRVSTREQVENYSIQAQTEKLTALCRSKDWDVYDIFIDGGYSGSNMDRPALNEMLSKLHEIDAVVVYRLDRLSRSQRDTITLIEEYFLKNNVEFVSLSETLDTSSPFGRAMIGILSVFAQLERETIRDRMVMGKIKRIEAGLPLTTAKGRTFGYDVIDTKLYINEEEARQLRLIYDIFEEEQSITFLQKRLKKLGFEVRTYNRYSNWLTNDLYCGYVRYKDKVHVKGIHEPIISEEQFYRVQEIFTRMGKNPNVNRDSASLLNNLVVCSKCGLGFVHRRKDTMSRGKKYHYRYYSCKTYKHTHELEKCGNKIWRADRLEELIINRVNNYSLASRNVVKEDELDSLNEKLKIEHAKKKRLFDLYINGSYEVSELDSMMNDIDAQINYYESQIEANEELKKNKKIQENLANLATVDYDSLEFREKQLYLKSLINKVYIDGEQVTIEWL

SEQ ID NO: 2364 - protein, 485 aa, synthetic construct
MTKKVAIYTRVSTANQAEEGFSIDEQTDRLTKYAEAMGWQVSNTYTDAGFSGAKLGRPAMQRLINDIEDKAFDTVLVYKLDRLSRSVRDTLYLVKDVFTKNKIDFISLNESIDTSSAMGSLFLTILSAINEFERENIKERMTMGKLGRAKSGKSMMWTRTAFGYYHNRKTGILEIVPLQATIVEQIFTDYLSGISLTKLRDKLNESGHIGKDIPWSYRTLRQTLDNPVYCGYIKFKDSLFEGMHKPIIPYETYLKVQKELEERQQQTYERNNNPRPFQAKYMLSGMARCGYCGAPLRIVLGHKRKDGSRTMKYHCANRFPRKTKGVTVYNDNKKCDSGTYDLSNLENTVIDNLTGFQENNDSLLKIINGNNQPILDTSSFKKQISQIDKKIQKNSDLYLNDFITMDELKDRTDRLQAEKKLLKAKISESKFNDSTDVFELVKTQLGSIPINELSYDDKKKIVNNLVSKVDVTADNVDIIFKFQLA

SEQ ID NO: 2365 - protein, 469 aa, synthetic construct
MSYTTPVRAAVYLRISEDRSGEQLGVARQREDCLKLCDQRKWVPVEYLDNDVSASTGKRRPAYEQMLADITAGKIAAVVSWDLDRLHRRPIELEAFMSLADEKRLALATVAGDVDLATPQGRLVARLKGSVAAHETEHKKARQRRAARQKAERGYPNWSKAFGYLPGPNGPEPDPRTAPLVKQAYADILAGASLGEVCRQWNDAGAFTITGRPWTTTTLSKFLRKPRNAGLRAYKGARYGPVDRDAIVGKAQWSPLVDEATFWAAQAVLDAPGRAPGRKSVRRHLLTGLAGCGKCGNHLAGSYRTDGRVVYVCKACHGVAILADNIEPILHHIVAERLAMPDAVDLLRREIHDAAEAETIRQGLETLYGELDRLAVERAEGLLTARQVKISTDIVNAKITRLQARQLDQERLRVFGGIPLGTPQVAGVIAELSPDRFRAVLDVLAEVVVQPVGKGGRIFNPERVQVNWR

SEQ ID NO: 2366 - protein, 485 aa, synthetic construct
MTKKVAIYTRVSTTNQAEEGFSIDEQIDRLTKYAEAMGWQVSDTYTDAGSSGAKLERPAMQRLINDIDNKAFDTVLVYKLDRLSRSVRDTLYLVKDVFTKNKIDFISLNESIDTSSAMGSLFLTILSAINEFERENIKERMTMGKLGRAKSGKSMMWTKTAFGYCHNRKTGILEIVPLQATIVEQIFTDYLSGISLTKLRDKLNESGHIGKDIPWSYRTLRQTLDNPVYCGYIKFKGSLFEGMHKPIIPYETYLKVQKELEERQQQTYERNNNPRPFQAKYMLSGMARCGYCGAPLRIVLGHKRKDGSRTMKYHCANRFPRKTKGVTVYNENEKCDSGAYDLSNLENTVIDILVGFQENNDSLLKIINGSNQPILDTGSVKKQISQIDKKIQRNSDLYLNDFITMDELKDRTDSLQAEKKLLKAKISEGKFNDSTDVFELVKTQLGSIPINELSYDDEKKIVNNLVSKVDVTADNVDIIFKFQLA

SEQ ID NO: 2367 - protein, 452 aa, synthetic construct
MKAAIYIRVSTQEQVGNYSIQAQTEKLTALCRSKDWDVYDIFIDGGYSGSNMNRPALNEMLSKLHEIDAVVVYRLDRLSRSQRDTTTLIEEYFLKNNVEFVSLSETLDTSSPFGRAMIGILSVFAQLERETIRDRMVMGKIKRIEAGLPLTTAKGRTFGYDVIDTKLYINEEEAKQLQLIYDIFEEERSITSLQKRLKKLGFRVRTYNRYSNWLTNDLYCGYVSYKDKVHVKGIHEPIISEEQFYRVQEIFTRMGKSPNMNRDSASLLNNLVVCSKCGLGFVHRSKDTMCRGKKYHYRYYSCKTYKHTHELEKCGNKTWRADKLEELIINRVNNYSFASRNVDKEDELDSLNEKLKIGHAKKKRLFDLYINGSYEVSELDSMMNDIDAQINYYESQIEANEELKKNKKIQENLADLVTVDFDSLEFREKQLYLKSLINKIYIDGEQVTIEWL

SEQ ID NO: 2368 - protein, 485 aa, synthetic construct
MTKKVAIYTRVSTTSQAEEGFSIDEQIDRLTKYAEAMGWQVSGTYTDAGFSGAKLERPAMQRLIDDIENKAFDTVLVYKLDRLSRSVRDTLYLVKDVFTKNKIDFISLNESIDTSSAMGSLFLTILSAINEFERENIKERMTMGKLGRAKSGKSMMWAKTAFGYYHNRKTGILEIVPLQATIVEQIFTDYLSGISLTKLRDKLNESGHIGKDIPWSYRTLRQTLDNPVYCGYIKFKDSLFEGMHRPIIPYETYLKVQKELEERQQQTYERNNNPRPFQAKYMLSGMARCGYCGAPLKIVLGHKRKDGSRTMKYHCTNRFPRKTKGVTVYNDNKKCDSGTYDLSNLENTVIDNLVGFQENNDGLLKIINGNNQPILDTSSFKKQISRIDRKIQKNSDLYLNDFITMDELKARTDSLQAKKKLLKAKISENKFNDSTDVFELVKTQLGSIPINELSYDNKKKIVNNLVSKVDVTADNVDITFKFQLA

SEQ ID NO: 2369 - protein, 452 aa, synthetic construct
MKAAIYIRVSTQEQVGNYSIQAQTEKLTALCRSKDWDVYDIFVDGGYSGSNMNRPALNEMLSKLHEIDAVVVYRLDRLSRSQRDTTTLIEEYFLKNNVEFVSLSETLDTSSPFGRAMIGILSVFAQLERETIRDRMVMGKIKRIEAGLPLTTAKGRTFGYDVIDTKLYINEEEARQLQLIYDIFEEEQSITFLQKRLKKLGFKVRTYNRYNSWLTNDLYCGYVSYKDKVHVKGIHEPIISEEQFYRVQEIFTRMGKNPNMNRDSASLLNNLVVCSKCGLSFVHRSKDTMCRGKKYHYRYYSCKTYKHTHELEKCGNKTWRADKLEELIINRVNNYSFVSRDMVKEDELDSLNEKLKIEHAKKKRLFDLYINGSYEVSELDSMMNDIDAQINYYESQIEANEELKKNKKIRENLAVLATVDFDSLEFREKQLYLKRLINRIYIDGEQVTIEWL

SEQ ID NO: 2370 - protein, 485 aa, synthetic construct
MTKKVAIYTRVSTTNQAEEGFSIDEQIDRLTKYAEAMGWQVSDTYTDAGFSGAKLERPAMQRLINDIENEAFDTVLVYKLDRLSRSVRDTLYLVKDVFTKNKIDFISLNESIDTSSAMGSLFLTILSAINEFERENIKERMTMGKLGRAKSGKSMMWAKTAFGYYHNRKTGILEIVPLQATIVEQIFTDYLSGISLTKLRDKLNESGHIGKDIPWSYRTLRQTLDNPVYCGYIKFKGSLFEGMHKPIIPYETYLKVQKELEERQQQTYERNNNPRPFQAKYMLSGMARCGYCGAPLRIVLGHKRKDGSRTMKYHCANRFPRKTKGVTVYNDNKKCDSGAYDLSSLENTVIDNLIGFQENNDSLLKIINGNNQPILDTSSFKKQISQIDKKIQKNSDLYLNDFITMDELKDRTDSLQAKKKLLKAKISETKSNDSTDVFELVKTQLGSIPINELSYDNKKKIVNNLVSKVDVTADNVDIIFKFQLV

SEQ ID NO: 2371 - protein, 452 aa, synthetic construct
MKAAIYIRVSTREQVENYSIQAQTEKLTALCRSKDWDVYDIFIDGGYSGSNMNRPALNEMLSKLHEIDAVVVYRLDRLSRSQRDTITLIEEYFLKNNVEFVSLSETLDTSSPFGRAMIGILSVFAQLERETIRDRMVMGKIKRIEAGLPLTTAKGRTFGYDVIDTKLYINEEEAKQLQLIYDIFEEEQSITFLQKRLKKLGFKVRTYNRYNNWLTNDLYCGYVSYKDKVHVKGIHEPIISEEQFYRVQEIFTRMGKNPNMNRDSASLLNNLVVCSKCGLGFVHRRKDAMSRDKKYHYRYYSCKTYKHIHELEKCGNKVWRADKLEELIINRVNNYSLASRNVDKEGELDSLNEKLKIEHAKKKRLFDLYLNGSYEVSELDSMMNDIDAQINYYESQIEANEGLRKNKKIQENLANLATVDFDSLEFREKQLYLKSLINKIYIDGEQVTIEWL

SEQ ID NO: 2372 - protein, 452 aa, synthetic construct
MKAAIYIRVSTREQVENYSIQAQTEKLTALCRSRDWDVYDIFIDGGYSGSNMNRPALNEMLSKLHEIDAVVVYRLDRLSRSQRDTITLIEEYFLKNNVEFVSLSETLDTSSPFGRAMIGILSVFAQLERETIRDRMVMGKIKRIEAGLPLTTAKGRTFGYDVIDTKLYINEEEAKQLQLIYDIFEEEQSITFLQKRLKKLGFKVRTYSCYNNWLTNDLYCGYVSYKDKVHVKGIHEPIISEEQFYRVQEIFTRMGKNPNMNRDSASLLNNLVVCSKCGLGFVHRRKDTMSRGKKYHYRYYSCKTYKHTHELEKCGNKIWRADKLEELIINRVNNYSLASRNVDKEDELDSLNEKLKIERAKKKRLFDLYINGSYEVSELDSMMSDIDAQINYYESQIEANEELRKNKKIQENLADLATVDFDSLGFREKQLYLKSLISKIYIDGEQVTIEWL

SEQ ID NO: 2373 - protein, 485 aa, synthetic construct
MTKKVAIYTRVSTTNQAEEGFSIDEQIDRLTKYAEAMGWQVSDTYTDAGSSGARLERPAMQRLINDIENKAFDTVLVHKLDRLSRSVRDTLYLVKDVFTKNKIDFISLNESIDTSSAMGSLFLTILSAINEFERENIKERMTMGKLGRAKSGKSMMWTKTAFGYRHNRKTGILEIVPLQATIVEQIFADYLSGISLTKLRDKLNGSGHIGKDIPWSYRTLRQTLDNPVYCGYIKFKDSLFEGMHEPIIPYETYLKVQKELEERQQQTYERNNNPRPFQAKYMLSGMARCGYCGAPLRIVLGHKRKDGSRTMKYHCANRFPRKTKGVTVYNDNKKCDSGTYDLSNLENTVIDNLIGFQENNDSLLKIINGNNQPILDTSSFENQISQIDKKIQKNSDLYLNDFITMDELKDRTDSLQAEKKLLKAKISEDKFNDGTDVFELVKTQLGSIPINELSYDDKKKIVNNLVSKVDVTADNVDIIFKFQLV

SEQ ID NO: 2374 - protein, 452 aa, synthetic construct
MKAAIYIRVSTREQVENYSIQAQTEKLTALCRSKGWDVYDIFIDGGYSGSNMNRPALNEMLSKLHEIDAVVVYRLDRLSRSQRDTITLIEEYFLKNNVEFVSLSETLDTSSPFGRAMIGILSVFAQLERETIRDRMVMGKIKRVEAGLPLTTAKGRTFGYDVVDTKLYINEEEAEELQLIYDIFEEEQSITFLQKRLKELGFKVRTYNCYNNWLTNDLYCGYVSYKDKVHVKGIHEPIISEEQFYRVQEIFTRMGKNPNMNRDSASLLNNLVVCSKCGLGFVHRRKDAMSRDKKYHYRYYSCKTYKHIHELEKCGNKIWRADKLEELIINRVNNYSLASRNVDKEDELDSLNKKLKIEHAKKRRLFDLYVNGSYEVSELDSMMNDIDAQISYYESQIEANEEQRKNKKIQGNLADLATVDFDSLEFREKQLYLKSLINKIYIDGEQVTIEWL

SEQ ID NO: 2375 - protein, 452 aa, synthetic construct
MKAAIYIRVSTREQVENYSIQAQTEKLTALCRSKDWDVYDIFVDGGYSGSNMNRPALNEMLSKLHEIDAVVVYRLDRLSRSQRDTITLIEEYFLKNNVEFVSLSETLDTSSPFGRAMIGILSVFAQLERETIRDRMVMGKIKRIEAGLPLTTAKGRTFGYDVIDTKLYINEGEAKQLQLIYDIFEEEQSITFLQKRLKELGFKVRTYNCYNNWLTNDLYCGYVSYKDKVHVKGIHEPIISEEQFYRVQEIFTRMGKNPNMNRDSASLLNNLVVCSKCGLGFVHRRKDAMSRDKKYHYRYYSCKTYKHIHELEKCGNKIWRADKLEELIINRVNNYSLANRNVDKEAELDSLSEKLKIEHAKKKRLFDLYINGSYEVSELDSMMNDIDAQINYYESQIEANEELKKNKKIQENLANLATVDFDSLEFREKQLYLKSLISKIYIDGEQVTIEWL

SEQ ID NO: 2376 - protein, 485 aa, synthetic construct
MTKKVAIYTRVSTTSQAEEGFSIDEQIDRLSKYAEAMGWQVSDAYTDAGFSGAKLERPAMQRLINDIENKAFDTVLVYKLDRLSRSVRDTLHLVKDVFTKNKIDFISLNESIDTSSAMGSLFLTILSAINEFERENIKERMTMGKLGRAKSGKSMMWTKTAFGYHHDRKTGILEIVPLQATIVEQIFADYLSGISLTKLRDKLNEGGHIGKDIPWSYRTLRQTLDNPVYCGYIKFKDSLFEGMHKPIIPYETYLKVQKELGERQQQTYERNNNPRPFQAKYMLSGMARCGYCGAPLKIVLGHKRKDGSRAMKYHCANRFPRKTKGITVYNDNKKCDSGTYDLSNLENTVIDSLIGFQEDNDSLLTIINGNNQPILDTSSFEKQISQIDKKIQKNSDLYLNDFITMDELKNRTDNLQAEKKLLKAKINENKFNDSTDVFELVKTQLGSIPINELSYDDKKKIVNNLVSKVDVTADDVDIIFKFQLA

SEQ ID NO: 2377 - protein, 452 aa, synthetic construct
MKAAIYIRVSTREQVENYSIQAQTEKLTALCRSKDWDVYDIFIDGGYSGSNMNRPALNEMLSKLHEIDAVVVYRLDRLSRSQRDTITLIEEYFLKNSVEFVSLSETLDTSSPFGRAMIGILSVFAQLERETIRDRMVMGKIKRIEAGLPLTTAKGRTFGYDVIDTKLYINEEEAKQLQLIYDIFEEEQSITSLQKRLKRLGFKVRTYSRYNDWLTNDLYCGYVSYKDKVHVKGIHEPIISEEQFYRVQEIFTRMGRNPNMNRDSASLLNNLVVCSKCGLGFVHRRKDTMSRGKKYHYRYYSCKTYKHIHELEKCGNKIWRADKLEELIINRVNNYSFASRNVDKEDELDSLNEKLKIEHAKKKRLFDLYINGSYEVSELDSMMNDIDAQINYYESQIEANEELKKNKKIQENLANLATVDYDSLEFREKQLYLKSLINKIYIDGEQVTIEWL

SEQ ID NO: 2378 - protein, 485 aa, synthetic construct
MTKKVAIYTRVSTTNQAEEGFSIDEQIDRLTKYAEAMGWQVSDTYTDAGFSGAKLERPAMQRLINDIENKAFDTVLVYKLDRLSRSVRDTLYLVKDVFTKNKIDFISLNESIDTSSAMGSLFLTILSAINEFERENIKERMTMGKLGRAKSGKSMMWTKTAFGYYHNRKTGILEIVPLQAAIVEQIFTDYLGGISLTKLRDKLNESGHIGKDIPWSYRTLRQTLDNPVYCGYIKFKGSLFEGMHKPIIPYETYLKVQKELEERQQQAYERNNNPRPFQAKYMLSGMARCGYCGAPLKIVLGRKRKDGSRTMKYHCANRFPRKTKGVTVYNDNKKCDSGTYDLSNLENTVIDILIGFQENNDSLLKIINGNNRPILDTSGFKKQISQIDKKIQKNSDLYLNDFITMDELKDRTDSLQAEKKLLKAKISENKSNDSTDVFELVKTQLGSIPINELSYDDKKKIVNNLVSKVDVTADSVDIIFKFQLA

SEQ ID NO: 2379 - protein, 469 aa, synthetic construct
MSYTTPVRAAVYLRISEDRSGEQLGVARQREDCLKLCDQHKWVPVEYLDNDVSASTGKRRPAYEQMLADISAGKIAAVVAWDLDRLHRRPIELEAFMSLADEKRLALATVAGDVDLATPQGRLVARLKGSVAAHETEHKKARQRRAARQKAERGHPNWSKAFGYLPGPNGPEPDPRTAPLVKQAYADILAGASLGDVCRRWNDAGALTITGRPWTTTTLSKFLRKPRNAGLRAYKGARYGPVDRDAIVGKAQWSPLVDEATFWAAQAVLDAPGRAPGRKSVRRHLLTGLAGCGKCGNHLAGSYRTDGRVVYVCKACHGIAILADNIEPTLYHIVAERLAMPDAVDLLRREVHDAAEAETIRLELETLYGELDRLAVERAEGLLTARQVKISTDIVNAKITKLQERQLDQERLRVFDGIPLGTPQVAGMIAELSPDRFRAVLDVLAEVVVQPVGKSGRTFNPERVRVNWR

SEQ ID NO: 2380 - protein, 452 aa, synthetic construct
MKAAIYIRVSTREQVENYSIQAQTEKLTALCRSKDWDVYDIFIDGGYSGSNMNRPALNEMLSKLHEIDAVVVYRLDRLSRSQRDTITLIEEYFLKNNVEFVSLSETLDTSSPFGRAMIGILSVFAQLERETIRDRMVMGKIKRIEAGLPLTTAKGRTFGYDVIDTKLYVNEEEARQLQLIYDIFEEEQSITFLQKRLKELGFKVRTYNRYNNWLTNDLYCGYVSYKDKVHVKGIHEPIISEEQFYRVQEIFARMGKNPNMNRDSASLLNNLVVCSKCGLGFVHRRKDAMSRDKKYHYRYYSCKTYKHIHELEKCGNKIWRADKLEELIINRVNNYSFASRNVDKEDEQDSLNEKLKIEHAKKKRLFDLYINGRYEVSELDSMMKDIDAQINYYESQIEANDGLKKDKKIQENLANLATVDFDSLEFREKQLYLRSLINKIYIDGEQVTIEWL

SEQ ID NO: 2381 - protein, 452 aa, synthetic construct
MKAAIYIRVSTREQVENYSIQAQTEKLTALCRSKGWDVYDIFIDGGYSGSNMNRPALNEMLSKLHEIDAVVVYRLDRLSRSQRDTITLIEEYFLKNNVEFVSLSETLDTSSPFGRAMIGILSVFAQLERETIRDRMVMGKIKRIEAGLPLTTAKGRTFGYDVIDTKLYINEEEAKQLRLIYDIFEEEQSITFLQKRLKELGFKVRSYNRYNNWLTNDLYCGYVSYKDKVHVKGIHEPIISEEQFYRVQEIFTRMGKNPNMNRDSASLLNNLVVCSKCGLGFVHRRKDAKSRDKRYHYRYYSCKTYKHIHELEKCGNKIWRADKLEELIINRVNNYSIASRNADKEDELDSLNEKLKIEHAKKKRLFELYINGSYEVSELDSMMNDIDAQINYYESQIEANKELKKNKKIQENLADLATVDFDSLEFREKQLYLKSLINKIYIDGEQVTIEWL

SEQ ID NO: 2382 - protein, 469 aa, synthetic construct
MSYTTPVRAAVYLRISEDRSGEQLGVARQREDCLKLCDQRKWVPVEYLDNDVSASTGKHRPAYEQMLADITAGKIAAVVAWDLDRLHRRPIELEAFMSLADEKRLALATVAGDVDLATPQGRLVARLKGCVAAHETEHKKARQRRAARQKAERGLPNWSKAFGYLPGPNGPEPDPRTAPLVKQAYADILAGASLGDVCRQWNDAGAFTITGRPWTSTTLSKFLRKPRNAGLRAYKGARYGPVDRDAIVGKAQWSPLVDEATFWAAQAVLDAPGRAPGRKSVRRHLLTGLAGCGRCGNHLAGSYRTDGRVVYVCKACHGVAILADNIEPVLYHIVAERLAMPDAVGLLRREIHDAAEAETIRLELEILYGELDRLAVERAEGLLTARQVKISTDIVNAKITKLQARQLDQERLRVFDGIPLGTPQVAGMIAELSPDRFRAVLDVLAVVVVQPVGKGGRIFTPERVQVNWR

SEQ ID NO: 2383 - protein, 469 aa, synthetic construct
MSYTTPVRAAVYLRISEDRSGEQLGVARQREDCLKLCDQRKWVPVEYLDNDVSASTGKRRPAYEQMLADIAAGKIAAVVAWDLDRLHRRPVELEAFMSLADEKRLALATVAGDVDLATPQGRLVARLKGSVAAHETEHKKARQRRAARQKAERGHPNWSKAFGYLPGPNGPEPDPRTAPLVKQAYADILAGASLGDVCRRWNDAGALTITGRPWTTTTLSKFLRKPRNAGLRAYKGARYGPVDRDAIVGKAQWSPLVDEATFWAVQAVLDAPGRAPGRKSVRRHLLTGLAGCGKCGNHLAGSYRTDGRVVYVCKACHGVAILADNIEPILYHIVAERLAMPDAVDLLCREIHDAAEAETIRLELKTLYGELDCLAVERAEGLLTARQVKISTDIVNAKITKLQARQLDQERLRVFDGIPLGAPQVAGVIAELSPDRFRAVLDVLAEVVVQPVGKGGRIFNPERVQVNWR

SEQ ID NO: 2384 - protein, 469 aa, synthetic construct
MSYTTPVRAAVYLRISEDRSGEQLGVARQREDCLKLCGQRKWVPVEYLDNDVSASTGKRRPAYEQMLADITAGKIAAVVAWDLDRLHRRPIELEAFMSLADEKRLALATVAGDVDLATPQGRLVARLKGCVAAHETEHKKARQRRAARQKAERGHPNWSKAFGYLPGPNGPEPDPRTAPLVKQAYVDILAGASLGDVCRQWNDAGAFTITGRPWTTTTLSKFLRKPRNAGLRAYKGARYGPVDRDAIVGKAQWSPLVDEATFWAAQAVLDAPGRAPGRKSVRRHLLTGLAGCGKCGNHLAGSYRTDGRVVYVCKACHGVAILADNIEPILYHIVAERLAMPDAVDLLRREIHDAAEAETARLELETLYGELDRLAVERAEGLLTARQVKISTDIMNAKITKLQARQLDQERLRVLDGIPLGTPQVAGAIAELSPDRFRAVLDVLAEVVVQPVGKSGGIFNPERVQVNWR

SEQ ID NO: 2385 - protein, 485 aa, synthetic construct
MTKKVAIYTRVSTTNQAEEGFSIDEQIDRLTKYAEAMGWQVSDTYTDAGISGAKLERPAMQRLINDIEDKAFDTVLVYKLDRLSRSVRDTLYLVKDVFTKNKIDFISLNESIDTSSAMGSLFLTILSAINEFERENIRERMTMGKLGRAKSGKSMMWTKTAFGYYHNRKTGILEIVPLQATIVEQIFTDYLSGISLTKLRDKLNESGHIGKDIPWSYRTLRQTLDNPVYCGYIKFKDSLFEGMHKPIIPYETYLKVQKELEERQQQTYERNNNPRPFQAKYMLSGLARCGYCGAPLRIVLGHKRKDGSRTMKYHCANRSPRKTRGVTAYNDNKKCDSGTYDLSNLENTVIDNLIGFQENNDSLLKIINGNDQPILNTSSFEEQISQIDKKIQKNSDLYLNDFITMDELKDRTDSLQAEKKLLKAKISENKFNDSTDVFELVKTQLGSIPINELSYDDKKKIVNNLVSKVDVTADNVDIIFKFQLA

SEQ ID NO: 2386 - protein, 469 aa, synthetic construct
MSYTTPVRAAVYLRISEDRSGEQLGVARQREDCLKLCDQRKWVPVEYLDNDVSASTGRRRPAYEQMLADITAGRIAAVVAWDLDRLHRRPIELEAFMSLADEKRLALATVAGDVDLATPQGRLVARLKGCVAAHETEHKKARQRRAARQKAERGLPNWSKAFGYLPGPNGPEPDPRTAPLVKQAYADILAGASLGDVCRQWNDAGAFTITGRPWTTTTLSKFLRKPRNAGLRAYKGARYGPVDRDAIVGKAQWSPLVDEATFWAAQAVLDAPGRAPGRKSVRRHLLTGLAGCGKCGNHLAGSHRTDGRVVYVCKACHGVAILADNIEPILYHIVAERLAMPDAVDLLRREFQDAAEAETIRLELETLYGELDRLAVERAEGLLTARQVKISTDVVNAKITELRARQLDQERLRVLDGIPLGTPQVAGMIAELSPDRFRAVLDVLAEVVVQPVGKSGRIFNPERVQVNWR

SEQ ID NO: 2387 - protein, 485 aa, synthetic construct
MTKKVAIYTRVSTTNQAEEGFSIDEQVDRLTKYAEAMGWQVSDTYTDAGLSGAKLERPAMQRLINDIENKAFDTVLVYKLDRLSRSVRDTLYLVKDVFTKNKIDFISLNESIDTSSAMGSLFLTILSAINEFERENIKERMTMGKLGRAKSGKSMMWTKTAFGYYHNRKTGILEIVPLQATIVEQIFTDYLSGISLTKLRDKLNESGHIGKDIPWSYRTLRQTLDNPVYCGYIKFKDSLFEGMHKPIIPYETYLKVQKELEERQQQTYERNNNPRPFQAKYMLSGMARCGYCGAPLRIVLGHKRKDGSRTMKYHCANRSPRKTKGVTVYNDNKKCDSGTYDLSNLENTVIDNLIGFQENNDSLLKIINGNNQPILDTSSLKKQISQIDKKIQKNSDLYLNDFITMDELKGRTDSLQAEKKLLEAKISENKLDDSTDVFELVKTQLGSIPINELSYDNKKRIVNNLVSKVDVTADNVDIIFKFQLA

SEQ ID NO: 2388 - protein, 485 aa, synthetic construct
MTKKVAIYTRVSTTNQAEEGFSIDEQIDRLTKYAEAMGWQVSDTYTDAGFSGAKLERPAMQRLINDIENKAFDTVLVYKLDRLSRSVRDTLYLVKDVFTKNKIDFISLNESIDTSSAMGSLFLTILSAINEFERENIKERMTMGKLGRAKSGKSMMWTKTAFGYYHNRKTGILEIVPLQATIVEQIFTDYLGGISLTKLRDKLNESGHIGKDIPWSYRTLRQTLDNPVYCGYIKFKDSLFEGTHKPIIPYETYLKVQKELEERQQQTYERNNNPRPFQAKYMLSGMARCGYCGAPLRIVLGHKRKDGSRTMKYHCANRFPRKTKGVTVYNDNKKCDSGTYDLSSLENTVIDNLIGFQENNDSLLRIINGNNQPILDTSSFKEQISQIDKKIQKNSDLYLNGFITMDELKDRTDSLQAEKRLLKAKISENKSIDSTDVLELVKTQLGSIPINELSYDNKKRVVNNLVSKVDVTADNVDIIFKFQLA

SEQ ID NO: 2389 - protein, 452 aa, synthetic construct
MKAAIYIRVSTQEQVGNYSIQAQTEKLTALCRSKDWDVYDIFIDGGYSGSNMNRPALSEMLSKLHEIDAVVVYRLDRLSRSQRDTTTLIEEYFLKNNVEFVSLSETLDTSSPFGRAMIGILSVFAQLERETIRDRMVMGKIKRIEAGLPLTTAKGRTFGYDVIDTKLYVNEEEAKQLRLIYDIFEEEQSITLLQKRLKKLGFKVRTYNRYNSWLTNDLYCGYVSYKDKVHVKGIHEPIISEEQFYRVQEIFTRMGKNPNMNRDSASLLSNLVVCSKCGLSFVHRSKDTMSRGKRYHYRYYSCKTYKHTHELEKCGNKTWRADKLEELIINRVSNYSFASRNVDKEDELDGLNEKLKIERAKKKRLFDLYINGSYEVSELDSMMNDIDARINYYESQIEANKELKKNKKIQENLADLATVDFDSLEFREKQLYLKSLINKIYIDGEQVTIEWL

SEQ ID NO: 2390 - protein, 485 aa, synthetic construct
MTKKVAIYTRVSTTNQAEEGFSIDEQIDRLTKYAEAMGWQVSDTYTDAGFSGAKLRRPAMQRLVNDIGNKAFDTVLVYKLDRLSRSVRDTLYLVKDVFTKNKIDFISLNESIDTSSAMGSLFLTILSAINEFERENIKERMTMGKLGRAKSGKSMMWTKTAFGYYHNRKTGILEIVPLQATIVEQIFTDYLSGISLTRLRDKLNESGHIGKDIPWSYRTLRQTLDNPVYCGYIKFKGSLFEGMHKPIIPYETYLKVQKELEERQQQTYERNNNPRPFQAKYMLSGMARCGYCGAPLRIVLGRKRKDGSRTMKYHCANRFPRKTKGVTVYNDNKKCDSGTYDLSNLENTVINNLIGFQENNDSLLKIINGNNQPILDTSSFKKQISQIDKKIQKNSDLYLNDFITMDELKDRTDSLQAEKKLLKAKISENKFNDSTDVFELVKTQLGSIPINELSYDNKKKIVNNLVSKVDVTADNVDIIFKFQPA

SEQ ID NO: 2391 - protein, 485 aa, synthetic construct
MTKKVAIYTRVSTTNQAEEGFSIDEQIDRLTKYAEAMGWQVSDTYTDAGFSGAKLERPAMQRLINDIENKAFDTVLVYKLDRLSRSVRDTLYLVKDVFTKNKIDFISLNESINTSSAMGSLFLTILSAINEFERENIRERMTMGKLGRAKSGKSMMWTKTAFGYYHNRRTGILETVPLQATIVEQIFTDYLSGISLTKLRDKLNESGHIGKDIPWSYRTLRQTLDNPVYCGYIKFKDSLFEGMHKPIIPYETYLKVQKELEERQQQAYERNNNPRPFQAKYMLSGMARCGYCGAPLRIVLGHKRKDGSRTMKYHCANRFPRKTKGVTVYNDNKKCDSGTYDLSNLENTVIDNLVSLQENNDSLLKIINGNNQPILDTSSFKKQISQIDKKIQKNSDLYLNDFITMDELKDRTDSLQAEKKLLEAKISENKFNDSIDVFELVKTQLGNIPINELSYDNKKKIVNNLVSKVDVTADNVDIIFKFQLA

SEQ ID NO: 2392 - protein, 469 aa, synthetic construct
MSYTTPVRAAVYLRISEDRSGEQLGVARQREDCLKLCGQRKWVPVEYLDNDVSASTGKRRPAYEQMLADITAGKIAAVVAWDLDRLHRRPVELEAFMSLADENRLALATVAGDVDLATPQGRLVARLKGCVAAHETEHKKARQRRAARQKAERGHPNWSKAFGYLPGPSGPEPDPRTAPLVKQAYADILAGASLGDVCRQWNDAGAFTITGRPWTTATLSKFLRKPRNAGLRAYKGARYGPVDRDAIVGKAQWSPLVDEATFWAAQAVLDAPGRAPGRKSVRRHLLTGLAGCGKCGNHLAGSYRTDGRVVYVCKACHGVAILADNIEPILYHIVAERLAMPDAVDLLRREIHDVAEAETIRLELETLYGELDRLAVERAEGLLTARQVKISTDIVDAKITKLQARQLDQERLRVFDGIPLGTPQAAGMIAELSPDRFRAVLDVLAEVVVQPVGKSGRIFNPERVQVNWR

SEQ ID NO: 2393 - protein, 452 aa, synthetic construct
MKAAIYIRVSTREQVENYSIQAQTEKLTALCRSKDWNVYDIFIDGGYSGSNMNRPALNEMLSKLHEIDAVVVYRLDRLSRSQRDTITLIEEYFLKNNVEFVSLSETLDTSSPFGRAMIGILSVFAQLERETIRDRMVMGKIKRIEAGLPLTTAKGRTFGYDVIDTKLYINEEEARQLRLIYDIFEEEQSITSLQKRLKKLGSKVRTYNRYNNWLTNDLYCGYVSYKDKVHVKGIHEPIISEEQFYRVQEIFTRMGKNPNMNRDSASLLNGLVVCSKCGLGFVHRRKDAMSRDKKYHYRYYSCKTYKHIHELEKCGNKTWRADKLEELIINRVNNYSVASRNVDKEDELDSLNEKLKIEHAKKRRLFDLYINGSYEVSELDSMMNDIDAQINYYESQIEANEELKKNKKIQENLAYLATVDFDSLEFREKQLYLKSLINKIYIDGEQVTIEWL

SEQ ID NO: 2394 - protein, 469 aa, synthetic construct
MSYTTPVRAAVYLRISEDRSGEQLGVARQREDCLKLCGQRNWVPVEYLDNDVSASTGKRRPAYEQMLADITAGKIAAVVAWDLDRLHRRPIELEAFMSLADEKRLALATVAGDVDLATPQGRLVARLKGCVAAHETEHKKARQRRAARQKAERGLPNWSKAFGYLPGLNGPEPDPRTAPLVKQAYADILAGASLGDVCRQWNDAGAFTITGRPWTTTTLSKFLRKPRNAGLRAYKGARYGPVDRDAIVGKAQWSPLVDEATFWAVQAVLDAPGRAPGRKSVRRHLLTGLAGCGKCGNHLAGSYRTDGRVVYVCKACHGVAILADNIEPILYHIVAERLATPDAVDLLRREIHDAAEAETIRLELEALCGELDRLAVERAEGLLTARQVKISTDIVNAKITKLRARQLDQERLRVFGGIPLGTPQVAGVIAELSPDRFRAVLDVLAEVVVRPAGKSGRIFNPERVEVNWR

SEQ ID NO: 2395 - protein, 452 aa, synthetic construct
MKAAIYIRVSTREQVENYSIQAQTEKLTALCRSKDWDVYDIFIDGGYSGSNMNRPALNEMLSKLHEIDAVVVYRLDRLSRSQRDTITLIEEYFLKNNVEFVSLSETLDTSSPFGRAMIGILSVFAQLERETIRDRMVMGKIKRIEAGLPLTTAKGRTFGYDVIDTKLYINEEEAKQLRLIYDIFEEEQSITFLQKRLKKLGFKVRTYSCYNNWLTNDLYCGYVSYKDKVHVKGIHEPIISEEQFYRVQEIFTRMGKNPNMNRDSASLLNNLVVCSKCGLGFVHRRKDTMSRGKKYHYRYYSCKTYKHTHELEKCGNKIWRADELEELIINRVSNYSFASRNVGKEDELDSLNEKLKIEHAKKKRLFDLYINGSYEVSELDSMMNDIDAQINYYESQIEANEELKRNKKIQENLADLATVDFDSLEFREKQLYLKSLINKIYIDGEQVTIEWL

SEQ ID NO: 2396 - protein, 452 aa, synthetic construct
MKAAIYIRVSTREQVENYSIQAQTEKLTALCRSKDWDVYDIFIDGGYSGSNMNRPALNEMLSKLHEIDAVVVYRLDRLSRSQRDTITLIEEYFLKNSVEFVSLSETLDTSSPFGRAMIGILSVFAQLERETIRDRMVMGKIKRIEAGLPLTTAKGRTFGYDVIDTKLYINEEEAKQLRLVYDIFEEEQSITFLQKRLKKLGFKVRTYSCYNSWLTNDLYCGYVSYKDKVHVKGVHEPIISEEQFYRVQEIFTRMGKNPNMNRDSASLLNNLVVCSKCGLGFVHRRKDTMSRGKKYHYRYYSCKTYKHIHELEKCGNKIWRADKLEELIINRVNNYSFASRSAEKEDELDSLNEKLKLEHAKKKRLFDLYINGSYEVSELDSMMNDIDAQINYYESRIEANEELKKNKEIQENLADLATVDFDSLEFREKQLYLKSLINKIYIDGEQVTIEWL

SEQ ID NO: 2397 - protein, 452 aa, synthetic construct
MKAAIYIRVSTREQVENYSIQAQTEKLTALCRSKDWDVYDIFIDGGYSGSNMNRPALNEMLSKLHEIDAVVVYRLDRLSRSQRDTITLIEEYFLKNNVEFVSLSETLDTSSPFGRAMIGILSVFAQLERETIRDRMVMGKIKRIEAGLPLTTAKGRTFGYDVIDTKLYINEEEAKQLQLIYDIFEEVQSITFLQKRLKKLGFKVRTYNRYNNWLTNDLYCGYVSYKDKVHVKGIHEPIISEEQFYRVQEIFARMGKNPNMNRDSASLLNNLVVCSKCGLGFVHRRKDAMSRDKKYHYRYYSCKTYKHIHELEKCGNKIWRADKLEELIISRVSNYSLASRNVDKEDELESLNEKLKIEHAKKKRLFDLYINGSYEVSELDSMMGDIDVQISYYESQIEANEELKKNKKIQENLADLATVDFDSLEFREKQLYLKSLINKIYIDGEQVTIEWL

SEQ ID NO: 2398 - protein, 452 aa, synthetic construct
MKAAIYIRVSTQEQVENYSIQAQTEKLTALCRSKGWDVYDIFIDGGYSGSNMNRPALNEMLSKLHEIDAVVVYRLDRLSRSQRDTTTLIEEHFLKNNVEFVSLSETLDTSSPFGRAMIGILSVFAQLERETIRDRMVMGKIKRIEAGLPLTTAKGRTFGYDVIDTRLYINEEEARQLQLIYDIFEEEQSITSLQKRLKKLGFKVRTYNRYNNWLTNDLYCGYVSYKDKVHVKGIHEPIISEEQFYRVQEIFTRMGKNPNINRDSASLLSNLVVCSKCGLGFVHRSKDTMSRGKKYHYRYYSCKTYKHTHELEKCGNKTWRADKLEELIINRVNNYSFVSRNVDKEDELDSLNEKLKIEHAKKKRLFDLYINGSYEVSELDGMMSDIDAQISYYESQIEANGELRRNRKIQENLADLATVDFNSLELREKQLYLKSLINKIYIDGEQVTIEWL

SEQ ID NO: 2399 - protein, 469 aa, synthetic construct
MCYTTPVRAAVYLRISEDRSGEQLGVARQREDCLELCGQRKWVPVEYLDNDVSASTGKRRPAYEQMLADITAGKIAAVVVWDLDRLHRRPIELEAFMSLADEKRLALATVAGDVDLATPQGRLVARLKGSVAAHETEHKKARQRRAARQKAERGYPNWSKAFGYLPGPNGPEPDPRTAPLVKQAYADILAGASLGDVCRRWNDAGAFTITGRPWTTTTLSKFLRKPRNAGLRAYKGARYGPVDRDAIVGKAQWSPLVDEATFWAAQAVLDAPGRAPGRKSVRRHLLTGLAGCGKCGNHLAGSYRTDGRVVYVCKACHGVAILADNIEPILYHTVAERLAMPDAVDLLRREVHDAAEAETIRLGLETLHGELDRLAVERAEGLLTARQVKICTDIVNVKIARLQARRLDQERLRVFDGIPLGTPQVAGVIAELSPNRFRAVLDVLAEVVVQPVGKSGRIFNPERVQVNWR

SEQ ID NO: 2400 - protein, 485 aa, synthetic construct
MTRKVAIYTRVSTTNQAEEGFSIDEQIDRLTKYAEAMGWQVSDTYTDAGFSGAKLERPAMQRLINDIENKAFDTVLVYKLDRLSRSVRDTLYLVKDVFTKNTIDFISLNESIDTSSAMGSLFLTILSAINEFERENIKERMTMGKLGRAKSGKSMMWTKTAFGYYHNRKTGILEIVPLQATIVEQIFTDYLSGISLTKLRDKLNESGHIGKDIPWSYRTLRQTLDNPVYCGYIKFKGSLFEGMHKPIIPYETYLRVQKELEERQQQTYERNNNPRPFQAKYMLSGMARCGYCGAPLKIVLGHKRKDGSRTMKYHCANRFPRKTKGVTVYNDNKKCDSGTYDLSNLENTVIDNLIGFQENNDSLLKIINGNSQPILDTSSFKKQISQIDKKIQRNSDLYLNDFITMDELKARTDSLQAEKKLLKAKISENKFNDSTDVFELVKTQLGSIPINELSYDNKKKIVNNLVSKVDVTADSVDIIFKFQLA

SEQ ID NO: 2401 - protein, 469 aa, synthetic construct
MSYTTPVRAAVYLRISEDRSGEQLGVARQREDCLKLCDQRKWVPVEYLDNDVSASTGKRRPAYEQMLADITAGKIAAVVAWDLDRLHRRPIELEAFMSLADEKRLALATVAGDVDLATPQGRLVARLKGSVAAHETEHKKARQRRAARQKAERGHPNWSKAFGYLPGPNGPEPDPRTAPLVKQAYTDILAGASLGDVCRQWNDAGAFTITGRPWTTTALSKFLRKPRNAGLRAYKGARYGPVDRDAIVGKAQWSPLVDEATFWAAQAVLDAPGRAPGKKSVRRHLLTGLAGCGKCGNLLAGSYRTDGRVVYVCKACHGVAILADNIEPILYHIVAERLAMPDAVDLLRREIHDAAEAETIRLELETLYGELDRLAVERAEGLLTARQVKISTDIVSAKITELQARQLDQERLRVLDGIPLGTPRVAGMIAGLSPDRFRAVLDVLAEVVVQPVGKSGRIFNPERVQVNWR

SEQ ID NO: 2402 - protein, 469 aa, synthetic construct
MSYTTPVRAAVYLRISEDRSGEQLGVARQREDCLKLCVQRKWEPVEYLDNDVSASTGKRRPAYEQMLADITAGKIAAVVAWDLDRLHRRPMELEAFMSLADEKRLALATVAGDVDLATPQGRLVARLKGSVAAHETEHKKARQRRAARQKAERGHPNWSKAFGYLPGPNGPEPDPRTAPLVKQAYADILAGASLGDVCRQWNAAGAFTITGRPWTTTTLSKFLRKPRNAGLRAYKGARYGPVDRNAIVGKAQWSPLVDEATFWAAQAVLDAPGRAPGRKSVRRHLLTGLAGCGKCGNHLAGSYRTDGKVVYACKACHGVAILADNIEPILYHIVAERLAMPDAVDLLRREIHDAAEAETIRLELETLYGELDRLAVERAEGLLTARQVKISTDIVNAKITKLQARQLDQERLRVFEGIPLGTPQVAGVIAELSPDRFRAVLDVLVEVVVQPVGKSGRIFNPERVQVNWR

SEQ ID NO: 2403 - protein, 452 aa, synthetic construct
MKAAIYIRVSTREQVENYSIQAQTEKLTALCRSKDWDVYDIFIDGGYSGSNMNRPALNEMLSKLHEIDAVVVYRLDRLSRSQRDTITLIEEYFLKNNVEFVSLSETLDTSSPFGRAMIGILSVFAQLERETIRDRMVMGKIKRIEAGLPLTTAKGRTFGYDVIDTKLYINEEEAKQLQLIYDIFEEERSITSLQKRLKKLGFKVRTYSRYYGWLTNDLYCGYVSYKDKVHVKGIHEPIISEEQFYRVQEIFTRMGKNPNMNRDSASLLNNLVVCSKCGLGFVHRRKDTMSRGKKYHYRYYSCKTYKHTHELEKCGNKIWRADKLEELVINRVNNYSFASRNVDKEDELASLNEKLKTEHAKKKRLFDLYINGSYEVSELDSMMNDIDAQINYYESQIEANEELKRNKKIQENLANLATVDYDSLEFREKQLYLKSLINKIYIDGELVTIEWQ

SEQ ID NO: 2404 - protein, 452 aa, synthetic construct
MKAAIYIRVSTQEQVGNYSIQAQTEKLTALCRSKDWDVYDIFIDGGYSGSNMNRPALNEMLSKLHEIDAVVVYRLDRLSRSQRDTTTLIEEYFLKNNVEFVSLSETLDTSSPFGRAMIGILSVFAQLERETIRDRMVMGKIKRIEAGLPLTTAKGRTFGYDVIDTKLYINEEEAKQLQLIYDIFEEEQSITSLQKRLKKLGFRVRTYNRYNNWLTNDLYCGYVSYKDKVHVKGIHEPIISEEQFYRVQEIFTRMGKSPNMNRDSASLLSNLVVCSKCGLGFVHRSKDTMSRGKKYHYRYYSCKTYKHTHELEKCGNKTWRADKLEELVINRVSNYSLASRNVDKEGELDSLNEKLKIEHAKKKRLFDLYINGSYEVGELDSMMNDIDAQISYYESQIEANEELKKNKKIQENLADLATVDFDSLEFREKQLYLKSLINKIYIDGEQVTIEWL

SEQ ID NO: 2405 - protein, 485 aa, synthetic construct
MTKKVAIYTRVSTTNQAGEGFSIDEQTDRLTKYAEAMGWQVSDTYTDAGFSGAKLERPAMQRLINDIENEAFDTVLVYKLDRLSRSVRDTLYLVKDVFTKNKIDFISLNESIDTSSAMGSLFLTILSAINEFERENIKERMTMGKLGRAKSGKSMMWTKTAFGYYHNRKTGILEIVPLQATIVEQIFTDYLSGISLTKLRDKLNESGHIGKDIPWSYRTLRQTLDNPVYCGYIKFKDSLFEGMHKPIIPYETYLKVQKELEERQQQTYERNNNPRPFQAKYMLSGMARCGYCGAPLRIVLGHKRKDGSRTMKYHCANRFPRKTKGVTVYNDNKKCDSGAYDLSNLENTVIDNLIGFQENNDSLLKIINGNSQPILDTSSLEKQISQIDKKIQKNSDLYLNDLITMDELKDRTDSLQAEKKLLKAKISENKFNDSTDVFELVKTQLGSIPINELSYDSKKKIVNNLVSKVDVTADNVDIIFKFQLA

SEQ ID NO: 2406 - protein, 485 aa, synthetic construct
MTKKVAIYTRVSTTSQAEEGFSIDEQIDRLTKYAEAMGWQVSDTYTDAGCSGAKLERPAMQRLINDIENKAFDTVLVYKLDRLSRSVRDTLYLVKDVFTKNKIDFISLNESIDTSSAMGSLFLTILSAINEFERENIKERMTMGKLGRAKSGKSMMWTKTAFGYYHNRKTGILEIVPLQATIVEQIFTDYLSGISLTKLRDKLNESGHIGKDIPWSYRTLRQTLDNPVYCGYIKFKDSLFEGMHEPIIPYETYLKVQKELEERQQQTYERNNNPRPFQAKYMLSGMARCGYCGAPLRIVLGHKRKDGSRTMKYHCANRFPRKTKGVTVYNDNKKCDSGTYDLSNLENTVIDNLVGFQENNDSLLKIINGNNQPILDTSSFREQISRIDKKIQKNSDLYLNDFITMDELKARTDSLQAEKKLLKAKISENKFNDSTDVFELVKAQLGSIPINELSYDNKKRIVNNLVSKVDVTADNVDIIFKFQLA

SEQ ID NO: 2407 - protein, 452 aa, synthetic construct
MKAAIYIRVSTREQVENYSIQAQTEKLTALCRSKDWDVYDIFIDGGYSGSNMNRPALNEMLNKLHEIDAVVVYRLDRLSRSQRDTVTLIEEYFLKNNVEFVSLSETLDTSSPFGRAMIGILSVFAQLERETIRDRMVMGKIKRIEAGLPLTTAKGRTFGYDVIDTKLYINEEEAKQLQLIYNIFEEERSITFLQKRLKKLGFKVRTYSRYNSWLTNDLYCGYVSYKDKVHVKGIHEPIISEEQFYRVQEIFTRMGKNPNMNRDSASLLNNLVVCGKCGLGFVHRRKDTVSRGKKYHYRYYSCKTYKHIHELEKCGNKIWRADKLEELIINRVNNYSLASRNVDKEDELDSLNEKLKIEHAKKKRLFDLYINGSYEVSELDSMMNDIDAQINYYESQIEANEELKRNKKIQENLADLATVDFDSLEFREKQLYLKSLINKIYIDGEQVTIEWL

SEQ ID NO: 2408 - protein, 452 aa, synthetic construct
MKAAIYIRVSTREQVENYSIQAQTEKLTALCRSKDWDVYDIFIDGGYSGSNMNRPALNEMLSKLHEIDAVVVYRLDRLSRSQRDTITLIEEYFLKNNVEFVSLSETLDTSSPFGRAMIGILSVFAQLERETIRDRMVMGKIKRIEAGLPLTTAKGRTFGYDVIDTKLYINEEEAKQLQLIYDIFEEERSITFLQKRLKKLGFKVRTYNCYNNWLTNDLYCGYVSYKDKVHVKGIHEPIISEEQFYRVQEIFTRMGRNPNMNRDSASLLNNLVVCSKCGLGFVHRRKDAMSRNKKYHYRYYSCKTYKHIHELEKCGNKIWRADELEELIINRVNDYSLASRNVDKGDELDSLNEKLKIEHAKKRRLFDLYINGSYEVSELDSMMNDIDAQINYYESQIEANEELKKNKKIQENLAYLATVDFDSLEFREKQLYLKSLINKIYIDGEQVTIEWL

SEQ ID NO: 2409 - protein, 485 aa, synthetic construct
MTKKVAIYTRVSTTNQAEEGFSIDEQIDRLTKYAEAMGWQVSDTYTDAGFSGAKLERPAMQRLINDIENKAFDTVLVYKLDRLSRSVRDTLYLVKDVFTKNKIDFISLNESINTSSAMGSLFLTILSAINEFERENIKERMTMGKLGRAKSGKSMMWTKTAFGYYHNRKTGILEIVPLQATIVEQIFTDYLSGISLTKLRDKLNESGHIGKDIPWSYRTLRQTLDNPVYCGYIKFKGSLFEGMHKPIIPYETYLKVQKELEERQQQTYERNNNPRPFQAKYMLSGMARCGYCGAPLRIVLGHKRKDGSRTMKYHCANRFPRNTKGITVYNDNKKCDSGTYDLRSLENTVIDNLTGFQEDNDSLLKIINGNNQPIQDTSSIKNQISQIDKKIQKNSDLYLNDFITMEELKDRTDGLQAEKKLLKAKISVNKSNDSTGVFELVKTQLGSIPINELSYDNKKKIVNNLVSKVDVTADSVDIIFKFQLA

SEQ ID NO: 2410 - protein, 452 aa, synthetic construct
MKAAIYIRVSTQEQVGNYSIQAQTEKLTALCRSKDWDVYDIFIDGGYSGSNMNRPALNEMLSRLHEIDAVVVYRLDRLSRSQRDTTTLIEEYFLKNNVEFVSLSETLDTSSPFGRAMIGILSVFAQLERETIRDRMVMGKIKRIEAGLPLTTAKGRTFGYDVIDTKLYINEEEAKQLRLIYDIFEEERSITLLQKRLKKLGFKVRTYNRYNNWLTNDLYCGYVSYKDKVHVKGIHEPIISEEQFYRVQEIFTRMGKNPNMNRDSASLLTGLVVCSKCGLSFVHRSKDTMSRGKKYHYRYYSCKSYKHTHELEKCGNKTWRADKLEELIINRVNNYSFASRNADKGDELDSLNEKLKIEHARKKRLFDLYINGSYEVSELDSMMDDIDAQINYYESQIEAIEKLKKNKKIQENLADLATMDFDSLEFREKQLYLKSLINKIYIDGEQVTIEWL

SEQ ID NO: 2411 - protein, 452 aa, synthetic construct
MKAAIYIRVSTREQVENYSIQAQTEKLTALCRSKDWDVYDIFIDGGYSGSNMNRPALNEMLSKLHEIDAVVVYRLDRLSRSQRDTITLIEEYFLKNNVEFVSLSETLDTSSPFGRAMIGILSVFAQLERETIRDRMVMGKIKRVEAGLPLTTAKGRTFGYDVIDTRLYINEEEAKQLQLIYDIFEEEQSITFLQKRLKKLGFKVHTYNRYNNWLTNDLYCGYVSYKDKVHVKGIHEPIISEEQFYRVQEIFTRMGTNPNMNRDSASLLNNLVVCSKCGLGFVHRRKDTVSRGKKYHYRYYSCKTYKHIHELEKCGNKIWRADKLEELIINRVNNYSLASRDVDKEDELDSLSEKLKVEHAKKKRLFELYINGSYEMGELDSMMNDIDAQINYYESQIEANEELKKSKKIQENLADLATVDYDSLEFREKQLYLKSLINKIYIDGEQVTIEWL

SEQ ID NO: 2412 - protein, 452 aa, synthetic construct
MRAAIYIRVSTREQVENYSIQAQTERLTALCRSKGWDVYDIFVDGGYSGSNMNRPALNEMLSKLHEIDAVVVYRLDRLSRSQRDTITLIEEYFLKNNVEFVSLSETLDTSSPFGRAMIGILSVFAQLERETIRDRMVMGKIKRIEAGLPLTTAKGRTFGYDVVDTKLYINEEEARQLQLIYDIFEEERSITSLQKRLKELGFKVRTYNRYNNWLTNDLYCGYVSYKDKVHVKGIHEPIISEEQFYRVQEIFTRMGKNPNMNRDSASLLNNLVVCSKCGLGFVHRRKDIMSRGKKYHYRYYSCKTYKHIHELEKCGNKIWRADKLEELIINRVNNYSFASRNVDKEDELNSLNEKLKMEHAKKKRLFDLYINGSYEVSELDSMMNDIDAQISYYESQIEANEELKKNKEIRENLAHLATVDFDSLEFREKQLYLKSLINKIYIDGEQVTIEWL

SEQ ID NO: 2413 - protein, 469 aa, synthetic construct
MCYTTPVRAAVYLRISEDRSGEQLGVARQREDCLKLCSQRRWVPVEYLDNDVSASTGKRRPAYEQMLADITAGKIAAVVAWDLDRLHRRPIELEAFMSLADEKRLALATVAGDVDLATPQGRLVARLKGSVAAHETEHKKARQRRAARQKAERGHPNWSKAFGYLPGPNGPEPDPRTAPLVRQAYADILAGASLGDVCRQWNDAGALTITGRPWTTTALSKFLRKPRNAGLRAYKGARYGPVDRDAIVGKAQWSPLVDEATFWAAQAVLDAPGRAPGRKSVRRHLLTGLAGCGKCGNHLAGSYRTDGRVVYVCKACHGIAILADNIEPTLYHIVAERLAMPDAVDLLRREIHDAAEAETIRLELETLHGELDRLAVERAEGLLTARQVKISTDIVNAKITKLQARQLDQVRLRVFDGIPLGTPQVAGMIAELSPDRFRAVLDVLAEVVVQPVGKSGRIFNPERVQVNWR

SEQ ID NO: 2414 - protein, 452 aa, synthetic construct
MKAAIYIRVSTREQVENYSIQAQTEKLTALCHSKGWDVYGIFIDGGYSGSNMNRPALNEMLSKLHEIDAVVVYRLDRLSRSQRDTITLIEEYFLKNNVEFVSLSETLDTSSPFGRAMIGILSVFAQLERETIRDRMVMGKIKRIEAGLPLTTAKGRTFGYDVIDTKLYINEEEAKQLRLIYDIFEEEQSITFLQKRLKKLGFKVRTYNRYNNWLTNDLYCGYVSYKDKVHVKGIHEPIISEEQFYRVQEIFTRMGRNPNMNRDSASLLNNLVVCSKCGLGFVHRRKDAMSRDKKYHYRYYSCKTYKHIHELEKCGNKIWRADKLEELIINRVNNYSFASRNADKEGELDSLNEKLKIEHAKRKRLFDLYINGSYEVSELDSMMNNIDAQINYYESQIEANEELKKNKKILENLAHLATVDFDSLEFREKQLYLKSLINKIYIDGEQVTIEWL

SEQ ID NO: 2415 - protein, 452 aa, synthetic construct
MKAAIYIRVSTQEQVGNYSIQAQTEKLTALCRSKDWDVYDIFIDGGYSGSNMNRPALNEMLSKLHEIDAVVVYRLDRLSRSQRDTTTLIEEYFLKNNVEFVSLSETLDTSSPFGRAMIGILSVFAQLERETIRDRTVMGKIKRVEAGLPLTTAKGRTFGYDVIDTKLYINEEEAKQLRLIYDIFEEEQSITFLQKRLKKLGFKVRTYNRYNNWLTNDLYCGYVSYKDKVHVKGIHEPIISEEQFYRVQEIFTRMGKNPNMNRDSASLLNNLVVCSKCGLGFVHRSKDTMCRGKKYHYRYYSCKTYKHTHELEKCGNKTWRADKLEELITNRVNNYSFASRNVGKEDELDSLNEKLKIEHAKKKRLFDLYINGSYEVSELDSMMNDIDAQISYYESQIEANEELKKNKKIQENLANLATVDFDSLEFREKQLYLKSLINKIYIDGEQVTIEWL

SEQ ID NO: 2416 - protein, 452 aa, synthetic construct
MKAAIYIRVSTQEQVGNYSIQAQTEKLTALCRSKDWDVYDIFIDGGYSGSNMNRPALNEMLSKLHEIDAVVVYRLDRLSRSQRDTTTLIEEYFLKNNVEFVSLSETLDTSSPFGRAMIGILSVFAQLERETIRDRMVMGKIKRIEAGLPLTTAKGRTFGYDVIDTKLYVNEEEAKQLQLIYDIFEEEQSITFLQKRLKELGFKVRTYNRYNNWLTNDLYCGYVSYKDKVRVKGIHEPIISEEQFYRVQEIFTRMGKNPNMNRDSASLLSNLVVCSKCGLGFVHRSKDTMSRGKKYHYRYYSCKTYKHTHELEKCGNKTWRADKLEELVINRVNNYSFASRNADKEDELDSLNDKLKIEHAKKKRLFDLYINGSYEVSELDSMMNDIDAQINYYESQIEANEELKKNKKIQENLANLAAVDFDSLEFREKQLYLKSLINKIYIDGEQVTIEWL

SEQ ID NO: 2417 - protein, 485 aa, synthetic construct
MTKKVAIYTRVSTTNQAEEGFSIDEQIDRLTKYAEAKGWQVSGTYTDAGFSGARLGRPAMQRLIDDIENKAFDTVLVYKLDRLSRSVRDTLYLVKEVFTKNKIDFISLNESIDTSSAMGSLFLTILSAINEFERENIRERMTMGKLGRAKSGKSMMWTKTAFGYYHNRKTGILEIVPLQATIVEQIFTDYLSGISLTKLRDKLNESGHIGKDIPWSYRTLRQTLDNPVYCGYIKFKDSLFEGMHKPIIPYETYLKVQKELEERQQQTYERNNNPRPFQAKYMLSGMARCGYCGAPLRIVLGRKRKDGSRTTKYHCANRFPRKTKGVTVYNDNKKCDSGTYDLSYLENAVIDNLIGFQENNDSLLKIINGNNQPILDTSSFKKQISQIDKKIQKNSDLYLNDFITMDELKERTDSLQAEKKLLKAKISENKFNDSTDVFELVKTQLGSIPINELSYDNKKKIVNNLVSKVDVTADNVDIIFKFQLA

SEQ ID NO: 2418 - protein, 485 aa, synthetic construct
MTRKVAIYTRVSTTNQAEEGFSIDEQIDRLTKYAEAMGWQVSDTYTDAGVSGAKLERPAMQRLINDIENKAFDTVLVYKLDRLSRSVRDTLYLMKDVFTKNKIDFISLNESIDTSNAMGSLFLTILSAINEFERENIKERMTMGKLGRAKSGKSMMWTKTAFGYYHNRKTGILEIVPLQATIVEQIFTDYLSGISLTKLRDKLNESGHIGKDIPWSYRTLRQTLDNPVYCGYIKFKDSLFEGMHKPIIPYETYLKVQKELEERQQQAYERNNNPRPFQAKYMLSGMARCGYCGAPLKIVLGHKRKDGSRTMKYHCANRFPRKTKGVTVYNNNKKCDSGTYDLSNLENTVIDNLIGFQKNDDSLLKIINGNNQPILDTSSFEEQISQIDKKIQKNSDLYLNDFITMDELKDRTDSLQAEKKLLKAKISENKFNDSTDVFELVKTQLGSTPINELSYDNKKKIVNNLVSKVDVTADNVDIIFKFQLA

SEQ ID NO: 2419 - protein, 452 aa, synthetic construct
MKAAIYIRVSTREQVENYSIQAQTEKLTALCRSKDWDVYDIFIDGGYSGGNMNRPALNEMLSKLHEFDAVVVYRLDRLSRSQRDTITLIEEYFLKNNVEFVSLSETLDTSSPFGRAMIGILSVFAQLERETIRDRMVMGKIKRIEAGLPLTTAKGRTFGYDVIDTKLYINEEEAKQLQLIYDIFEEEQSITSLQKRLKKLGFKVHTYNRYNNWLTNDLYCGYVSYKDKVHVKGVHEPIISEEQFYRVQEIFTRVGKNPNTNRDSASLLNNLVVCGKCGLGFVHRRKDTTSRGKKYHYRYYSCKTYKHTHELEKCGNRIWRADKLEELIINRVNNYSLASRNVDKEDELDSLNAKLKIEHAKKRRLFDLYINGSYEVSELDSMMNDIDAQINYYESQIEAIEELKKNKKIQENLANLATVDYDSLEFREKQLYLKSLINKIYIDGEQVTIEWL

SEQ ID NO: 2420 - protein, 452 aa, synthetic construct
MKAAIYIRVSTREQVENFSIQAQTEKLTALCRSKDWDVYDIFIDGGYSGSNMNRPALNEMLSKLHEIDAVVVYRLDRLSRSQRDTITLIEEYFLKNNVEFVSLSETLDTSSPFGRAMIGILSVFAQLERETIRDRMVMGKIKRIEAGLPLTTAKGRTFGYDVIDTKLYINEEEAKQLQLIYDIFEEEQSITFLQKRLKKLGFKVRTYSRYNNWLTNDLYCGYVSYKDKVHVKGIHEPIISEEQFYRVQEIFARMGKNPNMNRDSASLLSNLVVCSKCGLGFVHRRKDTMSRGKKYHYRYYSCKTYKHIHELEKCGNKIWRADKLEELIINRVNNYSFASRNVDKEDELDSLNEKLKIEHAKKKRLFDLYINGSYEVSELDSMMNDIDAQIDYYESQIEAIVELKKDKKIQENLANLATVDYDSLEFREKQLYLKSLINKIYIDGEQVTIEWL

SEQ ID NO: 2421 - protein, 485 aa, synthetic construct
MTKKVAIYTRVSTTNQAEEGFSIDEQIDRLTKYAEAMGWQVSDTYTDAGLSGAKLERPAMQRLINDIENKAFDTVLVYKLDRLSRSVRDTLYLVNDVFTKNKIDFVSLNESIDTSSAMGSLFLTILSAINEFERENIKERMTMGKLGRAKSGKSMMWTKTAFGYHHNRKTGILEIVPLQATIVKQIFTDYLSGISLTKLRDKLNESGHIGKDIPWSYRTLRQTLDNPVYCGYIKFKDSLFEGMHKPIIPYETYLKVQKELEERQQQTYERNNNPRPFQAKYMLSGLARCGYCGAPLKIVLGHKRKDGSRTMKYHCANRFPRKTKGVTVYNDNKKCDSGTYDLSNLENTVIDNLIGFQENNDSLLKVINGNNQPILDTSSFKKQISRIDKKIQRNSDLYLNDFITMDELKDRTDSLLAEKKLLKAKISENEFNDSTDVFELVKTQLGSIPINELSYDNKKKIVNNLVSKVDVTADNVDIIFKFQLA

SEQ ID NO: 2422 - protein, 452 aa, synthetic construct
MKAAIYIRVSTREQVENYSIQAQTEKLTALCRSKDWDVYDIFIDGGYSGSNMSRPALNEMLSKLHEIDAVVVYRLDRLSRSQRDTITLIEEYFLKNNVEFVSLSETLDTSSPFGRAMIGILSVFAQLERETIRDRMVMGKIKRIEAGLPLTTAKGRTFGYDVIDTKLYINEEEAKQLQLIYDIFEEEQSITFLQKRLKKLGFKVRTYNRYNNWLTNDLYCGYVSYKDKVHVKGIHEPIISEEQFYRVQEIFTRMGKNPNMNRDSASLLNNLVVCSKCGLGFVHRRKDAMSRDKKYHYRYYSCKTYKHIHELEKCGNKIWRADELEELVINRVNSYSVASRNVDKEDELGSLNEKLKIEHAKKKRLFDLYINGNYEVSELDSMMNDIDAQINYYESQIEANEELKKNKKIQENLAYLATVDFDSLEFREKQLYLKSLINKIYIDGEQVSIEWL

SEQ ID NO: 2423 - protein, 485 aa, synthetic construct
MTKKVAIYTRVSTTNQAEEGFSIDEQIDRLTKYAEAMGWQVSDTYTDAGFSGAKLERPAMQRLINDIENKAFDTVLVYKLDRLSRSVRDTLYLVKDVFTKNKIDFISLNESINTSSAMGSLFLTILSAINEFERENIKERMTMGKLGRAKSGKSMMWTKTAFGYYHNRKSGILEIVPLQAAIVEQIFTDYLSGISLTKLRDKLNESGHIGKDIPWSYRTLRQTLDNPVYCGYIKFKGSLFGGMHKPIIPYETYLRVQKELGERQQQTYERNNNPRPFQAKYMLSGMARCGYCGAPLRIVLGHRRKDGSRTMKYHCANRFPRKTRGVTVYNNNKKCDSGTYDLSNLENTVIDNLIGLQENNDSLLKIIIGNNQPILDTSSFKEQISRIDKKIQKNSDLYLNDFITMDELKERTDSLRAERRLLKAKISENKFNDSTDVFELVKTQLGSIPINELSYDNKKKIVNNLVSKVDVTADSVDIVFKFQLA

SEQ ID NO: 2424 - protein, 452 aa, synthetic construct
MKAAIYIRVSTQEQVGNYSIQAQTEKLTALCRSKDWDVYDIFIDGGYSGSNMNRPALNEMLSKLHEIDAVVVYRLDRLSRSQRDTTTLIEEYFLKNNVEFVSLSETLDTSSPFGRAMIGILSVFAQLERETIRDRMVMGKIKRIEAGLPLTTAKGRTFGYDVIDTRLYINEEEARQLQLIYDIFEEEQSITFLQKRLKKLGFKVRTYNRYNNWLTNDLYCGYVSYKDKVHVKGIHEPIISEEQFYRVQEIFTRMGKSPNMNRDSASLLNNLVVCSKCGLGFVHRSKDTMSRGKKYHYRYYSCKTYKHTHELEKCGNKTWRADKLEELIINRVNNYSFASRNVDKGGELDSLNEKLKIEHAKKRRLFDLYINGSYEVSELDSMMNDIDAQINYYESQVEANDELKKDKKIQENLADLATVDFDSLEFREKQLYLRGLINKIYIDGEQVTIEWL

SEQ ID NO: 2425 - protein, 452 aa, synthetic construct
MKAAIYIRVSTREQVENYSIQAQTEKLTALCRSKDWDVYDIFIDGGYSGSNMNRPALNEMLSKLHEIDAVVVYRLDRLSRSQRDTITLIEEHFLKNNVEFVSLSETLDTSSPFGRAMIGILSVFAQLERETIRDRMVMGKIKRIEAGLPLTTAKGRTFGYDVIDTKLYINEEEAKQLQLIYDIFEEEQSITFLQKRLKKLGFKVRTYNRYNNWLTNDLYCGYVSYKDKVHVKGIHEPIISEEQFYRVQEIFTRMGKNPNMNRDSASLLNNLVVCSKCGLGFVHRRKDAMSRDKKYHYRYYSCKTYKHIHELEKCGNKIWRADKLEELIINRVNNYSLASRNVGKEDELDSLSEKLKIEHAKKRRLFDLYINGSYEVCELDSMMKDIDAQINYYESQIEANEELKKNKKIQENLAELATVDFDSLEFREKQLYLKSLINKIYIDGEQVTIEWL

SEQ ID NO: 2426 - protein, 485 aa, synthetic construct
MTKKVAIYTRVSTTNQAEEGFSIDEQIDRLIKYAEAMGWQVSDTYTDAGFSGAKLERPAMRRLINDIENKAFDTVLVYKLDRLSRSVRDTLYLVKDVFTKNKIDFISLNESIDTSSAMGSLFLTILSAINEFERENIKERMTMGKLGRAKSGKSMMWTKTAFGYYHNRKTGILEIVPPQATIVEQIFADYLSGISLTKLRDKLNESGHIGKDIPWSYRTLRQTLDNPVYCGYIKFKDSLFEGMHKPIIPYETYLKVQKELEERQQQTYERNNNPRPFQAKYMLSGMARCGYCGAPLKIVLGHKRKDGSRTMKYHCANRFPRKTKGVTVYNDNKKCDSGTYDLSNLENTVIDNLIGFQENNDSLLKIINGNNQPTPDTSGFKEQINQIDKKIQKNSDLYLNDFITMDELKDRTDSLQAEKKLLKAKISENKFNDSTDVFELVKTQLGSIPINELSYDNKKKIVNNLVSKVDVTADNVDIIFKFQLA

SEQ ID NO: 2427 - protein, 452 aa, synthetic construct
MKAAIYIRVSTQEQVENYSIQAQTEKLTALCRSKDWDVYDIFIDGGYSGSNMNRPALNEMLSKLHEIDAVVVYRLDRLSRSQRDTTTLIEEYFLKNNVEFVSLSETLDTSSPFGRAMIGILSVFAQLERETIRDRMVMGKIKRIEAGLPLTTAKGRTFGYDVIDTKLYINEEEARQLQLIYDIFEEEQSITSLQKRLKKLGFKVRTYNRYNNWLTNDLYCGYVSYKDKVHVKGIHEPIISEEQFYRVQEIFTRMGKSPNMNRDSASLLNNLVVCSKCGLGFVHRSKDTMCRGKKYHYRYYSCKTYKHAHELEKCGNKTWRADKLEELIINRVNSYSFASRNVDRENELDSLNEKLKIEHAKKKRLFDLYINGSYEVSELDSVMNDIDAQINYYESQIEASEELKKNKKIQENLADLATVDFDSLEFREKQLYLKSLISKIYIDGEQVTIEWL

SEQ ID NO: 2428 - protein, 452 aa, synthetic construct
MKAAIYIRVSTREQVENYSIQAQTEKLTALCRSKDWDVYDIFIDGGYSGSNMNRPALNEMLSKLHEIDAVVVYRLDRLSRSQRDTITLIEEYFLKNNVEFVSLSETLDTSSPFGRAMIGILSVFAQLERETIRDRMVMGKIKRIEAGLPLTTAKGRTFGYDVIDTRLYINEEEARQLQLIYDIFEEEQSITFLQKRLKKLGFKVRTYSCYNNWLSNDLYCGYVSYKDKVHVKGIHEPIISEEQFYRVQEIFTRMGKNPNMNRDSASLLNSLVVCSKCGLGFVHRRKDTMSRGKKYHYRYYSCKTYKHTHELEKCGNKIWRADKLEELIINRVNNYSFASRDVDKEDELDSLNEKLKIERAKKKRLFDLYINGSYEVSELDSMMSDIDARINYYESQIEGNEELRKNKKIQENLAVLATVDFDSLGFREKQLYLKSLINKIYIDGEQVTIEWL

SEQ ID NO: 2429 - protein, 469 aa, synthetic construct
MSYTTPVRAAVYLRISEDRSGEQLGVARQREDCLKLCDQRKWVPVEYLDNDVSASTGKRRPAYEQMLADITAGKIAAVVAWDLDRLHRRPIELEAFMSLADEKCLALATVAGDVDLATPQGRLVARLKGSVAAHETEHKKARQRRAARQKAERGHPNWSKAFGYRPGPNGPVPDPRTAPLVKQAYTDILAGASLGDVCRQWNDAGAFTITGRPWATTTLSKFLRKPRNAGLRAYKGARYGPVDRDAIVGKAQWSPLVDEATFWAAQAVLDAPGRAPGRKSVRRHLLTGLAGCGKCGNHLAGSYRTDGRVVYVCKACHGVAILADNIEPILYHIVAERLAMPDAVDLLRREIHDAAEAETIRLELATLYDELDRLAIERAEGLLTARQVKISTDIVNAKITQLQARQLDQERLRVFDGIPLGTPQVAGMIAELSPDRFRAVLDVLAEVVVRPVGKSGRIFNPERVQVNWR

SEQ ID NO: 2430 - protein, 485 aa, synthetic construct
MTKKVAIYTRVSTTNQAEEGFSIDEQIDRLTKYAEAMGWQVSDTYTDAGLSGAKLERPAMQRLINDSENKAFDTVLVYKLDRLSRSVRDTLYLVKDVFTKNKIDFISLNESIDTSSAMGSLFLTILSAINEFERENIKERMTMGKLGRAKSGKSMMWTKTAFGYYHNRNTGILEVVPLQAAIVEQIFADYLSGISLTKLRDKLNESGHIGKDIPWSYRTLRQTLDNPVYCGYIKFKGSLFEGMHKPIIPYETYLKVQKELEKRQQQTYERSNNPRPFQAKYMLSGMARCGYCGAPLKIVLGHKRRDGSRTVKYHCANRFPRKTKGVTVYNDNKKCDSGTYDLSNLENTVIDNLIGFQENNDSLLKIINGNTQPILDTSSFEKQISQIDEKIQRNSDLYLNDFITMDELKARTDSLQAEKKLLKAKISENKFNDSTDVFELVKTQLGSIPINELSYDNKKKIVNNLVSKVDVTADNVDIIFKFQLA

SEQ ID NO: 2431 - protein, 469 aa, synthetic construct
MSYTTPVRAAVYLRISEDRSGEQLGIARQREDCLKLCDQRKWVPVEYLDNDVSASTGKRRPAYEQMLADITAGKIAAVVAWDLDRLHRRPVELEAFMSLADEKRLALATVAGDIDLATPQGRLVARLKGSVAAHETEHKKARQRRAARQKAERGYPNWSKAFGYLPGPNGPEPDPRTAPLVKQAYADILAGASLGDVCRQWNDAGAFTITGRPWTTTALSKFLRKPRNAGLRAYKGARYGPVDRDAIVGKAQWSPLVDEATFWAAQAVLDAPGRAPGRKSVRRHLLTGLAGCGKCGNHLAGSYRTDGRVVYVCKACHGVAILADNIEPILYHIVAERLAMPDAVDLLRREIHDAAEAETIRLELETLYGELDRLAVERAEGLLTARQVKISTDIVNAKITKLQARQLDQERLRVFDGIPLGTPQVAGMIAELSPDRFRAVLDVLAEVVVQPVGKSGRIFNPERVQVNWR

SEQ ID NO: 2432 - protein, 452 aa, synthetic construct
MKAAIYIRVSTREQVENYSIQAQTEKLTALCRSKDWDVYDIFVDGGYSGSNMNRPALNEMLSKLHEIDAVVVYRLDRLSRSQRDTITLIEEYFLKNNVEFVSLSETLDTSSPFGRAMIGILSVFAQLERETIRDRMVMGKIKRIEAGLPLTTAKGRTFGYDVIDTKLYINEEEARQLQLIYDIFEEEQSITFLQKRLKKLGFKVRTYSCYNSWLTNDLYCGYVSYKDKVHVKGIHEPIISEEQFYRVQEIFTRMGKNPNMNRDSASLLNNLVVCSKCGLGFVHRRKDAVSRDKKYHYRYYSCKTYKHIHELEKCGNKIWRADKLEELIINRVNNYSIASRNADKEDELDSLNEKLKIEHAKKKRLFELYINGSYEVSELDSMMNDIDAQINYYESQIEANKELKRNKKIQENLADLATVDFDSLEFREKQLYLKSLINKIYIDGEQVTIEWL

SEQ ID NO: 2433 - protein, 469 aa, synthetic construct
MCYTTPVRAAVYLRISEDRSGEQLGVARQREDCLKLCDQRKWVPVEYLDNDVSASTGKRRPAYEQMLADITAGKIAAVVAWDLDRLHRRPIELEAFMSLADEKRLALATVAGDVDLATPQGRLVARLKGCVAAHETEHKKARQRRAARQKAERGHPNWSKAFGYLPGPNGPEPDPRTAPLVKQAYTDILAGASLGDVCRQWNDAGALTITGRPWTTTALSKFLRKPRNAGLRAYKGARYGPVDRDAIVGKAQWSPLVDEATFWAAQAVLDAPGRAPGRKSVRRHLLTGLAGCGKCGNHLAGSYRTDGRVVYVCKACHGVAILADNIEPILYHIVAERLAMPNAMDLLRREIHDAAEAETIRLELETLYGELDRLAVERAEGLLTARQVKISTDIVNAKITKLQARQLDQERLRVFDGIPLGTPQVTGVIAELSPDRFRAVLDVLAEVVVQPVGKSGRIFSPERVQVNWR

SEQ ID NO: 2434 - protein, 469 aa, synthetic construct; identical to SEQ ID NO: 413

SEQ ID NO: 2435 - protein, 452 aa, synthetic construct
MKAAIYIRVSTREQVENYSIRAQTEKLTALCRSKDWDVYDIFIDGGYSGSDMNRPALNEMLSKLHEIDAVVVYRLDRLSRSQRDTITLIEEYFLKNNVEFVSLSETLDTSSPFGRAMIGVLSVFAQLERETIRDRMVMGKIKRIEAGLPLTTAKGRTFGYDVIDTKLYINEEEAKQLQLIYDIFEEEQSITFLQKRLKKLGFKVHTYNRYNNWLTNDLYCGYVSYKDKVHVRGIHEPIISEEQFYRVQEIFTRMGKNPNLNRDNASLLNNLVVCSKCGLGFVHRRKDTTSRGRKYHYRYYSCKTYKHTHELEKCGNKIWRADKLEELIINRVNNYSPASRNVDKEDELDSLNGKLKIEHAKRKRLFDLYINGSYGVSELDSMMSDIDAQINYYEGQIEANEELRKDKKIQENLANLAAVDYDSLEFHEKQLYLKSLINKIYIDGEQVTIEWL

SEQ ID NO: 2436 - protein, 485 aa, synthetic construct
MTKKVAIYTRVSTTNQAEEGFSIDEQIDRLTKYAEAMGWQVSDTYTDAGLSGAKLERPAMQRLINDIENKAFDTVLVYKLDRLSRSVRDTLYLVKDVFTKNKIDFISLNESIDTSSAMGSLFLTILSAINEFERENIKERMTMGKLGRAKSGKSMMWTKTAFGYYHNRKTGILEIVPLQATIVEQIFTDYLSGISLTKLRDRLNESGHIGKDIPWSYRTLRQTLDNPVYCGYIKFKDSLFEGMHKPIIPYETYLKVQKELEERQQQAYERNNNPRPFQAKYMLSGMARCGYCGAPLRIVLGHKRKDGSRTMKYHCANRFPRKTKGVTVYNDNKKCDSGTYDLSTLENTVIDNLIGFQENNDSLLKIINGNNQPTLDTSSFKKQISQIDKKIQKNSDLYLNDFITMDELKDRTDSLQAEKKLLKAKISENKFNDSTDVFELVKTQLGSIPINELSYDNKKKIVNNLVSKVDVTADNVDIIFKFQLA

SEQ ID NO: 2437 - protein, 485 aa, synthetic construct
MIKKVAIYTRVSTTNQAEEGFSIDEQIDRLTKYAEAMGWQVSDTYTDAGSSGAKLERPAMQRLINDIENKAFDTVLVYKLDRLSRSVRDTLYLVKDVFTKNKIDFISLNESIDTSSAMGSLFLTILSAINEFERENIRERMAMGKLGRAKSGKSMMWTKTAFGYYHNRKTGILEIVPLQATIVEQIFTDYLSGISLTKLRDKLNESGHIGKDIPWSYRTLRQTLDNPVYCGYIKFKDSLFEGMHKPIIPYETYLKVQKELEERQQQTYERNNNPRPFQAKYMLSGMARCGYCGAPLRVVLGRKRKDGSRTMKYHCTNRFPRGTKGVTVYNDNKKCDSGTYDLSNLENTVIDNLIGLQENHDSLLKIINGNNQPILDTSSLKKQISQIDKKIQKNSDLYLNDFITMDELRDRTDSLQAEKKQLKAKISENRFNDSTDVFELVKTQLGSIPINELSYDNKKKIVNNLVSKVDVTADNVVIIFKFQLA

SEQ ID NO: 2438 - protein, 485 aa, synthetic construct
MTRKVAIYTRVSTTNQAEEGFSIDEQIDRLTKYAEAMGWQVSDTYTDAGFSGAKLERPAMQRLINDIENKAFDTVLVYKLDRLSRSVRDTLYLVKDVFTKNKIDFISLNESIDTSSAMGSLFLTILSAINEFERENIKERMTMGKLGRAKSGKSMMWTKTAFGYHHNRKTGILEIVPQQATIVEQIFTDYLSGISLTKLRDKLNESGHIGKDIPWSYRTLRQTLDNPVYCGYIKFKDSLFEGMHKPIIPYETYLKVQKELEERQQQAYERNNNPRPFQAKYMLSGMARCGYCGAPLKIVLGHKRKDGSRTMKYHCANRFPRKTKGVTVYNDNKKCDSGTYDLSNLENTVIDNLIGFQENNDSLLKIINGNNQPILDTSSFKKQISQIDEKIQKNSDLYLNGFITMDELKARTDSLRAEKKLPEAKISENKFNDSTGVFELVKTQLGSIPLNELSYDNKKKIVNNLVSKVDVTADNVDIIFKFQLA

SEQ ID NO: 2439 - protein, 485 aa, synthetic construct
MTKKVAIYTRVSTTNQAEEGFSIDEQIDRLTKYAEAMGWQVSDTYTDAGFSGAKLERPAMQRLINDIETKAFDTVLVYKLDRLSRSVRDTLYLVKDVFTKNKIDFISLSESIDTSSAMGSLFLTILSAINEFERENIKERMTMGKLGRAKSGKSMMWTKTAFGYYHNRKTGILEIVPLQATIVEQIFTDYLSGISLTKLRDKLNESGHIGKDIPWSYRTLRQTLDNPVYCGYIKFKDSLFEGMHKPIIPYETYLKVQRELEKRQQQTYERNNNPRPFQAKYMLSGMARCGYCGAPLRIVLGHKRKDGSRTMKYHCANRFPRKTKGITVYNDNKKCDSGAYDLGNLENTVIDYLIGFQENNDSLLKIINGSNQSILDTRSFEKQISQIDKKIQKNSDLYLNDFITMEELKNRADRLQAEKKLLKAKISENKFNDSTDVFELVKTQLGSIPINELSYDNKKKIVNNLVNKVNVTADNVDIVFKFQLA

SEQ ID NO: 2440 - protein, 452 aa, synthetic construct
MKAAIYIRVSTREQVENYSIQAQTEKLTALCRSKDWDVYDIFIDGGYSGSNMNRPALNDMLSKLHEIDAVVVYRLDRLSRSQRDTITLIEEYFLKNNVEFVSLSETLDTSSPFGRAMIGILSVFAQLERETIRDRMVMGKIKRVEAGLPLTTAKGRTFGYDVIDTKLYINEEEAKQLQLIYDIFEEEQSITFLQKRLKKLGFKVRTYNRYNNWLTNDLYCGYVSYKDKVHVKGIHEPIISEEQFYRVQEIFTRMGRNPNMNRDSASLLNNLVVCSKCGLGFVHRRKDTMSHGKKYHYRYYSCKTYKHIHELEKCGNKIWRADKLEELIINRVNNYSFASRNVDKEDELGSLNEKLKIEHAKRKRLFDLYINGSYEVSELDSMMSDIDAQINYYESQIEANEELKKNKKIQENLANLATVDYDSLEFREKQLYLRSLINKIYIDGEQVTIEWL

SEQ ID NO: 2441 - protein, 452 aa, synthetic construct
MKAAIYIRVSTREQVENYSIQAQTEKLTALCRSKDWDVYDIFIDGGYSGSDMNRPALNEMLSKLHEIDAVVVYRLDRLSRSQRDTITLIEEYFLKNNVEFVSLSETLDTSSPYGRAMIGILSVFAQLERETIRDRMVMGKIKRVEAGLPLTTAKGRTFGYDVIDAKLYINEEEAKQLQLIYDVFEEEQSITFLQKRLKKLGFKVRTYSRYNSWLTNDLYCGYVSYKDKVHVKGIHEPIISEEQFHRVQEIFTRMGKNPNMNRDSASLLNNLVVCSKCGLGFVHRRKDTMSRGRKYHYRYYSCKTYKHTHELEKCGNKIWRADKLEELIINRVNNYSLASRNVDKEDELDSLNEKLKIEHAKRKRLFDLYINGSYEVSELDSMMNDIDAQINYYESQIEANEELKKDKKIQEGLANLATVDYDSLEFREKQLYLKSLINKIYIDGEQVTIEWL

SEQ ID NO: 2442 - protein, 452 aa, synthetic construct
MKAAIYIRVSTREQVENYSIQAQTEKLTALCRSKDWDVYDIFIDGGYSGSNMNRPALNEMLSKLHEIDAVVVYRLDRLSRSQRDTITLIEEYFLKNNVEFVSLSETLDTSSPFGRAMIGILSVFAQLERETIRDRMVMGKIKRIEAGLPLTTAKGRTFGYDVIGTKLYINEEEAKQLQLIYDIFEEEQSITFLQKRLKKLGFKVRTYNRYHSWLTNDLYCGYVSYKDKVHVKGIHEPIISEEQFYRVQEIFTRMGKNPNMNRDSASLLNGLVVCSKCGLGFVHRRKDTMSRGKKYHYRYYSCKTYKHTHELEKCGNKIWRADKLEELIINRVNNYNFANRNVDKEDELDGLNEKLKIEHAKRKRLFDLYINGSYEVSELDSMMNDIDAQISNYESQIEANEELKKNKKIQENLADLATVDFDSLEFREKQLYLKSLINKIYIDGEQVTIEWL

SEQ ID NO: 2443 - protein, 486 aa, synthetic construct
MTKEVAIYTRVSTTNQAEEGFSIDEQIDRLTKYAEAMGWQVSDTYTDAGFSGAKLERPAMQRLINDIENKAFDSVLVYKLDRLSRSVRDTLYLVKDVFTKNKIDFISLNESIDTSSAMGSLFLTILSAINEFERENIKERMTMGKLGRAKSGKSMMWTKTAFGYYHNRETGILEIVPQQATIVEQIFTDYLSGTSLTKLRDKLNESGHIGKDIPWSYRTLRQTLDNPVYCGYIKFKDSLFEGMHKPIIPYETYLKVQKELEERQQQTCERNNNPRPFQAKYMLSGMARCGYCGAPLRIVLGHKRKDGSRTMKYHCANRFPRKTKGITVYNDNKKCDSGTYDLSSLENTVIGSLIGFQEDNDSLLKIINGSDQPILDTSSLEKQISQIDKKIQKNSDLYLNDFITMDELKARTDSLLAEKKLLKAKISENKFNDSTDVFELVKTQLGSIPINELSYDNKKKIVNNLVSKVDVTADNVDIIFKFQLAQ

SEQ ID NO: 2444 - protein, 452 aa, synthetic construct
MKAAIYIRVSTREQVENYSIQAQTEKLTALCRSKDWDVYDIFIDGGCSGSNMNRPALNEMLSKLHEIDAVVVYRLDRLSRSQRDTITLIEEYFLKNNVEFVSLSETLDTSSPFGRAMIGILSVFAQLERETIRDRMVMGKIKRIEAGLPLTTAKGRTFGYDVIDTKLYINEEEAKQLQLIYDIFEEERSITFLQKRLKRLGFKVRTYNRYNNWLTNDLYCGYVSYKDKVRVKGIHEPIISEEQFYRVQEIFTRMGKNPNMNRGSASLLNNLVVCSKCGLGFVHRRKDAMSRDKKYHYRYYSCKTYKHIHELEKCGNKIWRADKLEELVINRVNNYSFASRNADKEDELDSLNEKLKVEHAKKKRLFDLYISGRYEVSELDSMMKDINAQINYYESQIEANEELKKNKKIQENLANLAAVDFDSLEFREKQLYLKSLINKIYIDGEQVTIEWL

SEQ ID NO: 2445 - protein, 485 aa, synthetic construct
MTKKVAIYTRVSTTNQAEEGFSIDEQIDRLTKYAEAMGWQVSDTYTDAGFSGAKLERPAMQRLINDIENKAFDTVLVYKLDRLSRSVRDTLYLVKDEFTKNKIDFISLSESIDTSSAMGSLFLTILSAINEFERENIKERMTMGKLGRARSGKSMMWTKTAFGYYHNRKTGILEIVPLQATIVEQIFTDYLSGISLTKLRDKLNEGGHIGKDIPWSYRTLRQTLDNPVYCGYIKFKGNLFEGMHKPIIPYETYLKVQKELEERQQQTYERNNNPRPFQAKYMLSGMARCGYCGAPLRIVLGRKRRDGSRTMKYHCANRFPRKTRGVTVYNDNKKCDSGTYDLSNLENTVIDNLIGFQEDNDSLLKIINGDNQPILDTSSLKKQISQIDKKIQKNSDLYLNDFITMDELKDRTDSLQAEKKLLKAKISGNKFNDSTDVFELVKTQLGGIPINELSYDNKKKIVNNLVSKVDVTADNVDIIFKFQLA

SEQ ID NO: 2446 - protein, 452 aa, synthetic construct
MKAAIYIRVSTREQVENYSIQAQTEKLTALCRSKDWDVYDIFIDGGYSGSNMNRPALNEMLSKLHEIDAVVVYRLDRLSRSQRDTITLIEEYFLKNNVEFVSLSETLDTSSPFGRAMIGILSVFAQLERETIRDRMVMGKIKRIEAGLPLTTAKGRTFGYDVIDTKLYINEEEAKQLQLIYDIFEEEQSITSLQKRLKKLGFKVRTYNRYNNWLTNDLYCGYVSYKDKVHVKGIHEPIISEEQFYRVQEIFTRMGKNPNMNRDSASLLNNLVVCSKCGLGFVHRRKDAMSRDKKYHYRYYSCKTYKHIHELEKCGNKIWRADKLEELIINRVNDYSLASRNVDKEDELDSLNEKLKIEHAKKKRLFDLYINGSYEVSELDSMMNDIDAQINYYESQIEANEALIKNKKIQENLANLATVDFDSLEFREKQLYLKSLINKIYIDGEQVTIEWL

SEQ ID NO: 2447 - protein, 485 aa, synthetic construct
MTKKVAIYTRVSTTNQAEEGFSIDEQIDRLTKYAEAMGWQVSDTYTDAGYSGAKLERPAMQRLINDIENKAFDTVLVYKLDRLSRSARDTLYLVKDVFTKNKIDFISLSESIDTSSAMGSLFLTILSAINEFERENIKERMTMGKLGRAKSGKSMMWTETAFGYYHNRETGILEIVPPQATIVEQIFTDYLSGISLTKLRDKLNEGGHIGKDIPWSYRTLRQTLDNPVYCGYIKFKDSLFEGMHKPIIPYETYLKVQKELEERQQQAYERNNNPRPFQAKYMLSGMARCGYCGAPLRIVLGHKRKDGSRTMKYHCANRFPRKTKGVTVYNDNRKCDSGTYDLSNLENTVIDNLIGFQVNNDSLLKIINGNNQPIPDTSSFKKQISQIDKKIQKNSDLYLNDFITMDELKGRTDSLQAEKRLLKAKISENKFNDSTDVFELVKTQLGSIPIDKLSYDNKKKIVNNLVSKVDVTADNVDIIFKFQLA

SEQ ID NO: 2448 - protein, 485 aa, synthetic construct
MTKKVAIYTRVSTTNQAEEGFSIDEQTDRLTKYAEAMGWQVSGTYTDAGLSGAKLERPAMQRLINDIENKAFDTVLVYKLDRLSRSVRDTLYLVKDVFTKNKIDFISLNESIDTSSAMGSLFLTILSAINEFERENIKERMTMGKLGRAKSGKSMMWTKTAFGYYHNRKTGILEIVPLQATIVEQIFTDYLSGISLTKLRDKLNESGHIGKDIPWSYRTLRQTLDNPVYCGYIKFKDSLFEGMHKPIIPYETYLKVQKELEERQQQTYERNNNPRPFQAKYMLSGMARCGYCGAPLRIVLGHKRKDGSRTMKYHCANRFPRKTKGVTAYNDNKKCDSGTYDLGNLENTVIDNLIGLQENNDSLLKIINGNNQPILDISSLKKQVSQIDKKIQKNSDLYLNDFITMDELKDRTDRLQAEKKLLKAKIRENRSNDSTDVFELVKTQLGSVPINELSYDNKKKIVNNLVSKVDVTADNVDIIFKFQLA

SEQ ID NO: 2449 - protein, 452 aa, synthetic construct
MKAAIYIRVSTQEQVGNYSIQAQTEKLTALCRSKDWDVYDIFIDGGYSGSNMNRPALNEMLSKLHEIDAVVVYRLDRLSRSQRDTTTLIEEYFLKNNVEFVSLSETLDTSSPFGRAMIGILSVFAQLERETIRDRMVMGKIKRIEAGLPLTTAKGRTFGYDVIDTKLYINEEEAKQLQLIYDIFEEEQSITLLQKRLKKLGFKVRTYNRYNNWLTNDLYCGYVSYKDKVHVKGIHEPIISEEQFYRVQEIFTRMGKNPNMNRDSASLLSNLVVCSKCGLGFVHRSKDTMSRGKKYHYRYYSCKTYKHTHELEKCGNKTWRADKLEELIISRVNNYSFASRSVDKEDELDSLNEKLKIEHAKKKRLFDLYINGSYEVSELDSMMNDINAQINYYESQIEASEELKKDKKIQENLADLTTVDFDSLEFREKQLYLRSLINKIYIDGEQVTIEWL

SEQ ID NO: 2450 - protein, 469 aa, synthetic construct
MSYTTPVRAAVYLRISEDRSGEQLGVARQREDCLKLCDQRKWVPVEYLDNDVSASTGKRRPAYEQMLADITAGKIAAVVAWDLDRLHRRPIELEAFMSLADEKRLALATVAGDVDLATPQGRLVARLKGSVAAHETEHKKARQRRAARQKAERGHPNWSKAFGYLPGPNGPEPDPRTAPLVKQAYADILAGASLGDVCRQWNAAGAFTITGRPWTTTTLSKFLRKPRNAGLRAYKGARYGPVDRDAIVGKAQWSPLVDEATFWAAQAVLDAPGRAPGRKSVRRHLLTGLAGCGKCGNHLAGSCRTDGRVVYVCKACHGVAILADNIEPILYHIVAERLAMPDAVDLLRRESHDAAEAETIRLELETLYSELDHLAVERAEGLLTARQVKISTDIVNAKITKLQARQLDQERLRVFDGIPLGTPQVAGMIAELSPDRFRAVLGVLAEVVVRPVGKGGRIFNPERVQVNWR

SEQ ID NO: 2451 - protein, 452 aa, synthetic construct
MKAAIYIRVSTREQVENYSIQAQTEKLTALCRSKDWDVYDIFIDGGYSGSNMNRPALNEMLSRLHEIDAVVVYRLDRLSRSQRDTITLIEEYFLKNNVEFVSLSETLDTGSPFGRAMIGILSVFAQLERETIRDRMVMGKIKRIEAGLPLTTAKGRTFGYDVIDTKLYINEEEAKQLQLIYDIFEEEQSITFLQKRLKKLGFKVHTYNRYNNWLTNDLYCGYVSYKDKVHVKGIHEPIISEEQFYRVQEIFTRMGKNPNMNRDSASLLNNLVVCGKCGLGFVHRRKDAMSRDKKYHYRYYSCKTYKHIHELEKCGNKIWRADKLEELIINHVNSYSLASRDVDKEDELDSLNEKLKIEHAKKKRLFDLYINGSYEVSELDSMMNDIDAQISYYESQIEANEELKKNKKIQENLAHLATVDFDSLEFREKQLYLKSLINKIYIDGEQVTIVWL

SEQ ID NO: 2452 - protein, 452 aa, synthetic construct
MKAAIYIRVSTQEQVGNYSIQAQTEKLTALCRSKDWDVYDIFIDGGYSGSNMNRPALNEMLSKLHEIDAVVVYRLDRLSRSQRDTTTLIEEYFLKNNVEFVSLSETLDTSSPFGRAMIGILSVFAQLERETIRDRMVMGKIKRIEAGLPLTTAKGRTFGYDVIDTKLYVNEEEAKQLRLIYDIFEEEQSITSLQKRLKKLGLKVRTYNRYNNWLTNDLYCGYVSYKDKVHVKGIHEPIISEEQFYRVQEIFTRMGKNPNMNRDSASLLSNLVVCSKCGLGFVHRSKDTMSRGKKYHYRYYSCKTYKHTHELEKCGNKTWRADKLEELIISRVSNYSFASRSVDKEDELDSLNEKLKIEHAKRKRLFDLYINSSYEVSELDSMMNDIDAQINYYESQIEANEELKKNKKIQENLADLATVDFDSLEFREKQLYLKSLINKIYIDGEQVTIEWL

SEQ ID NO: 2453 - protein, 469 aa, synthetic construct
MSYTTPVRAAVYLRISEDRSGEQLGVARQREDCLKLCGQRKWVPVEYLDNDVSASTGKRRPAYEQMLADITAGKIAAVVAWDLDRLHRRPVELEAFMSLADEKRLALATVAGDVDLATPQGRLVARLKGSVAAHETEHKKARQRRAARQKAERGYPNWSKAFGYLPGPNGPEPDPRTAPLVKQAYADILAGASLGDVCRQWNDAGAFTITGRPWTTTALSKFLRKPRNAGLRAYKGARYGPVDRDAIVGKAQWSPLVDEATFWAAQAVLDAPGRAPGRKSVRRHLLTGLAGCGKCGNHLAGSHRTDGRVVYVCKACHGVAILADNIEPILYHIVAERLAMPDAVDLLRREIHDAAEAETIRLELETLYGELDRLAVERADGLLTARQVKISTDIVNAKIAKLQARQLDQERLRVLDGIPLGTPQVAGVIAELSPDRFRAVLDVLAEVVVQPVGKSGRIFSPERVQVSWR

SEQ ID NO: 2454 - protein, 485 aa, synthetic construct
MTKKVAIYTRVSTTNQVEEGFSIDEQIDRLAKYAEAMGWQVSDTYTDAGFSGAKLERPAMRRLINDIENKAFDTVLVYKLDRLSRSVRDTLYLVKDVFTKNEIDFISLNESIDTSSAMGSLFLTILSAINEFERENIKERMTMGKLGRAKSGKSMMWTKTAFGYCHNRKTGILEIVPLQATIVEQIFTDYLSGISLTKLRDKLNESGHIGKDIPWSYRTLRQTLDNPVYCGYIKFKDSLFEGMHKPIIPYETYLKVQKELEERQQQTYERNNNPRPFQAKYMLSGMARCGYCGAPLRIVLGRKRKDGSRTMKYHCANRFPRKTKGVTVYNDNKRCDSGTYDLSSLENTVIDNLIGFQENNDSLLKIINGNNQPILDTSSFKNQISQIDKKIQKNSDLYLNDFITMDELKNRTDSLQAEKKLLKAKISENKFNDSTDVFELVKTQLGSIPINELSYDDKKRIVNNLVSKVDVTADNVDIIFKFQLA

SEQ ID NO: 2455 - protein, 452 aa, synthetic construct
MKAAIYIRVSTREQVENYSIQAQTEKLTALCRSKDWDVYDIFIDGGYSGSNMNRPALNEMLSKLHEIDAVVVYRLDRLSRSQRDTITLIEEYFLKNNVEFVSLSETLDTSSPFGRAMIGILSVFAQLERETIRDRMVMGKIKRIEAGLPLTTAKGRTFGYDVIDTKLYINEEEAKQLQLIYDIFEEEQSITFLQKRLKKLGFKVHTYNRYNNWLTNDLYCGYVSYKDKVHVKGIHEPIISEEQFYRVQEIFTRMGKNPNMNRDSASLLNNLVVCSKCGLGFVHRRKDTMSRGKKYHYRYYSCKTYKHTHELDRCGNKIWRADKLEELIINRVNNYSLASRNVNKEDELDSLNEKLKIEHAKKRRLFELYINGSYEVSELDSMMNDIDAQINYYESQIEANEELKKNKKIQENLADLATVDFDSLEFREKQLYLKSLIDKIYIDGEQVTIEWL

SEQ ID NO: 2456 - protein, 469 aa, synthetic construct
MSYTTPVRAAVYLRISEDRSGEQLGVARQREDCLKLCGQRKWVPVEYLDNDVSASTGKRRPAYEQMLADIAAGEIAAVVAWDLDRLHRRPVELEAFMSLADEKRLALATVAGDVDLATPQGRLVARLKGSVAAHETEHKKARQRRAARQKAERGHPNWRKAFGYLPGPSGPEPDPRTAPLVKQAYADILAGASLGDVCRRWNDAGAFTITGRPWTSTTLSKFLRKPRNAGLRAYKGARYGPVDRDAIVGQAQWSPLVDEATFWAAQAVLDAPGRAPGRKSVRRHLLTGLVGCGKCGNHLAGSYRTDGRVVYVCKACHGVAIMADNIEPILYHIVAERLAMPDAVDLLRREIHDAAEAETIRLELETLYGELDRLAVERAEGLLTARQVKISTDIVNAKITELQARQQDQERLRVLDGIPLGTPRVAGKIAELSPDRFRAVLDVLAEVVVQPVGKSGRIFNPERVQVNWR

SEQ ID NO: 2457 - protein, 469 aa, synthetic construct
MCYTTPVRAAVYLRISEDRSGEQLGVARQREDCLKLCDQRKWVPVEYLDNDVSASTGKRRPAYEQMLADITAGKIAAVVTWDLDRLHRRPIELEAFMSLADEKRLALATVAGDVDLATPQGRLVARLKGSVAAHETEHKRARQRRAARQKAERGHPNWSKAFGYLPGPNGPEPDPRTAPLVKQAYADILAGASLGDVCRQWNDAGAFTITGRPWTATTLSKFLRKPRNAGLRAYKGARYGPVDRDAIVGKAQWSPLVDEATFWAAQAVLDAPGRAPGRKSVRRHLLTGLAGCGKCGNHLAGSYRTDGRVVYVCKACHGVAILADNIEPILYRIVAERLAMPNAVDLLRREIHDAAEAETIRLELETLYGELDRLAVERAEGLLTARQVKISTDIVNAKITKLQARQLDQERLRVFDGIPLGTPQVAGMIAELSPDRFRAVLDVLAVVVVQPVGKGGRIFNPKRVQVNWR

SEQ ID NO: 2458 - protein, 452 aa, synthetic construct
MKAAIYIRVSTREQVENYSIQAQTEKLTALCRSKDWDVYDIFIDGGYSGSNMNRPALNEMLSRLHEIDAVVVYRLDRLSRSQRDTITLIEEYFLKNNVEFVSLSETLDTSSPFGRAMIGILSVFAQLERETIRERTVMGKIKRIEAGLPLTTAKGRTFGYDVIDTRLYINEEEAKQLQLIYDIFEEEQSITFLQKRLKKLGFKVRTYNRYNNWLTNDLYCGYVSYKDKVHVRGIHEPIISEEQFYRVQEIFTRMGKNPNMNRDSASLLNNLVVCSKCGLGFVHRRKDAMSHGKKYHYRYYSCKTYKHIHELEKCGNKIWRADKLEELVIGRVNDYSFASRNADKEDELDSLNEKLKIEHAKKKRLFDLYLNGRYEVSELDSMMNDIDAQINYYESQIEANEELKKNKQIQENLANLATVDFDSLEFREKQRYLKSLINKIYIDGEQVTIEWL

SEQ ID NO: 2459 - protein, 452 aa, synthetic construct
MKAAIYIRVSTQEQVENYSIQAQTEKLTALCRSKDWDVYDIFIDGGYSGSNMNRPALNEMLSKLHEIDAVVVYRLDRLSRSQRDTSTLIEEYFLKNNVEFVSLSEALDTSSPFGRAMIGILSVFAQLERETIRDRMVMGKIKRVEAGLPLTTAKGRTFGYDVIDTKLYINEEEAKQLQLIYDIFEEEQSITSLQKRLKKLGFKVRTYNRYNSWLTNDLYCGYVSYKDKVHVKGIHEPIISEEQFYRVQEIFTRMGKSPNMNRDSASLLNNLVVCSKCGLGFVHRSKDTMSRGKKYHYRYYSCKTYKHTHELEKCGNKTWRADKLEELIISRVNNYSFASRSVDKEGELDSLNEKLKIEHAKKKRLFDLYINGSYEVSELDSMMNDIDAQINYYESQIEANEELKRNKKIQENLADLATADFDSLEFHEKQLYLKSLINKIYIDGEQVTIEWL

SEQ ID NO: 2460 - protein, 452 aa, synthetic construct
MKAAIYIRVSTREQVENYSIQAQTEKLTALCRSKGWDVYDIFIDGGYSGSNMNRPALNEMLSKLHEIDAVVVYRLDRLSRSQRDTITLIEGYFLKNNVEFVSLSETLDTSSPFGRAMIGILSVFAQLERETIRDRMVMGKIKRVEAGLPLTTAKGRTFGYDVIDTKLYINEEEAKQLQLIYDIFEEEQSITFLQKRLKKLGFKVRTYNRYISWLTNDLYCGYVSYKDKVHVKGIHEPIISEEQFYRVQEIFTRMGKNPNMNRDSASLLNNLVVCSKCGLGFVHRRKDTMSRGKRYHYRYYSCKTYKHTHELEKCGNKIWRADKLEELIIDRVNNYSLASRNVDKKDELDSLNEKLKIEHAKKRRLFDLYINGSYEVSELDSMMNDIDAQINYYESQIEANEELKKNKKIQENLADLATVDFDSLEFREKQLYLKSLINKIYIDGEQVTIEWL

SEQ ID NO: 2461 - protein, 485 aa, synthetic construct
MTKKVAIYTRVSTTNQAEEGFSIDEQIDRLTKYAEAMGWQVGDTYTDAGFSGAKLERPAMQRLINDIENKAFDTVLVYKLDRLSRSVRDTLYLVKDVFTKNRIDFISLNESINTSSAMGSLFLTILSAINEFERESIKERMTMGKLGRAKSGKSMMWTKTAFGYYHNRKTGILEIVPLQATIVEQIFTDYLSGISLTKLRDKLNESGHIGKDIPWSYRTLRQTLDNPVYCGYIKFKDSLFEGMHKPIIPYETYLKVQKELEERQQQTYERNNNPRPFQAKYMLSGVARCGYCGAPLKIVLGHKRKDGSRTMKYHCANRFPRKTKGVTVYNDNKKCDSGTYDLRNLENSVIDILIGFQENNGSLLKIINGNNQPIPDTSSIKNQISQIDKKIQKDSDLYLNDFITMDELKDRTDSLQAEKKLLKAKISENRFNDSTDVFELVKTQLGSIPINELSYDNKKKIVNNLVSKVDVTADNVDIIFKFQLA

SEQ ID NO: 2462 - protein, 485 aa, synthetic construct
MTKKVAIYTRVSTTNQAEEGFSIDEQIDRLTKYAEAMGWQVSDTYTDAGFSGAKLVRPAMQRLINDIEDKTFDTVLVYKLDRLSRSVRDTLYLVKDVFTKNKIDFISLNESIDTGSAMGSLFLTILSAINEFERENIKERMTMGKLGRAKSGKSMMWTKTAFGYNHNRKTGILEIVPLQATIVEQIFTDYLSGISLTKLRDKLNESGHIGKDIPWSYRTLRQTLDNPVYCGYIKFKDSLFEGMHKPIIPYETYLKVQKELEERQQQTYERNNNPRPFQAKYMLSGVARCGYCGAPLKIVLGHKRKDGSRTMKYHCANRFPRKTKGVTAYNDNKKCDSGTYDLSNLENTVIDTLIGFQENNDSLLKIINGNNQPILDTSSFKEQISQIDKKIQKNSDLYLNDFITMDELKDRTDSLQAEKKLLKAKISENKFNDSTDVFELVKTQLGSIPINELSYDNKKKIVNNLVSKVDVTADNVDIIFKFQLA

SEQ ID NO: 2463 - protein, 452 aa, synthetic construct
MKAAIYIRVSTQEQVGNYSIQAQTEKLTALCRSKDWDVYDIFVDGGYSGSNMNRPALNEMLSRLHEIDAVVVYRLDRLSRSQRDTTTLIEEYFLKNNVEFVSLSETLDTSSPFGRAMIGILSVFAQLERETIRDRMVMGKIKRIEAGLPLTTAKGRTFGYDVIDTKLYINEEEAKQLQLIYDIFEEEQSITFLQKRLKKLGFKVRSYNRYNSWLTNDLYCGYVSYKDKVHVKGIHEPIISEEQFYRVQEIFTRMGKNPNMNRDSASLLSNLVVCSKCGLGFVHRSKDTMSRGKKYHYRYYSCKTYKHTHELEKCGNKTWRADKLEELIINRVNNYSFASRNVGKEDELDSLNEKLKIEHAKKKRLFDLYINGSYEVSELDSMMNDIDAQINYYESQIEANEELRKNKKIQENLADLATVDFDSLEFREKQLYLKSLINKIYIDGEQVTIEWL

SEQ ID NO: 2464 - protein, 452 aa, synthetic construct
MKAAIYIRVSTREQVENYSIQAQTEKLTALCRSKDWDVYDIFIDGGYSGSNMNRPALNEMLSKLHEIDAVVVHRLDRLSRSQRDTITLIEEYFLKNNVEFVSLSETLDTSSPFGRAMIGILSVFAQLERETIRDRMVMGKIKRIEAGLPLTTAKGRTFGYDVIDTKLYINEEEAKQLQLIYDIFEEEQSITFLQKRLKKLGFKVRTYNRYNNWLTNDLYCGYVSYKDKVHVKGIHEPIISEEQFYRVQEIFTRMGKNPNMNRDSASLLNNLVVCSKCGLGFVHRRKDAMSRDKKYHYRYYSCKTYKHIHELEKCGNKIWRADKLEELIISRVNNYSLASRNVDKEDELDSLNEKLKIEHAKKKRLFDLYINGSYEVSELDSMMSDIDAQINYYESQIEANEELKKNKKIQENLANLAAVDFDSLEFREKQLYLKSLINKIYIDGEQVTIEWL

SEQ ID NO: 2465 - protein, 485 aa, synthetic construct
MTKKVAIYTRVSTTSQAEEGFSIDEQIDRLTKYAEAMGWQVSDTYTDAGFSGAKLKRPAMQRLINDIENKAFDTVLVYKLDRLSRSVRDTLHLVKDVFTKNKIDFISLNESIDTSSAMGSLFLTILSAINEFERENIKERMTMGKLGRAKSGKSMMWTKTAFGYYHNRKTGILEIVPLQATIVEQIFTDYLSGISLTKLRDKLNESGHIGKDIPWSYRTLRQTLDNPVYCGYIKFKDSLFEGMHKPIIPYETYLKVQKELEERQQQTYERNNNPRPFQAKYMLSGMARCGYCGAPLRIVLGHKRRDGSRTMKYHCANRFPRKTKGVTVYNDNKKCDSGTYDLSNLENAVIDNLIGFQENNDSLLKIINGNNQPILDTSSLKEQISQIDKKIQKNSDLYLNGFITMDELKDRTDSLQAEKKLLKTKISENRFNDSTDVFELVKTQLGSIPINELSYDNKKKIVNNLVSKVDVTADNVDIIFKFQLA

SEQ ID NO: 2466 - protein, 452 aa, synthetic construct
MKAAIYIRVSTREQVENYSIQAQTEKLTALCRSKDWEVYDIFIDGGYSGSNMNRPALNEMLSKLHEIDAVVVYRLDRLSRSQRDTITLIEEYFLKNNVEFVSLSETLDTSSPFGRAMIGILSVFAQLERETIRDRMVMGKIKRIEAGLPLTTAKGRTFGYDVIDTKLYINEEEAKQLQLIYDIFEEEQSITFLQKRLKKLGFKVRTYNCYNSWLTNDLYCGYVSYKDKVRVKGIHEPIISEEQFYRVQEIFTRMGKNPNVNRDSASLLNNLVVCSKCGLGFVHRRKDTMSRGKKYHYRYYSCKTYKHTHELEKCGNKIWRADRLEELVVNRVNNYSFASRNVDKEDELDSLNEKLKTEHAKKKRLLDLYISGSYEVSELDGMMNDIDAQINYYESQIEAIEEQKKNRKIRENLADLATVDFESLEFREKQLYLKSLINKIYIDGEQVTIEWL

SEQ ID NO: 2467 - protein, 485 aa, synthetic construct
MTRKVAIYTRVSTTNQAEEGFSIDEQIDRLTKYAEAMGWQVSDTYTDAGFSGAKLERPAMLRLINDIENKAFDTVLVYKLDRLSRSVRDTLYLVKDVFTKNKIDFISLNESIDTSSAMGSLFLTILSAINEFERENIKERMTMGKLGRAKSGKSMMWTKTAFGYYHNRKTGILEIVPLQATIVEQIFTDYLSGISLTKLRDKLNESGHIGKDIPWSYRTLRQTLDNPVYCGYIKFKDSLFEGMHKPIIPYETYLKVQKELEERQQQTYERNNNPRPFQAKYMLSGMARCGYCGAPLRIVLGHKRKDGSRTMKYHCANRFPRKTKGVTVYNDNKKCDSGTYDLSNLENTVIDSLIGFQENNDSLLKIINGNNQPTLDTSSFKKQISQIDKKIQKNSDLYLNDFITMDELKDRTGSLQAEKKLLEAKISENEFNDSTDVFELVKTQLGSIPINELSYDNKKKIVNNLVSKVDVTADNVDIIFKFQLA

SEQ ID NO: 2468 - protein, 452 aa, synthetic construct
MKAAIYIRVSTREQVENYSIQAQTEKLTALCRSKDWDVYDIFIDGGYSGSNMNRPALNEMLSKLHEIDAVVVYRLDRLSRSQRDTITLIEEHFLKNNVEFVSLSETLDTSSPFGRAMIGILSVFAQLERETIRDRMVMGKIKRIEAGLPLTTAKGRTFGYDVIDTKLYINEEEAKQLQLIYDIFEEEQSITFLQKRLKKLGFKVRTYNRYNNWLTNDLYCGYVSYKDKVHVKGIHEPIISEEQFYRVQEIFTRMGKNPNMNRGSASLLNNLVVCGKCGLGFVHRRKDAMSRDKKYHYRYYSCKTYKHIHELEKCGNKIWRADKLEELIINRVNNYSLASRNVDKEDELDSLNEKLKIEHAKKKRLFDLYINGRYEVSELDSMMNDIDAQISYYESQIEANGELKKNKQIQENLANLATVDFDSLEFREKQLYLKSLINKIYVDGEQVTIEWL

SEQ ID NO: 2469 - protein, 452 aa, synthetic construct
MKAAIYIRVSTREQVENYSIQAQTEKLTALCRSKGWDVYDIFIDGGYSGSNMNRPALNEMLSKLHEIDAVVVYRLDRLSRSQRDTITLIEEYFLKNNVEFVSLSETLDTSSPFGRAMIGILSVFAQLERETIRDRMVMGKIKRIEAGLPLTTAKGRTFGYDVIDTKLYINEEEAKQLRLIYDIFEEEQSITFLQKRLKKLGFKVRTYNRYNNWLTNDLYCGYVSYKDKVHVRGIHEPIISEEQFYRVQEIFTRMGRNPNMNRDSASLLNNLVVCSKCGLGFVHRRKDAMSRNKKYHYRYYSCKTYKHIHELEKCGNKIWRADKLEELVINRVNDYSLASRNVDKEGELDSLNEKLKIEHAKKKRLFDLYINGRYEVSELDCMMNDIDAQINNYESQIEANEELKKSKRIQENLANLATVDFDSLEFREKQLYLKSLINKIYIDGEQVTIEWL

SEQ ID NO: 2470 - protein, 485 aa, synthetic construct
MTKKVAIYTRVSTTNQAEEGFSIDEQIDRLTKYAEAMGWQVSGTYTDAGFSGAKLERPAMQRLINDIENKAFDTVLVYKLDRLSRSVRDTLYLVKDVFTKNKIDFISLSESIDTSSAMGSLFLTILSAINEFERENIKERMTMGKLGRARSGKSMMWTKTAFGYYHNRKTGILEIVPLQATIVEQIFTDYLSGMSLTKLRDKLNESGHIGKDIPWSYRTLRQTLDNPVYCGYIKFKDSLFEGMHKPIIPYETYLKVQKELEERQQQTYERNNNPRPFQAKYMLSGMARCGYCGAPLRIVLGHKRKDGSRTMKYHCANRFPRKTKGITVYNDNKKCDSGTYDLSNLENAVIDNLIGFQENNESLLKIINGNNLLILDTSSFKKQISQIDKKIQKNSELYLNDFITMDELKDRTDSLQAEKKLLKAKISENKFNDSTGVFELVKARLGSIPINELSYDNKKKIVNNLVSKVDVTADNVDIIFKFQLA

SEQ ID NO: 2471 - protein, 469 aa, synthetic construct
MSHTTPVHAAVYLRISEDRSGEQLGVARQREDCLKLCDQRKWVPVEYLDNDVSASTGKRRPAYEQMLADITAGKIAAVVAWDLDRLHRRPIELEAFMSLADEKRLALATVAGDVDLATPQGRLVARLKGSVAAHETEHKKARQRRAARQKAERGLPNWSKAFGYLPGPNSPEPDPRTAPLVKQAYADILAGASLGDVCRQWNDAGAFTITGRPWTTTTLSKFLRKPRNAGLRAYKGARYGPVDRNAIVGKAQWSPLVDEATFWAAQAVLDAPGRAPGRKSVRRHLLTGLARCGKCGYHLAGSYRTDGRVVYVCKACHGVAILADKIEPILYHIVAERLAMPDAVDLLRRETHDAAEVETIRLELETLYGELDRLAVERAEGLLTARQVKISTDIVNAKITKLQARQLDQERLRVLEGIPLGTPQVAGMIAELSPDRFRAVLDVLAEVVVQPVGKSGRIFNPERVQVNWR

SEQ ID NO: 2472 - protein, 452 aa, synthetic construct
MKAAIYIRVSTREQVENYSIQAQTEKLTALCRSKGWDVYDIFIDGGYSGSNMNRPALNEMLSKLHEIDAVVVYRLDRLSRSQRDTITLIEEYFLKNNVEFVSLSETLDTSSPFGRAMIGILSVFAQLERETIRDRMVMGKIKRIEAGLPLTTAKGRTFGYDVIDTKLYINEEEAKQLQLIYDIFEEEQSITSLQKRLKKLGFKVHTYNRYNNWLTNDLYCGYVSYKDKVHVKGIHEPIISEEQFYRVQEIFARMGKNPNMNRGSASLLNNLVVCSKCGLGFVHRRKDIMGRDKKYHYRYYSCKTYKHIHELEKCGNKIWRADKLEELIINRVNNYGIASRNADKEDELDSLNEKLKIEHAKKKRLFELYINGSYEVSELDSMMNDIDAQINYYESQIEANKELKKNKKIQENLADLATVDFDSLEFREKQLYLKSLINKIYIDGEQVTIEWL

SEQ ID NO: 2473 - protein, 485 aa, synthetic construct
MTKKVAIYTRVSTTNQAEEGFSIDEQIDRLTKYAEAMGWQVSDTYTDAGFSGAKLVRPAMQRLINDIENKAFDTVLVYKLDRLSRSVRDTLHLVKDVFTRNKIDFISLNESIDTSSAMGSLFLTILSAINEFERENIKERMTMGKLGRAKSGKSMMWTKTAFGYYHNRKTGILEIVPLQATIVEQIFTDYLSGISLTKLRDKLNENGHIGKDIPWSYRTLRQTLDNPVYCGYIKFKDSLFEGMHKPIIPYETYLKVQKELEERQQQTYERNNNPRPFQAKYMLSGKARCGYCGAPLKIVLGHKRKDGSRTMKYHCANRFPRKTRGITVYNDNKKCDSGTYDLSNLENTVIDNLIGFQENDDSLLKVINGNNQPILDTSSFKEQISQIDKKIQKDSELYLNDFITMDELKHRTDSLQAEKKLLKAKISENKFNDSTDVFELVKTQLGSIPINELSYDNKKKIVNNLVSKVDVTADNVDIIFKFQLA

SEQ ID NO: 2474 - protein, 452 aa, synthetic construct
MKAAIYIRVSTQEQVGNYSIQAQTEKLTALCRSKDWDVYDIFIDGGYSGSNMDRPALNEMLSKLHEIDAVVVYRLDRLSRSQRDTTTLIEEYFLKNNVEFVSLSETLDTSSPFGRAMIGILSVFAQLERETIRDRMVMGKIKRIEAGLPLTTAKGRTFGYDVIDTKLYINEEEAKQLRLIYDIFEEEQSITSLQKRLKKLGFKVRTYNRYNNWLTNDLYCGYVSYKDKVHVKGIHEPIISEEQFYRVQEIFTRMGKNPNMNRDSASLLSNLVVCSKCGLGFVHRSKDTMSGGKKYHYRYYSCKTYKHTHELEKCGNKTWRADRLEELIINRVNNYSFASRNVDEEDKLDSLNEKLKIEHAKKKRLFDLYINGSYEVSELDSMMNDIDAQINYYESQIEVNEELKKNKKIQENLVDLATVDFDSLEFREKQLYLKSLINKIYIDGEQVTIEWL

SEQ ID NO: 2475 - protein, 485 aa, synthetic construct
MTKKVAIYTRVSTTSQAEEGFSIDEQIDRLTKYAEAMGWQVSDTYTDAGISGAKLERPAMQRLINDIENKAFDTVLVYKLDRLSRSVRDTLYLVKDVFTKNKIDFISLNESIDTSSAMGSLFLTILSAINEFERENIKERMTMGKLGRAKSGKSMMWTKTAFGYYHNRETGILEIVPLQATIVEQIFTDYLSGISLTKLRDKLNESGHIGKDIPWSYRTLRQTLDNPVYCGYIKFKDSLFEGMHKPIIPYETYLKVQKELGERQQQTYERNNNPRPFQAKYMLSGMARCGYCGAPLKIVLGHKRKDGSRTMKYHCANRFPRKTKGVTVYNDNKKCDSGTYDLSNLENTVIDNLIGFQENNDSLLKIINGNNQPILDTSSFKKQISQIDKKIQKNSDLYLNDFITMGELKDRTGSLQAEKKLLKAKISETKLNDRTDVFELVKTQLGSIPINELSYDNKKKIVNNLVSKVDVTADNVDIIFKFQLA

SEQ ID NO: 2476 - protein, 485 aa, synthetic construct
MTKKVAIYTRVSTTNQAEEGFSIDEQIDRLTKYAEAMGWQVSDTYTDAGFSGAKLGRPAMQRLINDIENKAFDTVLVYKLDRLSRSVRDTLYLVKDVFTKNKIDFISLNESIDTSSAMGSLFLTILSAINEFERENIKERMTMGKLGRAKSGKSMMWTKTAFGYYHNRKTGVLEIVPLQATIVEQIFTDYLSGISLTKLRDKLNESGHIGKDIPWSYRTLRQTLDNPVYCGYIKFRDSLFEGMHKPIIPYETYLKVQNELEERQQQAYERNNNPRPFQAKYMLSGMARCGYCGAPLRIVLGHKRKDGSRTMKYHCANRFPRKTKGVTVYNDNKKCDSGTYDLSNLENTVIDNLTGFQENNDSLLRIINGNNLPILDTSSLKKQISQIDEKIQKNSDLYLNDFITMDELRDRTDSLRAEKKLLKAKISENKFNDSADVFEQVKTQLGSIPINELSYDDKKKIVNNLVSKVDVTADNVDIIFKFQLA

SEQ ID NO: 2477 - protein, 485 aa, synthetic construct
MTKKVAIYTRVSTTNQAEEGFSIDEQIDRLTKYAEAMGWQVSDTYTDAGFSGAKLERPAMQRLINDIENKAFDTVLVYKLDRLSRSVRDTLYLVKDVFTKNKIDFISLNESIDTSSAMGSLFLTILSAINEFERENIKERMTMGKLGRAKSGKSMMWTKTAFGYYHNRKTGILEIVPLQATIVEQIFTDYLSGISLTKLRDKLNESGHIGKDIPWSYRTLRQTLDNPVYCGYIKFKDSLFEGMHKPIIPYETYLKVQKELEERQQQTYERNNNPRPFQAKYMLSGMARCGYCGAPLRIVLGHKRKDGSRTMKYHCANRFPRKTKGVTVYNDNKKCGSGTYDLSNLENTVIDNLVGFQENNDSLLKVINGNNQPILDTSSFKEQISQIDKKIQKNSDLYLNDFITMDELKDRTDSLQAEKKLLKAKISENKFNDSTDVFELVKAQLGSIPINELSYDDKKKIVNNLVSKVDVTADNVDIIFKFQLA

SEQ ID NO: 2478 - protein, 469 aa, synthetic construct
MSYTTPVRAAVYLRISEDRSGEQLGVARQREDCLKLCDQRKWVPVEYLDNDVSASTGKRRPAYEQMLADITAGKIGAVVAWDLDRLHRRPVELEAFMSLADEKRLALATVAGDVDLATPQGRLVARLKGVVAAHETEHKKARQRRAARQKAERGHPNWSKAFGYLSGPNGPEPDPRIAPLVKQAYADILAGASLGDVCRQWNDAGAFTITGRPWTTTTLSKFLRKPRNAGLRAYKGARYGPVDRDAIVGKAQWSPLVDEATFWAAQAVLDAPGRAPGRKSVRRHLLTGLAGCGKCGNHLAGSYRTDGRVVYVCKACHGVAILADNIEPILYHIVAERLATPDAVDLLRREVHDAAEAEAIRLGLETLYGELDRLAVERAEGLLTARQVKISTDIVNAKITKLQARQLDQERLRVFDGIPLGTPQVAGMIAELSPDRFRAVLDVLAEVVVQPVGRSGKIFSPERVQVNWR

SEQ ID NO: 2479 - protein, 452 aa, synthetic construct
MKAAIYIRVSTQEQVGNYSIQAQTEKLTALCRSKDWDVYDIFIDGGYSGSNMNRPALNEMLSKLHEIDAVVVYRLDRLSRSQRDTTTLIEEYFLKNNVEFVSLSETLDTSSPFGRAMIGILSVFAQLERETIRDRMVMGKIKRIEAGLPLTTAKGRTFGYDVIDTKLYINEEEAKQLQLIYDIFEEEQSITFLQKRLKKLGFKVSTYNRYRNWLTNDLYCGYVSYKDKVHVKGIHEPIISEEQFYRVQEIFTRMGKNPNTNRDSASLLNSLVVCSKCGLGFVHRSKDTMNRGKKYHYRYYSCRTYKHTHELEKCGNKTWRADKLEELIINRVNNYSFASRNVDKEGELDSLNEKLKIEHAKKRRLFDLYINGSYEVSELDSMMNGIDAQISYYESQIEANEELKKNKKIQENLANLVTVDFDSLEFREKQLYLKSLINKIYIDGEQVTIEWL

SEQ ID NO: 2480 - protein, 469 aa, synthetic construct
MSYTTPVRAAVYLRISEDRSGEQLGVARQREDCLKLCDQRKWVPVEYLDNDVSASTGKRRPAYEQMLADITAGKIAAVVAWDLDRLHRRPLELEAFMSLADEKRLALATVAGDVDLATPQGRLVARLKGSVAAHETEHKKARQRRAARQKAERGHPNWSKAFGYLPGPNGPEPDPRTAPLVKQAYTDILAGASLGDVCRRWNDAGAFTITGRPWTTTILSKFLRKPRNAGLRAYKGARYGPVDRDAIVGKAQWSPLVDEATFWAAQAVLDAPGRAPGRKSVRRHLLTGLAGCGKCGNHLAGSYRTDGRVVYVCKACHGVAILADNIEPILYHIVAERLAMPDAVDLLRREIHDAAEAETIRLELETLRGELDRLAVERAEGLLTARQVKISTEIVNAKITKLQARQQDQERLRVFDGIPLGTPQVAGMIAELSPNRFRAVLDVLAEVVVQPVGKSGRVFNPERVQVNWR

SEQ ID NO: 2481 - protein, 452 aa, synthetic construct
MKAAIYIRVSTREQVENYSIQAQTEKLTALCRSKDWDVYDIFIDGGYSGSNMNRPALNEMLSKLHEIDAVVVYRLDRLSRSQRDTITLIEEYFLKNNVEFVSLSETLDTSSPFGRAMIGILSVFAQLERETIRDRMVMGRIKRVEAGLPLTTAKGRTFGYDVIDTKLYINEEEAKQLQLIYDIFEEEQSITFLQKRLKKLGFKVRTYNRYNSWLTNDLYCGYVSYKDEVHVKGIHEPIISEEQFYRVQEIFARTGKNPNMNRDSASLLNNLVVCSKCGLGFVHRRKDTMSRGKKYHYRYYSCKTYKHIHELEKCGNKIWRADKLEELIINRVNNYSFASRNVDKEDELDSLNEKLKIEHAKKKRLFDLYINGSYEVSELDSMMNDIDAQINCYESRIEANEELKKSKKIQENLANLATVDYDSLEFREKQLYLKSLINKIYIDGEQVTIEWL

SEQ ID NO: 2482 - protein, 469 aa, synthetic construct
MSYTTPVRAAVYLRISEDRSGEQLGVARQREDCLKLCDQHKWVPVEYLDNDVSASTGKRRPAYEQMLADITAGKIAAVVAWDLDRLHRRPIELEAFMCLADEKRLALATVAGDVDLATPQGRLVARLKGSVAAHETEHKKARQRRAARQKAERGYPNWSKAFGYLPGPNGPEPDPRTAPLVKQAYADILAGASLGDVCRQWNDAGAFTITGRPWTTTALSKFLRKPRNAGLRAYKGARYGPVDRDAIVGKAQWSPLVDEATFWAAQAVLDAPGRAPGRKSVRRHLLTGLAGCGKCGNHLAGSYRTDGRVVYVCKVCHGVAILADNVEPILYHIVAERLAMPDAVDLLRREIHDAAEAEAIRLELETLYGELDRLAVERAEGLLTARQVKISTDIMNAKITQLRARQLDQERLRVFDGIPLGTPQVAGMIAKLSPDRFRAVLDVLAEVVVQPVGKGGRIFNLGRVQVNWR

SEQ ID NO: 2483 - protein, 452 aa, synthetic construct
MKAAIYIRVSTREQVENYSIQAQTEKLTALCRSKGWDVYDIFIDGGYSGSNMNRPALNEMLSKLHEIDAVVVYRLDRLSRSQRDTITLIEEYFLKNNVEFVSLSETLDTSSPFGRAMIGILSVFAQLERETIRDRMVMGKIKRIEAGLPLTTAKGRTFGYDVIDTKLYINEEEAKQLQLIYDIFEEEQSITLLQKRLKKLGFKVRTYNRYNNWLTNDLYCGYVSYKDKVHVKGIHEPIISEEQFYRVQEIFTRMGRNPNMNRGSASLLNNLVVCGKCGLGFVHRRKDAMSRDKKYHYRYYSCKTYKHIHELEKCGNKIWRADELEELIINRVNNYSLASRNVDKEDGLDSLNEKLKIEHAKKKRLFDLYLNGSYEVSELDSMMNDIDAQISYYESQIEANEALIKNKKVQENLANLATVDFDSLEFREKQLYLKSLINKIYIDGEQVTIEWL

SEQ ID NO: 2484 - protein, 485 aa, synthetic construct
MTKKVAIYTRVSTTNQAEEGFSIDEQIDRLTKYAEAMGWQVSDTYTDAGLSGAKLERPAMQRLINDIETKAFDTVLVYKLDRLSRSVRDTLYLVKDVFTKNKIDFISLNESIDTSSAMGSLFLTILSAINEFERENIKERMTMGKLGRAKSGKSMMWTKTAFGYHHNRKTGILEIVPLQATIVEQIFTDYLSGISLTKLRDKLNESGHIGKDIPWSYRTLRQTLDNPVYCGYIKFKDSLFEGMHKPIIPYETYLKVQKELEERQQQTYERNNNPRPFQAKYMLSGMARCGYCGAPLRIVLGRKRKDGSRTMKYHCANRFPRKTKGITVYNDNKKCDSGTYDLSNLENTVIDNLIGFQENNDSLLKIINGNNQPILDTGSFKEQISQIDKKIQKNSDLYLNDFITMDELKDRTDSLQAEKKLLKAKISENKFNDSTDVFELVKTQLGSIPINELSYDSKKKIVNNLVSKVDVTADNVDIIFKFQLA

SEQ ID NO: 2485 - protein, 485 aa, synthetic construct
MTKKVAIYTRVSTTNQAEEGFSIDEQIDRLTKYAEAMGWQVSDTYTDAGISGAKLERPAMQRLINDIENKAFDTVLVYKLDRLSRSVRDTLYLVKDVFTKNKIDFISLNESIDTSSAMGSLFLTILSAINEFERENIKERMTMGKLGRAKSGKSMMWTKTAFGYYHNRKTGILEIVPLQATIVEQIFTDYLSGISLTKLRDKLNESGHIGKDIPWSYRTLRQTLDNPVYCGYIKFKDSLFEGMHKPIIPYETYLRVQKELEERQQQAYERNNNPRPFQAKYMLSGMARCGYCGAPLKIVLGHKRKDGSRTMKYRCTNRFPRKTKGVTVYNDNRKCNSGTYDLSNLENTVIDNLVGFQENNDSLLKIINGNNQPILDTSSFKKQISQIDKKIQKNSDLYLNDFITMDELKDRTDSLQAEKKLLEAKISENKFNDSTDVFELVKTQLGSIPINELSYDNKKKIVNNLVSKVDVTADNVDIIFKFQLA

SEQ ID NO: 2486 - protein, 469 aa, synthetic construct
MSYTTPVRAAVYLRISEDRSGEQLGVARQREDCLKLCDQRKWVPVEYLDNDVSASTGRRRPAYEQMLADITAGKIAAVVAWDLDRLHRRPIELEAFMSLADEKRLALATVAGDVDLATPQGRLVARLKGSVAAHETEHKKARQRRAARQKAERGLPNWSKAFGYLPGPNGPEPDPRTAPLVRQAYSDILAGASLGDVCRQWNDAGAFTITGRPWTTTTLSKFLRKPRNAGLRAYKGARYGPVDRDAIVGKAQWSPLVDEATFWAAQAVLDAPGRAPGRKSVRRHLLTGLAGCGKCGNHLAGSYRTDGRVVYVCKACRGVAILADNIEPILYHIVAERLAMPDAVDLLRREIHDAAEAETIRLELETLYGELDRLAVERAEGLLTARQVKISTDIVSAKITELQARQLDQVRLRVFDGIPLGTPQVAGTIAGLSPDRFRAVLGVLAEVVVQPVGKSGRIFNPERVQVNWR

SEQ ID NO: 2487 - protein, 452 aa, synthetic construct
MKAAIYIRVSTREQVENYSIQAQTEKLTALCRSKDWDVYDIFTDGGYSGSNMNRPALNEMLSKLHEIDAVVVYRLDRLSRSQRDTITLIEEYFLKNDVEFVSLSETLDTSSPFGRAMIGILSVFAQLERETIRDRMVMGKIKRIEAGLPLTTAKGRTFGYDVIDTKLYINEEEAKQLQLIYDIFEEEQSITFLQKRLKKLGFKVRSYNCYNNWLTNDLYCGYVSYKDKVHVKGIHEPIISEEQFYRVQEIFTRMGKNPNMNRDSASLLNNLVVCGKCGLGFVHRRKDAMSRDKKYHYRYYSCKTYKHIHELEKCGNKIWRADELEELIINRVNNYSLASRNVDKEDGLDSLNEKLKIEHAKKKRLFDLYLNGSYEVSELDSMMNDIDAQINYYESLIEANEEQKKNKKIQENLAGLATVDFDSLEFREKQLYLKSLISKIYIDGEQVTIEWL

SEQ ID NO: 2488 - protein, 469 aa, synthetic construct
MSYTTPVRAAVYLRISEDRSGEQLGVARQREDCLKLCGQRKWEPVEYLDNDVSASTGKRRPAYEQMLADITAGKIAAVVAWDLDRLHRRPIELEAFMSLADEKRLALATVAGDVDLATPQGRLVARLKGSVAAHETEHKRARQRRAARQKAERGHPNWSKAFGYLPGPNGPEPDPRTAPLVKQAYADILAGASLGDVCRQWNDAGAFTITGRPWTTTALSKFLRKPRNAGLRAYKGARYGPVDRDAIVGKAQWSPLVDEATFWAAQAVLDAPGRAPGRKSVRRHLLTGLAGCGKCGNHLAGSYRTDGRVVYVCKACHGVAILADNIVPILYHIVAERLAMPDAVDLLRSEFHDAAEAETIRLELGTLYGELDRLAVERAEGLLTARQVKISTDIVNAKITELQARQLDQERLRVFDGIPLGTPQVAGMIAELSPDRFRAVLDVLAEVVVQPVGKGGRISNPERVQVNWR

SEQ ID NO: 2489 - protein, 485 aa, synthetic construct
MTKKVAIYTRVSTTNQAEEGFSIGEQIDRLTKYAEAMGWQVSDTYTDAGFSGAKLERPAVQRLINDIENKAFDAVLVYKLDRLSRSVRDTLYLVKDVFTKNKIDFVSLNESIDTSSAMGSLFLTILSAVNEFERENIKERMTMGKLGRAKSGKSMMWTKTAFGYSHNRKTGILEIVPLQATIVEQIFTDYLSGISLTKLRDKLNESGHIGKDIPWSYRTLRQTLDNPVYCGYIKFKGSLFEGMHKPIIPYETYLKVQKELEVRQQQAYERNNSPRPFQAKYMLSGMARCGYCGAPLRIVPGRKRKDGSRTMKYHCANRFPRKTKGVTVYNDNKKCDSGTYDLSNLENTVIDNLIGFQENNDSLLKIINGNNQPILDTSSLKKQISQIDKKIQKNSDLYLNDFITMDELKNRTDSLQAEKKLLKAKISENKFNDSTDVLELVKTQLGSIPINELSYDNKKKIVNNLVSRVDVTADNVDIIFKFQLA

SEQ ID NO: 2490 - protein, 452 aa, synthetic construct
MKAAIYIRVSTREQVENYSIQAQTEKLTALCRSKDWDVYDIFIDGGYSGSNMNRPALNEMLSKLHEIDAVVVYRLDRLSRSQRDTITLIEEYFLKNNVEFVSLSETLDTSSPFGRAMIGILSVFAQLERETIRDRMEMGKIKRIEAGLPLTTAKGRTFGYDVIDTKLYINEEEAKQLQLIYDIFEEEQSITFLQKRLKELGFKVRTYNRYNNWLTNDLYCGYVSYKDKVHVKGIHEPIISEEQFYRVQEIFTRMGKNPNMNRGSASLLNNLVVCGKCGLGFVHRRKDIVSRGKKYHYRYYSCKTYKHIHELEKCGNKIWRADKLEELIINRVNNYSLANRNVDKEDELDSLNGKLKVEHAKRKRLFDLYINGSYEVSELDSMMKDIDAQINYYESQIKANEELKKNKKIQEDLADLATVDFDSLEFREKQLYLKSLINKIYIDGGQVTIEWL

SEQ ID NO: 2491 - protein, 452 aa, synthetic construct
MKAAIYIRVSTHEQVANYSIQAQTEKLTALCRSKDWDVYDIFIDGGYSGSNMNRPALNEMLSKLHEIDAVVVYRLDRLSRSQRDTTTLIEEYFLKNNVEFVSLSETLDTSSPFGRAMIGILSVFAQLERETIRDRMVMGKIKRIEAGLPLTTAKGRTFGYDVIDTKLYINEEEAKQLQLIYDIFEEEQSITSLQKRLKRLGFKVRTYNRYNSWLTNDLYCGYVSYKDKVHVKGIHEPIISEEQFYRVQEIFTRMGKNPNINRDSASLLSNLVVCSKCGLGFVHRSKDTMSRGKKYHYRYYSCKTYKHTHELEKCGNKTWRADKLEELIINRVNNYSFVSRSVDKEDELDSLNEKLKIEHAKKRRLFDLYVNGSYEVSELDSMMNDIDAQISYYESQIEANEELKKNKKIQENLANLATVDFDSLEFREKQLYLKSLISKIYIDGEQVTIEWL

SEQ ID NO: 2492 - protein, 452 aa, synthetic construct
MKAAIYIRVSTREQVENYSIQAQTEKLTALCRSKDWDVYDIFIDGGYSGSNMSRPALNEMLSKLHEIDAVVVYRLDRLSRSQRDTITLIEEYFLKNNVEFVSLSETLDTSSPFGRAMIGILSVFAQLERETIRDRMVMGKIKRIEAGLPLTTAKGRTFGYDVIDTKLYINVEEAKQLQLIYDIFEEEQSITFLQKRLKKLGFKVRTYSCYNNWLTNDLYCGYVSYKDKVHVKGIHEPIISEEQFYRVQEIFTRMGKNPNMNRGSASLLNNLVVCGKCGLGFVHRRKDTMSRGKKYHYRYYSCKTYKHTHELEKCGNKIWRADKLEELIINRVSNYSFASRNADKENELDSLNEKLKVEHAKKKRLFDLYINGSYGVSELDSMMNDIDAQINHYESQIEANEELKKNKKIQENLADLATVDFDSLEFREKQLYLKSLINKIYIDGEQVTIEWL

SEQ ID NO: 2493 - protein, 452 aa, synthetic construct
MKAAVYIRVSTREQVENYSIQAQTEKLTALCRSKDWDVYDIFVDGGYSGSNMNRPALNEMLSKLHEIDAVVVYRLDRLSRSQRDTITLIEEYFLRNNVEFVSLSETLDTSSPFGRAMIGILSVFAQLERETIRDRMVMGKIKRIEAGLPLTTAKGRTFGYDVIDTKLYINEEEAKQLQLIYDIFEEEQSITFLQKRLKKLGFKVRTYSRYNNWLTNDLYCGYVSYKDKVHVKGIHEPIISEEQFYRVQEIFARMGKNPNMNRDSASLLNNLVVCSKCGLGFVHRRKDTMSRGKKYHYRYYSCKTYKHTHELEKCGNKIWRADKLEELIINRVSNYSFASRNVDKEDELDSLNEKLKVEHAKKKRLFDLYINGSYEVSELDSMMNDIDAQISYYESRIEANEELKKDKKIQENLASLATVDFDSLEFREKQLYLKSLINKIYIDGEQVTIEWL

SEQ ID NO: 2494 - protein, 469 aa, synthetic construct
MCYTTPVRAAVYLRISEDRSGEQLGVARQREDCLKLCDQRRWVPVEYLDNDVSASTGKRRPAYEQMLADITAGKIAAVVAWDLDRLHRRPIELEAFMSLADEKRLALATVAGDVDLATPQGRLVARLKGSVAAHETEHKKARQRRAARQKAERGHPNWSKAFGYLPGPNGPEPDPRTAPLVKQAYADILAGASLGDVCRQWNDAGAFTITGRPWTTTTLSKFLRKPRNAGLRAYKGARYGPVDRDAIVGKAQWSPLVDEATFWAAQAVLDAPGRAPGRKSVRRHLLTGLAGCGKCGNRLAGSYRTDGQVVYVCKACHGVSILADNIEPILYHIVAERLAMPEAVDLLRREIHDAAEAEAIRLELETLYGELDCLAVERAEGLLTARQVKISTDIVNAKITRLQARQQDQERLHVLDGIPLGTPQVADMIAELSPDRFRAVLDVLAEVVVQPVGKSGRIFNPERVQVNWR

SEQ ID NO: 2495 - protein, 452 aa, synthetic construct
MKAAIYIRVSTQEQVGNYSIQAQTEKLTALCHSKDWDVYDIFVDGGYSGSNMNRPALNEMLSKLHEIDAVVVYRLDRLSRSQRDTTTLIEEYFLKNNVEFVSLSETLDTSSPFGRAMIGILSVFAQLERETIRDRMMMGKIKRTEAGLPLTTAKGRTFGYDVIDTKLYINEEEAKQLQLIYDIFEEERSITSLQKRLKKLGFKVRTYNRYNNWLTNDLYCGYVSYKDKVHVKGIHEPIISEEQFYRVQEIFTRMGKNPNMNRDSASLLNNLVVCGKCGLGFVHRSKDTMCRGKKYHYRYYSCKTYKHTHELEKCGNKIWRADKLEELVINRVNNYSFASCDVGKEDELDSLNEKLKIERAKKKRLFDLYINGSYEVSELDSMMNDVDAQINYYESQIEANEELRRNKKIQENLADLAAVDFDSLGFREKQLYLKSLINKIYIDGEQVTIVWL

SEQ ID NO: 2496 - protein, 469 aa, synthetic construct
MCYTTPVRAAVYLRISEDRSGEQLGVARQREDCLKLCDQRKWVPVEYLDNDVSASTGKRRPAYEQMLADITAGKIAAVVAWDLDRLHRRPIELEAFMSLADEKRLALATVAGDVDLATPQGRLVARLKGSVAAHETEHKRARQRRAARQKAERGYPNWSKAFGYLPGPNGPEPDPRTAPLVKQAYADILAGASLGDVCRQWNDAGAFTITGRPWTTTTLSKFLRKPRNAGLRAYKGARYGPVDRDAIVGKAQWSPLVDEATFWAAQAVLDAPGRAPGRKSVRRHLLTGLAGCGKCGNHLAGSYRTDGQVVYVCKVCHGVSILAVNIVPILYHIVAERLAMPDAVDLLRREIHGAAEAETICLELETLYGELDRLAVERAEGLLTARQVKISTDIVNAKITKLQARRLDQERLRVFEGIPLGTPQVAGVIAELSPDRFRAVLDVLAEVVVQPVGKSGRISNPERVQVNWR

SEQ ID NO: 2497 - protein, 452 aa, synthetic construct
MKAAIYIRVSTQEQVENYSIQAQTEKLTALCRSKDWDVYDIFIDGGYSGSNMNRPALNEMLSKLHEIDAVVVYRLDRLSRSQRDTITLIEEHFLKNNVEFVSLSETLDTGSPFGRAMIGILSVFAQLERETIRDRMVMGKIKRIEAGLPLTTAKGRTFGYDVIDTKLYINEEEAKQLQLIYDIFEEEQSITSLQKRLKKLGFKVRTYNRYNNWLTNDLYCGYVSYKDKVHVKGIHEPIISEEQFCRVQEIFTRMGKNPNVNRDSASLLNNLVVCSKCGLGFVHRRKDTTSRGKKYHYRYYSCKTYKHTHELEKCGNKIWRADKLEELIINRVSNYSLASRNVDKEGELDSLNEKLKIEHAKKKRLFDLYINGSYEVSELDSMMNDIDAQINYYESQIEANEELKKNKKIQENLADLATVDFDSLEFREKQLYLKSLINKIYIDGEQVTIEWL

SEQ ID NO: 2498 - protein, 485 aa, synthetic construct
MTKKVAIYTRVSTTNQAEEGFSIDEQIDRLTKYAEAMGWQVSDTYTDAGFSGAKLERPAMQRLINDIENKAFDTVLVYKLDRLSRSVRDTLYLVKDVFTKNKIDFISLNESINTSSAMGSLFLTILSAINEFERENIKERMTMGKLGRAKSGKSMMWTKTAFGYYHNRKTGILEIVPLQATIVEQIFTDYLSGISLTKLRDKLNESGHIGKDIPWSYRTLRQTLDNPVYCGYIKFKDSLFEGMHKPIIPYETYLRVQKELEERQQQTYERNNNPRPFQAKYMLSGMARCGYCGAPLRIVLGHKRKDGSRTMKYHCANRFPRKTKGVTVYNDNKKCDSGTYDLSNLENTVIDALIGFQENNDSLLKIINGNNQPVLDTSSFKKQISQIDKKIQKNSDLYLNDFITMDELKDRTDSLQAEKKLLKAKISENKFNDSADVFELVKTQLGSIPINELSYDNKKKIVNNLVSKVDVTADNVDIIFKFQLA

SEQ ID NO: 2499 - protein, 452 aa, synthetic construct
MKAAIYIRVSTQEQVGNYSIQAQTEKLTALCRSKDWDVYDIFIDGGYSGSNMNRPALNEMLSKLHEIDAVVVYRLDRLSRSQRDTTTLIEEYFLKNNVEFVSLSETLDTSSPFGRAMIGILSVFAQLERETIRDRMVMGKIKRIEAGLPLTTAKGRTFGYDVIDTKLYINEEEARQLRLIYDIFEEEQSITSLQKRLKKLGFKVHAYNRYNNWLTNDLYCGYVSYKDKVHVKGIHEPIISEEQFYRVQEIFTRMGKNPNMNRDSASLLNSLVVCSKCGLSFVHRSKDTMSRGKKYHYRYYSCKTYKHTHELEKCGNKIWRADKLEELIINRVNNYSFASRNVGKEDELDSRYEKLKIEHAKKKRLFDLYINGGYEVSELDSMMNDIDAQINYYESQIGASEELKKNKKIQENLADLATVDFDSLEFREKQLYLKSLINKIYIDGEQVTIEWL

SEQ ID NO: 2500 - protein, 452 aa, synthetic construct
MKAAIYIRVSTREQVENYSIQAQTEKLTALCRSKDWDVYDVFIDGGYSGSNMNRPALNEMLGKLHEIDAVVVYRLDRLSRSQRDTITLIEEYFLKNNVEFVSLSETLDTSSPFGRAMIGILSVFAQLERETIRDRMVMGKIKRIEAGLPLTTAKGRTFGYDVIDTKLYINGEEAKQLQLIYDIFEEEQSITFLQKRLKKLGYKVRTYNRYNNWLTNDLYCGYVSYKDKVRVKGIHEPIISEEQFYRVQEIFARTGKNPNMNRDSASLLNNLVVCSKCGLGFVHRRKDAMSRDKKYHYRYYSCKTYKHIHELEKCGNKIWRADKLEELIINRVNNYSLASRNVDKEDELDSLNEKLRTEHAKKKRLFDLYVNGRYEVSELDSMMSDIDAQINYYESQIEANEELKRNEKIQENLADLATVDFDSLEFREKQLYLKGLINKIYIDGEQVTIEWL

SEQ ID NO: 2501 - protein, 452 aa, synthetic construct
MKAAIYIRVSTREQVENYSIQAQTEKLTALCRSKDWDVYDIFIDGGYSGSNMNRPALNEMLSKLHEIDAVVVYRLDRLSRSQRDTITLIEEYFLKNNVEFVSLSETLDTSSPFGRAMIGILSVFAQLERETIRDRMVMGKIKRIEAGLPLTTAKGRTFGYDVIDTKLYVNEEEARQLQLIYDIFEEEQSITSLQKRLKELGFKVRTYNRYNNWLTNDLYCGYVSYKDKVHVRGIHEPIISEEQFYRVQEIFTRMGKNPNMNRDSASLLNNLVVCSRCGLGFVHRRKDAMSRDKKYHYRYYSCKTYKHIHELEKCGNKIWRADKLEELIINRVNNYSIASRNADKEDELDSLNEKLKIEHAKKKRLFELYINGSYEVSELDSMMNDIDAQINYYEGQIEANEELRKSKKIQENLANLATVDFDSLEFREKQLYLKSLINKIYIDGEQVTIEWL

SEQ ID NO: 2502 - protein, 469 aa, synthetic construct
MSYTTPVRAAVYLRISEDRSGEQLGVARQREDCLKLCDQRKWVPVEYLDNDVSASTGKRRPAYEQMLADITAGKIAAVVAWDLDRLHRRPVELEAFMSLADEKRLALATVAGDVDLATPQGRLVARLKGCVAAHETEHKKARQRRAARQKAERGYPNWGKAFGYLPGPNGPEPDPRTAPLVKQAYADILAGASLGDVCRQWNDAGAFTITGRPWTTTTLSKFLRKPRNAGLRAYKGARYGPVDRDAIVGKAQWSPLVDEATFWAAQAVLDAPGRAPGRKSVRRHLLTGLAGCGKCGNHLAGSYRTDGRVVYVCKACYGVAILADNIVPILYHIVAERLAMPDAVGLLRREIHDAAEAETIRLELETLYGELDRLAVERAEGLLTARQVKISTDIVNAKITKLQARQLDQERLRVLDGIPLGTPQAAGMIAELSPDRFRAVLDVLAEVIVLPVGKSGRIFNPERVQVNWR

SEQ ID NO: 2503 - protein, 485 aa, synthetic construct
MTKKVAIYTRVSTTNQAEEGFSIDEQIDRLTKYAEAMGWQVSDTYTDAGSSGAKLERPAMQRLISDIENKAFDTVLVYKLDRLSRSVRDTLYLVKDVFTKNKIDFISLNESIDTSSAMGSLFLTILSAINEFERENIKERMTMGKLGRAKSGKSMMWTKTAFGYHHNRKTGILEIVPLQATIVEQIFTDYLSGISLTKLRDKLNESGHIGKDIPWSYRTLRQTLDNPVYCGYIKFKDSLFEGLHKPIIPYETYLKVQKELEVRQQQTYERNNNPRPFQAKYMLSGMARCGYCGAPLKIVLGHKRKDGSRTMKYHCANRFPRKTKGITVYNDNKKCDSGTYDLNDLENTVIDNLIGLQENSDSLLKIINGNNQPILDTSSFEKQISQIDKKIQKNSDLYLNDFITMDELKDRTDSSQAEKKLLKAKISENKFNDSTDVFELVKTQLGSIPINELSYDNKKKIVNNLVSKVDVTADNVDIIFKFQLA

SEQ ID NO: 2504 - protein, 485 aa, synthetic construct
MTKKVAIYTRVSTTNQAEEGFSIDEQIDRLTKYAEAMGWQVSDTYTDAGFSGAKLGRPAMQRLINDIENKAFDTVLVYKLDRLSRSVRDTLYLMKDVFTKNKIDFISLNESINTSSAMGSLFLTILSAINEFERENIKERMTMGKLGRAKSGKSMMWTKTAFGYYHNRKTGILEIVPLQATIVEQIFTDYLSGISLTKLRDKLNESGHIGKDIPWSYRTLRQTLDNPVYCGYIKFKDSLFEGMHKPIIPYETYLKVQKELEERQQQTYERNNNPRPFQAKYMLSGMARCGYCGAPLRIVLGHKRKDGSRTMKYHCANRFPRKTKGITVYNDNKKCDSGTYDLRNLENTVIDNLIGFQDNSDSLLKIINGNNQSILDTSNFKKQISQIDKKIQKNCDLYLYDFITMDELKDRTNSLQAEKKLLKAKISENKFNDGTDVLELVKTQLGSIPINELSYDDKKKIVNNLVSKVDVTADNVDIIFKFQLA

SEQ ID NO: 2505 - protein, 485 aa, synthetic construct
MTKKVAIYTRVSTTNQAEEGFSIDEQIDRLTKYAEAMGWQVSDTYTDAGFSGAKLERPAMQRLINDIENKAFDTVLVYKLDRLSRSVRDTLHLVKDVFTKNKIDFISLNESIDTSSAMGSLFLTILSAINEFERENIKERMTMGKLGRAKSGKSMMWTKTAFGYHHNRKTGILEIVPLQATIVEQIFTDYLSGISLTKLRDKLNESGHIGKDIPWSYRTLRQTLDNPVYCGYIKFKGSLFEGMHKPIIPYETYLKVQKELEERQQQTYERNNNPRPFQAKYMLSGMARCGYCGAPLRVVLGHKRKDGSRTMKYHCANRFPRKTKGVTVYNDNNKCDSGTYDLSNLESTVIDNLIGFQENNDSLLNTINGNNQPIPDTSSFKKQISQIDKKIQKNTDLYLNDFITMDELKDRTDSLQAEKKLLKAKISENKFNDSTDVFELVKTQLGSIPINELSYDDKKKIVNNLVSKVDVTADNVDIIFKFQLA

SEQ ID NO: 2506 - protein, 452 aa, synthetic construct
MKAAIYIRVSTREQVENYSIQAQTEKLTALCRSKGWDVYDIFIDGGYSGSNMNRPALGEMLSKLHEIDAVVVYRLDRLSRSQRDTITLIEEYFLKNNVEFVSLSETLDTSSPFGRAMIGILSVFAQLERETIRDRMVMGKIKRIEAGLPLTTARGRTFGYDVFDTKLYINEEEAKQLQLIYDIFEKEQSITFLQKRLKELGFKVHTYNRYNNWLTNDLYCGYVSYKDKVHVKGIHEPIISEEQFYRVQEIFTRMGKNPNTNRDSASLLNNLVVCSKCGLGFVHRRKDAMSRDKKYHYRYYSCKTYKHIHELEKCGNKIWRADKLEELIINRVSNYSIASRNVDKEDELGSLSEKLKIEHAKKKRLFDLYINGSYEVSELDSMMHDIDAQINYYESKIEASEELKKNKKIQENLAYLATVDFDSLEFREKQLYLKSLINKIYIDGEQVTIEWL

SEQ ID NO: 2507 - protein, 485 aa, synthetic construct
MTKKVAIYTRVSTTNQAEEGFSIDEQIDRLTKYAGAMGWQVSDTYTDAGFSGAKLERPAMQRLINDIENKAFDTVLVYKLDRLSRSVRDTLHLVKDVFTKNKIDFISLNESIDTSSAMGSLFLTILSAINEFERENIKERMAMGKLGRAKSGKSMMWTKTAFGYYHNHKTGILEIVPLQATIVEQIFTDYLSGMSLTKLRDKLNESGHIGKDIPWSYRTLRQALDNPVYCGYIKFKGSLFEGMHKPIIPYETYLKVQKELEERQQQTYERNNNPRPFQAKYMLSGMARCGYCGAPLKIVLGRRRKDGSRTMKYHCANRFPRKTKGITVYNDNKKCDSGTYDLSNLENTVIDNLISLQRNSDSLLKIINGNNRPILDTSSLKKQISQIDRKIQKNSDLYLNDFITMDELKDRTDSLQAEKKLLKAKISENKFNDSTDVFELVRTQLGSIPINELSYDDKKKIVNNLVSKVDVTADNVDIIFKFQLA

SEQ ID NO: 2508 - protein, 452 aa, synthetic construct
MKAAIYIRVSTREQVENYSIQAQTEKLTALCRSKDWDVYDIFIDGGYSGSNMNRPALNEMLSKLHEIDAVVVYRLDRLSRSQRDTITLIEEYFLKNNVEFVSLSETLDTSSPFGRAMIGILSVFAQLERETIRDRMVMGKIKRIEAGLPLTTAKGRTFGYDVIDTKLYINEEEAKQLQLIYDIFEEEQSITLLQKRLKKLGFKVRSYNRYNNWLTNDLYCGYVSYKDKVHVKGIHEPIISEEQFYRVQEIFTRMGRNPNMNRDSASLLNNLVVCSKCGLGFVHRRKDTMSRGKKYHYRYYSCKTYKHIHELEKCGNKIWRADKLEELIINRVNNYSLASRDVDKEDELDSLNEKLKIEQARKRRLFDPYINGSYEVSELDGMMNDIDAQINYYESQIEANEELKKNKKIQENLADLATVDFDSLEFREKQLYLKSLINKIYIDGEQVTIEWL

SEQ ID NO: 2509 - protein, 469 aa, synthetic construct
MSYTTPVRAAVYLRISEDRSGEQLGVARQREDCLELCGQRKWVPVEYLDNDVSASTGKRRPAYEQMLADITAGKIAAVVAWDLDRLHRRPIELEAFMSLADEKRLALATVAGDVDLATPQGRLVARLKGSVAAHETEHKKARQRRAARQKAERGHPNWSKAFGYLPGPNGPEPDPRTAPLVEQAYADILAGASLGDVCRQWNGAGAFTITGRPWTTTTLSKFLRKPRNAGLRAYKGARYGPVDRDAIVGKAQWSPLVDEATFWAAQAVLDAPGRAPGRKSVRRHLLTGLAGCGKCGNHLAGSYRTDGRVVYVCKACHGIAILADNIEPILYHIVAERLAMPDAVGLLRREIHDAAEAETIRLELETLYGELDRLAVERAEGLLTARQVKISTDIVNAKITKLQARQLDQERLRVFDGIPLGTPQVAGMIAELSPDRFRAVLDVLAEVVVQPVGKGGRIFNPERVQVNWR

SEQ ID NO: 2510 - protein, 469 aa, synthetic construct
MSYTTPVRAAVYLRISEDRSGEQLGVARQREDCLKLCDQRKWVPVEYLDNDVSASTGKRRPAYEQMLADITAGKIAAVVAWDLDRLHRRPIELEAFMSLADEKRLALATVAGDVDLATPQGRLVARLKGCVAAHETEHKKARQRRAARQKAERGHPNWSKAFGYQPGPDGPEPDPRTAPLVKQAYADILAGASLGDVCRQWNGAGAFTITGRPWTTTALSKFLRKPRNAGLRAYKGARYGPVDRDAIVGKAQWSPLVDEATFWAAQAVLDAPGRAPGRKSVRRHLLTGLAGCGKCGNHLAGSYRTDGQVVYVCKACYGVAILADNIVPILYHVVAERLAMPDAVDLLRHEIHDAAEAEAIRLELETLYGELDRLAVERAEGLLTARQVKISTDIVSAKITKLQARQLDQERLRVFNGIPLGTPQVAGVIAELSPDRFRAVLVVLAEVVVQPVGKGGRIFNPGRVQVNWR

SEQ ID NO: 2511 - protein, 485 aa, synthetic construct
MTKKVAIYTRVSTTNQAEEGFSIDEQIDRLTKYAEAMGWQVSDTYTDAGFSGAKLERPAMQRLINDIENKAFDTVLVYKLDRLSRSVRDTLYLVKDVFTKNKIDFISLNESIDTSSAMGSLFLTILSAINEFERENIKERMTMGKLGRAKSGKSMMWTKTAFGYYHNRKTGILEIVPLQATIVEQIFTDYLSGISLTKLRDKLNESGHIGKDIPWSYRTLRQTLDNPVYCGYIKFKDSLFEGMHKPIIPYETYLKVQKELEKRQQQTYERNNNPRPFQAKYMLSGMARCGYCGAPLKIVLGRKRKNGSRAMKYHCANRFPRKTKGVTVYNDNKKCDSGTYDLSNLEDTVIGNLVGFQENSDSLLKIINGNNQPILDTSSFKEQISQIDKKIQKNSDLYLNDFITMDELKDRTDSLQAEKKLLKAKISENKFNDSTDVFELVKTQLGSIPINELSYDDKKKIVNNLVGKVDVTADNVDIIFKFQLA

SEQ ID NO: 2512 - protein, 469 aa, synthetic construct
MSYTTPVRAAVYLRISEDRSGEQLGVARQREDCLKLCGQRKWVPVEYLDNDVSASTGKRRPAYEQMLADITAGKIAAVVAWDLDRLHRRPIELEAFMSLADEKRLALATVAGDVDLATPQGRLVARLKGSVAAHETEHKKARQRRAARQKAERGHPNWSKAFGYLPGPNGPEPDPRTAPLVKQAYADILAGASLGDVCRQWNDAGAFTITGRPWTTTTLSKFLRKPRNAGLRAYKGARYGPVDRDAIVGKAQWSPLVDEATFWAAQAVLDAPGRAPGRKSVRRHLLTGLAGCGKCGNHLAGSYRTDGRVVYVCKACYGIAILADNIEPILYHIVAERLAMPDAVDLLCREIHDAAEAETIRLELETLCGELDRLAVERAEGLLTARQVKISTDIVNAKITKLQARQLDQERLRVFDGLPLGTPQVAGMIAELSPNRFRAVLDVLAEVVVQPVGKRGRIFNPERVQVNWR

SEQ ID NO: 2513 - protein, 452 aa, synthetic construct
MKAAIYIRVSTQEQVGNYSIQAQTEKLTALCRSKDWDVYDIFIDGGYSGSNMNRPALNEMLSKLHEIDAVVVYRLDRLSRSQRDTTTLIEEYFLKNNVEFVSLSETLDTSSPFGRAMIGILSVFAQLERETIRDRMVMGKIKRIEAGLPLTTAKGRTFGYDVIDTKLYINKEEAKQLQLIYDIFEEEQSITSLQKRLKKLGFKVRTYNRYNNWLTNDLYCGYVSYKDKVHVKGIHEPIISEEQFYRVQEIFTRMGKNPNMNRDSASLLNSLVVCSKCGLGFVHRRKDTMSGGKKYHYRYYSCKTYKHTHELEKCGNKTWRADKLEELVINRVNNYSFASRNVDKEDELDSLNEKLKVEHAKRKRLFDLYINGSYEVSELDSMMNDIDAQINYYESLIEANEELKKNRKIQENLADMATVDFDSLEFREKQLYLKSLINKIYIDGEQVTIEWL

SEQ ID NO: 2514 - protein, 469 aa, synthetic construct
MSYTTPVRAAMYLRISEDRSGEQLGVARQREDCLKLCDQRRWVPVEYLDNDVSASTGKRRPAYEQMLADITAGKIAAVVAWDLDRLHRRPIELEAFMSLADEKRLALATVAGDVDLATPQGRLVARLKGSVAAHETEHKRARQCRAARQKAERGHPNWSKAFGYLPGPNGPEPDPRTAPLVKQAYADILAGASLGDVCRQWNDAGASTITGRPWTTTTLSKFLRKPRNAGLRAYKGARYGPVDRDAIVGKAQWSPLVDEATFWAAQAVLDAPGRAPGRKSVRRHLLTGLAGCGKCGNHLAGSYRTDGRVVYVCKACHGVAILADNIEPILYRIVAERLAMPDAVDLLRREIHDATEAETIRLELETLYGELDRLAVERAEGLLTARQVKISTDIVNAKITELQARQLDQERLRVFDGIPLGTPQVAGVIAELSPNRFRAVLDVLAEVVVQPVGKSGRVFNPERVQVNWR

SEQ ID NO: 2515 - protein, 485 aa, synthetic construct
MTKKVAIYTRVSTTNQAEEGFSIDEQIDRLTKYAEAMGWQVSDTYTDAGFSGAKLERPAMQRLINDIENKAFDTVLVYKLDRLSRSVRDTLYLVKDVFTKSKIDFISLNESIDTSSAMGSLFLTILSAINEFERENIKERMTMGKLGRAKSGKSMMWTRTAFGYHHNRKTGILEIVPLQATIVEQIFTDYLSGISLTKLRDKLNESGHIGKDIPWSYRTLRQTLDNPVYCGYIKFRGSLFEGMHKPIIPYETYQKVQKELEERQQQTYERNNNPRPFQAKYMLSGMARCGYCGAPLRIVLGHKRKDGSRTMKYHCANRFPRITKSVTVYNDNKKCDSGTYDLSDLENTVIDNLIGFQKNNDSLLKIVNGNNQPILDTSSFKKRISQIDKKIQKNSDLYLNDLITMDELKDRTDSLQAEKKLLKAKISENKFNDCTDVFELVKTQLGSIPINELSYEDKKKIVNNLVSKVDVTADNVDIIFKFQLA

SEQ ID NO: 2516 - protein, 452 aa, synthetic construct
MKAAIYIRVSTREQVENYSIQAQTEKLTALCRSKDWDVYDIFIDGGYSGSNMNRPALNEMLSRLHEIDAVVVYRLDRLSRSQRDTITLIEEYFLKNSVEFVSLSETLDTSSPFGRAMIGILSVFAQLERETIRDRMVMGKIKRIEAGLPLTTAKGRTFGYDVIDTKLYINEEEAKQLRLIYDIFEEEQSITFLQKRLKELGFKVRTYNRYNNWLTNDLYCGYVSYKDKVHVKGIHEPIISEEQFYRVQEIFTRMGKNPNMNRDSASLLNNLVVCSKCGLGFVHRRKDAMSRDKKYHYRYYSCKTYKHIHELEKCGNKIWRADKLEELIIDRVNSYSLASRNVDKEDELDGLNEKLKTEHAKKKRLFDLYINGSYEVSELDSMMSDIDAQINYYESQIEANEELKKNKKIQENLADLATVDFDSLEFREKQQYLKSLINKIYIDGDQVTIEWL

SEQ ID NO: 2517 - protein, 469 aa, synthetic construct
MSYTTPVRAAVYLRISEDRSGEQLGVARQREDCLKLCGQRKWVPVEYLDNDVSASTGKRRPAYEQMLVDITAGKIAAVVAWDLDRLHRRPIELEAFMSLADEKRLALATVAGDIDLATPQGRLVARLKGSVAAHETEHKKARQRRAARQKAERGHPNWSKAFGYQPGPNGPEPDPRTAPLVRQAYADILAGASLGDVCRRWNDAGAFTITGRLWTTTTLSKFLRKPRNAGLRAYKGARYGPVDRDAIVGKARWSPLVDEATFWAAQAVLDAPGRAPGRKSVRRHLLTGLAGCGKCGNHLAGSYRTDGRVVYVCKACHGVAILADNIEPILYHIVAERLAMPDAVDLLRREIHDAAEAETTRLELETLYGELDRLAVERAEGLLTARQVKISTDIVNAKVTKLQARQLDQERLRVFDGIPLGTPQVAGMIAELSPDRFRAVLDVLAEVVVQPVGKSGRMFNPERVQVNWR

SEQ ID NO: 2518 - protein, 452 aa, synthetic construct
MKAAIYIRVSTQEQVENYSIQAQTEKLTALCRSKDWDVYDIFIDGGYSGSNMNRPALNEMLSKLHEIDAVVVYRLDRLSRSQRDTTTLIEEYFLKNNVEFVSLSETLDTSSPFGRAMIGILSVFAQLERETIRDRMVMGKIKRIEAGLPLTTAKGRTFGYDVIDTKLYINEEEAKQLQLIYDIFEEEQSITFLQKRLKKLGFKVRTYNRYNSWLTNDLYCGYVSYKDKVRVKGIHEPIISEEQFYRVQEILTRMGKNPNMNRDSASLLNNLVVCSKCGLGFVHRSKDTMSRGKKYHYRYYSCKTYKHTHELEKCGNKIWRADKLEELIINRVNNYSFASRNVDKEDELDSLNEKLETEHAKKKRLFDLYINGSYEVCELDSMMNDIDAQINYYESQIEANEELKKNKRIQESLADLATVDFDSLEFREKQLYLKCLINKIYIDGEQVTIEWL

SEQ ID NO: 2519 - protein, 452 aa, synthetic construct
MKAAIYIRVSTQEQVENYSIQAQTEKLTALCRSKDWDVYDIFIDGGYSGSNMNRPALNEMLSKLHEIDAVVVYRLDRLSRSQRDTTTLIEEYFLKNNVEFVSLSETLDTSSPFGRAMIGILSVFAQLERETIRDRMVMGKIKRIESGLPLTTAKGRTFGYDVIDTKLYINEEEAKQLQLIYDIFEEEQSITFLQKRLKKLGFKVRTYNRYHKWLTNDLYCGYVSYRDKVHVKGIHEPIISEEQFYRVQEIFTRMGKNPNMNRDSASLLSNLVACSRCGLGFVHRSKDTMSRGKKYHYRYYSCKTYKHTHELEKCGNKIWRADKLEELIINRVNNYSFASRNVDKEDELDSLNERLKIEHAKKKRLFDLYINGSYEVSELDSMMNDIDAQINYYESQIEANEELGKDKKIQENLANLATVDFDSLEFREKQLYLKSLINKIYIDGEQVTIEWL

SEQ ID NO: 2520 - protein, 452 aa, synthetic construct
MKAAIYVRVSTREQVENYSIQAQTEKLTALCRSKDWDVYDIFIDGGYSGSNMNRPALNEMLSKLHEIDAVVVYRLDRLSRSQRDTITLIEEYFLKNNVEFVSLSETLDTSSPFGRAMIGILSVFAQLERETIRDRMVMGKIKRIEAGLPLTTAKGRTYGYDVIDTKLYINEEEAKQLQLIYDIFEEEQSITFLQKRLKKLGFKVRTYNRYHNWLTNDLYCGYVSYKDKVHVKGIHEPIISEEQFYRVQEIFTRMGKNPNMNRDSASLLNSLVVCSKCGLGFVHRRKDTMSRGKKYHYRYYSCKTYKHTHELEKCGNKIWRADKLEELIISRVNNYGFAGRNVDEAEELDSLNEKLKVEHAKKKRLFDLYINGSYNVSELDSMMNDIDAQINYYESQIEANEELKKNKKIQENLAGLATVDFDSLEFREKQLYLKSLINKIYIDGEQVTIEWL

SEQ ID NO: 2521 - protein, 452 aa, synthetic construct
MKAAIYIRVSTQEQVENYSIQAQTEKLTALCRSKDWDVYDIFIDGGYSGSNMNRPALNEMLSKLHEIDAVVVYRLDRLSRSQRDTTTLIEEYFLKNNVEFVSLSETLDTSSPFGRAMIGILSVFAQLERETIRDRMVMGKIKRIEAGLPLTTARGRTFGYDVIDTKLYINEEEAKQLQLIYDIFEEEQSITFLQKRLKKLGLKVHTYNRYNNWLTNDLYCGYVSYKDKVHVKGIHEPIISEEQFYRVQEIFTRMGKNPNMNRDGASLLSNLVVCSKCGLGFVHRSKDTMSRGKKYHYRYYSCKTYKHTHELEKCGNKTWRADKLEELIINRVNNYSFASRNVDKEDELDSLNEKLKIEHARKKRLFDLYINGSYEVSELDSMMNDIDAQINYYESQIEANEELKRTKKIQENLADLATVDFDSLEFREKQQYLRSLINKIYIDGERVTIEWL

SEQ ID NO: 2522 - protein, 452 aa, synthetic construct
MKAAIYIRVSTQEQVGNYSIQAQTEKLTALCRSKDWDVYDIFIDGGYSGSNMNRPALNEMLSKLHEIDAVVVYRLDRLSRSQRDTTTLIEEYFLKNNVEFVSLSETLDTSSPFGRAMIGILSVFAQLERETIRDRMVMGKIKRIEAGLPLTTAKGRTFGYDVIDTKLYINEEEAKQLQLIYDIFEEEQSITSLQKRLKKLGFKVRTYSRYNNWLTNDLYCGYVSYKDKVHVKGIHEPIISEEQFYRVQEIFTRMGKNPNMNRDSASLLNSLVVCSKCGLSFVHRSKDTMSGGKKYHYRYYSCKTYKHTHELEKCGNKTWRADKLEELVINRVNNYSFASRNVDKEDELDSLNEKLKIEHAKRKRLFDLYINGSYEVSELDSMMNDIDAQINYYESQIEANEELKKDKKIQENLADLATVDFDSLEFREKQLYLKSLINKVYIDGEQVTIEWL

SEQ ID NO: 2523 - protein, 452 aa, synthetic construct
MKAAIYIRVSTREQVENYSIQAQTEKLTALCRSKDWDVYDIFVDGGYSGSNMNRPALNEMLSKLHEIDAVVVYRLDRLSRSQRDTITLIEEYFLKNNVEFVSLSETLDTSSPFGRAMIGILSVFAQLERETIRDRMVMGKIKRIEAGLPLTTAKGRTFGYDVIDTRLYINEEEAKQLQLIYDIFEEEQSITFLQKRLKKLGFKVRTYNRYNNWLTNDLYCGYVSYKDKVHVKGIHEPIISEEQFYRVQEIFTRMGKNPNMNRDSASLLNNLVVCSKCGLGFVHRRKDAMSRGKKYHYRYYSCKTYKHIHELEKCGNKIWRADKLEELIINRVNNYSIASRNADKEDELDSLNEKLKVEHAKKKRLFELYINGSYEMSELDSMMNGIDAQINYYESQIEANKELKKDKKIQENLANLATVDFDSLEFREKQLYLKSLINKIYIDGEQVTIEWL

SEQ ID NO: 2524 - protein, 452 aa, synthetic construct
MKAAIYIRVSTREQVENYSIQAQTEKLTALCRSKDWDVYDIFIDGGYSGSNMNRPALNEMLSKLHEIDAVVVYRLDRLSRSQRDTITLIEEYFLKNNVEFVSLSETLDTSSPFGRAMIGILSVFAQLERETIRDRMVMGKIKRIEAGLPLTTAKGRTFGYDVIDTKLYVNEEEARQLQLIYDIFEEEQSITSLQKRLKKLGFKVRTYNCYNNWLTNDLYCGYVSYKDKVHVKGIHEPIISEEQFYRVQEIFTRMGKNPNMNRDSASLLNNLVVCSKCGLGFVHRRKDAMSRDKKYHYRYYSCKTYKHIHELEKCGNKIWRADKLEELVINRVNSYSLASRNVVKEDELDSLNEKLKIEHAKKKRLFDLYINGSYEVSELDSMMNDIDAQINYYESQIGANEELKRDKNIQENLAYLATVDFDSLEFREKQLYLKSLINKIYIDGEQVTIEWL

SEQ ID NO: 2525 - protein, 452 aa, synthetic construct
MKAAIYIRVSTREQVENYSIQAQTEKLTALCCSKGWDVYDIFIDGGYSGSNMNRPALNEMLSKLHEVDAVVVYRLDRLSRSQRDTITLIEEYFLKNNVEFVSLSETLDTSSPFGRAMIGILSVFAQLERETIRDRMMMGKIKRIEAGLPLTTAKGRTFGYDVIDTKLYINEEEAKQLQLIYDIFEEVQSITFLQKRLKKLGFRVRTYNCYNNWLTNDLYCGYVSYKDKVHVKGIHEPIISEEQFYRVQEIFTRMGKNPNMNRDSASLLNNLVVCSKCGLGFVHRRKDTTSRGKKYHYRYYSCKTYKHTHELEKCGNKIWRADKLEELIINRVNNYSFAGRNVDKEDELGSLNEKLKIEHAKKKRLFELYINGSYEVSELDSMMNDIDAQINYYESQIGANEELKKNKKIQENLADPATVDFDSLEFREKQLYLKNLINKIYIDGEQVTIEWL

SEQ ID NO: 2526 - protein, 452 aa, synthetic construct
MKAAIYIRVSTREQVENYSIQAQTEKLTALCRSKDWDVYDIFIDGGYSGSNMNRPALTEMLSKLHEIDAVVVYRLDRLSRSQRDTITLIEEYFLKNNVEFVSLSETLDTSSPFGRAMIGILSVFAQLERETIRDRMVMGKIKRIEAGLPLTTAKGRTFGYDVIDTKLYINEEEARQLQLIYDIFEEEQSITFLQKRLKKLGFKVRTYSCYNNWLTNDLYCGYVSYKDRVHVKGIHEPIISEEQFYRVQEIFTRMGRNPNMNRDSASLLNNLVVCSKCGLGFVHRRKDTMSRGKKYHYRYYSCKTYKHTHELDRCGNKIWRADKLEELIINRVNNYSFASRDVDKEDELDSLNEKLKIEHAKKKRLFDLYINGSYVVSELDSMMSDIDAQINYYESQIDASKEQKKNKKIQENLANLATVDYDSLEFREKQLYLKSLINKIYIDGEQVTIEWL

SEQ ID NO: 2527 - protein, 469 aa, synthetic construct
MSYTTPVRAAVYLRISEDRSGEQLGVARQREDCLKLCDQRKWVPVEYLDNDVSASTGKRRPAYEQMLADITAGKIAAVVAWDLDRLHRRPIELEAFMSLADEKRLALATVAGDVDLATPQGRLVARLKGSVAAHETEHKKARQRRAARQKAERGHPNWSKAFGYLPGPNGPEPDPRTAPLVKQAYADILAGASLGDVCRRWNGAGAFTITGRPWTTTTLSKFLRKPRNAGLRAYKGARYGPVDRDAIVGKAQWSPLVDEATFWAAQAVLDAPGRAPGRKSVRRHLLTGLAGCGKCGNHLAGSYRTDGRVVYVCKACHGVAILADNIEPILYHIVAERLAMPDAVDLLRREIHDAAEAETIRQELETLHGELDRLAVERAEGLLTARQVKISTDIVNAKITKLQAHQQDQERLRVLDGIPLGTPQVAGVIAELSPNRFRAVLDVLAEVVVQPVGKSGRISNPERVQVNWR

SEQ ID NO: 2528 - protein, 485 aa, synthetic construct
MTKKVAIYTRVSTTNQAEEGFSIDEQIDRLTKYAEAMGWQVSDTYTDAGFSGAKLERPAMQRLINDIENKAFDTVLVYKLDRLSRSVRDTLYLVKDVFTKNKIDFVSLNECIDTSSAMGSLFLTILSAINEFERENIKERMTMGKLGRAKSGKSMMWTKTAFGYYHNRKTGILEIVPLQATIVEQIFTDYLSGISLTKLRDKLNESGHIGKDIPWSYRTLRQTLDNPVYCGYIKFKDSLFEGMHKPIIPYETYLKVQKELEERQQQTYERNNNPRPFQAKYMLSGMARCGYCGAPLKIVLGHKRKDGSRTMKYHCANRFPRKTKGVTVYNDNKKCDSGTYDLSNLENTVIDNLIGIQENNDSLLKIINGNNQPILDTNSLKKRISQIDKKIQKNSDLYLNDFITMDELKNRTDSLQAEKKLLKAKISENKFNDSTDVFELVKTQLGSTPINELSYDNKKKIVNNLVSKVDVTADNVDIIFKFQLA

SEQ ID NO: 2529 - protein, 452 aa, synthetic construct
MKAAIYIRVSTQEQVENYSIQAQTEKLTALCRSKDWDVYDIFIDGGYSGSNMNRPALNEMLSKLHEIDAVVVYRLDRLSRSQRDTTTLIEEYFLKNNVEFVSLSETLDTSSPFGRAMIGILSVFAQLERETIRDRTVMGKIKRVEAGLPLTTAKGRTFGYDVIDTKLYVNEEEAKQLQLIYDIFEEEQSITFLQKRLKKLGFKVRTYNRYNKWLTNDLYCGYVSYKDKVHVKGIHEPIISEEQFYRVQEIFTRMGKSPNMNRDSASLLSNLVVCSKCGLGFVHRSKDTMSRGKKYHYRYYSCKTYKHTHELEKCGNKTWRADKLEELIINRVNNYSFASRNMAKEDELDSLNEKLKIEHAKKKRLFDLYINGSYEVSGLDSMMNNIDAQINHYESQIEANEELKKNKKIRENLADLATVDFDSLEFREKQLYLKSLINKIYIDGEQVTIEWL

SEQ ID NO: 2530 - protein, 452 aa, synthetic construct
MKAAIYIRVSTREQVENYSIQAQTEKLTALCRSKDWDVYDIFIDGGYSGSNMNRPALNEMLSKLHEIDAVVVYRLDRLSRSQRDTITLIEEYFLKNNVEFVSLSETLDTSSPFGRAMIGILSVFAQLERETIRDRMVMGKIKRIEAGLPLTTAKGRTFGYDVIDTKLYVNEEEAKQLQLIYDIFEEEQSITFLQKRLKKLGFKVRTYNRYNNWLTNDLYCGYVSYKDKVRVKGIHEPIISEEQFCRVQEIFTRMGKNPNMNRDSASLLNNLVVCSKCGLGFVHRRKDAMSRDKKYHYRYYSCKTYKHIHELEKCGNKIWRADKLEELVINRVNSYSFASRNADKEDELVSLNEKLKIEHAKKKRLFDLYINGRYEVSELDSMMSDIDAQISYYESQIEANEALIKNKRIQENLANLATVDFDSLEFREKQLYLKSLINKIYIDGEQVTIEWL

SEQ ID NO: 2531 - protein, 485 aa, synthetic construct
MTKKVAVYTRVSTTNQAEEGFSIDEQIDRLTKYAEAMGWQVSDTYTDAGFSGAKLERPAMQRLINDIENKAFDTVLVYKLDRLSRSVRDTLYLVKDVFTKNKIDFISLNESIDTSSAMGSLFLTILSAINEFERENIKERMTMGKLGRAKSGKSMMWTKTAFGYYHNRKTGILEIVPLQATIVEQIFTDYLSGISLTKLRDKLNESGHIGKDIPWSYRTLRQTLDNPVYCGYIKFKDSLFEGMHKPIIPYETYLKVQKELDERQQQTYERNNNPRPFQAKYMLSGMARCGYCGAPLRIVLGHKRKDGSRTMKYHCANRFPRKTRGVTVYNDNKKCDSGTYDLRNLENTVIDNLIGFQEDNDSLLKIINGNNQPVPDTSSFKEQISQIDKKIQKNSDLYLNDFITMDELKDRTDSLQAEKKLLKAKISENRFNDSADVFELVKTQLGSIPINELSYDDKKKIVNNLVSKVDVTADNVDIIFKFQLA

SEQ ID NO: 2532 - protein, 469 aa, synthetic construct
MSYTTPVRAAVYLRISEDRSGEQLGVARQREDCLKLCGQRKWEPVEYLDNDVSASTGKRRPAYEQMLADITEGKIAAVVAWDLDRLHRRPIELEAFMRLADERRLALATVAGDVDLATPQGRLVARLKGCVAAHETEHKKARQRRAARQKAERGYPNWSKAFGYLPGPNGPEPDPRTAPLVKQAYADILAGASLGDVCRQWNAAGAFTITGRLWTSTTLSKFLRKPRNAGLRAYKGARYGPVDRDAIVGKAQWSPLVDEATFWAAQAVLDAPGRAPGRKSVRRHLLTGLAGCGKCGNHLAGSYRTDGKVVYVCKACHGVAILADNIEPTLYHIVAERLAMPDAVGLLRREIHDAAEAETIRLELETLYGVLDRLAVERAEGLLTARQVKISTDIVNAKITKLQARQLDQERLRVFDGIPLGTPQVAGMIAELSPDRFRAVLDVLAEVVVQPVGKGGRIFNPERVQVNWR

SEQ ID NO: 2533 - protein, 469 aa, synthetic construct
MSYTTPVRAAVYLRISEDRSGEQLGVARQREDCLKLCGQRKWVPVEYLDNDVSASTGKRRPAYEQMLADITAGKIAAVVAWDLDRLHRRPIELEAFMSLADEKRLALATVAGDVDLATPQGRLVARLKGSVAAHETEHKKARQRRAARQKAERGYPNWSKAFGYLPGPNGPEPDPRTAPLVKQAYADILAGASLGDVCRQWNDAGAFTITGRPWTTTTLSKFLRKPRNAGLRAYKGARYGPVDRDAIVGKAQWRPLVDEATFWAAQAVLDAPGRAPGRKSVRRHLLTGLAGCGKCGNHLAGSYRTDGRVVYVCKACHGVAILADNIEPILYHIVAERLAMPDAVDLLRREIHDAAEAETVRLELETLYGELDRLAVERAEGLLTARQVKVSTDIVNAKITKLQARQLDQERLRVFDGIPLGTPQVAGMIAGLSPDRFRAVLDVLAEVVVQPVGKSGRTFNLERVQVNWR

SEQ ID NO: 2534 - protein, 485 aa, synthetic construct
MTKKVAIYTRVSTTNQAEEGFSIDEQIDRLTKYAEAMGWQVSDTYTDAGLSGAKLERPAMQRLINDIENKAFDTVLVYKLDRLSRSVRDTLYLVKDVFTKNKIDFISLNESIDTSSAMGGLFLTILSAINEFERENIKERMTMGKLGRAKSGKSMMWTKTAFGYYHNRKTGILEIVPLQAAIVEQIFTDYLSGISLTKLRDKLNEGGHIGKDIPWSYRTLRQTLGNPVYCGYIKFKGSLFEGMHKPIIPYETYLKVQKELGERQRQTYERNNNPRPFQAKYMLSGMARCGYCGAPLRIVLGHKRKDGSRTMKYHCANRFPRKTRGITVYNDNKKCDSGTYDLSNLENTVIDNLTGFQENNGSLLKIISGNNQPILDTSSLRKQISQIDRRIQKNSDLYLNDFITMDELKDRTDSLQAEKKLLKAKISENKFNNSTDVLEQVKTQLGSIPINELSYDDKKKIVNNLVSKVDVTADNVDIIFKFQLA

SEQ ID NO: 2535 - protein, 469 aa, synthetic construct
MSYTTPVRAAVYLRISEDRSGEQLGVARQREDCLKLCGQRKWVPVEYLDNDVSASTGKRRPAYEQMLADITAGKIAAVVAWDLDRLHRRPVELEAFMSLADEKRLALATVAGDVDLATPQGRLVARLKGCVAAHETEHKKARQRRAARQKAERGHPNWSKAFGYLPGPNGPEPDPRTAPLVKQAYADILAGASLGDVCRQWNDAGALTITGRPWITTTLSKFLRKPRNAGLRAYKGARYGPVDRDAIVGKAQWSPLVDEATFWAAQAVLDAPGRAPGRKSVRRHLLTGLAGCGKCGNHLAGSYRTDGRVVYVCKTCHGVVILADNIEPILYHTVAERLAMPDAVDLLRREIHDAAEAETTRLELETLYGELDRLAVERAEGLLTARQVKISTDIVNAKISKLQARQLDQERLRVFDGIPLGTPQVAGMIAELGPDRFRAVLNVLAEVVVQPVGKSGRIFNPERVQVNWR

SEQ ID NO: 2536 - protein, 469 aa, synthetic construct
MSYTTPVRAAVYLRISEDRSGEQLGVARQREDCLKLCDQRKWVPVEYLDNDVSASTGKRRPAYEQMLADITAGRIAAVVAWDLDRLHRRPIELEAFMSLADEKRLALATVAGDVDLATPQGRLVARLKGSVAAHETEHKKARQRRAARQKAERGLPNWSKAFGYLPGPNGPEPDPRTAPLVKQAYADILAGASLGDVCRQWNDAGAFTITGRPWTTTALSKFLRKPRNAGLRAYKGARYGPVDRDAIVGKAQWSPLVDEATFWAAQAVLDAPGRAPGRKSVRRHLLTGLAGCGKCGNHLAGSYRTDGQVVYVCKACHGVAILADNIEPILYHVVAERLAMPDAVDLLRREIHDAAEAETIRLELETLYGELDRLAVERAEGLLTARQVKISTDIVSAKITKLQARQLDQERLRVFAGIPLGTPQVAGMIAELSPDRFRAVLDVLAEVVVQPVSKSGRIFNPERVQVNWR

SEQ ID NO: 2537 - protein, 452 aa, synthetic construct
MKAAIYIRVSTQEQVGNYSIQAQTEKLTALCRSKDWDVYDIFVDGGYSGSNMNRPALNEMLSKLHEIDAVVVYRLDRLSRSQRDTTTLIEEYFLKNNVEFVSLSETLDTSSPFGRAMIGILSVFAQLERETIRDRMVMGKIKRIEAGLPLTTAKGRTFGYDVIDTKLYVNEEEAKQLRLIYDIFEEEQSITSLQKRLKKLGFKVRTYNRYNNWLTNDLYCGYVSYKDKVHVKGIHEPIISEEQFYRVQEIFTRMGKNPNMNRDSASLLNNLVVCSKCGLSFVHRSKDTMSRGKKYHYRYYSCKTYKHTHELEKCGNKTWRADKLEELIINRVNNYSFASRNVDKGDELDSLNERLKIEHAKKKRLFDLYINGSYEVSELDSMMNDIDAQINYYESQIEASEELKKNKKIQESLADLATVDFDSLEFREKQLYLKSLINKIYIDGEQVTVEWL

SEQ ID NO: 2538 - protein, 469 aa, synthetic construct
MSYTTPVRAAVYLRISEDRSGEQLGVARQREDCLKLCDQRKWVPVEYLDNDVSACTGKRRPAYEQMLADITAGKIAAVVAWDLDRLHRRPTELEAFMSLADEKRLALATVAGDVDLATPQGRLVARLKGSVAAHETEHKKARQRRAARQKAERGHPNWSKAFGYLPGPNGPEPDPRTAPLVKQAYADILAGASLGDVCRQWNDAGAFTITGRPWTTTTLSKFLRKPRNAGLRAYKGARCGPVDRDAIVGKAQWSPLVDEATFWAAQAVLDAPGRAPGRKSVRRHLLTGLAGCGKCGNHLAGSYRTDGRVVYVCKACHGVAILADNIEPILYHIVAERLATPDAVDLLRREIHDAAEAETIRLELEALYGELDRLAVERAEGLLTARQVKISTDIVSAKITKLQACQLDQERLRVFDGIPLGTPQAADVIAELSPNRFRAVLDVLAEVVVQPVGKSGRIFNPERVQVNWR

SEQ ID NO: 2539 - protein, 452 aa, synthetic construct
MKAAIYIRVSTREQVENYSIQAQTEKLTALCRSKDWDVYDIFIDGGYSGSNMNRPALNEMLNKLHEIDAVVVYRLDRLSRSQRDTITLIEEYFLKNNVEFVSLSETLDTSSPFGRAMIGILSVFAQLERETIRDRMVMGKIKRIEAGLPLTTAKGRTFGYDVIDTKLYINEEEAKQLQLIYDIFEEEQSITFLQKRLKKLGFRVRTYNRYNSWLTNDLYCGYVSYKDKVHVKGIHEPIISEEQFYRVQEIFARMGKNPNMNRDSASLLNNLVVCSKCGLGFVHRRKDTMSRGKKYHYRYYSCKTYKHIHELEKCGNKIWRADKLEELIINRVNNYSLASRNVDEEDELDNLSEKLKAEHAKKKRLFELYINGSYEMGELDSMMNDIDAQINYYESQIEANEELKRNRKIQENLANLATVDYDSLEFREKQLYLKSLISKIYIDGEQVTIEWL

SEQ ID NO: 2540 - protein, 452 aa, synthetic construct
MKAAIYIRVSTQEQVENYSIQAQTEKLTALCRSKDWDVYDIFVDGGYSGSNMNRPALNEMLSKLHEIDAVVVYRLDRLSRSQRDTTTLIEEYFLKNNVEFVSLSETLDTSSPFGRAMIGILSVFAQLERETIRDRMVMGKIKRIEAGLPLTTAKGRTFGYDVIDTKLYINEEEAKQLQLIYDIFEEEQSITSLQKRLKKLGFKVRTYNRYNNWLTNDLYCGYVSYKDKVHVKGIHEPIISEEQFYRVQEIFTRMGKNPNMNRDSASLLNNLVVCSKCGLSFVHRSKDTMSRGKKYHYRYYSCKTYKHTHELEKCGNKTWRADKLEELIINRVNNYSFASRDVDKEDELDSLREKLRIEHAKKKRLFDLYINGSYEASELDGMMSDIDAQINYYESQIEANEELKKNKKIQENLADLATVDFDSLEFREKQLYLKSLISKIYIDGEQVTIEWL

SEQ ID NO: 2541 - protein, 469 aa, synthetic construct
MCYTTPVRAAVYLRISEDRSGEQLGVARQREDCLKLCDQRKWAPVEYLDNDVSASTGKRRPAYEQMLADITAGKIAAVVAWDLDRLHRRPIELEAFMSLADEKRLALATVAGDVDLATPQGRLVARLKGSVAAHETEHKKARQRRAARQKAERGYPNWSKAFGYLSGPNGPEPDPQTAPLVKQAYADILAGASLGDVCRQWNDAGAFTITGRPWTTTTLSKFLRKPRNAGLRAYKGARYGPVDRDAIVGKAQWSPLVDEATFWAAQAVLDAPGRAPGRKSVRRHLLTGLAGCGKCGNHLAGSYRTDGKVVYVCKACHGVAILADNIEPVLYHIVAERLAMPDAVDLLRCEIHDAAEAETTRLELETLYGELDRLAVERAEGLLTARQVKISTDIVNAKITKLQARQLDQERLRVFEGIPLGTPQVVGMIAELSPDRFRAVLDVLVEVVVQPVGKSGRIFNPERVQVNWR

SEQ ID NO: 2542 - protein, 485 aa, synthetic construct
MTKKVAIYTRVSTTNQAEEGFSIDEQIDRLTKYAEAMGWQVSNTYTDAGFSGAKLERPAMQRLINDIENKAFDAVLVYKLDRLSRSVRDTLYLVKDVFTKNKIDFISLNESINTSSAMGSLFLTILSAINEFERENIKERMTMGKLGRAKSGKSMMWTKTAFGYYHNRKTGILEIVPLQATIVEQIFTDYLSGISLTKLRDKLNESGHIGKDIPWSYRTLRQTLDNPVYCGYIKFKGSLFEGMHKPIIPYETYLKVQKELEERQQQTYERNNNPRPFQAKYMLSGMARCGYCGAPLRIVLGHKRKDGSRTMKYHCANRFPRKTKGVTLYNDNKKCDSGTYDLSNLENTVIDNLIGFQENNDSLLKIINGNNQPILDTSSFKKQISQIDKKIQKISDLYLNDFITMDELKDRTDSLQAEKRLLKAKISENKCNDSTDVFELVKAQLGSIPINELSYDNKKKIVNNLVSKVDVTADNVNIIFKFQLA

SEQ ID NO: 2543 - protein, 469 aa, synthetic construct
MSHTTPVRAAVYLRISEDRSGEQLGVARQREDCLKLCSQRKWVPVEYLDNDVSASSGKRRPAYEQMLADITAGKIAAVVAWDLDRLHRRPVELEAFMSLADEKRLALATVAGDVDLATPQGRLVARLKGSVTAHETEHKKVRQRRAARQKAERGHPNWSKAFGYRPGPNGPEPDPRTAPLVKQAYADILAGASLGDVCRQWNDAGAFTITGRLWTTTTLSKFLRKPRNAGLRAYKGARYGPVDRDAIVGKAQWSPLVDEATFWAAQAVLDAPGRAPGRKSVRRHLLTGLAGCGKCGNHLAGSYRTDGRVVYVCKACHGVSILAVNIEPILYRIVAERLAMPDAVDLLRRETHDAAEAETTRLELETLYGELDRLAVERAEGLLTARQVKISTDIVNAKITKLQARQLDQERLRVFDGIPLGTPQVAGVIAELSPDRFRAVLDVLAEVVVQPVGKSGRIFNPERVQVHWR

SEQ ID NO: 2544 - protein, 485 aa, synthetic construct
MTKKVAIYTRVSTINQAEEGFSIDEQIDRLTKYAEAMGWQVSDTYTDAGFSGAKLERPAMQRLINDIENKAFDTVLVYKLDRLSRSARDTLYLVKDVFTKNKIDFISLNESIDTSSAMGSLFLTILSAINEFERENIKERMTMGKLGRAKSGKSMMWTKTAFGYYHNRKTGILEIVPLQAAIVEQIFTDYLSGVSLTKLRDKLNESGHIGKDIPWSYRTLRQTLDNPVYCGYIRFKDSLFEGMHKPIIPYETYLKVQRELGERQQQTYERNNNPRPFQARYMLSGMARCGYCGAPLRIALGHKRKDGSRTMKYHCANRFPRKTKGITVYNDNKKCDSGTYDLSNLENTVIDILIGFQENNDSLLKIINGNNQPILDTSSLKKQISQIDKKIRKNSDLYMNDFITMDELKDRTDSLQAEKKLLEAKISENKFNDSADVFELVKTQLGSIPINELSYDNKKKIVNNLVSKVDVTADNVDIIFKFQLA

SEQ ID NO: 2545 - protein, 469 aa, synthetic construct
MSYTTPVRAAVYLRISEDRSGEQLGVARQREDCLKLCVQRKWVPVEYLDNDVSASTGKRRPAYEQMLADITAGKIAAVVAWDLDRLHRRPVELEAFMSLADEKRLALATVAGDVDLATPQGRLVARLKGCVAAHETEHKKARQRRAARQKAERGLPNWSKAFGYLSGPNGPEPDPRTAPLVKQAYADILAGASLGDVCRQWNDAGALTITGRPWTTTTLSKFLRKPRNAGLRAYKGARYGPVDRDAIVGKAQWSPLVDEATFWAAQAVLDAPGRAPGRKSVRRHLLTGLAGCGKCGSHLAGSYRTDGRVVYVCKACHGVVILADNIEPILYHIVAERLAMPDAVDLLRREIHDAAEAETIRLELETLYGELDSLAVERAEGLLTARQVKISTDIVNAKITKLRARQLDQERLRVFDGIPLGTPQVAGIIAELSPDRFRAVLDALAEVVVQPVGKGGRTFNPERVQVNWR

SEQ ID NO: 2546 - protein, 452 aa, synthetic construct
MKAAIYIRVSTREQVENYSIQAQTEKLTALCRSKDWDVYDIFIDGGYSGSNMNRPALNEMLSKLHEIDAVVVYRLDRLSRSQRDTITLIEEYFLKNNVEFVSLCETLDTSSPFGRAMIGILSVFAQLERETIRDRMVMGKIKRIEAGLPLTTAKGRTFGYDVIDTKLYVNEEEARQLQLIYDIFEEEQSITFLQKRLKKLGFKVRTYNRYNNWLTNDLYCGYVSYKDKVHVKGIHEPIISEEQFYRVQEIFTRMGKNPNMNRDSASLLNNLVVCSKCGLGFVHRRKDAMSRDKKYHYRYYSCKTYKHIHELEKCGNKIWRADKLEELVINHVNNYSLANRNVDKEDGLDSLNRKLRTEHAKRKRLFDLYLSGSYEVSELDSMMNDIDAQINYYESQIEANEELRRNKKIQENLARLATVDFDSLEFREKQLYLKSLINKIYIDGEQVTIEWL

SEQ ID NO: 2547 - protein, 452 aa, synthetic construct
MKAAIYIRVSTREQVENYSIQAQTEKLTALCRSKDWDVYDIFIDGGYSGSNMNRPALNEMLSKLHEIDAVVVYRLDRLSRSQRDTITLIEEYFLKNNVEFVSLSETLDTSSPFGRAMIGILSVFAQLERETIRDRMVMGKIKRIEAGLPLTTAKGRTFGYDVIDTKLYINEEEAKQLQLIYDIFEEEQSITFLQKRLKKLGFKVRTYNRYNNWLTNDLYCGYVSYKDKVHVKGVHEPIISEEQFYRVQEIFTRMGKNPNMNRDSASLLNNLVVCSKCGLGFVHRRKDAMSRDKKYHYRYYSCKTYKHIHELEKCGNKIWRADKLEELIINRVNDYSLASRNVDKEDELDSLNEKLKIEHAKKRRLFDLYINGSYEVSELDSMMNGIDAQINYYESQIEANEELKKNKKIRENLANLATVDFDSLEFRDKQLYLKSLINKIYIDGEQVTIEWL

SEQ ID NO: 2548 - protein, 469 aa, synthetic construct
MSYTTPVRAAVYLRISEDRSGEQLGVARQREDCLKLCGQRKWVPVEYLDNDVSASTGKRRPAYEQMLADITAGKIAAVVAWDLDRLHRRPIELEAFMSLADEKRLALATVAGDVDLATPQGRLVARLKGCVAAHETEHKKARQRRAARQKAERGHPNWSRAFGYLPGPNGPEPDPRTAPLVKQAYADILAGASLGDVCRRWNDAGALTITGRPWTTTTLSKFLRKPRNAGLRAYKGARYGPVDRDAIVGKAQWSPLVDEATFWAAQAVLDAPGRAPGRKSVRRHLLTGLAGCGKCGNHLAGSYRTDGRIVYVCKACHGVAILADNIEPILYHIVAERLAMPDAVDLLRREIHDVAEAETIRLELESLYGELDRLAVERAEGLLTARQVKISTDIVNAKITKLQARQLDQERLRVFNGIPLGTPQVAGVIAELSPDRFRAVLVVLAEVVVQPVGKGGRIFNPERVQVNWR

SEQ ID NO: 2549 - protein, 452 aa, synthetic construct
MKAAIYIRVSTREQVENYSIQAQTEKLTALCRSKDWDVYDIFIDGGYSGSNMNRPALNEMLSKLHEIDAVVVYRLDRLSRSQRDTITLIEEYFLKNNVEFVSLSETLDTSSPFGRATIGILSVFAQLERETIRDRMVMGKIKRIEAGLPLTTAKGRTFGYDVIDTKLYINEEEAKQLRLIYDIFEEEQSITFLQKRLKKLGFKVRTYSRYSNWLTNDLYCGYVSYKDKVHVKGIHEPIISEEQFYRVQEIFTRMGKNPNMNRDSASLLNNLVVCSRCGLGFVHRRKDTMSRGKKYHYRYYSCKTYKHTHELEKCGNKIWRADKLEELIINRVSNYSFASRNVDKEDELDSLNEKLKVEHARKKRLFELYINGSYEVSELDSMMNDIDAQISYYESQIEANEELRKNKKIQENLAKLATVDYDSLEFREKQLYLKSLINKIYIDGEQVTIEWL

SEQ ID NO: 2550 - protein, 485 aa, synthetic construct
MAKKVAIYTRVSTTNQAEEGFSIDEQIDRLTKYAEAMGWQVSDTYTDAGVSGAKLERPAMQRLINDIENKAFDTVLVYKLDRLSRSVRDTLYLVKDVFTKNKVDFISLNESIDTSSAMGSLFLTILSAINEFERENIKERMTMGKLGRAKSGKSMMWTKTAFGYYHNRKTGILEIVPLQATIVEQIFTDYLSGISLTKLRDKLNESGHIGKDIPWSYRTLRQTLDNPVYCGYIKFKGSLFEGMHKPIIPYETYLKVQKELEERQQQTYERNNNPRPFQAKYMLSGMARCGYCGAPLKIVLGHKRKDGSRTMKYHCANRFPRKTKGVTVYNDNKKCDSGTYDLSNLENTVIDNLIGFQENNDSLLEIINGSNQPILDTSSFKKQISQIDKRIQKNSDLYLNDFITMDELKDRTDSLQAEKKLLKAKISENKFNDSTDVFELVKTQLGSIPINELSYDNKKKIVNNLVSKVDVTADNVNIIFKFQLA

SEQ ID NO: 2551 - protein, 469 aa, synthetic construct
MSYTTPVRAAVYLRISEDRSGEQLGVARQREDCLELCGQRKWVPVEYLDNDVSASTGKRRPAYEQMLADITAGKIAAVVAWDLDRLHRRPVELEAFMSLADEKRLALATVAGDVDLATPQGRLVARLKGCVAAHETEHKKARQRRAARQKAERGHPNWSKAFGYLPGPNGPEPDPRTAPLVKQAYADILAGASLGDVRRQWNDAGAFTITGRPWTTTALSKFLRKPRNAGLRAYKGARYGPVDRDAIVGKAQWSPLVDEATFWAAQAVLDAPGRAPGRKGVRRHLLTGLAGCGKCGNHLAGSYRTDGRVVYVCKACHGVAILADNIEPILYHIVAERLAMPDAVDLLRREIHDAAEAETIRPELETLYGELDRLAVERAEGLLTARQVKISTDIVNAKITKLQARQLDQERLRVFDGIPLGTPQVAGMIAELSPDRFRAVLDVLAEVVVQPVGKSGRIFNPERVRVNWR

SEQ ID NO: 2552 - protein, 485 aa, synthetic construct
MTKKVAIYTRVSTTNQAEEGFSIDEQIDRLTKYAEAMGWQVSDTYTDAGLSGAKLERPAMQRLINDIESKAFDTVLVYKLDRLSRSVRDTLYLVKDVFTKNKIDFISLNECIDTSSAMGSLFLTILSAINEFERENIKERMTMGKLGRAKSGKSMMWTKTAFGYYHNRETGILEIVPLQAAVVERIFTDYLSGISLTKLRDKLNESGHIGKDIPWSYRTLRQTLDNPVYCGYIKFKGSLFEGMHKPIIPYETYLKVQKELEERQQQAYERNNNPRPFQAKYMLSGMARCGYCGAPLRIVLGHKRKDGSRTMKYHCANRFPRKTKGVTVYNDNKKCDSGTYNLSDLENTVIDNLIGFQENNDSLLKIINGNNQPIRDTSSFKKQISQIDKKIQKNSDLYLNDFITMDELKDRTDSLQAEKKLLKAKISESKFNDSTDVFELVKTQLGSIPINELSYDDRKRIVNNLVSKVDVTADNVDIIFKFQLA

SEQ ID NO: 2553 - protein, 452 aa, synthetic construct
MKAAIYIRVSTREQVENYSIQAQTEKLTALCRSKDWDVYGIFIDGGYSGSNMNRPALNEMLSKLHEIDAVVVYRLDRLSRSQRDTITLIEEYFLKNNVEFVSLSETLDTSSPFGRAMIGILSVFAQLERETIRDRMVMGKIKRIEAGLPLTTAKGRTFGYDVIDTKLYINEEEAKQLQLIYDIFEEERSITFLQKRLKELGFKVRTYNCYNNWLTNDLYCGYVSYKDKVHVKGIHEPIISEEQFYRVQEILTRVGKNPNMNRDSASLLNNLVVCSKCGLGFVHRRKDTMSRGKKYHYRYYSCKTYKHTHELEKCGNKIWRADKLEELIINRVNNYSLASRNVDKEDELDSLSEKLKVEHAKKKRLFELYINGSYEMGELDSMMNDIDAQINYYESQIEANEELKKSKKIQENLANLATVDYDSLEFREKQLYLKSLINKIYIDGEQVTIEWL

SEQ ID NO: 2554 - protein, 485 aa, synthetic construct
MTKKVAIYTRVSTTNQAEEGFSIDEQVDRLTKYAEAMGWQVSDTYTDAGFSGAKLERPAMQRLINDIENKAFDTVLVYKLDRLSRSVRDTLYLVKDVFTKNKIDFISLNESIDTSSAMGSLFLTILSAINEFERENIKERMTMGKLGRAKSGKSMMWTKTAFGYYHNRKTGILEIVPLQATIVEQIFTDYLSGISLTKLRDKLNESGHIGKDIPWSYRTLRQTLDNPVYCGYIKFKDSLFEGMHEPIIPHETYLKVQNELEERQRQTYERNNNPRPFQAKYMLSGVARCGYCGAPLKIVLGHKRKDGSRTMRYHCANRYPRKTKGVTVYNDNKKCDSGTYDLGNLENTVIDNLIGFQENNGSLLKIISGNNQPIQGTSSLKKQISQIDKKIQKNSDLYLNDFITMDELKARTDSLQAEKKLLKAKISENKFSDSTDVFEQVKTQLGSIPINELSYDNKKKIVNNLVSKVDVTADNVDIILKFQLA

SEQ ID NO: 2555 - protein, 485 aa, synthetic construct
MTKKVAIYTRVSTTNQAEEGFSIDEQIDRLTKYAEAMGWQVSGTYTDAGFSGAKLERPAMQRLINDIENKAFDTVLVYKLDRLSRSVRDTLYLVKDVFTKNKIDFISLNESIDTSSAMGSLFLTILSAINEFERENIKERMTMGKLGRAKSGKSMMWTKTAFGYHHNRKTGILEIVPLQAAIVEQIFTDYLSGISLTKLRDKLNESGHIGKDIPWSYRTLRQTLDNPVYCGYIKFKDSLFEGMHKPIIPYETYLKVQEELEERQQQTYERNNNPRPFQAKYMLSGMARCGYCGAPLRIVLGRKRKDGSRTMKYHCANRFPRKTKGVTVYNDNKKCDSGTYDLSNLENTVIDNLIGFQENDDSLLKIINGNNQPILDTSSLKKQISQIDKKIQKNSDLYLNDFITMDELKDRTDSLQAEKKLLEAKISENKLNNSTDVFELVKTQLGSIPINELSYDNKKKIVNNLVSKVDVTADNVDIIFKFQLA

SEQ ID NO: 2556 - protein, 485 aa, synthetic construct
MTKKVAIYTRVSTTNQAEEGFSIDEQIDRLTKYAEAMGWQVSDTYTDAGFSGAKLERPAMQRLINDIENKAFDTVLVYKLDRLSRSVRDTLYLVKDVFTKNKIDFTSLNESIDTSSAMGSLFLTILSAINEFERENIKERMTMGKLGRAKSGKSMMWTKTAFGYYHNRKTGILEIVPLQATIVEQIFTDYLSGISLTKLRDKLNGSGHIGKDIPWSYRTLRQTLDNPVYCGYIKFKGSLFEGMHKPIIPYETYLRVQKELEERQQQTYERNNNPRPFQAKYMLSGMARCGYCGAPLRIVLGHKRKDGSRTMKYHCANRFPRKTKGVTVYNDNKKCDSGTYDLSDLENTVIDNLIGFQENNDSLLKIINGNNQPILDTSSLKEQISQIDKKIQKNSDLYLNDFITMDELKDRTDSLQAEKKLLKAKISENKFNDSTDVFELVKTQLGSIPINELSYDNKKKIVNNLVSKVDVTADNVDIIFKFQLA

SEQ ID NO: 2557 - protein, 485 aa, synthetic construct
MTKKVAIYTRVSTTNQAEEGFSIDEQIDRLTKYAEAMGWQVSDTYTDAGFSGAKLERPAMQRLINDIENKAFDTVLVYKLDRLSRSVRDTLYLVKDVFTKNNIDFISLNESIDTSSAMGSLFLTILSAINEFERENIKERMTMGKLGRAKSGKSMMWTKTAFGYYHNRKTGILEIVPLQATIVEQIFTDYLSGISLTKLRDKLNENGHIGKDIPWSYRTLRQTLDNPVYCGYIRFKDSLFKGMHKPIIPYETYLKVQKELEERQQQAYERNNNPRPFQAKYMLSGIARCGYCGAPLRIVLGHKRKDGGRTMKYHCANRFPRKTKGVTVYNDNKKCDSGTYDLRNLENTVIDNLIGFQENNDSLLKIINGNNQPILDTSSFKKQISQIDKKIQKNSDLYLNDFITMDELKDRTDSLQAEKKLLEAKISENKFNDSTDVFELVKTQLGSIPINELSYDNKKKIVNNLVSKVDVTADNVDIIFKFQLA

SEQ ID NO: 2558 - protein, 485 aa, synthetic construct
MTKKVAIYTRVSTTNQAEEGFSIDEQTDRLTKYAEAMGWQVSDTYTDAGFSGAKLERPAMQRLINDIDNKAFDTVLVYKLDRLSRSARDTLYLVKDVFTKNKIDFISLNESIDTSSAMGSLFLTILSAINEFERENIKERMTMGKLGRAKSGKSMMWTKTAFGYYHNRETGILEIVPLQAAIVEQIFTDYLSGVSLTKLRDKLNESGHIGKDIPWSYRTLRQTLDNPVYCGYIKFKDSLFEGMHKPIIPYETYLKVQKELGERQQQAYERNNNPRPFQAKYMLSGVARCGYCGAPLKIVLGHKRKDGSRTMKYHCANRFPRKTKGVTVYNDNKKCDSGTYDLSNLEDTVIDNLIGFQENNDSLLRIINGNNQPILDTSSFKEQISQIDKKIQKNSNLYLNDSITMDELKDRTDSLQAEKRLLKAKISENKFNDSTDVFELVKTQLGSIPINELSYDDKKKIVNNLVSKVDVTADNVDIIFKFQLA

SEQ ID NO: 2559 - protein, 452 aa, synthetic construct
MKAAIYIRVSTREQVENYSIQAQTERLTALCRSKDWDVYDIFVDGGYSGSNMNRPALNEMLSKLHEIDAVVVYRLDRLSRSQRDTITLIEEYFLKNNVEFVSLSETLDTSSPFGRAMIGILSVFAQLERETIRDRMVMGKIKRIEAGLPLTTAKGRTFGYDVIDTKLYINEEEAKQLQLIYDIFEEEQSITLLQKRLKKLGFKVRSYSRYNNWLTNDLYCGYVSYKDKVHVKGIHEPIISEEQFYRVQEIFTRMGKNPNMNRASASLLNNLVVCSKCGLGFVHRRKDAMSRDKKYHYRYYSCKTYKHIHELEKCGNKIWRADKLEELIINRVNNYSLASRNVDKDDELDSLNERLKMEHAKKKRLFDLYINGGYEVSELDSMMNDIDAQINYYESQIEANEELKKNKKIQENLADLATVDFDSLGFREKQLYLKSLINKIYIDGEQVTIEWL

SEQ ID NO: 2560 - protein, 453 aa, synthetic construct
MKAAIYIRVSTREQVENYSIQAQTEKLTALCRSKDWDVYDIFIDGGYSGSNMNRPALNEMLSKLHEIDAVVVYRLDRLSRSQRDTITLIEEYFLKNNVEFVSLSETLDTSSPFGRAMIGILSVFAQLERETIRDRMVMGKIKRVEAGLPLTTAKGRTFGYDVIDTKLYINEEEAKQLQLIYDIFEEEQSITFLQKRLKKLGFKVRTYNRYNDWLTNDLYCGYVSYKDKVHVKGIHEPIISEEQFYRVQEIFARMGKNPNMNRDSASLLNNLVVCSKCGLGFVHRRKDTTSRGKKYHYRYYSCKTYKHIHELDKCGNKIWRADKLEELIINRVNNYSFASRNVDKEDVLDSLNEKLKIEHAKKRRLFDLYTNGGYEVSELDSMMNDIDAQINYYESQIEANKELKKDKRIQENLAELATVDFDSLEFREKQLYLKSLINKIYIDGEQVTIEWLE

SEQ ID NO: 2561 - protein, 452 aa, synthetic construct
MKAAIYIRVSTQEQVGNYSIQAQTEKLTALCRSKDWDVYDIFIDGGYSGSNMNRPALNEMLSRLHEIDAVVVYRLDRLSRSQRDTTTLIEEYFLKNNVEFVSLSETLDTSSPFGRAMIGILSVFAQLERETIRDRMVMGKIKRIEAGLPLTTAKGRTFGYDVIDTKLYINEEEAKQLQLIYDIFEEEQSITFLQKRLKKLGFKVRTYNRYNNWLTNDLYCGYVSYKDKVHVKGIHEPIISEEQFHRVQEIFTRMGKNPNMNRDSASLLNNLVVCSKCGLGFVHRSKDTMSRGKKYHYRYYSCKTYKHTHELEKCGNKTWRADKLEELIINRVNNYSFASRNADKEDELDGLNEKLKIEHARKKRLFDLYINGSYEVSELDSMMNDIDAQINYYESQIEASEELKKNKKIQENLADLATVDFDSLEFREKQLYLKSLINKIYIDGEQVTIEWL

SEQ ID NO: 2562 - protein, 469 aa, synthetic construct
MSYTTPMRAAVYLRISEDRSGEQLGVARQREDCLKLCDQRKWVPVEYLDNDVSASTGKRRPAYEQMLADITAGKIAAVVAWDLDRLHRRPIELEAFMSLADEKRLALATVAGDVDLATPQGRLVARLKGCVAAHETEHKKARQRRAARQKAERGYPNWSKAFGYLPGPNGPEPDPRTAPLVKQAYADILAGASLGDVCRQWNDAGAFTITGRPWTTTTLSKFLRKPRNAGLRAYKGARYGPVDRDAIVGKAQWSPLVDEATFWAAQAVLDAPGRAPGRKSVRRHLLTGLAGCGKCGNHLAGSYRTDGRVVYVCKACHGVAILADNIEPILYHIVAERLATPDAVDLLRREVHDVAEAETIRLELETLYGELDRLAVERAEGLLTARQVKISTDIVNAKITKLQARQLDQERLRVFDGIPLGTPQVAGMIAELSPDRFRAVLGVLAEVVVQPVGKGGRIFNPERVQVNWR

SEQ ID NO: 2563 - protein, 469 aa, synthetic construct
MSYTTPVRAAVYLRISEDRSGEQLGVARQREDCLKLCDQRKWVPVEYLDNDVSASTGKRRPAYEQMLADITAGKIAAVVAWDLDRLHRRPVELEAFMSLADEKRLALATVAGDVDLATPQGRLVARLKGCVAAHETEHKKARQRRAARQKAERGHPNWSKAFGYLPGPNGPEPDPRTAPLVKQAYADILAGASLGDVCRQWNDAGAFTITGRPWTTTTLSKFLRKPRNAGLRAYKGARYGPVDRDAIVGKAQWSPLVDEATFWAAQAVLDAPGRAPGRKSVRRHLLTGLAGCGKCGNHLAGSYRTDGQVVYVCKTCHGVSILAVNIELILYHIVAERLAMPDAVGLLRREIHDAAEAETIRMELEALYGELDRLAVERAEGLLTARQVKISTDIVDAKITKLQARQLDQERLRVFDDIPLGTPQVAGMIAELSPDRFRAVLDVLAEVVVQPVGKRGRIFNPERVQVNWR

SEQ ID NO: 2564 - protein, 469 aa, synthetic construct
MSYTTPVRAAVYLRISEDRSGEQLGVARQREDCLKLCDQRKWVPVEYLDNDVSASTGKRRPAYEQMLADITAGKIAAVVAWDLDRLHRRPMELEAFMSLADEKRLALATVAGDVDLATPQGRLVARLKGSVAAHETEHKRARQRRAARQKAERGHPNWSKAFGYLPGPNGPEPDPRTAPLVKQAYADILAGASLGDVCRQWNDAGAFTITGRLWTTTTLSKFLRKPRNAGLRAYKGARYGPVDRDAIVGKAQWSPLVDEATFWAAQAVLDAPGRAPGRKSVRRHLLTGLAGCGKCGNHLAGSYRTDGQVVYVCKACHGVVILADNIEPILYRIVAERLAMPDAVDLLRREIHDAAEAETTRLELESLYGELDRLAVERAEGLLTARQVKICTDIVNAKITKLQARQLDQERLRVLDGIPLGTPQVAGMIAELSPDRFRAVLDVLVEVVVQPVGKSGRIFNPERVRVNWR

SEQ ID NO: 2565 - protein, 469 aa, synthetic construct
MSYTTPVRAAVYLRISEDRSGEQLGVARQREDCLKLCDQRKWVPVEYLDNDVSASTGKRRPAYEQMLADITAGKIAAVVAWDLDRLHRRPIELEAFMSLADEKRLALATVAGDVDLATPQGRLVARLKGSVAAHETEHKKARQRRAARQKAERGHPNWSKAFGYLPGPCGPEPDPRTAPLVKQAYADILAGASLGDVCRQWNDAGAFTITGRPWTTTALSKFLRKPRNAGLRAYKGARYGPVDRDAIVGKAQWSPLVDEATFWAAQAVLDAPGRAPGRKSVRRHLLTGLAGCGKCGNHLAGSHRTDGRVVYVCKACHGVAILADNIEPILYHIVAERLAMPDAVDLLRREIHDAAEAETIRLELETLYGELDRLAVERAEGLLTARQVKISTDIVNAKITRLQARQLDQERLRVFDGIPLGTPQVAGMVAELSPDRFRAVLDVLAEVVVQPVGKSGRIFSPERVQVNWR

SEQ ID NO: 2566 - protein, 452 aa, synthetic construct
MKAAIYIRVSTQEQVGNYSIQAQAEKLTALCRSKDWDVYDIFIDGGYSGSNMNRPALNEMLSKLHEIDAVVVYRLDRLSRSQRDTTTLIEEYFLKNNVEFVSLSETLDTSSPFGRAMIGILSVFAQLERETIRDRMVMGKIKRIEAGLPLTTAKGRTFGYDVIDTKLYINEEEAKQLRLIYDIFEEVQSITFLQKRLKQLGFKVRTYNRYNNWLTNDLYCGYVSYKDKVHVKGIHEPIISEEQFYRVQEIFTRMGKNPNMNRDSASLLSNLVVCSKCGLGFVHRSKDTMSRGKKYHYRYYSCKTYKHTHELEKCGNKIWRADKLEELVINRVNNYSFASRNVDKEDELDSLSEKLETERAKKKRLFDLYINGSYEVSELDSMMNDIDAQINYYESQIEANEELRKNRKIQENLADLATVDFDGLEFRDKQLYLKSLINKIYIDGEQVTIEWL

SEQ ID NO: 2567 - protein, 452 aa, synthetic construct
MKAAIYIRVSTREQVENYSIQAQTEKLTALCRSKGWDVYDIFIDGGYSGSNMNRPALNEMLSKLHEIDAVVVYRLDRLSRSQRDTITLIEEYFLKNNVEFMSLSETLDTSSPFGRAMIGILSVFAQLERETIRDRMVMGKIKRIEAGLPLTTAKGRTFGYDVIDTKLYINEEEAKQLQLVYDIFEEERSITLLQKRLRKLGFKVHTYSRYNNWLTNDLYCGYVSYKDKVHVKGIHEPIISEEQFYRVQEIFTRMGKNPNMNRDSASLLNGLVVCSKCGLGFVHRRKDTTSRGKKYHYRYYSCKTYKHIHELEKCGNKIWRADKLEELIINRVSNYSFASRNVDKEDELDSLNEKLKIEHAKKKRLFDLYINGSYEASELDSMMNDIDAQINYYESQIEANEELKKTKKIQENLADLATVDYDSLEFREKQLYLKSLINKIHIDGEQVTIEWL

SEQ ID NO: 2568 - protein, 485 aa, synthetic construct
MTKKVAIYTRVSTTNQAEEGFSIDEQVDRLTKYAEAMGWQVSDTYTDAGFSGAKLERPAMRRLISDIENKAFDTVLVYKLDRLSRSVHDTLYLVKDVFTKNKIDFISLNESIDTSSAMGSLFLTILSAINEFERENIKERMTMGKLGRAKSGKSMMWTKTAFGYYHNRKTGILEIVPLQATIVEQIFTDYLGGISLTKLRDKLNESGHIGKDIPWSYRTLRQTLDNPVYCGYIKFKGSLFEGMHKPIIPYETYLKVQKELEERQQQTYERNNNPRPFQAKYMLSGMARCGYCGAPLRIVLGHKRKDGGRTMKYHCANRFPRKTKGVTVYNDNKKCDSGTYDLSSLENTVIDNLIGLQENNDSLLKIINGNNQPILDTSSLKKQISQIDKKIQKNSDLYLNGFITMDELKDRTDSLRAEKKLLEAKISENKFNDSTDVFELVKTQLGSIPISELSYDNKKKIVNNLVSKVDVTADNVDIIFKFQLA

SEQ ID NO: 2569 - protein, 469 aa, synthetic construct
MSYTTPVRAAVYLRISEDRSGEQLGVARQREDCLKLCDQRKWVPVEYLDNDVSASTGKRRPAYEQMLADIAAGKIAAVVAWDLDRLHRRPIELEAFMSLADEKRLALATVAGDVDLATPQGRLVARLKGCVAAHETEHKKARQRRAARQKAERGYPNWSKAFGYLPGLNGPEPDPRTAPLVKQAYADILAGASLGDVCRRWNGAGAFTITGRPWTTTTLSKFLRKPRNAGLRAYKGARYGPVDRDAIVGKAQWSPLVDEATFWAAQAVLDAPGRAPGRRSVRRHLLTGLAGCGKCGNHLAGSYRTDGRVVYVCKACHGVAILADNIEPTLYRIVAERLAMPDAVDLLRREVHDAAEAETIRLELESLYDELDHLAVERAEGLLTARQVKISTDIVNAKITKLQARQRDQERLRVLDGIPLGTPQVAGMIAELSPDRFRAVLDVLAEVVVQPAGKSGRVFNPERVQVNWR

SEQ ID NO: 2570 - protein, 452 aa, synthetic construct
MKAAIYIRVSTREQVENYSIQAQTEKLTALCRSKGWDVYDIFIDGGYSGSNMNRPALNEMLSKLHEIDAVVVYRLDRLSRSQRDTITLIEEYFLKNNVEFVSLSETLDTSSPFGRAMIGILSVFAQLERETIRDRMVMGKIKRIEAGLPLTTAKGRTFGYDVIDTKLYINEEEAKQLQLIYDIFEEEQSITSLQKRLKKLGFKVRTYNRYNNWLTNDLYCGYVSYKDRVHVKGVHEPIISEEQFYRVQEIFARMGKNPNMNRDSASLLNNLVVCSKCGLGFVHRRKDTMSRGKKYHYRYYSCKTYKHIHELEKCGNKIWRADKLEELIINRVNNYSFASRNADKEDELDSLNEKLRIEHAKKKRLFDLYINGSYEVSELDSMMNDVDAQINYYESQIEANEELKKSKKVQENLANLATVDYDSLEFREKQLYLKSLINKIYIDGEQVTIEWL

SEQ ID NO: 2571 - protein, 452 aa, synthetic construct
MKAAIYIRVSTQEQVENYSIQAQTEKLTALCRSKDWDVYDIFIDGGYSGSNMNRPALSEMLSKLHEIDAVVVYRLDRLSRSQRDTITLIEEYFLKNNVEFVSLSETLDTSSPFGRAMIGILSVFAQLERETIRDRMVMGKIKRIEAGLPLTTAKGRTFGYDVIDTKLYINEEEAKQLQLIYDIFEEEQSITLLQKRLKKLGFKVRTYNRYNSWLTNDLYCGYVRYKDKVHVKGIHEPIISEEQFYRVQEIFTRMGKNPNMNRGSASLLNNLVVCSKCGLGFVHRRKDTMSRGKKYHYRYYSCKTYKHTHELKKCGNKIWRADKLEELIINRVNNYSFASRNADKEDELDSLNEKLKIERAKKKRLFDLYINGSYEVSELDSMMSDIDAQINYYESQIEANEELKKDKRIQENLADLATVDFDSLEFREKQRYLRSLINKIYIDGEQVTIEWL

SEQ ID NO: 2572 - protein, 469 aa, synthetic construct
MSNTTPVRAAVYLRISEDRSGEQLGVARQREDCLKLCGQRKWVPVEYLDNDVSASIGKRRPAYEQMLADITAGKIAAVVAWDLDRLHRRPIELEAFMSLADEKRLALATVAGDVDLATPQGRLVARLKGCVAAHETEHKKARQRRAARQKAERGLPNWSKAFGYLPGPNGPEPDPRTAPLVRQAYADILAGASLGDVCRQWNDAGAFTITGRPWTTTTLSKFLRKPRNAGLRAYKGARYGPVDRDAIVGKAQWSPLVDEATFWAAQTVLDAPGRAPGRKSVRRHLLTGLAGCGKCGNHLAGSYRTDGQIVYVCKACHGVSILAVNIEPILYHIVAERLAMPDAVGLLRREIHDAAEAEAIRLELGTLYGELDRLAVERAEGLLTARQVKISTDIVNAKITKLQTCQLDQERLRVFDGIPLGTPQVAGMIAELSPDRFRAVLDVLAEVVVQPVGKSGRIFNPERVQVNWR

SEQ ID NO: 2573 - protein, 485 aa, synthetic construct
MTKKVAIYTRVSTTNQAEEGFSIDEQVDRLTKYAEAMGWQVSGTYTDAGFSGAKLERPAMQRLINDIENKAFDTVLVYKLDRLSRSVRDTLYLVKDVFTKNKIDFISLSESIDTSSAMGSLFLTILSAINEFERENIKERMTMGKLGRAKSGKSMMWTKTAFGYYHNRKTGILEIVPLQATIVEQIFTDYLSGISLTKLRDKLNESGHIGKDIPWSYRTLRQTLDNPVYCGYIKFKDSLFEGMHKPIIPYETYLKVQKELEERQQQTYERNNNPRPFQAKYMLSGVARCGYCGAPLKIVLGHKRKDGSRTMKYHCANRFPRKTKGITVYNDNKKCDSGTYDLSNLENTVVDNLIGFQENNDSLLKIINGNNQPILDTSSFKKQISQIDKKIQKNSDLYLNDFITMDELKDRTESLQAEKKLLKAKISENKSNDSTDVFELVKTQLGSVPINELSYGNKKRIVNNLVSKVDVTADNVDIIFKFQLA

SEQ ID NO: 2574 - protein, 452 aa, synthetic construct
MKAAIYIRVSTQEQVGNYSIQAQTEKLTALCRSKDWDVYDIFVDGGYSGSNMNRPALNEMLSKLHEIDAVVVYRLDRLSRSQRDTTTLIEEYFLKNNVEFVSLSETLDTSSPFGRAMIGILSVFAQLERETIRDRMVMGKIKRIEAGLPLTTAKGRTFGYDVIDTKLYINKEEAKQLQLIYDIFEEEQSITSLQKRLKKLGFKVRTYNRYNNWLTNDLYCGYVSYKDKVHVRGIHEPIISEEQFYRVQEIFTRTGKNPNMNRDSASLLNNLVVCSKCGLGFVHRSKDTMCRGRKYHYRYYSCKTYKHTHELEKCGNKTWRADKLEELVINRVNSYSLASRDVDKEDELDSLNEKLKVEHAKKKRLFDLYINGSYEVSELDSMMNDIDAQINYYESQIEANEELKKNKKIQENLADLATVDFDSLEFREKQLYLKSLINKIYIDGEQVTIEWL

SEQ ID NO: 2575 - protein, 469 aa, synthetic construct
MSYTTPVRAAVYLRISEDRSGEQLGVARQREDCLKLCDQRKWVPVEYLDNDVSASTGKRRPAYEQMLADITAGKIAAVVAWDLDRLHRRPVELEAFMSLADEKRLALATVAGDVDLATPQGRLVARLKGCVAAHETEHKKARQRRAARQKAERGHPNWSKAFGYLPGPNGPEPDPRTAPLVKQAYADILAGASLGDVCRQWNNAGAFTITGRTWTTTTLSKFLRKPRNAGLRAYKGARYGPVDRGAIVGKAQWSPLVDEATFWAVQAVLDAPGRAPGRKSVRRHLLTGLAGCGKCGNHLAGSYRTDGRVVYVCKACHGVAILADNIEPILYHIVAERLAMPDAVDLLRREIHDAAEAETIRLELETLYGELDRLAVERAEGLLTARQVKISTDIVNAKITKLQARQLDQERLRVFDGIPLGTPQVAGVIAELSPDRFRTVLDVLAEVVVQPVGKSGRIFNPERVQVNWR

SEQ ID NO: 2576 - protein, 485 aa, synthetic construct
MTKKVAIYTRVSTTNQAEEGFSIDEQIDRLTKYAEAMGWQVSDTYTDAGFSGAKLERPAMQRLINDIENKAFDTVLVYKLDRLSRSVRDTLHLVKDVFTKNKIDFISLNESIDTSSAMGSLFLTILSAINEFERENIKERMTMGKLGRAKSGKSMMWTKTAFGYYHNRKTGILEIVPLQATIVEQIFTNYLSGISLTKLRDKLNESGHIGKDIPWSYRTLRQTLDNPVYCGYIKFKDSLFEGMHKPIIPYETYLRVQKELEERQQQTYERNNNPRPFQAKYMLSGMARCGYCGAPLRIVLGRKRKDGSRTMKYHCANRFPRKTKGVTVYNDNKKCDSGTYDLSNLENTVIDNLIGLQENNDSLLKIINGNNQPILDTSSLKEQISQIDKKIQKNSDLYLNDFITMDELKDRTDSLQAEKKLLKAKISENKFNDSTDVSELVKTQLGSIPINELSYDNKKKIVNNLVSKVDVTADNVDIIFKFQLA

SEQ ID NO: 2577 - protein, 485 aa, synthetic construct
MTKKVAIYTRVSTTNQAEEGFSIDEQIDRLTKYTEAMGWQVSDTYTDAGSSGAKLERPAMQRLINDIENRAFDTVLVYKLDRLSRSVRDTLYLVKDVFTKNKIDFISLNESIDTSSAMGSLFLTILSAINEFERENIKERMTMGKLGRAKSGKSMMWTKTAFGYNHNRKTGILEIVPLQATIVEQIFTDYLSGISLTKLRDKLNESGHIGKDIPWSYRTLRQTLGNPVYCGYIKFKDSLFEGKHKPIIPYETYLKVQKELEERQQQTYERNNNPRPFQAKYMLSGMARCGYCGAPLRIVLGHKRKDGSRTMKYHCANRFPRKTKGVTVYNVNKKCDSGTYDLSDLENTVIDNLIGFQENDDSLLKIINGNNQPILDTSSFKNQISQIDKKIQKNSDLYLNDFITMDELKDRTDSLQAEKKLLKAKISENKFNDSTDVFELVKTQLGSIPINELSYDNKKKIVNSLVSKVDVTADSVDIIFKFQLA

SEQ ID NO: 2578 - protein, 485 aa, synthetic construct
MTKKVAIYTRVSTTNQAEEGFSIDEQIDRLTKYAEAMGWQVSDTYTDAGSSGAKLERPAMQRLINDIENKAFDTVLVYKLDRLSRSVRDTLYLVKDVFTKNKIDFISLNESIDTSSAMGSLFLTILSAINEFERENIKERMTMGKLGRAKSGKSMMWTKTAFGYYHNRKTGILEIVPLQATIVEQIFTDYLSGVSLTKLRDKLNESGHIGKDIPWSYRTLRQTLDNPVYCGYIKFKDSLFEGMHKPIIPYETYLKVQKELEERQQQTYERNSNPRPFQAKYMLSGMARCGYCGAPLRIVLGHKRKDGSRTMKYHCANRFPRKTKGVTVYNDNKKCNSGAYDLSNLENTVIDSLIGFQGNNDSLLKIINGNNQPILDTSSFEKQISQIDKKIQKNSDLYLNDFITMDELKDRTDALQAEKKLLKAKISENKFSDSTDVFELVKTQLGSIPMNELSYDNKKKIVNNLVSKVDVTADNVDIIFKFQLA

SEQ ID NO: 2579 - protein, 485 aa, synthetic construct
MTKKVAIYTRVSTTNQAEEGFSIDEQTDRLTKYAEAMGWQVSDTYTDAGFSGAKLGRPAMQRLINDIENKAFDTVLVYKLDRLSRSVRDTLYLVKDVFTKNKIDFISLNESIDTSSAMGSLFLTILSAINEFERENIKERMTMGKLGRAKSGKSMMWTKTAFGYYHNRKTGILEIVPLQATIVEQIFTDYLSGISLTKLRDKLNESGHIGKDIPWSYRTLRQTLDNPVYCGYIKFKDSLYEGMHKPIIPYETYLKVQKELEERQQQTYERNNNPRPFQAKYMLSGMARCGYCGAPLRIVLGRKRKDGSRTMKYHCANRFPRKTKGVTVYNDNKKCDSGTYDLSNLENTVIDNLVGFQENNDSLLKIINGNNQPILDTSSFKKQISQIDKKIQKNSDLYLNDFITMDELKDRTDSLQAEKKLLKVKISENKFNDSTDVFELVKTQLGSIPINELSYDNKKKIVNNLVSKVDVTADNVDITFKFQLA

SEQ ID NO: 2580 - protein, 469 aa, synthetic construct
MCYTTPVRAAVYLRISEDRSGEQLGVARQREDCLKLCDQRKWVPVEYLDNDVSASTGKRRPAYEQMLADITAGKIAAVVAWDLDRLHRRPIELEAFMSLADEKRLALATVAGDVDLATPQGRLVARLKGSVAAHETEHKKARQRRAARQKAERGHPNWSKAFGYLPGPNGPEPDPRTAPLVKQAYADILAGASLGDVCRQWNDAGAFTITGRPWATTTLSKFLRKPRNAGLRAYKGARYGPVDRDAIVGKAQWSPLVDEATFWAAQAVLDAPGRAPGRKSVRRHLLTGLAGCGKCGNHLAGSYRTDGKVVYVCKACHGVAILADNIEPILYHIVAERLAMPDAVDLLRREIHDATEAETIRLELETLYGELDCLAVERAEGLLTARQVKISTDIVNAKITKLQARQQDQERLRVLDGIPLGTPQVADVIAELSPDRFRAVLDVLVDVVVQPVGKGGRIFNPERVRVNWR

SEQ ID NO: 2581 - protein, 485 aa, synthetic construct
MTKKVAIYTRVSTTSQAEEGFSIDEQIDRLTKYAEAMGWQVSDTYTDAGLSGAKLERPAMQRLINDIENKAFDTVLVYKLDRLSRSVRDTLYLVKDVFTKNKIDFISLNESIDTSSAMGSLFLTILSAINEFERENIKERMTMGKLGRARSGKSMMWTKTAFGYYHNRKTGILEIVPLQATIVEQIFTDYLSGISLTKLRDKLNESGHIGKDIPWSYRTLRQTLDNPVYCGYIKFKDSLFEGMHKPIIPYETYLKVQKELEERQQQTYERNNNPRPFQAKYMLSGMARCGYCGAPLRIVLGHKRKDGSRTMKYHCANRFPRKTRGITVYNDNKKCDSGTYDLSNLENTVIDNLIGLQENNDSLLEFINGNNQPILDTSSFKEQISQIDKKIQKNSDLYLNDFITMDELKDRTNSLRAEKKLLKAKISENKFNDNTDVFELVKTQLGSIPINELSYDNKKKIVNNLVSKVDVTADNVDIIFKFQLA

SEQ ID NO: 2582 - protein, 485 aa, synthetic construct
MTKKVAIYTRVSTTNQAEEGFSIDEQIDRLTKYTEAMGWQVSNTYTDAGSSGAKLERPAMQRLINDIENKAFDTVLVYKLDRLSRSVRDTLYLVKDVFTKNKIDFISLNESIDTSSAMGSLFLTILSAINEFERENIKERMTMGKLGRAKSGKSMMWTKTAFGYYHNRKTGILEIVPLQATIVEQIFTDYLSGISLTKLRDKLNESGHIGKDIPWSYRTLRQTLDNPVYCGYIKFKDSLFEGMHKPIIPYETYLRVQKELEERQQQTYERNNNPRPFQAKYMLSGMARCGYCGAPLRIVLGHKRKDGSRTMKYHCANRFPRKTKGVTVYNDNKKCDSGTYDLSNLENTVIDILIGFQEDNDSLLKIINGNNQPILDTSSFKRQISQIDKKIQKNSDLYLNDFITMDELKDRTDSLQAEKKLLEAEINKNKFNDSTDVFELVKTQLGSIPINELSYDNKKKIVNNLVSKVDVTADNVDIIFKFQLA

SEQ ID NO: 2583 - protein, 452 aa, synthetic construct
MKAAIYIRVSTQEQVGNYSIQAQTEKLTALCRSKDWDVYDIFIDGGYSGSNMNRPALNEMLSKLHEIDAVVVYRLDRLSRSQRDTTTLIEEYFLKNNVEFVSLSETLDTSSPFGRAMIGILSVFAQLERETIRDRMVMGKIKRIEAGLPLTTAKGRTFGYDVIDTKLYINEEEAKQLQLIYDIFEEEQSITSLQKRLKKLGFKVRTYNRYNNWLTNDLYCGYVSYKDKVHVKGIHEPIISEEQFYRVQEIFTRMGKNPNMNRDSASLLSNLVVCSKCGLGFVHRSKDTMSRGKKYHYRYYSCKTYKHTHELEKCGNKTWRADKLEELIINRVNNYSFASRNADKEDELDSLNEKLKIEHARKKRLFDLYINGSYEVSELDSMMNDIDAQISYYESQIEASEELKRNKKIQENLADLATVDFDSLEFREKQLYLKSLINKIYIDGEQVTIDWL

SEQ ID NO: 2584 - protein, 452 aa, synthetic construct
MKAAIYIRVSTREQVENYSIQAQTEKLTALCRSKGWDVYDIFIDGGYSGSNMNRPALNEMLSKLHEIDAVVVYRLDRLSRSQRDTITLIEEYFLKNNVEFVSLSETLDTSSPFGRAMIGILSVFAQLERETIRDRMVMGKIKRIEAGLPLTTAKGRTFGYDVIDTKLYINEEEAKQLRLIYDIFEEEQSITFLQKRLKKLGSKVRTYNRYNNWLTNDLYCGYVSYKDKVHVKGIHEPIISEEQFNRVQEIFARMGKNPNMNRDSASLLNNLVVCGKCGLGFVHRRKDIMSRGKKYHYRYYSCKTYKHIHELEKCGNKIWRADKLEELVINRVNNYSLASRNADKEDELDSLNERLKIEHAKKRRLFDLYINGSYEVSELDSMMKDIDAQINYYESQIEANEELKKNRKIQENLADQATVDFDSLEFREKQLYLKSLINKIYIDGEQVTIEWL

SEQ ID NO: 2585 - protein, 485 aa, synthetic construct
MTKKVAIYTRVSTANQAEEGFSIDEQIDRLTKYAEAMGWQVSDTYTDAGFSGAKLERPAMQRLINDIENKAFDTVLVYKLDRLSRSVRDTLYLVKDVFTKNKIDFISLNESINTSSAMGSLFLTILSAINEFERENIKERMTMGKLGRAKSGKSMMWTKTAFGYYHNRKTGILEIVPLQATIVEQIFTDYLSGISLTKLRDKLNESGHIGKDIPWSYRALRQTLDNPVYCGYIRFKNSLFEGMHKPIIPYETYLKVQKELGERRQQTYERYNNPRPFQAKYMLSGMARCGYCGAPLKIVLGHKRKDGSRTMKYHCANRFPRRTKGVTVYNDNKKCDSGTYDLSDLENTVIDNLTDLQENNDSLLKIINGSNQPILDTSSFKKQISQIDKKIQKNSDLYLNDFITMDELKDRTDSLQAEKKLLKAKISENKFNDSTDVFELVKTQLGSIPINELSYDNKKKIVNNLVSKVDVTADNVVIIFKFQLA

SEQ ID NO: 2586 - protein, 469 aa, synthetic construct
MCYTTPVRAAVYLRISEDRSGEQLGVARQREDCLKLCDQRKWVPVEYLDNDVSASTSKRRPAYEQMLADITAGKIAAVVAWDLDRLHRRPIELEAFMSLADEKRLALATVAGDVDLATPQGRLVARLKGSVAAHETEHKKARQRRAARQKAERGQPNWSKAFGYLPGPNGPEPDPRTAPLVKQAYADILAGASLGDVCRQWNDAGAFTITGRPWTSTTLSKFLRKPRNAGLRAYKGARHGPVDRDAIVGKAQWSPLVDEATFWAAQAVLDAPGRAPGRKSVRRHLLTGLAGCGKCGNHLAGSYRTDGRVVYVCKACHGVAILADNIVPILYHIVAERLAMPDAVDLLRREIHDAAEAETIRLELETLYGELDRLAVERAEGLLTARQVKICTDIVNAKITKLQARQLDQERLRVLDGIPLGTPQVAGKIAELSPDRFRAVLDVLAEVVVQPVGRGGRIFNPERVQVNWR

SEQ ID NO: 2587 - protein, 469 aa, synthetic construct
MCYTTPVRAAVYLRISEDRSGEQLGVARQREDCLKLCDQRKWVPVEYLDNDVSASAGKRRPAYEQMLADITAGKIAAVVAWDLDRLHRRPIELEAFMSLADEKRLALATVAGDVDLATPQGRLVARLKGSVAAHETEHKKARQRRAARQKAERGHPNWSKAFGYLPGPNGPEPDPRTAPLVEQAYADILAGASLGDVCRQWNGAGALTITGRPWTTTTLSKFLRKPRNAGLRAYKGARYGPVDRDAIVGKAQWSPLVDEATFWAAQAVLDAPGRAPGRKSVRRHLLTGLAGCGKCGNHLAGSYRTDGRVVYVCKACHGVAILADNIEPILYHIVAERLAMPDAVDLLRREIHDVAEAETIRLELETLYGELDRLAVERAEGLLTARQVKISTDIVNAKIAKLQARQQDQERLRVLDGIPLGTPQVAGMIVELSPDRFRAVLDVLAEVVVQPVGKGGRIFNPERVQVNWR

SEQ ID NO: 2588 - protein, 452 aa, synthetic construct
MKAAIYIRVSTREQVENYSIQAQTEKLTALCRSKGWDVYDIFIDGGYSGSDMNRPALNEMLSKLHEIDAVVVYRLDRLSRNQRDTITLVEEYFLKHNVEFVSLSETLDTSSPFGRAMIGILSVFAQLERETIRDRMVMGKIKRIEAGLPLTTAKGRTFGYDVIDTKLYINEEEAKQLQLIYDIFEEEQSITSLQKRLKKLGFKVRTYNRYNNWLTNDLYCGYVSYKDKVHVKGIHEPIISEEQFYRVQEIFTRMGKNPNMNRDSASLLNSLVVCSKCGLSFVHRSKDTMSRGKKYHYRYYSCKTYKHTHELEKCGNKTWRADKLEELIINRVNNYSFAGRNVDKEDELDSLNEKLKIEHAKKKRLFDLYINGSCEMSELDSMMNDIDAQINYYESQIEANEELKKNKKIQENLANLATVDFDSLEFREKQLYLKSLINKIYIDGEQVTIEWL

SEQ ID NO: 2589 - protein, 452 aa, synthetic construct
MKAAIYIRVSTREQVENYSIQAQTEKLTALCRSKDWDVYDIFIDGGYSGSNMSRPALSEMLSKLHEIDAVVVYRLDRLSRSQRDTITLIEEYFLKNDVEFVSLSETLDTSSPFGRAMIGILSVFAQLERETIRDRMVMGKIKRIEAGLPLTTAKGRTFGYDVIDTKLYINEEEAKQLQLIYDIFEEEQSITFLQKRLKKLGFKVHTYNRYNNWLTNDLYCGYVSYKDIVHVKGIHEPIISEEQFYRVQEIFTRMGKNPNMNRDSASLLSNLVVCSKCGLGFVHRRKDTMSRGKKYHYRYYSCKTYKHTHELEKCGNKIWRADKLEELIVNRVNNYSFASRNVDKEDELDSLNEKLKIEHAKKKRLFDLHINGNYEVSELDSMMNDIDTQINYYESQIEANEELKKDKRIQKNLADLATVDFDSLEFREKQLHLKSLINKIYIDGEQVTIEWL

SEQ ID NO: 2590 - protein, 452 aa, synthetic construct
MKAAIYIRVSTQEQVGNYSIQAQTEKLTALCRSKDWDVYDIFIDGGYSGSNMNRPALNEMLSKLHEIDAVVVYRLDRLSRSQRDTTTLIEEYFLKNNVEFVSLSETLDTSSPFGRAMIGILSVFAQLERETIRDRMVMGKIKRIEAGLPLTTAKGRTFGYDVIDTKLYINEEEAKQLQLIYDIFEEEQSITFLQKRLKELGFKVRSYNRYNSWLTNDLYCGYVSYKDKVHVKGIHEPIISEEQFYRVQEIFTRMGKNPNMNRDSASLLNSLVVCSKCGLGFVHRSKDTMSRGKKYHYRYYSCKTYKHTHELEKCGNKTWRADKLEELIISRVNNYSFASRSVDKEDELDSLNEKLKIEHAKRKRLFDLYINGSYEVSELDSMMNDIDAQINYYEGQIVANEELKKNKRIQENLADLATADFDSLEFREKQLYLKSLINKIYIDGEQVTIEWL

SEQ ID NO: 2591 - protein, 452 aa, synthetic construct
MKAAIYIRVSTREQVENYSIQAQTEKLTALCRSKDWDVYDIFIDGGYSGSNMNRPALNEMLSKLHEIDAVVVYRLDRLSRSQRDTITLIEEYFLKNNVEFVSLSETLDTSSPFGRAMIGILSVFAQLERETIRDRMVMGKIKRIEAGLPLTTAKGRTFGYDVIDTKLYVNEEEAKQLRLIYDIFEEEQSITLLQKRLKELGFKVRTYNRYNSWLTNDLYCGYVSYKDKVHVKGIHEPIISEEQFYRVQEIFARMGKNPNMNRDSASLLNNLVVCGKCGLGFVHRRKDTTSRGKKYHYRYYSCKTYKHTHELEKCGNKIWRADKLEELIINRVNDYSLARRNVDKEGELDSLNEKLKIEHAKKKRLFDLYIKGSYEVSELDSMMNDIDAQINYYESQIEANGELKRNKKIQENLADLVSVDYDSLEFREKQLYLKSLINKIYIDGEQVTIEWL

SEQ ID NO: 2592 - protein, 485 aa, synthetic construct
MTKKVAIYTRVSTTNQAEEGFSIDEQIDRLTKYAEAMGWQVSGTYTDAGFSGAKLERPAMQCLINDIENKAFDTVLVYKLDRLSRSVRDTLYLVKDVFTKNKIDFISLNESIDTSGAVGSLFLTILSAINEFERENIKERMTMGKLGRAKSGKSMMWTKTAFGYYHNRKTGILEIVPLQATIVEQIFTDYLSGISLTKLRDKLNESGHIGKDIPWSYRTLRQTLDNPVYCGYIKFKDSLFEGMHKPIIPYETYLKVQKELEERQQQTYERNNNPRPFQAKYMLSGVARCGYCGAPLRIVLGHKRKDGSRTMKYHCANRFPRKTKGVTVYNDNKKCDSGTYDLSNLENTVIDNLIGFQKNNDSLLKIINGNDQPILDTSSFKKQISQIDKKIQKNSDLYLNDLITMDELKDRTDSLQAEKKLLKAKIIENKFNDSTDVFELVKTQLGSIPINELSYDNKKKIVNNLVSKVDVTADNVDIIFKFQLA

SEQ ID NO: 2593 - protein, 485 aa, synthetic construct
MTKKVAIYTRVSTTNQAEEGFSIDEQVDRLTKYAEAMGWQVSDTYTDAGFSGAKLERPAMQRLINDIENKAFDTVLVYKLDRLSRSVRDTLYLVKDVFTKNKIDFISLNESIDTSSAMGSLFLTILSAINEFERENIKERMTMGKLGRAKSGKSMMWTKTAFGYYHNRKTGILEIVPLQATIVEQIFTDYLSGISLTKLRDKLNESGHIGKDIPWSYRTLRQTLDNPVYCGYIKFKDSLFEGMHKPIIPYETYLKVQKELEKRQQQTYERNNNPRPFQAKYMLSGMARCGYCGAPLKIVLGHKRKDGSRTMRYHCANRFPRKTKGVTVYNDNKKCDSGSYDLSNLENTVIDNLIGFQENNDSLLKIINGNNQPILDTSSFEEQISQIDKKIQKSSDLYLNDFITMDELKDRTDSLQAEKKLLEARISGNKFDDSTDVFELVKTQLGSIPINELSYDNKKKIVNNLVSKVDVTADNVDIIFKFQLA

SEQ ID NO: 2594 - protein, 452 aa, synthetic construct
MKAAIYIRVSTREQVENYSIQAQTEKLTALCRSKDWDVYDIFIDGGYSGSNMNRPALNEMLSKLHEIDAVVVYRLDRLSRSQRDTITLIEEYFLKNNVDFVSLSETLDTSSPFGRAMIGILSVFAQLERETIRDRMVMGKIKRIEAGLPLTTAKGRTFGYDVIDTKLYINEEEAKQLQLIYDIFEEEQSITFLQKRLKKLGFKVRTYNCYNNWLTNDLYCGYVSYKDKVHVKGIHEPIISEEQFYRVQEIFTRMGKNPNMNRDSASLLNNLVVCSKCGLGFVHRRKDIMSRGKKYHYRYYSCKTYKHIHELEKCGNKIWRADKLEELIINRVSNYSLASRNVDKEDELDSLNEKLKIEHAKKKRLFDLYVNGRYEASELDSMMNGIDGQINYYESQIEANDKLKKNKKIQETLADLATVDFDSLEFREKQLYLKSLINKIYIDGEQVTIEWL

SEQ ID NO: 2595 - protein, 485 aa, synthetic construct
MTKKVAIYTRVSTTNQAEEGFSTDEQIDRLTKYAEAMGWQVSDTYTDAGFSGAKLERPAMQRLINDIENKTFDTVLVYKLDRLSRSVRDTLYLVKDVFTKNKIDFISLNESINTSSAMGSLFLTILSAINEFERENIKERMTMGKLGRAKSGKSMMWTRTAFGYYHNRKTGILEIVPLQATIVEQIFTDYLSGISLTKLRDKLNESGHIGKDIPWSYRALRQTLDNPVYCGYIKFKDSLFEGMHKPIIPYETYLKVQKELEERQQQAYERNNNPRPFQAKYMLSGTARCGYCGAPLKVVLGHKRKDGSRTMKYHCANRFPRKTKGVTVYNDNEKCDSGTYDQSNLENTVIDYLIGFQENNDSLLKIINGNNQPILDTSSIKKQISQIDKKIQKNSDLYLNDFITMDELKDRTDSLQAEKKLLEAKISETKFNDSTDVFELVKTQLGSIPINELSYDNKKKIVNNLVSKVDVTADNVDIIFKFQLA

SEQ ID NO: 2596 - protein, 469 aa, synthetic construct
MSYTTPVRAAVYLRISEDRSGEQLGVARQREDCLKLCGQHKWVPVEYLDNDVSASTGKRRPAYEQMLADITAGKIAAVVAWDLDRLHRRPIELEAFMSLADEKRLALATAAGDVDLATPQGRLVARLKGCVAAHETEHKKARQRRAARQKAERGLPNWSRAFGYLPGPNGPEPDPRTAPLVKQAYADILAGASLGDVCRQWNDAGAFTITGRPWTTTTLSKFLRKPRNAGLREYKGARYGPVDRDAIVGKAQWSPLVDEATFWAAQAVLDAPGRAPGRKSVRRHLLTGLAGCGKCGNHLAGSYRTDGQVVYVCKACHGVSILAVNIEPILYHIVTERLATPHAVDLLRREFHDAAEAETTRLELETLYGELDRLAVERAEGLLTARQVKISTDIVNAKITKLLARQLDQERLRVLDGIPLGTPQVAGVIAELSPDRFRAVLDVLAEVVVQPVGRGGRAFNPERVQVNWR

SEQ ID NO: 2597 - protein, 469 aa, synthetic construct
MSYTTPVRAAMYLRISEDRSGEQLGVARQREDCLKLCDQHKWEPVEYLDNDVSASTGKRRPAYEQMLADITAGKIAAVVAWDLDRLHRRPIELEAFMSLADEKRLALATVAGDVDLATPQGRLVARLKGSVAAHETEHKKARQRRAARQKAERGLPNWSKAFGYLPGPNGPEPDPRTAPLVKQAYADILAGASLGDVCRQWNDAGAFTITGRPWTTTTLSKFLRKPRNAGLRAYKGARYGPVDRDAIVGKAQWSPLVDEATFWAAQAVLDAPGRAPGRKSVRRHLLTGLAGCGKCGNHLAGSYRTDGRVVYVCKACHGVAILADNIEPILYHIVAERLAMPDAVNLLRREFHDAAEAETTRLELETLYGELDRLAVERAEGLLTARQVKISTDIVNAKITKLQARQLDQERLRVFDGIPLGTPQVAGMIAELSPDRFRAVLDVLAEVVVQPVGKSGRIFNPERVQVNWR

SEQ ID NO: 2598 - protein, 485 aa, synthetic construct
MTKKAAIYTRVSTTNQAEEGFSIDEQIDRLTKYAEAMGWQVSDTYTDAGFSGAKLERPAMQRLINDIENKAFDTVLVYKLDRLSRSVRDTLYLVKEVFTKNKIDFISLSESIDTSSAMGSLFLTILSAINEFERENIKERMTMGKLGRAKGGKSMMWTKTAFGYYHNRKTGILEIVPLQATIVEQIFTDYLSGVSLTKLRDKLNESGHIGKDIPWSYRTLRQTLDNPVYCGYIKFKGNLFEGMHKPIIPYETYLKVQKELEERQQQTYERNNNPRPFRAKYMLSGMARCGYCGAPLRIVLGHKRKDGSRTMKYHCANRFPRKTKGVTVYNDNKKCDSGTYDLSNLENTVIDNLIGFQENNDSLLKIINGSNQPILDTSSVKKQISQIDKKIQKNSDLYLNDFITMDELKDRTDSLQAEKKLLKAKISENKFNDRTDVFELVKTQLGSIPINELSYDNKKKIVNNLVSKVDVTADNVDIIFKFQLA

SEQ ID NO: 2599 - protein, 485 aa, synthetic construct
MTKKVAIYTRVSTTNQAEEGFSIDEQIDRLTKYAEAMGWQVSGTYTDAGSSGAKLERPAMQRLINDIENKAFDTVLVYKLDRLSRSVRDTLYLVKDVFTKNKIDFVSLNESIDTSSAMGSLFLTILSAINEFERENIKERMTMGKLGRAKSGKSMMWTKTAFGYYHNRKTGILEIVPLQATIVEQIFTDYLSGISLTKLRDKLNESGHIGRDIPWSYRTLRQTLDNPVYCGYIKFKGSLFEGMHKPIIPYETYLKVQKELEERQQQTYERNNNPRPFQAKYMLSGMARCGYCGAPLKIVLGHKRKDGSRTMKYHCANRFPRKTKGVTVYNDNRKCDSGTYDLSNLENTVIDNLIGFQENNDSLLKIINGNNQPIQDTSSFKKQISQIDKKIQKNSDLYLNDFITMDELKNRTDSLQAEKKLLEAKISENKFNDSTDVFELVKTQLGSIPINELSYDNKKKIVNNLVSKVDVTADNVDIIFKFQLA

SEQ ID NO: 2600 - protein, 469 aa, synthetic construct
MSYTTPVRAAVYLRISEDRSGEQLGVARQREDCLELCDQRKWVPVEYLDNDVSASTGKRRPAYEQMLADITAGKIAAVVAWDLDRLHRRPIELEAFMCLADEKRLALATVAGDVDLATPQGRLVARLKGSVAAHETEHKKARQRRAARQKAERGHPNWSKAFGYLPGPNGPEPDPRTAPLVKQAYADILAGASLGDVCRQWNDAGAFTITGRPWTTTTLSKFLRKPRNAGLRAYKGARYGPVDRDAIVGKAQWSPLVDEATFWAAQAVLDAPGRAPGRKSVRRHLLTGLAGCGKCGSHLAGSYRTDGRVVYVCKACHGVAILADNIVPILYHIVAERLAKPDAVDLLRREIHDAAEAETIRLELETLYGELDRLAVERAEGLLTARQVKISSDIVDAKITKLQARQLDQERLRVFDGIPLGTPQVAGMIAELSPGRFRAVLDVLAEVVVQPVGKSGRIFNPERVQVNWR

SEQ ID NO: 2601 - protein, 469 aa, synthetic construct
MSYTTPVRAAVYLRISEDRSGEQLGVARQREDCLKLCGQRKWVPVEYLDNDVSASTGKRRPAYEQMLADITAGKIAAVVAWDLDRLHRRPIELEAFMSLADEKRLALATVAGDVDLATPQGRLVARLKGGVAAHETEHKKARQRRAARQKAERGLPNWSKAFGYLPGLNGPEPDPRTAPLVKQAYADILAGASLGDVCRQWNGAGAFTITGRPWTTTALSKFLRKPRNAGLRTYKGVPYGPVDRDAIVGKAQWSPLVDEATFWAAQAVLDAPGRAPGRKSVRRHLLTGLAGCGKCGNHLAGSYRTDGRVVYVCKACHGVAILADNIEPILYHIVAERLAMPDAVDLLRRGIHDAAEAETIRLELETLYGELDRLAVERAEGLLTARQVKICTDIVNGKISKLQARQLDQERLRVLDGIPLGTPQVAGKIAELSPDRFRAVLDVLAEVVVQPVGKSGRIFNPERVQVNWR

SEQ ID NO: 2602 - protein, 452 aa, synthetic construct
MKAAIYIRVSTREQVENYSIQAQTEKLTALCRSKDWDVYDIFIDGGYSGSNMNRPALSEMLSKLHEIDAVVVYRLDRLSRSQRDTITLIEEYFLKNNVEFVSLSETLDTSSPFGRAMIGVLSVFAQLERETIRDRMVMGKIKRIEAGLPLTTAKGRTFGYDVIDTKLYINEEEAKQLQLIYDIFEEEQSITFLQKRLKKLGVKVRTYNRYNNWLTNDLYCGYVSYKDKVHVKGIHEPIISEEQFYRVQEIFARMGKSPNMNRDSASLLNNLVVCSKCGLSFVHRRKDTTSRGKKYHYRYYSCKTYKHIHELEKCGNKIWRADKLEELVINRVNNYSSASRNVGKEDELDSLNEKLKIEHAKRKRLFDLYINGSYEVSELDSMMNDIDAQINYYESQIGANEELKKDKKIQESLANLATVDYDSLEFREKQLYLKSLINKIYIDGEQVTIEWL

SEQ ID NO: 2603 - protein, 452 aa, synthetic construct
MKAAIYIRVSTREQVENYSIQAQTEKLTALCRSKDWDVYDIFIDGGYSGSNMNRPALNEMLSKLHEIDAVVVYRLDRLSRSQRDTITLIEEYFLKNNVEFVSLSETLDTSSPFGRAMIGILSVFAQLERETIRDRMVMGKIKRIEAGLPLTTAKGRTFGYDVIDTKLYINEEEAKQLRLIYDIFEEEQSITFLQRRLKKLGFKVRTYNRYYNWLTNDLYCGYVSYKDKVHVKGIHEPIISEEQFYRVQEIFTRMGKNPNMNRDSASLLNNLVVCSKCGLGFVHRRKDTTSRGKKYHYRYYSCKTYKHIHELEKCGNKIWRADKLEELIINRVSNYSFASRNVDKEDELDSLNEKLKIEHAKKKRLFDLYINGSYEMSELDSMMNDIDAQINYYESQIEANEELKKNKKIQENLAELATVDFDSLEFREKQLYLKSLINKIYIDGEQVTIEWL

SEQ ID NO: 2604 - protein, 452 aa, synthetic construct
MKAAIYIRVSTREQVENYSIQAQTEKLTALCRSKDWDVYDIFIDGGYSGSNMNRPALNEMLSKLHEIDAVVVYRLDRLSRSQRDTITLIEEYFLKNNVEFVSLSETLDTSSPFGRAMIGILSVFAQLERETIRDRMVMGKIKRIEAGLPLTTAKGRTFGYDVIDTKLYINEEEANQLQLIYDIFEEEQSITLLQKRLKKLGFKVRTYNCYNNWLTNDLYCGYVSYKDKVHVKGIHEPIISEEQFYRVQEIFTRMGENPNMNRDSASLLNNLVVCSKCGLGFVHRRKDTVSRGKKYHYRYYSCRTYKHIHELEKCGNKIWRADKLEELIINRVDNYSFASRNVDKEDELDGLNEKLKIEHAKKKRLFDLYINGSYEVSELDSMMNDIDAQISYYESQIEANEELKKNKKIQENLANLATVDYDSLEFREKQLYLKSLINKIYIDGEQVTIEWL

SEQ ID NO: 2605 - protein, 469 aa, synthetic construct
MSYITPVRAAVYLRISEDRSGEQLGVARQREDCLKLCDQRKWVPVEYLDNDVSASTGKRRPAYEQMLADITAGKIAAVVAWDLDRLHRRPIELEAFMGLADEKRLALATVAGDVDLATPQGRLVARLKGSVAAHETEHKRARQRRAARQKAERGLPNWSKAFGYLPGPNGPEPDPRTAPLVKRAYADILAGASLGDVCRRWNDAGAFTITGRPWTTTTLSKFLRKPRNAGLRAYRGARYGPVDRDAIVGRAQWSPLVDEATFWAAQAVLDAPGRAPGRKSVRRHLLTGLAGCGKCGNHLAGSYRTNGKVVYVCKACHGVAILADNIEPILYHIVAERLAMPDAVDLLRREFHDAAEAETIRLELETLYGELDRLAVERAEGLLTARQVKISTDIVNAKIAKLQARQLDQERLRVFDGIPLGTPQVADMIAELSPDRFRAVLDVLAEVVVQPVGKSGRVFNPERVQVNWR

SEQ ID NO: 2606 - protein, 469 aa, synthetic construct
MCYTTPVRAAVYLRISEDRSGEQLGVTRQREDCLKLCDQRKWVPVEYLDNDVSASTGKRRPAYEQMLADITAGKIAAVVAWDLDRLHRRPIELEAFMSLADEKRLALATVAGDVDLATPQGRLVARLKGSVAAHETEHKKARQRRAARQKAERGHPNWSKAFGYLPGPNGPEPDPRTAPLVKQAYADILAGASLGDVCRQWNGAGAFTITGRLWTTTTLSKFLRKPRNAGLRAYKGARYGPVDRDAIVGKAQWSPLVDEATFWAAQAVLDAPGRAPGRKSVRRHLLTGLAGCGKCGNHLAGSYRTDGRVVYVCKACHGVAILADNIEPILYHIVVERLAMPDAVDLLRREIHDAAEAETIRLELETLYDELDRLAVERAEGLLTARQVKIGTDIVNAKITKLQARQLDQERLRVFDGIPLGTPQVAGMIAELSPDRFRAVLDVLAEVVVQPVGKGGRVSNPERVQVNWR

SEQ ID NO: 2607 - protein, 452 aa, synthetic construct
MKAAIYIRVSTQEQVGNYSIQAQTEKLTALCRSKDWDVYDIFVDGGYSGSNMNRPALNEMLSKLHEIDAVVVYRLDRLSRSQRDTTTLIEEYFLKNNVEFVSLSETLDTSSPFGRAMIGILSVFAQLERETIRDRMVMGKIKRIEAGLPLTTAKGRTFGYDVIDTKLYINEEEAKQLRLIYDIFEEEQSITSLQKRLKRLGFKVRTYNRYNNWLTNDLYCGYVSYKDKVHVKGIHEPIISEEQFYRVQEIFTRTGKNPNMNRDSASLLNNLVVCSKCGLGFVHRSKDTMSRGKKYHYRYYSCKTYKHTHELEKCGNKTWRADKLEELVINRVNNYSFASRNVDKEDELDSLNEKLEVEHAKKKRLFDLYINGSYEVSELDSMMNDIDAQINYYESQIGANEELKRNKKIQENLADLATVDFDSLEFREKQLYLKSLINKIYIDGEQVTIEWL

SEQ ID NO: 2608 - protein, 469 aa, synthetic construct
MSYTTPVRAAVYLRISEDRSGEQLGVVRQREDCLKLCGQRKWVPVEYLDNDVSASTGKRRPAYEQMLADITAGKIAAVVAWDLDRLHRRPIELEAFMSLADEKRLALATVAGDVDLATPQGRLVARLKGSVAAHETEHKKARQRRAARQKAERGHPNWSKAFGYLPGPNGPEPDPRTAPLVKQAYADVLAGASLGDVCRQWNDAGAFTITGRPWTITTLSKFLRKPRNAGLREYKGARYGPVDRDAIVGKAQWSPLVDEATFWAAQAVLDAPGRAPGRKSVRRHLLTGLAGCGKCGNHLAGSYRTDGRVVYVCKACHGVAILADNIEPILYHIVAERLAMPDAVDLLRREIHDAAEAETIRLELETLYGELDRLAVERAEGLLTARQVKISTDIVNAKITKLQARQLDQERLRVLDGIPLGTPQVAGMIAELSPDRFRAVLDVLAEVVVQPVGKSGRVFNPERVQVNWR

SEQ ID NO: 2609 - protein, 469 aa, synthetic construct
MSYTTPVRAAVYLRISEDRSGEQLGVARQREDCLKLCNQRKWVPVEYLDNDVSASTGKRRPAYEQMLADITAGKVAAVVAWDLDRLHRRPMELEAFMSLADEKRLALATVAGDIDLATPQGRLVARLKGSVAAHETEHKKARQRRAARQKAERGHPNWSKAFGYLPGPNGPEPDPRTAPLVKQAYADILAGASLGDVCRRWNDAGAFTITGRPWTTTTLSKFLRKPRNAGLRAYKGARYGPVDRDAIVGKAQWSPLVDEATFWAAQAVLDAPGRAPGRKSVRRHLLTGLVGCGKCGNHLAGSYRTDGRVVYVCKTCHGVTILADNIEPILYHIVAERLAMPNAVDLLRREVYDAAEAETTRLELETLYGELDRLAVERAEGLLTARQVKISTDIVNAKITELQARQLDQERLRVFNGIPLGTPQVAGMIAALSPDRFRAVLDVLAEVVVQPVGKSGRVFNPERVQVNWR

SEQ ID NO: 2610 - protein, 452 aa, synthetic construct
MKAAIYIRVSTQEQVGNYSIQAQTEKLTALCRSKDWDVYDIFVDGGYSGSNMNRPALNEMLSKLQEIDAVVVYRLDRLSRSQRDTTTLIEEYFLKNNVEFVSLSETLDTSSPFGRAMIGILSVFAQLERETIRDRMVMGKIKRIEAGLPLTTAKGRTFGYDVIDTKLYINEEEAKQLQLIYDIFEEEQSITSLQKRLKKLGLKVRTYNRYNSWLTNDLYCGYVSYKDKVHVKGIHEPIISEEQFYRVQEIFTRMGKNPNMNRDSASLLNNLVVCSRCGLGFVHRSKDTMSRGKKYHYRYYSCKTYKHTHELEKCGNKIWRADKLEELIINRVSNYSFVSRNVYKEDELDSLNEKLKVEHAKKKRLFNLYINGSYEVSELDSLMNDIDAQINYYKSQIEANEELKKNKKIQENLANLATVDFDSLEFREKQLYLKSLINKIYIDGEQVTIEWL

SEQ ID NO: 2611 - protein, 485 aa, synthetic construct
MTKKVAIYTRVSTTNQAEEGFSIDEQTDRLTKYAEAMGWQVSDTYTDAGFSGAKLGRPAMQRLINDIENKAFDTVLVYKLDRLSRSVRDTLYLVKDVFTKNKIDFISLNESIDTSSAMGSLFLTILSAINEFERENIKERMTMGKLGRAKSGKSMMWTKTAFGYYHNRKTGILEIVPLQATIVEQIFTDYLSGISLTKLRDKLNESGHIGKDIPWSYRTLRQTLDNPVYCGYIKFKGRLFEGMHKPIIPYETYLKVQKELEERQQQTYERNNNPRPFQAKYMLSGMARCGYCGAPLRIVLGHKRKDGSRTMKYHCANRFPRKTKGITVYNDNKKCDSGTYDLSNLENTVIDNLIGFQENNDSLLKIINGNNQPILDTSSFKKQISQIDKKIQRNSDLYLNDFITMDELKDRTDSLQAEKKLLKAKISENKFNDSTDVFELVKAQLGSIPINELSYDNKKKIVNNLVSKVDVTADNVDIIFKFQLA

SEQ ID NO: 2612 - protein, 452 aa, synthetic construct
MKAAIYIRVSTREQVENYSIQAQTEKLTALCRSKDWDVYDIFVDGGYSGSNMNRPALNEMLSKLHEIDAVVVYRLDRLSRSQRDTITLIEEYFLKNNVEFVSLSETLDTSSPFGRAMIGILSVFAQLERETIRDRMVMGKIKRIEAGLPLVTAKGRTFGYDVIDTKLYINEVEAKQLQLIYDIFEEEQSITFLQKRLKKLGFKVRSYNRYNNWLTNDLYCGYVSYKDKVHVKGIHEPIISEEQFYRVQEIFARMGKNPNMNRDSASLLNGLVVCSKCGLGFVHRRKDTMSRDKKYHYRYYSCKTYKHIHELEKCGNKIWRADKLEELIINRVSNYSIASRSVDKEGELDRLNEKLKIEHAKKKRLFDLYINGSYEVSELDSMMNDIDAQINYYESQIEANEELKRNKKIQESLADLATVDFDSLEFREKRRYLKSLINKIHIDGEQVTIEWL

SEQ ID NO: 2613 - protein, 469 aa, synthetic construct
MCYTTPVRAAVYLRISEDRSGEQLGVARQREDCLKLCDQRKWEPVEYLDNDVSASTGKRRPAYEQMLADITAGKIAAVVAWDLDRLHRRPIELEAFMSLADEKRLALATVAGDVDLATPQGRLVARLKGSVAAHETEHKKARQRRAARQKAERGYPNWSRAFGYLPGPNGPEPDPRTAPLVKQAYADILAGASLGDVCRQWNDAGAFTITGRPWTTTTLSKFLRKPRNAGLRAYRGARYGPVDRDAIVGKAQWSPLVDEATFWAAQAVLDAPGRAPGRKSVRRHLLTGLAGCGKCGNHLAGSYRTDGRVVYVCKACHGVSILADNIEPILYHIVAERLAMPDAVDLLCREIHDAAEVETIRLELETLYGELDRLAVERAEGLLTARQVKISTDIVNAKITKLQARQLDQERLRVFGGIPLGTPQVAGMIAELSPDRFRAVLDVLAEVVVQPVGKSGRTFNPERVQVNWR

SEQ ID NO: 2614 - protein, 469 aa, synthetic construct
MNYTTPVRAAVYLRISEDRSGEQLGVARQREDCLKLCGQRKWVPVEYLDNDVSASTGKHRPAYEQMLADITAGKIAAVVAWDLDRLHRRPIELEAFMSLADEKRLALATVAGDVDLATPQGRLVARLKGSVAAHETEHKKARQRRAARQKAERGLPNWSKAFGYLPGPNGPEPDPRIAPLVKQAYADILAGASLGDVCRQWSDAGAFTITGRPWTTTALSKFLRKPRNAGLRAYKGARYGPVDRDAIVGKAQWSPLVDEATFWAAQAVLDAPGRAPGRKSVRRHLLTGLAGCGKCGNHLAGSYRTDGRVVYVCKACHGVTILADNIEPILYHLVAERLAMPDAVDLLRCEIHDVAGAETIRLELETLYGELDRLAVERAEGLLTARQVKISTDIVNAKIAKLQARQLDQGRLRVFDGIPLGTPQVAGMIAELSPDRFRAVLDVLAEVVVLPAGKRGRIFNPERVQVNWR

SEQ ID NO: 2615 - protein, 452 aa, synthetic construct
MKAAIYIRVSTREQVENYSIQAQTEKLTALCRSKDWDVYDIFIDGGYSGSNMNRPALNEMLSKLHEIDAVVVYRLDRLSRSQRDTITLIEEYFLKNNVEFVSLSETLDTSSPFGRAMIGILSVFAQLERETIRDRMVMGKIKRIEAGLPLTTAKGRTFGYDVIDTKLYINEEEAKQLQLIYDIFEEEQSITFLQKRLKRLGFKVHTYNRYNNWLTNDLYCGYVSYKDKVHVKGIHEPIISEEQFYRVQEIFTRMGKNPNMNRDSASLLSNLVVCSKCGLGFVHRRKDTMSRGKKYHYRYYSCKTYKHTHELEKCGNKIWRADKLEELIISRVNNYSLASRNVDKEDELDSLNEKLKIEHAKKKRLFDLYINGSYEVSELDSMMDDIDAQINYYESQIEANGGLRRNKKIQENLADLASVDYDSLEFREKQLYLKSLINKIYIDGEQVTIEWL

SEQ ID NO: 2616 - protein, 452 aa, synthetic construct
MKAAIYIRVSTREQVENYSIQAQTGKLTALCRSKDWDVYDIFIDGGYSGSNMNRPALNEMLSKLHEIDAVVVYRLDRLSRSQRDTITLIEEYFLKNNVEFVSLSETLDTSSPFGRAMIGILSVFAQLERETIRDRMVMGKIKRIEAGLPLTTAKGRTFGYDVIDTKLYINEEEAKQLQLIYDIFEEEQSITLLQKRLKKLGFKVRTYNRYNNWLTNDLYCGYVSYKDKVHVKGIHEPIISEEQFYRVQEIFTRMGKNPNMNRDSASLLNNLVVCSKCGLGFVHRRKDAISRDKKYHYRYYSCKTYKHIHELEKCGNKIWRADKLEELVINRVNNYSFASRNADKEDELDSLNEKLKIEHAKKKRLFDLYVNGSYEVSELDSMMNDINAQINYYESQIEANEELKRNKKIQENLADLAAVDFDGLEFREKQRYLKSLINKIYIDGEQVTIEWL

SEQ ID NO: 2617 - protein, 485 aa, synthetic construct
MTKKVAIYTRVSTTNQAEEGFSIDEQIDRLTKYAEAMGWQVSDTYTDAGLSGAKLERPAMQRLINDIENKAFDTVLVYKLDRLSRSVRDTLYLVKDVFTKNKIDFISLNESIDTSSAMGSLFLTILSAINEFERENIKERMTMGKLGRAKSGKSMMWTKTAFGYYHNRRTGTLEIVPLQATIVEQIFTDYLSGISLTKLRDKLNESGHIGKDIPWSYRTLRQTLDNPVYCGYIKFKDSLFEGMHKPIIPYETYLRVQKELEERQQQTYERNNNPRPFQAKYMLSGMARCGYCGAPLRIVLGHKRKDGSRTMKYHCANRFPRKTKGVTVYNENKKCDSGTYDLSNLENAVIDHLIGFQENNDSLLKIINGNNQPILNTSSIKKQISQIDKKIQKNSDLYLNDFITMDELRDRTDSLQAEKKLLEAEISESRFNDSTDVFELVKTQLGSIPINELSYDNKKKIVNNLVSKVDVTADNVDIIFKFQLA

SEQ ID NO: 2618 - protein, 469 aa, synthetic construct
MSYTTPVRAAVYLRISEDRSGEQLGVARQREDCLKLCGQRKWEPVEYLDNDVSASTGKRRPAYEQMLADITAGKIAAVVAWDLDRLHRRPIELEAFMSLADEKRLALATVAGDVDLATPQGRLVARLKGSVAAHETEHKKARQRRAARQKAERGYPNWSKAFGYLPGPNGPEPDPRTAPLVKQAYADILAGASLGDVCRQWNGAGAFTITGRPWTTTTLSKFLRKPRNAGLRAYKGAPYGPVDRDAIVGKAQWSPLVDEATFWAAQAVLDAPGRAPGRKSVRRHLLTGLAGCGKCGNHLAGSYRTDGRVVYVCKACHGVAILADNIEPILYHIVAERLAMPDAVDLLRREIHDAAEAEAIRLELETLHGELDRLAVERAEGLLTARQVKISTDIVSAKITKLQTRQLDQERLRVLDGIPLGTPQVAGVIAELSPDRFRAVLDVLAEVVVQPVGKSGGIFNPERVQVNWR

SEQ ID NO: 2619 - protein, 452 aa, synthetic construct
MKAAIYIRVSTQEQVGNYSIQAQTEKLTALCRSKDWDVYDIFVDGGYSGSNMNRPALNEMLSKLHEIDAVVVYRLDRLSRSQRDTTTLIEEYFLKNNVEFVSLSETLDTSSPFGRAMIGILSVFAQLERETIRDRMVMGKIKRIEAGLPLTTAKGRTFGYDVIDTKLYINEEEAKQLQLIYDIFEEEQSITFLQKRLKKLGFKVRTYNRYNSWLTNDLYCGYVSYKDKVHVKGIHEPIISEEQFYRVQEIFTRMGKNPNMNRDSASLLNNLVVCSKCGLGFVHRSKDTMCRGKKYHYRYYSCKTYKHTHELEKCGNKTWRADKLEELIINRVNDYSFASRNADKEDELDSLNEKLKVEHGKKKRLFDLYINGSYEVSELDSMMNDIDAQINYYESQIEANEELRRNKKIQENLADLATVDFDSLEFREKQLYLKSLINKIYIDGEQVTIEWL

SEQ ID NO: 2620 - protein, 469 aa, synthetic construct
MSYTTPVRAAVYLRISEDRSGEQLGVARQREDCLKLCDQRRWVPVEYLDNDVSASTGKRRPAYEQMLADITAGKIEAVVAWDLDRLHRRPIELEAFMSLADEKRLALATVAGDVDLATPQGRLVARLKGCVAAHETEHKKARQRRAARQKAERGHPNWSKAFGYLPGPDGPEPDPRTAPLVEQAYADILAGASLGDVCRQWNDAGAFTITGRPWTTTTLSKFLRKPRNAGLRAYKGARYGPVDRDAIVGRAQWSPLVDEATFWAAQAVLDAPGRAPGRKSVRRHLLTGLASCGKCGNHLAGSYRTDGRVVYVCKACYGIAILADNIEPILYHIVAERLAMPDAVDLLCREIHDAAEAETIRLELETLCGELDRLAVERAEGLLTARQVKISTDIVNAKITRLQARQLDQERLRVLDGIPLGTPQVAGVIAELSPDRFRAVLDVLAEVVVQPVGKSGRTFSPERVQVNWR

SEQ ID NO: 2621 - protein, 485 aa, synthetic construct
MTKKVAIYTRVSTTNQAEEGFSIDEQIDRLTKYAEAMGWQVSDTYTDAGISGAKLERPAMRRLINDIENKAFDTVLVYKLDRLSRSVRDTLYLVKDVFTRNKIDFISLNESIDTSSAMGSLFLTILSAINEFERENIKERMTMGKLGRAKSGKSMMWTKTAFGYYHNRKTGILEIVPLQATIVEQIFTDYLSGISLTKLRDKLNESGHIGKDIPWSYRTLRQTLDNPVYCGYIKFRGNLFEGMHKPIIPYETYLKVQKELEERQQQTYERNNNPRPFQAKYMLSGTARCGYCGAPLRIVLGHKRKDGSRTMKYHCANRFPRRTKGVTVYNDNKKCDSGTYDLSNLENTVIDYLIGFQEDNDSLLKIINGNNQPILDTSSFKKQISQIDKKIQKNSDLYLNDLITMDELKDRTDSLQAEKKLLKAKISENKFNDSTDVFELVKTQLGSIPINELSYDNKKKIVNNLVSKVDVTADNVDIIFKFQLV

SEQ ID NO: 2622 - protein, 452 aa, synthetic construct
MKAAIYIRVSTQEQVENYSIQAQTEKLTALCRSKDWDVYDIFIDGGYSGSNMNRPALNEMLSKLHEIDAVVVYRLDRLSRSQRDTITLIEEYFLKNNVEFVSLSETLDTSSPFGRAMIGILSVFAQLERETIRDRMVMGKIKRIEAGLPLTTAKGRTFGYDVIDTKLYINEEEAKQLQLIYDIFEEEQSITFLQKRLKKLGFKVRTYSCYNNWLTNDLYCGYVSYKDKVHVKGIHEPIISEEQFYRVQEIFTRMCKNPNMNRDSASLLNNLVVCSKCGLGFVHRRKDTMSRGKKYHYRYYSCKTYKHIHELEKCGNKIWRADKLEELIIDRVNNYSFASRNVDKEDALGSLSEKLKIEQAKKKRLFDLYINGSYEVSELDSMMNDIDAQINYYESQIEANEELKKNKKTQENLADLATVDYDSLEFREKQLYLKSLINKIYIDGEQVTIEWL

SEQ ID NO: 2623 - protein, 452 aa, synthetic construct
MKAAIYIRVSTREQVENYSIQAQTEKLTALCRSKDWDVYDIFIDGGYSGSNMNRPALNEMLSKLHEIGAVVVYRLDRLSRSQRDTITLIEEYFLKNNVEFVSLSETLDTSSPFGRAMIGILSVFAQLERETIRDRMVMGKIKRIEAGLPLTTAKGRTFGYDVIDTKLYINEEEAKQLQLIYDIFEEEQSITFLQKRLKKLGLKVRTYSCYNNWLTNDLYCGYVSYKDKVHVKGIHEPIISEEQFYRVQEIFTRMGKNPNMNRDSASLLSNLVVCSKCGLGFVHRRKDTMSRGKKYHYRYYSCKTYKHIHELEKCGNKIWRADKLEELIINRVNNYSFASRNVDKEDELDSLNEKLKTEHAKKRRLFDLYINGSYEVSELDSMMNDIDAQIDYYESQIEANEELRRNKKIQENLAQLATVDYDSLEFREKQLYLKGLINKIYIDGEQVTIEWL

SEQ ID NO: 2624 - protein, 452 aa, synthetic construct
MKAAIYIRVSTREQVENYSIQAQTEKLTALCRSKDWDVYDIFIDGGYSGSNMNRPALNEMLSRLHEIDAVVVYRLDRLSRSQRDTITLIEEYFLKNSVEFVSLSETLDTSSPFGRAMIGILSVFAQLERETIRDRMVMGKIKRIEAGLPLTTAKGRTFGYDVIDTKLYINEEEAKQLQLIYDIFEEEQSITFLQKRLKKLGFRVRTYNCYNNWLTNDLYCGYVSYKDKVHVKGIHEPIISEEQFYRVQEIFTRMGKNPNMNRDSASLLNNLVVCSKCGLGFVHRRKDAMSRDKKYHYRYYSCKTYKHIHELEKCGNKIWRADKLEELIINRVNNYSLASRNVDKEDELDSLNEKLKGEHAKKKRLFDLYINGSYEVSELDSMMNDIDAQINYYESQIEANEELRKSKRIQENLAYLATVDFDSLEFREKQLYLKSLINKIYIDGEQVTIEWL

SEQ ID NO: 2625 - protein, 485 aa, synthetic construct
MTKKVAIYTRVSTTNQAEEGFSIDEQIDRLTKYAEAMGWQVSDTYTDAGFSGAKLERPAMQRLINGIENKAFDTVLVYKLDRLSRSVRDTLHLVKDVFTKNKIDFISLSESIDTSSAMGSLFLTILSAINEFERENIKERMTMGKLGRAKSGKSMMWTKTAFGYYHNRKTGILEIVPLQATIVEQIFTDYLSGISLTKLRDKLNESGHIGKDIPWSYRTLRQTLDNPVYCGYIKFKDSLFEGMHKPIIPYETYLKVQKELEERQQQTYERNNNPRPFQAKYMLSGMARCGYCGAPLKIVLGHKRKDGSRTMKYHCADRFPRKTKGVTVYNDNKKCDSGTYDLSNLENTVIANLIGFQENNDSLLKIINGNNQPILDTSSFKEQISQIDKKIQKNSDLYLNDFITMDELKDRTDSLRAEKKLLKAKISENKFNDSTDVFELVKTQLGSIPINELSYDNKKKIVNSLVSKVDVTADSVDIIFKFQLA

SEQ ID NO: 2626 - protein, 485 aa, synthetic construct
MTKKVAIYTRVSTTNQAEEGFSIDEQVDRLTRYAEAMGWQVSDTYTDAGFSGAKLERPAMQRLINDIENRAFDTVLVYKLDRLSRSVRDTLYLVKDVFTKNKIDFISLNESIDTSSAMGSLFLTILSAINEFERENIRERMTMGKLGRAKSGKSMMWTKTAFGYYHNRKTGILEIVPLQATIVEQIFTDYLSGISLTKLRDKLNESGHIGKDIPWSYRTLRQTLDNPVYCGYIRFKDSLFEGMHKPIIPYETYLKVQKELEERQQQAYERNNNPRPFQAKYMLSGMARCGYCGAPLRVVLGHKRKDGSRTMKYHCANRFPRKTKGVTVYNDNKKCDSGTYDLSNLENTVIGNLIGLQENHDSLLKVINGNNQPILDTSSFKKQISQIDKKIQKNSDLYLNDFITMDELKDRTDSLQAEKKLLKAKISENKFNDSTDVLELVKTQLGSIPINELSYDNKKKIVNNLVSKVDVTADNVDIIFKFQLA

SEQ ID NO: 2627 - protein, 485 aa, synthetic construct
MTKKVAIYTRVSTTNQAEEGFSIDEQIDRLTKYAEAMGWQVSDTYTDAGFSGAKLERPAMQRLINDIENRAFDTVLVYKLDRLSRSVRDTLYLVKDVFTKNKIDFISLNESIDTSSAMGSLFLTILSAINEFERENIKERMTMGKLGRAKSGKSMMWTKTAFGYYHNRKTGILEIVPLQATIVEQIFTDYLSGTSLTKLRDKLNESGHIGKDIPWSYRTLRQTLDNPVYCGYIKFKDSLFEGMHKPIIPYETYLKVQKELEERQQQTYERNNNPRPFQAKYMLSGMARCGYCGAPLKIVLGHKRKDGSRTMKYHCANRFPRKTKGVTVYNDNKKCDSGTYDLSSLENTVIDNLIGFQENNDSLLKIINGNNQPILDTSSFKKQISQIDKEIQKNSDLYLNDFITMDELKDRTDSLQAEKKLLKAKICENKSNDSTDVLELVKTQLGSIPINELSYGDKKKIVNNLVSKVDVTADNVDIIFKFQLA

SEQ ID NO: 2628 - protein, 485 aa, synthetic construct
MTRKVAIYTRVSTTNQAEEGFSIDEQIDRLTKYAEAMGWQVSDTYTDAGLSGAKLERPAMQRLINDIENKAFDTVLVYKLDRLSRSVRDTLYLVKDVFTKNKIDFISLNESIDTSSAMGSLFLTILSAINEFERENIRERMTMGKLGRAKSGKSMMWTKTAFGYYHNRKTGILEIVPLQATIVEQIFTDYLSGISLTKLRDKLNESGHIGKDIPWSYRTLRQTLSNPVYCGYIKFKDSLFEGMHKPIIPYETYLKVQKELEERQQQTYERNNNPRPFQAKYMLSGMARCGYCGAPLRIVLGHKRKDGSRTMKYHCANRFPRKTKGVTVYNDNRKCDSGTYDLSNLENTVIDNLIGLQANNDSLLKIINGNNQPILDTSSFKRQISQIDKKIQKNSDLYLNDFITMDELKDRTDSLQAEKKLLKAKISENEFNDSTDVFELVKTQLGSIPINELSYNNKKKIVNNLVSKVDVTADNVDIIFKFQLA

SEQ ID NO: 2629 - protein, 469 aa, synthetic construct
MSYTTPVRAAVYLRISEDRSGEQLGVARQREDCLKLCGQRKWVPVEYLDNDVSASTGKRRPAYEQMLADITAGKIAAVVAWDLDRLHRRPIELEAFMSLADEKRLALATVAGDVDLATPQGRLVARLKGCVAAHETEHKKARQRRAARQKAERGLPNWSKAFGYLPGPNGPEPDPRTAPLVKQAYADILAGASLGDVCRQWNGAGAFTVTGRLWTTTALSKFLRKPRNAGLRAYKGARYGPVDRDAIVGKAQWSPLVDEATFWAAQAVLDAPGRAPGRKSVRRHLLTGLAGCGKCGNHLAGSYRTDGRVVYVCKACYGVAILADNIEPILYHIVAERLAMPDAVDLLRREIHDAAEAETIRLELETLYGELDRLAVERAEGLLTARQVKISTDIVNAKITKLQARQLDQERLRVFDGIPLGTPQVAGVIAELSPDRFRAVLDVLAEVVVQPVGKGGRIFNPERVQVNWR

SEQ ID NO: 2630 - protein, 485 aa, synthetic construct
MTKKVAIYTRVSTTNQAEEGFSIDEQIDRLTKYAEAMGWRVSDTYTDAGFSGAKLERPAMQRLINDIENKAFDTVLVYKLDRLSRSVRDTLYLVEDVFTKNKIDFISLSESIDTSSAMGSLFLTILSAINEFERENIKERMTMGKLGRAKSGKSMMWTKTAFGYYHNRKTGILEIVPLQATIVEQIFTDYLSGISLTKLRDKLNESGHIGKDIPWSYRTLRQTLDNPVYCGHIKFKDSLFVGMHKPIIPYETYLRVQKELEERQQQTYERNNNPRPFQAKYMLSGMARCGYCGAPLRIVLGHRRKDGSRTMKYHCANRFPRKTKGVTVYNDNKKCDSGTYDLSSLENTVIDNLIGFQENNDSLLKIINGNNQPILDTSGVKERISQIDKEIQKNSDLYLSDFITMDELRDRTGSLQAEKGLLKAKISENKFNGSTDVFELVKTQLGSIPINELSYDDKKKIVNNLVSKVDVTADNVDIIFKFQLA

SEQ ID NO: 2631 - protein, 485 aa, synthetic construct
MTKKVAIYTRVSTTNQAEEGFSIDEQIDRLTKYAEAMGWQVSDTYTDAGFSGAKLERPAMRRLVNDIENRAFDTVLVYKLDRLSRSVRDTLYLVKDVFTKNKIDFISLNESIDTSSAMGSLFLTILSAINEFERENIKERMTMGKLGRAKSGKSMMWTKTAFGYYHNRKTGILEIVPLQATIVEQIFTDYLSGISLTKLRDKLNESGHIGKNIPWSYRTLRQTLDNPVYCGYIKFKDSLFEGMHKPIIPYETYLKVQKELEERQQQTYERNNNPRPFQAKYMLSGMARCGYCGAPLRIVLGHKRKDGSRTMKYHCANRFPRKTKGVTVYNDSKKCDSGTYDLSNLENAVIDILIGFQENNDSLLKIINGNNQPILDTSSFKKQISQIDKKIQKNSDLYLNDLITMDELKDRTDSLQAEKKLLKAKISENKFNDSTDVFELVKTQLGSIPINELSYDNKKKIVNNLVSKVDVTADSVDIIFKFQLV

SEQ ID NO: 2632 - protein, 485 aa, synthetic construct
MTKKVAIYTRVSTTNQAEEGFSIDEQIDRLTKYAEAMGWQVSDTYTDAGFSGAKLERPAMQRLINDIENKAFDTVLVYKLDRLSRSVRDTLYLVKDVFTKNRIDFISLNESINTSSAMGSLFLTILSAINEFERENIKERMTMGKLGRAKSGKSMMWTKTAFGYYHNRKTGILEIVPLQATIVEQIFTDYLSGISLTKLRDKLNESGHIGKDIPWSYRTLRQTLDNPVYCGYIKFKDSLFEGMHKPIIPYETYLKVQKELEERQQQTYERNNNPRPFQAKYMLSGMARCGYCGAPLRIVLGHKRKDGSRTMKYHCANRFPRKTRGVTVYNDNKKCDSGTYDLSNLENTVIDNLIGLQVNNESLLKIINGNNQPILDTSSLNEQISQIDKKIQKNSDLYLNDFITMDELKDRTDSLQVEKKLLKAKISENESNDSTDVFELVKTQLGSIPINELSYDNKKKIVNSLVSKVDVTADNVDIIFKFQLA

SEQ ID NO: 2633 - protein, 452 aa, synthetic construct
MKAAIYIRVSTREQVENYSIQAQTEKLTALCRSKDWDVYDIFIDGGYSGSNMNRPALNEMLSKLHEIDAVVVYRLDRLSRSQRDTITLIEEYFLKNNVEFVSLSETLDTSSPFGRAMIGILSVFAQLERETIRDRMVMGKIRRIEAGLPLTTAKGRTFGYDVIDSRLYINEEEAKQLQLIYDIFEEEQSITFLQKRLKNLGSKVHTYNRYNNWLTNDLYCGYVSYKDKVHVKGIHEPIISEEQFYRVQEIFTRMGKNPNMNRDSASLLNNLVVCRKCGLGFVHRRKDTMSRGKKYHYRYYSCKTYKHTHELEKCGNKIWRADKLEELVINRVNNYSLASRNVDKEDELDSLNEKLKIEHARKKRLFDLYINGNYVVSELDSMMSDIDAQINYYESQIRASEELKKNKKIQENLANLATVDYDSLEFREKQLYLKSLINKIYIDGEQVTIEWL

SEQ ID NO: 2634 - protein, 452 aa, synthetic construct
MKAAIYIRVSTREQVENYSIQAQTEKLTALCRSKDWDVYDIFIDGGYSGSNMNRPALNEMLSKLHEIDAVVVYRLDRLSRSQRDTITLIEEYFLKNNVEFVSLCETLDTSSPFGRAMIGILSVFAQLERETIRDRMVMGKIKRIEAGLPLTTAKGRTFGYDVIDTKLYVNEEEAKQLRLIYDIFEEEQSITFLQKRLKKLGFKVRTYNRYNNWLTNDLYCGYVSYKDKVHVKGIHEPIISEEQFYRVQEIFTRMGKNPNMNRASASLLNNLVVCSKCGLGFVHRRKDTTSRGKKYHYRYYSCKTYKHIHELEKCGNKIWRADELEKLIINRVNNYSFASRSVDKEDELDSLNEKLRIEHAKKKRLFDLYINGSYGVSELDNMMNDIDAQINYYESQIEANEELKKNKKTQENLADLASVDYDSLEFREKQLYLKSLINKIYIDGEQVTIEWL

SEQ ID NO: 2635 - protein, 469 aa, synthetic construct
MSYTTPVRAAVYLRISEDRSGEQLGVARQREDCLKLCSQRKWVPVEYLDNDVSASTGKRRPAYEQMLADITAGKIAAVVAWDLDRLHRRPIELEAFMNLADEKRLALATVAGDVDLATPQGRLVARLKGSVAAHETEHKKARQRRAARQKAERGHPNWSKAFGYLPGPNGPVPDPRTAPLVKQAYADILAGASLGDVCRQWNDAGASTITGRPWTTTTLSKFLRKPRNAGLRAYKGARYGPVDRDAIVGKAQWSPLVDEATFWAAQAVLDAPGRAPGRKSVRRHLLTGLAGCGKCGNHLSGSCRTDGRVVYVCKACHGVAILADNIEPILYHIVAERLAMPNAVDLLRRETHDAAEAETVRLGLETLYGELDRLAVERAEGLLTARQVKICTDIVNAKITELRARQLDQERLRVLDGIPLGTPQVAGVIAELSPDRFRAVLDVLAEVVVQPAGKGGRISNLERVQVNWH

SEQ ID NO: 2636 - protein, 452 aa, synthetic construct
MKAAIYIRVSTREQVENYSIQAQTEKLTALCRSKDWDVYDIFIDGGYSGSNMNRPALNEMLSKLHEIDAVVVYRLDRLSRSQRDTITLIEEYFLKNNVEFVSLSETLDTSSPFGRAMIGILSVFAQLERETIRDRMVMGKIKRIEAGLPLTTAKGRTFGYNVIDTKLYVNEEEARQLQLIYDIFEEEQSITFLQRRLKELGFKVHTYNRYNNWLTNDLYCGYVSYKDKVHVKGIHEPIISEEQFYRVQEIFARMGKNPNMNRDSASLLNNLVVCSRCGLGFVHRRKDAMSRDKKYHYRYYSCKTYKHIHELEKCGNKIWRADKLEELIINRVNNYSFASRNADKEDELDSLNEKLKIEHVKKKRLFDLYINGSYEVSELDSMMNDIDAQINYYESQIEANEELRRNKKIQENLAHLATVDFDSLEFREKQLYLKSLISKIYVDGEQVTIEWL

SEQ ID NO: 2637 - protein, 469 aa, synthetic construct
MSYTTPVRAAVYLRISEDRSGEQLGVARQREDCLKLCDQRKWVPVEYLDNDVSASTGKRRPAYEQMLADITAGKIAAVVAWDLDRLHRRPIELEVFMSLADEKRLALATVAGDVDLATPQGRLVARLKGSVAAHETEHKKARQRRAARQKAERGYPNWSKAFGYLPGPNGPEPDPRTAPLVKQAYADILAGASLGDVCRQWNDAGAFTVTGRPWTTTTLSKFLRKPRNAGLRAYKGARYGPVDRDAIVGKAQWSPLVDEATFWAAQAVLDAPGRAPGRKSVRRHLLTGLAGCGKCGNHLAGSYRTDGRVVYVCKACHGVAILADNIEPILYHIVAERLAMPDAVDLLRCEIHDAAEAETIRLELETLYGELDRLAVERAEGLLTARQVKISTDIVSAKITKLQARQLDQERLHVLDGIPLGTPKVAGVIAELSPDRFRAVLDVLAEVVVQPVGKSGRIFNPERVRVNWR

SEQ ID NO: 2638 - protein, 485 aa, synthetic construct
MTKKVAIYTRVSTTNQAEEGFSIDEQTDRLTKYAEAMGWQVSDTYTDAGFSGAKLERPAMQRLINDIENKAFDTVLVYKLDRLSRSVRDTLYLVKDVLTKNKIDFVSLNESIDTSSAMGSLFLTILSAINEFERENIKERMTMGKLGRAKSGKSMMWTKTAFGYYHNRKTGILEIVPLQAAIVEQIFTDYLSGISLTKLRDKLNESGHIGKDIPWSYRTLRQTLDNPVYCGYIKFKGSLFEGMHKPIIPYETYLKVQKELGERQQQTYKRNNNPRPFQAKYMLSGMARCGYCGAPLRIVLGRKRKDGSRTKKYHCANRFPRKTKGVTVYNDNKKCDSGTYDLSNLENTVIDNLIGFQENNDSLLKIINGDNQPILDTSSFKKQISQIDKKIQKNSDLYLNDFITMDELKDRTDSLQAEKKLLEAKISENKFNDSTDVFELVKTQLGSIPINGLSYDNKKKIVNSLVSKVDVTADSVDIIFKFQLA

SEQ ID NO: 2639 - protein, 452 aa, synthetic construct
MKAAIYIRVSTREQVENYSIQAQTEKLTALCRSKDWDVYDIFIDGGYSGSNMNRPALNEMLSKLHEIDAVVVYRLDRLSRSQRDTITLIEEYFLKNNVEFVSLSETLDTSSPFGRAMIGILSVFAQLERETIRDRMVMGKIKRIEAGLPLTTAKGRTFGYDVIDTKLYINEEEAKQLRLIYDIFEEEQSITFLQKRLKKLGLKVHTYNRYNNWLTNDLYCGYVSYKDKVHVKGIHEPIISEEQFYRVQEIFTRMGKNPNMNRDSASLLNNLVVCSKCGLGFVHRRKDAMSRDKKYHYRYYSCKTYKHIHELEKCGNKIWRADKLEELIINRVNNYSFASRNADKEDELDSLNEKLKIEHAKKKRLFDLYINGSYEVSELDSMMNDIDAQINYYESQIEANEELKKNKKIQENLANLATVDFDSLEFREKQLYLKSLINKIYIDGEQVTIEWL

SEQ ID NO: 2640 - protein, 452 aa, synthetic construct
MKAAIYIRVSTREQVENYSIQAQTEKLTALCRSKDWDVYDIFVDGGYSGSNMNRPALNEMLSKLHEIDAVVVYRLDRLSRSQRDTITLIEEYFLKNNVEFVSLSETLDTSSPFGRAMIGILSVFAQLERETIRDRMVMGKIKRIEAGLPLTTAKGRTFGYDVIDTKLYINEEEAKQLRLIYDIFEEEQSITFLQKRLKELGFKVRTYNRYNNWLTNDLYCGYVSYKDKVHVKGIHEPIISEEQFYRVQEIFTRMGKNPNMNRDSASLLNNLVVCSKCGLGFVHRRKDAMSRDKKYHYRYYSCKTYKHIHELEKCGNKIWRADKLEELIIRRVNNYSVASRNVDKGDELDSLNEKLRIEHAKKKRLFDLYISGRYEVSELDSMMNDIDAQINYYESQIEANEGLKKNKQIQENLANLATVDFDSLEFREKQRYLKSLINKIYIDGEQVTIEWL

SEQ ID NO: 2641 - protein, 452 aa, synthetic construct
MKAAIYIRVSTREQVENYSIQAQTEKLTALCRSKDWDVYDIFIDGGYSGSNMNRPALNEMLSKLHEIDAVVVYRLDRLSRSQRDTITLIEEYFLKNNVEFVSLSETLDTSSPFGRAMIGILSVFAQLERETIRDRMVMGKIKRVEAGLPLTTAKGRTFGYDVIDTRLYINEEEAKQLQLIYDIFEEEQSITFLQKRLKKLGFKVRTYNRYNSWLTNDLYCGYVSYKDKVHVKGIHEPIISEEQFYRVQEIFTRMGKNPNMNRDSASLLNNLVVCCKCGLGFVHRRKDTVSRGKKYHYRYYSCKTYKHTHELEKCGNKIWRADKLEELVINRVNNYSFASRNVDKEDELANLNEKLKIEHAKKKRLFDLYINGSYDVSELDSMMNDIDAQIDYYESQIEANEELKKNKKIQENLADLATVDFDSLEFREKQLYLKSLISKIYIDGEQVTIEWL

SEQ ID NO: 2642 - protein, 452 aa, synthetic construct
MKAAIYIRVSTQEQVGNYSIQAQTEKLTALCRSKDWDVYDIFIDGGYSGSNMNRPALNEMLSKLHEIDAVVVYRLDRLSRSQRDTTTLIEEYFLKNNVEFVSLSETLDTSSPFGRAMIGILSVFAQLERETIRDRMVMGKIKRIEAGLPLTTAKGRTFGYDVVDTKLYINEEEAKQLQLIYDIFEEEQSITSLQKRLKKLGFKVRTYNRYSNWLTNDLYCGYVSYKDKVHVKGIHEPIISEEQFYRVQEIFTRMGKNPNMNRDSASLLNNLVVCSKCGLSFVHRSKDTMSRGKKYHYRYYSCKTYKHTHELEKCGNKTWRADKLEELIINRVNNYSFASRNVDKEDELDSLNEKLKIEHAKKRRLIDLYINGSYEVSELDSMMNDIDAQINYYESQIEANEELRKNKKIQENLADLATVDFDSLEFREKRLYLKSLINKIYIDGEQVTIEWL

SEQ ID NO: 2643 - protein, 485 aa, synthetic construct
MTKKVAIYTRVSTTNQAEEGFSIDEQIDRLTKYTEAMGWQVSDTYTDAGHSGAKLERPAMRRLINDIENKAFDTVLVYKLDRLSRSVRDTLYLVKDVFTKNKIDFISLNESIDTSSAMGSLFLTILSAINEFERENIKERMTMGKLGRAKSGKSMMWTKTAFGYYHNRKTGILEIVPLQATIVEQIFTDYLSGISLTKLRDKLNESGHIGKDIPWSYRTLRQTLDNPVYCGYIKFKDSLFEGMHKPIIPYGTYLKVQKELEERQQQTYERNNNPRPFQAKYMLSGMARCGYCGAPLRIVLGHKRKDGSRTMKYHCANRFPRKTKGVTVYNDNKKCDSGTYDLSNLEDTVIDILIGFQESNDSLLKIINGNNQPILDTSSYKKQISQIDEKIQKNSDLYLNDFITMDELKARTDNLQAEKKLLQAKISENKCDDSTNVFELVKTQLGSIPISELSYDNKKKIVNNLVSKVDVTADNVDIIFKFQLA

SEQ ID NO: 2644 - protein, 452 aa, synthetic construct
MKAAIYIRVSTREQVENYSIQAQTEKLTALCRSKDWDVYDIFIDGGYSGSNMNRPALNEMLSKLHEIDAVVVYRLDRLSRSQRDTITLIEEYFLKNNVEFVSLSETLDTSSPFGRAMIGILSVFAQLERETIRDRMVMGKIKRIEAGLPLTTAKGRTFGYDVIGTKLYINEEEAKHLQLIYDIFEEVQSITLLQKRLKKLGFKVRTYNRYNNWLTNDLYCGYVSYKDKVHVKGIHEPIISEEQFYRVQEIFARMGKNPNMNRGSASLLNNLVVCSKCGLGFVHRRKDTMSRDKKYHYRYYSCKTYKHIHELEKCGNKIWRADKLEELIINRVNNYSVASRNVDKEDELDNLNEKLKTEHAKKKRLFDLYISGSYEVSELDRMMSDIDAQISHYESQIKANEELKKSKKIQENLADLATVDFDSLEFREKQQYLKSLINKIYIDGEQVTIEWL

SEQ ID NO: 2645 - protein, 485 aa, synthetic construct
MTKKVAVYTRVSTTNQAEEGFSIDEQVDRLTKYAEAMGWQVSDTYTDAGFSGAKLERPAMQRLINDIENKAFDTVLVYKLDRLSRSVRDTLYLVKDVFTKNKIDFISLNESIDTSSAMGSLFLTILSAINEFERENIKERMTMGKLGRAKSGKSMMWTKTAFGYYHNRKTGILEIVPLQATIVEQIFTDYLSGISLTKLRDKLNESGHIGKDIPWSYRTLRQTLDNPVYCGYIKFKDSLFEGMHKPIIPYETYLKVQKELEERQQQTYERNNNPRPFQAKYMLSGMARCGYCGAPLRIVLGHKRKDGSRTMKYHCANRFPRKTKGVTVYNDNKKCDSGTYDLSNLENTVIDNLIGLQEDNDSLLKFINGNNQPILDTSSIEKQISQIDKKIQKNSDLYLNDFITMDELKDRTDSLQAEKKLLKAKISENKFNDSTDVFELVKTQLGSIPISELSYDNKKKIVNNLVSKVDVTADNVDIIFKFQLA

SEQ ID NO: 2646 - protein, 452 aa, synthetic construct
MKAAIYIRVSTREQVENYSIQAQTEKLTALCRSKDWDVYDIFIDGGYSGSNMNRPALNEMLSKLHEIDAVVVYRLDRLSRSQRDTITLIEEYFLKNNVEFASLSETLDTSSPFGRAMIGILSVFAQLERETIRDRMVMGKIKRIEAGLPLTTAKGRTFGYDVIDTKLYINEEEAKQLQLIYDIFEEEQSITFLQKRLKKLGYKVRTYNRYNNWLTNDLYCGYVSYKDKVHVKGIHEPIISEEQFYRVQEIFTRMGKNPNVNRDSASLLNGLVVCSKCGLGFVHRRKDTMSRGKKYHYRYYSCKTYKHIHELEKCGNKIWRADKLEELIINRVNNYSFASRNVDKEGELDSLNEKLKIEHAKKKRLFDLYINGSYEVSELDGMMNDIDAQINYYESQIEAIEELKKNKKIQENLADLATVDYDSLEFREKQLYLKSLINKIYIDGEQVTIEWL

SEQ ID NO: 2647 - protein, 485 aa, synthetic construct
MTKKVAIYTRVSTTNQAEEGFSIDEQVDRLTKYAEAMGWQVSDTYTDAGFSGAKLKRPAMQRLINDIENKAFDTVLVYKLDRLSRSVRDTLYLVKDVFTKNKIDFISLNESIDTSSAMGSLFLTILSAINEFERENIKERMTMGKLGRAKSGKSMMWTKTAFGYYHNRKTGILEIVPLQATIVEQIFTDYLSGISLTKLRDKLNESGHIGKDIPWSYRTLRQTLDNPVYCGYIKFKDSLFEGMHKPIIPYETYLKVQKELEERQQQTYERNNNPRPFQAKYMLSGMARCGYCGAPLRIVLGHKRKDGSRTLKYHCANRFPRKTKGVTVYNDNKKCDSGTYDLSNLENTVIDNLIGFQESNDSLLKAINGNNQPILDTSSFKKQISQIDKKIQKNSDLYLDDFITMDELKDRTDSLQAEKELLKAKISENKFNDSTDVFELVKTQLGSIPINELSYDDKKKIVNNLVSKVDVTADNVDIIFKFQLA

SEQ ID NO: 2648 - protein, 485 aa, synthetic construct
MTKKVAIYTRVSTTNQAEEGFSIDEQIDRLTKYAEAMGWQVSDTYTDAGFSGAKLERPAMQRLINDIENKAFDTVLVYKLDRLSRSVRDTLYLVKDVFTKNKIDFVSLNESINTSSAMGSLFLTILSAINEFERENIKERMTMGKLGRARSGKSMMWTKTAFGYYHNRKTGVLEIVPLQATIVEQIFTDYLSGISLTKLRDKLNESGHIGKDIPWSYRTLRQTLDNPVYCGYIKFKDSLFEGMHKPIIPYETYLKVQKELEERQRQTYERNNNPRPFQAKYMLSGMARCGYCGAPLRIVLGRRRKDGSRTMRYHCANRFPRKTKGVTVYNDNKKCDSGTYDLSNLENTVIDNLIGFQENNDSLLKIINGNNQPILGTSSFKKQISQIDKKIQKNSDLYLNDFITMDELKDRTDSLQAEKKQLKAKISENKFNDSSDVFELVKAQLGSIPINELSYDNKKKIVNNLVSKVDVTAGNVDIIFKFQLA

SEQ ID NO: 2649 - protein, 452 aa, synthetic construct
MKAAIYIRVSTREQVENYSIQAQTEKLTALCRSKDWDVYDIFVDGGYSGSNMNRPALNEMLSKLHEIDAVVVYRLDRLSRSQRDTITLIEEYFLKNNVEFVSLSETLDTSSPFGRAMIGILSVFAQLERETIRDRMVMGKIKRIEAGLPLTTAKGRTFGYDVIDTKLYINEEEAKQLQLIYDIFEEEQSITFLQKRLKKLGFKVRTYNRYNNWLTNDLYCGYVSYKDKVRVKGIHEPIISEEQFYRVQEIFTRMGKNPNMNRDSASLLNNLVVCGKCGLGFVHRRKDAMSRDKKYHYRYYSCKTYKHIHELEKCGNKIWRADKLEELIINRVNDYSIASRNADKEDELDSLNEKLKIEHAKKKRLFELYINGSYEVSELDSMMNDIDAQINYYESRIEANKELKKNKKIQENPADLATVDFDSLEFREKQLYLKSLINKVYIDGEQVTIEWL

SEQ ID NO: 2650 - protein, 485 aa, synthetic construct
MTKKVAIYTRVSTTNQAEEGFSIDEQIDRLTKYAEAMGWQVSDTYTDAGISGAKLERPAMQRLINDIENKAFDAVLVYKLDRLSRSVRDTLYLVKDVFTKNKIDFISLNESIDTSSAMGSLFLTILSAINEFERENIKERMTMGKLGRAKSGKSMMWTKTAFGYYHNRKTGILEIAPLQATIVEQIFTDYLSGISLTKLRDKLNESGHIGKDIPWSYRTLRQTLDNPVYCGYIKFKGSLFEGMHKPIVPYETYLRVQKELEERQQQTYERNNNPRPFQAKYMLSGMARCGYCGAPLRIVLGHKRKDGSRTMKYHCANRFPRKTKGVTVYNDNKKCNSGTYDLRNLENTVIDSLIGFQENNDSLLKIINGNNQPILDTSSFEKQISQIDKKIQKNSDLYLNDFITMDELKDRTDSLQAEKKLLKAKISENKFNDSTDVFELVKTQLGSIPINELSYDNKKKIVNNLVSKVDVTADNVDIIFKFQLA

SEQ ID NO: 2651 - protein, 452 aa, synthetic construct
MKAAIYIRVSTREQVENYSIQAQTEKLTALCRSKDWDVYDIFIDGGYSGSNMNRPALNEMLSKLHEIDAVVVYRLDRLSRSQRDTITLIEEYFLKNNVEFVSLSETLDTSSPFGRAMIGILSVFAQLERETIRDRMVMGKIKRIEAGLPLTTAKGRTFGYDVIDTKLYINEEEAKQLQLIYDIFEEEQSITFLQKRLKELGFKVHTYNRYNNWLTNDLYCGYVSYKDKVHVKGIHEPIISEEQFYRVQEIFTRMGKSPNMNRDSASLLSNLVVCSKCGRGFVHRRKDAKSRDKKYHYRYYSCKTYKHIHELEKCGNKIWRADKLEELIINHVNNYSFASRNADKEDELGSLNEKLKIEHARRRRLFELYISGSYEVSELDSMMSDIDAQICYYESQIEANEELRKNKKIQEDLAYLATVDFDSLEFREKQLYLKSLINKIYIDGEQVTIEWL

SEQ ID NO: 2652 - protein, 469 aa, synthetic construct
MSYTTPVRAAVYLRISEDRSGEQLGVARQREDCLKLCDQRKWVPVEYLDNDVSASTGKRRPAYEQMLADITAGKIAAVVAWDLDRLHRRPIELEAFMSLADEKRLALATVAGDVDLATPQGRLVARLKGSVAAHETEHKKARQRRAARQKAERGHPNWSKAFGYLPGPNGPEPDPRTAPLVKQAYADILAGASLGDVCRRWNDAGAFTITGRLWTTTTLSKFLRKPRNAGLRAYKGARYGPVDRDAIVGKAQWSPLVDEATFWAAQAVLDAPGRAPGRKSVRCHLLTGLAGCGKCGHHLAGSYRTDGRVVYVCKACYGVAILADNIEPILYHIVAERLAMPDAVDLLRREIHDAAEAEAIRLELETLYGELDRLAVERAEGLLTARQVKISTDIVNAKITKLQARQQDQERLRVLDGIPLGTPQVAGMIAELSPDRFRAVLDVLAEVVVQPVGRGGKIFNPERVQVNWR

SEQ ID NO: 2653 - protein, 485 aa, synthetic construct
MTKKVAIYTRVSTTNQAEEGFSIDEQIDRLTKYAEAMGWQVSDTYTDAGSSGAKLERPAMQRLIGDIENKAFDTVLVYKLDRLSRSVRDTLYLVKDVFTKNKIDFISLNESIDTSSAMGSLFLTILSAINEFERENIKERMTMGKLGRAKSGKSMMWTKTAFGYYHNRKTGILEIVPLQATIVEQIFTDYLSGISLTKLRDKLNESGHIGKDIPWSYRTLRQTLDNPVYCGYIKFKDSLFEGMHKPIIPYETYLKVQKELEERQQQAYERNNNPRPFQAKYMLSGMARCGYCGAPLRIVMGHKRKDGSRTMKYHCANRFPRKTKGVTVYNDNKKCDSGTYDLCNLENTVIDNLIGFQENNDSLLKIINGNNQPTLDTSSFKKQISQIDKKIQKNSDLYLNDFITMDELKDRTDSLQAEKKLLKAKISENKFNDSTDVFELVRTQLGSIPINELSYDNKKKIVNNLVSKVDVTADNVDIIFKFQLA

SEQ ID NO: 2654 - protein, 485 aa, synthetic construct
MTKKVAIYTRVSTTNQAEEGFSIDEQIDRLTRYAEAMGWQVSDTYTDAGFSGAKLKRPAMQRLINDIENKAFDTVLVYKLDRLSRSVRDTLYLVKDVFTKNKIDFISLNESIDTSSAMGSLFLTILSAINEFERENIKERMTMGKLGRAKSGKSMMWTKTAFGYYHNRKTGILEIVPPQATIVEQIFTDYLSGISLTKLRDKLNESGHIGKDTPWSYRTLRQTLDNPVYCGYIKFKDSLFEGLHKPIIPYETYLKVQKELEERQQRAYERNNNPRPFQAKYMLSGMARCGYCGAPLKIVLGHKRKDGSRTMKYHCANRFPRKTKGVTVYNDNKKCDSGTYDLNNLENTVIDNLIGFQENNDSLLKIINGDNQPILDTSSFREQISQIDKKIQKNSDLYLNDFITMDELKDRTDSLQAEKKLLEAKISENKFSDSTDVFELVKTQLGSIPINELSYDNKKKIVNNLVSKVDVTADNVDIIFKFQLA

SEQ ID NO: 2655 - protein, 452 aa, synthetic construct
MKAAIYIRVSTREQVENYSIQAQTEKLTALCRSKDWDVYDIFIDGGYSGSNMNRPALNEMLSKLHEIDAVVVYRLDRLSRSQRDTITLIEEYFLKNNVEFVSLSETLDTSSPFGRAMIGILSVFAQLERETIRDRMVMGKIKRIEAGLPLTTAKGRTFGYDVIDTKLYINEEEAKQLQLIYDIFEEEQSITSLQKRLKKLGFKVHTYNRYNNWLTNDLYCGYVSYKNKVHVKGIHEPIISEEQFYRVQEIFTRMGKNPNMNRGSASLLNNLVVCSKCGLGFVHRRKDAMSRDKKYHYRYYSCKTYKHIHELEKCGNKIWRADKLEELIINRVNNYSLASRNVDKEDELDSLNERLKIEHAKKRRLFDLYINGSYEVSELDSMMNDIDAQINCYESQIEANEELKKNKKIQENLAYLATVDFDSLEFREKQLYLKSLINKIYIDGEQVTIEWL

SEQ ID NO: 2656 - protein, 452 aa, synthetic construct
MKAAIYIRVSTREQVENYSIQAQTEKLTALCRSKDWDVYDIFIDGGYSGSNMNRPALNEMLSKLHEIDAVVVYRLDRLSRSQRDTITLIEEYFLKNNVEFVSLSETLDTSSPFGRAMIGILSVFAQLERETIRDRMVMGKIKRIEAGLPLTTAKGRTFGYDVIDTKLYINEEEAKQLQLIYDIFEEEQSITFLQRRLKELGFKVRTYSRYNSWLTNDLYCGYVSYKDKVRVKGIHEPIISEEQFYRVQEIFTRMGKNPNMNRDSASLLSNLVVCSKCGLGFVHRRKDTMSRGRKYHYRYYSCKTYKHTHELEKCGNKIWRADKLEELIINRVNNYSFASRNMGKEDELDSLNEKLKIEHAKKKRLFDLYINGSYEVSELDSMMNDIDAQINYYESQIEANEELKKNKKIQENLANLATVDYDSLEFREKQLYLKSLISKIYIDGEQVTIEWL

SEQ ID NO: 2657 - protein, 452 aa, synthetic construct
MKAAIYIRVSTQEQVGNYSIQAQTEKLTALCRSKDWDVYDIFIDGGYSGSNMNRPALNEMLSKLHEIDAVVVYRLDRLSRSQRDTTTLIEEYFLKNNVEFVSLSETLDTSSPFGRAMIGILSVFAQLERETIRDRMVMGKIKRIEAGLPLTTAKGRTFGYDVIDTKLYINEEEARQLQLIYDIFEEEQSITSLQKRLKKLGFKVRTYNRYNNWLTNDLYCGYVSYKDKVHVKGIHEPIISEEQFYRVQEIFTRMGKNPNMNRDSASLLSNLVVCSKCGLGFVHRSKDTMSRGKKYHYRYYSCKTYKHTHELEKCGNKTWRADKLEELIINRVNNYSFASRNVGKEDELDSLNEKLKIEHAKRKRLFDLYINGSYEVSELDSMMNDIDAQINYYESQIEANEELKKNRKIQENLADLATVDFDSLGFREKQLYLKSLINKIYIDGEQVTIEWL

SEQ ID NO: 2658 - protein, 469 aa, synthetic construct
MSYTTPVRAAVYLRISEDRSGEQLGVARQREDCLKLCDQRKWVPVEYLDNDVSASTGKRRPAYEQMLADITAGKIAAVVAWDLDRLHRRPIELEAFMSLADEKRLALATVAGDVDLATPQGRLVARLKGCVAAHETEHKKARQRRAARQKAERGYPNWSKAFGYLPGPNGPEPDPRIAPLVKQAYADILAGASLGDVCRQWNDAGAFTITGRPWTTTTLSKFLRKPRNAGLRAYKGARYGPVDRDAIVGKAQWSPLVDEATFWAAQSVLDAPGRAPGRKSVRRHLLTGLAGCGKCGNHLAGSYRTDGRVVYVCKACHGVSILAVNIEPILYHIVAERLAMPDAVDLLRREIHDTAEAETIRLELEALYGELDRLAVERAEGLLTARQVKISTDIVNAKITKLQARQLDQERLRVLDGIPLGTPQVAGMIAELSPDRFRAVLDVLAEVVVQPVGKRGRVFNPERVQVNWR

SEQ ID NO: 2659 - protein, 452 aa, synthetic construct
MKAAIYIRVSTREQVENYSIQAQTEKLTALCRSKDWDVYDIFIDGGYSGSNMNRPALNEMLSKLHEIDAVVVYRLDRLSRSQRDTITLIEEYFLKNNVEFVSLSETLDTSSPFGRAMIGILSVFAQLERETIRDRMVMGKIKRIEAGLPLTTAKGRTFGYDVIDTKLYINEEEAKQLQLIYDIFEEEQSITFLQKRLKELGFKVRTYNRYNNWLTNDLYCGYVSYKDKVHVKGIHEPIISEEQFYRVQEIFAHMGKNPNMNRDSASLLNNLVVCSKCGLSFVHRRKDTMSRGKKYHYRYYSCKTYKHVHELEKCGNKIWRADKLEELIIDRVNNYSLASRNVDKEDGLDSLNEKLKNEHAKKKRLFDLYINGSYNVSELDSMMNDIDAQINYYESQIEANEELKKNKKIQENLAGLATVDFDSLEFREKQLYLKSLINKIYIDGEQVTIEWL

SEQ ID NO: 2660 - protein, 452 aa, synthetic construct
MKAAIYIRVSTREQVENYSIQAQTEKLTALCRSKDWDVYDIFIDGGYSGSNMNRPALNEMLSKLHEIDAVVVYRLDRLSRSQRDTITLIEEYFLKNNVEFVSLSETLDTSSPFGRAMIGILSVFAQLERETIRDRMVMGKIKRIEAGLPLTTAKGRTFGYDVIDTKLYINEEEAKQLRLIYDIFEEEQSITSLQKRLKKLGFKVRTYSRYNNWLTNDLYCGYVSYKDKVHVKGIHEPIISEEQFYRVQEIFTRMGKNPNMNRGSASLLNNLVVCGKCGLGFVHRRKDAMSRDKKYHYRYYSCKTYKHIHELEKCGNKIWRADKLEELIIDRVNNYSFASRNVDKEDELDSLNEKLKIEHAKKKRLFDLYINGNYEVSELDCMMSDIDAQINYYESQIEANEELKKSKKIQENLAYLAAVDFDSLEFREKQLYLKSLINKIYIDGEQVTIEWL

SEQ ID NO: 2661 - protein, 485 aa, synthetic construct
MTKKVAIYTRVSTTNQAEEGFSIDEQIDRLTKYAEAMGWQVSDTYTDAGSSGAKLERPAMQRLINDIENRAFDTVLVYKLDRLSRSVRDTLYLVKDVFTKNKIDFISLNESIDTSSAMGSLFLTILSAINEFERENIKERMTMGRLGRAKSGKSMMWTKTAFGYYHNRETGILEIVPLQATIVEQIFTDYLSGISLTKLRDKLNESGHIGKDIPWSYRTLRQTLDNPVYCGYIKFKDSLFEGMHKPIISYETYLKAQKELEERQQQTYERNNNPRPFQAKYMLSGMARCGYCGAPLKIVLGHKRKDGSRTMKYHCANRFPRITRGVTVYNDNKKCDSGTYDLRNLENTVIDTLIGLQESDDSLLKIINGNNQPILDTSSFKEQISQIDKKIQKNSDLYLNDFITMDELKDRTDSLQAEKKLLKAKISENKFNDSTDVFELVKTQLGSIPINEVSYDSKKQIVNNLVSKVDVTADNVDIIFKFQLA

SEQ ID NO: 2662 - protein, 469 aa, synthetic construct
MSYTTPVRAAVYLRISEDRSGEQLGVARQREDCLKLCGQRKWEPVEYLDNDVSASTGRRRPAYEQMLADITAGKIAAVVAWDLDRLHRRPIELEAFMILADEKRLALATVAGDVDLATPQGRLVARLKGSVAAHETEHKRARQRRAARQKAERGHPNWSKAFGYLPGPNGPEPDPRTAPLVKQAYADILAGASLGDVCRQWNSAGAFTITGRPWTTTTLSKFLRKPRNAGLRAYKGARYGPVDRDAIVGKARWSPLVDEATFWAAQAVLDAPGRAPGRKSVRRHLLTGLAGCGKCGNHLAGSYRTDGRVVYVCKACHGVAILADNIEPMLYHIVAERLAMPNAVDLLRREIHDAAEAETIHLELETLYGELDRLAVERAEGLLTARQVKISTDIVNAKITKLQAHQQDQERLRVFDGIPLGTPQVAGVIAELSPNRFRAVLDVLAEVVVQPVGKSGRIFNPERVQVNWR

SEQ ID NO: 2663 - protein, 452 aa, synthetic construct
MKAAIYIRVSTQEQVENYSIQAQTEKLTALCRSKDWDVYDIFIDGGYSGSNMNRPALNEMLSKLHEIDAVVVYRLDRLSRSQRDTTTLIEEYFLKNNVEFVSLSETLDTSSPFGRAMIGILSVFAQLERETIRDRMVMGKIKRIEAGLPLTTAKGRTFGYDVIDTKLYINEEEAKQLRLIYDIFEEEQSITFLQKRLKKLGFRVRAYNCYNNWLTNDLYCGYVSYKDKVHVKGIHEPIISEEQFYRVQEIFTRMGKNPNMNRDSASLLNNLVVCSKCGLGFVHRSKDTMSGGKKYHYRYYSCKTYKHAHELEKCGNKTWRADKLEELIINRVNNYSFAGRNVDKEDELDSLNEKLKIEHAKRKRLFDLYINGSYEVSELDNMMNDIDAQINYYESQIEANEELRRNKKIQENLADLATVDFDSLEFRGKQLYLKSLISKIYIDGEQVTIEWL

SEQ ID NO: 2664 - protein, 469 aa, synthetic construct
MSYTTPVRAAVYLRISEDRSGEQLGVARQREDCLKLCDQRKWVPVEYLDNDVSASTGKRRPAYEQMLADITAGKIAAVVAWDLDRLHRRPVELEAFMCLADEKRLALATVAGDVDLATPQGRLVARLKGSVAAHETEHKKARQRRAARQKAERGYPNWSKAFGYLPGPNGPEPDPRTAPLVKQAYADILAGASLGDVCRQWNDAGAFTITGRPWTTTTLSKFLRKPRNAGLRAYKGARYGPVDRDAIVGKAQWSPLVDEATFWAAQAVLDAPGRAPGRKSVRRHLLTGLAGCGKCGNHLAGSYRTDGRVVYVCKACHGVAILADNIEPILYHIVAERLATPDAVDLLRREIHDAAEAETIRLELETLYGELDRLAVERAEGLLTARQVKISTDIVNAKITKLQARQLDQERLRVFDGIPLGTPQVAGMIAELSPDRFRAVLDVLAEVVVQPVGKSGRIFNPERVQVSWR

SEQ ID NO: 2665 - protein, 485 aa, synthetic construct
MTKKVAIYTRVSTTNQAEEGFSIDEQIDRLTKYAEAMGWQVSGTYTDAGLSGAELERPAMQRLINDIENKAFDTVLVYKLDRLSRSVRDTLYLVKDVFTKNKIDFISLNESIDTSSAMGSLFLTILSAINEFERENIKERMTMGKLGRAKSGKSMMWTKTAFGYHHNRKTGILEVVPLQATIVEQIFTDYLSGISLTKLRDKLNESGHIGKDIPWSYRTLRQTLDNPVYCGYIKFKDSLFEGMHKPIIPYETYLKVQRELEERQQQTYKRNNNPRPFQAKYMLSGMARCGYCGAPLKIVLGRKRKDGSRTMKYHCANRSPRKTKGVTVYNDNKKCDSGTYDLSNLENTVIDNLIGFQENNDSLLKIINGINQPILDTSSFKEQISQIDKKIQKNSDLYLNDFITMDELKDRTDSLQAEKKLLKAKISENKLNDSTDVFELVKTQLGSIPINELGYDDKKKIVSNLVSKVDVTADNVDIIFKFQLA

SEQ ID NO: 2666 - protein, 452 aa, synthetic construct
MKAAIYIRVSTREQVENYSIQAQTERLTALCRSKDWDVYDIFIDGGYSGSNMNRPALNEMLSKLHEIDAVVVYRLDRLSRSQRDTVTLIEEYFLKNNVEFVSLSETLDTSSPFGRAMIGILSVFAQLERETIRDRMVMGKIKRIEAGLPLTTAKGRTFGYDVIDSKLYINEEEAKQLRLIYDIFEEEQSITFLQKRLKKLGFKVRTYNRYNNWLTNDLYCGYVSYKDKVHVKGIHEPIISEEQFYRVQEIFTRMGKNPNVNRDSASLLNNLVVCSKCGLGFVHRRKDTMSRGKKYHYRYYSCKTYKHTHELEKCGNKIWRADKLEELIINRVNNYSFASRNADKEDELDSLNEKLKIEHAKKKRLFDLYINGSYEVSELDSMMNDIDAQINYYESQIEANEELRKNKKIQENLANLATVDFDSLEFREKQLYLKSLINKIYIDGEQVTIEWL

SEQ ID NO: 2667 - protein, 485 aa, synthetic construct
MTKKVAIYTRVSTTNQAEEGFSIDEQIDRLTKYAEAMGWQVSDTYTDAGFSGAKLKRPAMQRLINDIENKAFDTVLVYKLDRLSRSVRDTLYLVKDVFTKNKIDFISLSESIDTSSAMGSLFLTILSAINEFERENIKERMTMGKLGRAKSGKSMMWTKTAFGYYHNRKTGILEIVPLQATIVEQIFTGYLSGISLTKLRDKLNESGHIGKDIPWSYRTLRQTLDNPVYCGYIKFKDSLFGGMHKPIIPYETYLKVQKELEERQRQTYERNNNPRPFQAKYMLSGLARCGYCGAPLRIVLGHKRKDGSRTMKYHCANRFPRKTKGVTVYNDNKKCDSGTYDLSNLENTVIDSLIGFQENSDSLLKIINGNNQPILDTSSFEKQISQIDRIIQKNSDLYLNDFITMDELKDRTDSLQAEKKLLKAKISENKFNDNTDVFELVKTQLGSIPINELSYDNKKKIVNNLVSKVDVTADNVDIIFKFQLA

SEQ ID NO: 2668 - protein, 452 aa, synthetic construct
MKAAIYIRVSTREQVENYSIQAQTEKLTALCRSKDWDVYDIFIDGGYSGSNLNRPALNEMLGKLHEIDAVVVYRLDRLSRSQRDTITLIEEYFLKNNVEFVSLSETLDTSSPFGRAMIGILSVFAQLERETIRDRMVMGKIKRIEAGLPLTTAKGRTFGYDVIDTKLYINEEEAKQLQLIYDIFEEEQSITFLQKRLKKLGFKVHTYNRYNNWLTNDLYCGYVSYKDRVHVKGIHEPIISEEQFYRVQEIFTRMGKNPNMNRDSASLLNNLVVCSKCGLSFVHRRKDTMSRGKKYHYRYYSCKTYKHTHELEKCGNKIWRADKLEELIINRVNNYSFASRNVDKEDELDSLNEKLKIEHAKKKRLFDLYLNGSYEASELDCMMNDIDAQINYYESRIEANEELKRDKKIQESLANLATVDYDSLEFREKQLYLKSLINKIYIDGEQVTIEWL

SEQ ID NO: 2669 - protein, 452 aa, synthetic construct
MKAAIYIRVSTREQVENYSIQAQTEKLTALCRSKGWDVYDIFIDGGYSGSNMNRPALNEMLGKLHEIDAVVVYRLDRLSRSQRDTITLIEEYFLKNSVEFVSLSETLDTSSPFGRAMIGILSVFAQLERETIRDRMVMGKIKRIEAGLPLTTAKGRTFGYDVIDTKLYINEEEAKQLRLIYDIFEEEQSITFLQKRLKKLGFKVHTYNRYNNWLTNDLYCGYVSYKDKVHVKGIHEPIISEEQFYRVQEIFARMGKNPNMNRDSASLLNNLVVCGKCGLGFVHRRKDAMSRDKKYRYRYYSCKTYKHIHELEKCGNKIWRADKLEELIISRVNNYSFASRSVDKEDELDSLNEKLKIEHAKKKRLFDLYINGRYEVGELDSMMNDIDAQISYYESQIEASEELRKNKRIQENLAHLATVDFDSLEFREKQLYLKSLINKIYIDGEQVTIEWL

SEQ ID NO: 2670 - protein, 452 aa, synthetic construct
MKAAIYIRVSTREQVENYSIQAQTEKLTALCRSKDWDVYDIFIDGGYSGSNMNRPALNEMLSKLHEIDAVVVYRLDRLSRSQRDTITLIEEYFLKNNVEFVSLSETLDTSSPFGRAMIGILSVFAQLERETIRDRMVMGQIKRVEAGLPLTTAKGRTYGYDVIDTKLYINKEEAKQLQLIYDIFEEEQSITFLQKRLKKLGFKVRTYSCYNSWLTNDLYCGYVSYKDEVHVKGIHEPIISEEQFYRVQEIFTRMGKNPNMNRDSASLLNGLVVCSKCGLGFVHRRKDTMSRGKKYQYRYYSCKTYKHTHELEKCGNKIWRADKLEELIINRVNNYSFASRNADKEDELDSLNEKLKIEHAKKKRLFDLYINGSYEACELDSMMNDIDAQINYYESQIEANEELKKSKKIQENLADLATVDYDSLEFREKQLYLKSLINKIYIDGEQVTIEWL

SEQ ID NO: 2671 - protein, 469 aa, synthetic construct
MSYTTPVRAAVYLRISEDRSGEQLGVARQREDCLKLCDQRKWVPVEYLDNDVSASTGKRRPAYEQMLADITTGKIAAVVTWDLDRLHRRPIELEAFMSLADEKRLALATVAGDVDLATPQGRLVARLKGSVAAHETEHKKARQRRAARQKAERGYPNWSKAFGYLPGPNGPEPDPRTAPLVKQAYADILAGASLGDVCRRWNGAGAFTITGRPWTTTTLSKFLRKPRNAGLRAYKGARYGPVDRDAIVGKAQWSPLVDEATFWAAQAVLDAPGRAPGRKSVRRHLLTGLAGCGKCGNHLAGSYRTDGRVVYVCKACHGVAILADNIEPILYHIVAERLAMPDAVDLLRREIHDAAEAETIRLELETLYGELDRLAVERAEGLLTARQVKISTDIVNAKITKLQARQLDQERLRVFDGIPLGTPQVAGMIAELSPDRFRAVLDVLAEVVVQPVGKSGRIFNPERVQVNWR

SEQ ID NO: 2672 - protein, 485 aa, synthetic construct
MTKKVAIYTRVSTTNQAEEGFSIDEQIDRLTKYAEAMGWQVSDTYTDAGSSGAKLERPAMQRLINDIENKAFDTVLVYKLDRLSRSVRDTLYLVKDVFTKNKIDFISLNESIDTSSAMGSLFLTILSAINEFERENIKERMTMGKLGRAKSGKSMMWTKTAFGYYHNRETGILEIVPLQATIVEQIFTDYLSGISLTKLRDKLNEGGHIGKDIPWSYRTLRQTLDNPVYCGYIKFKGSLFEGMHEPIIPYETYLKVQKELEERQQQAYERNNNPRPFQAKYMLSGMARCGYCGAPLRIVLGRKRKNGSRTMKYHCANRFPRKTKGITVYNDNKKCDSGTYDLSDLENTVIDNLIGLQENNDSLLKIINGNNQPILDTSSFKKQISQIDKKIQKYSDLYLNDFITMDELEDRTDSLQAEKRLLKAKISENKFNDSTDVFELVKTQLGSIPINELSYDDKKKIVNNLVSKVDVTADNVDIIFKFQLA

SEQ ID NO: 2673 - protein, 485 aa, synthetic construct
MTKKVAIYTRVSTTNQAEEGFSIDEQIDRLTKYAEAMGWQVCDTYTDAGTSGAKLERPAMQRLINDIENKAFDTVLVYKLDRLSRSVRDTLYLVKDVFTKNKIDFISLNESIDTSSAMGSLFLTILSAINEFERENIKERMTMGKLGRAKSGKSMMWTKTAFGYYHNRKTGILEIVPLQAAIVEQIFTDYLSGISLTKLRDKLNESGHIGKDIPWSYRTLRQTLDNPVYCGYIKFKGSLFEGMHKPIIPYETYLKVQKELEKRQQQTYERNNNPRPFQAKYMLSGMARCGYCGAPLRIVLGHKRKDGSRTMKYHCANRFPRKTRGVTVYNDNKKCDSGTYDLSNLENIVIGSLIGFQENNDSLLKIINGNNQPILDTSSFKKQISQIDRKIQKNSDLYLNDFITMDELKDRTDSLLAEKKLLKAKISENKFNDSTDVFELVKTQLGSIPINELSYDNKKKIVNNLVSKVDVTADNVDIIFKFQLA

SEQ ID NO: 2674 - protein, 452 aa, synthetic construct
MKAAIYIRVSTREQVENYSIQAQTEKLTALCRSKDWDVYDIFIDGGYSGSNMNRPALNEMLSKLHEIDAVVVYRLDRLSRSQRDTITLIEEYFLKNNVEFVSLSETLDTSSPFGRAMIGILSVFAQLERETIRDRMVMGKIKRIEAGLPLTTAKGRTFGYDVIDTRLYINEEEAKQLQLIYDIFEEEQSITFLQKRLKKLGFKVHTYNRYNNWLTNDLYCGYVSYKDKVHVKGIHEPIISEEQFYRVQEIFTRMGKNPNMNRESASLLNNLVVCSKCGLGFVHRRKDTMSRGKKYHYRYYSCKTYKHIHELEKCGNKIWRADKLEELIINRVNNYSLASRDVDKEDELDSLNEKLKIEHAKRKRLFDLYINGSYEVSELDSMMSDIDAQINYYESQIEANGELKKNKKIQENLANLASVDYDSLEFREKQLYLKSLINKIYIDGEQVTIEWL

SEQ ID NO: 2675 - protein, 485 aa, synthetic construct
MTKKVAIYTRVSTTNQAEEGFSIDEQIDRLTKYAEAMGWQVSDTYTDAGSSGAKLERPAMQRLISDIENKAFDTVLVYKLDRLSRSVRDTLYLVKDVFTKNKIDFISLNESIDTSSAMGSLFLTILSAINEFERENIKERMTMGKLGRAKSGKSMMWTKTAFGYYHNRKTGILEIVPLQATIVEQIFTDYLSGISLTKLRDKLNESGHIGKDIPWSYRTLRQTLDNPVYCGYIKFKDSLFEGMHKPIIPYETYLKVQKELEERQQQTYERNNNSRPFQAKYMLSGMARCGYCGAPLRIVLGRKRKDGSRTMKYHCANRFPRKTKGVTVYNDNKKCDSGTYDLSNLETTVIDILIGFQENNDSLLKIINGNNQPILDTSSFEKQISQIDKKIQKNSDLYLNDFITMDELEDRTDSLQAEKKLLEAEISKNKFNDNTDVFDLVKTQLGSIPINELSYDNKKKIVNNLVCKVDVTADSVDIIFKFQLA

SEQ ID NO: 2676 - protein, 452 aa, synthetic construct
MKAAIYIRVSTREQVENYSIQAQTEKLTALCRSKDWDVYDIFIDGGYSGSNMNRPALNEMLSKLHEIDAVVVYRLDRLSRSQRDTITLIEEYFLKNNVEFVSLSETLDTSSPFGRAMIGILSVFAQLERETIRDRMVMGKIKRIEAGLPLTTAKGRTFGYDVIDTRLYINEEEAKQLQLIYDIFEEEQSITFLQKRLKKLGFKVRTYNRYNNWLTNDLYCGYVSYKDKVHVKGIHEPIISEEQFYRVQEIFARMGKNPNMNRDSASLLNNLVVCSKCGLGFVHRRKDTVSRGKKYHYRYYSCKTYKHTHELEKCGNKIWRADKLEELIINRVNNYSFASRNAGKEDELDSLNEKLKIEHAKKKRLFDLYINGCYEVSELDSMMNDIDAQINYYESQIEANEELKRNKKIQENLADLASVDYDSLEFREKQLYLKSLINKIYIDGEQVTIEWL

SEQ ID NO: 2677 - protein, 452 aa, synthetic construct
MKAAIYIRVSTQEQVGNYSIQAQTEKLTALCRSKDWDVYDIFVDGGYSGSNMNRPALNEMLSKLHEIDAVVVYRLDRLSRSQRDTTTLIEEYFLKNNVEFVSLSETLDTSSPFGRAMIGILSVFAQLERETIRDRMVMGKIKRIEAGLPLTTAKGRTFGYDVIDTKLYINEEEAKQLRLIYDIFEEEQSITFLQKRLKKLGFKVRSYNRYNNWLTNDLYCGYVSYKDKVHVKGIHEPIISEEQFYRVQEIFTRMGKNPNMNRDSASLLSNLVVCGKCGLGFVHRSKDTMSRGKKYHYRYYSCKTYKYTHELEKCGNKTWRADRLEELIINRVNNYSFASRNVDREDELGSLNDKLKIEHAKRKRLFDLYINGNYEVSELDSMMNDIDAQINYYESQIEANRELKKSKKIQENLADLATVDFDSLEFREKQLYLKSLINKIYIDGEQVTIEWQ

SEQ ID NO: 2678 - protein, 452 aa, synthetic construct
MKAAIYIRVSTQEQVGNYSIPAQTEKLTALCRSKDWDVYDIFIDGGYSGSNMNRPALNEMLSKLHEIDAVVVYRLDRLSRSQRDTTTLIEEYFLKNNVEFVSLSETLDTSSPFGRAMIGILSVFAQLERETIRDRMVMGKIKRIEAGLPLTTAKGRTFGYDVVDTKLYINEEEAKQLQLIYDIFEEEQSITLLQKRLKKLGFKVRTYNRYNSWLTNDLYCGYVSYKDKVHVKGIHEPIISEEQFYRVQEIFARMGKNPNMNRDNASLLSSLVVCSKCGLGFVHRSKDTVSRGKKYHYRYYSCKTYKHTHELEKCGNKTWRADKLEELIINRVNNYSFAGRNVDKEDELDSLNEKLKIEHAKKKRLFDLYINGSYEVSELDSMMSDIDAQINYYESRIEANKELKKNRKIQENLADLATVDFDSLEFREKQLYLKSLINKIYIDGDQVTIEWL

SEQ ID NO: 2679 - protein, 452 aa, synthetic construct
MKAAIYIRVSTREQVENYSIQAQTEKLTALCRSKDWDVHDIFIDGGYSGSNMNRPALNEMLSKLHEIDAVVVYRLDRLSRSQRDTITLIEEYFLKNNVEFVSLSETLDTSSPFGRAMIGILSVFAQLERETIRDRMVMGKIKRIEAGLPLTTAKGRTFGYDVIDTKLYINEEEAKQLQLIYDIFEEEQSITFLQKRLKKLGFKVRTYNRYNNWLTNDLYCGYVSYKDKVHVKGIHEPIISEEQFYRVQEIFTRMGKNPNMNRDSASLLNNLVVCGKCGLGFVHRRKDIVSHGKRYHYRYYSCKTYKHIHELEKCGNKIWRADKLEELIINRVNNYSLAGRNVDKEDELDSLSEKLKIEHAKKKRLFELYISGSYEVSELDSMMSDIDAQICYYESQIEANEELRKNKKIQENLADLATVDFDSLEFREKQLYLKSLINKIYVDGEQVSIEWL

SEQ ID NO: 2680 - protein, 452 aa, synthetic construct
MKAAIYIRVSTREQVENYSIQAQTEKLTALCRSKDWDVYDIFIDGGYSGSNMNRPALSEMLSKLHEIDAVVVYRLDRLSRSQRDTITLIEEYFLKNNVEFVSLSETLDTSSPFGRAMIGILSVFAQLERETIRDRMVMGKIKRIEAGLPLTTAKGRTFGYDVIDTKLYINEEEAKQLRLIYDIFEEEQSITFLQKRLKKLGLKVRTYNCYNNWLTNDLYCGYVSYKDKVHVKGIHEPIISEEQFCRVQEIFTRMGKNPNMNRDSASLLNNLVVCSKCGLSFVHRRKDATSRDKKYHYRYYSCKTYKHIHELEKCGNKIWRADKLEELIVNRVNDYSVASRNVDKGDELDSLNEKLKIEHAKKKRLFDLYINGRYEVSELDSMMNDIDAQINYYESQIEANEELKKNKKIQENLAHLATVDFDSLEFREKQLYLKSLINKIYIDGEQVTIEWL

SEQ ID NO: 2681 - protein, 469 aa, synthetic construct
MSYTTPVRAAVYLRISEDRSGEQLGVARQREDCLKLCDQRKWVPVEYLDNDVSASTGKRRPAYEQMLADITAGKITAVVAWDLDRLHRRPIELEAFMSLADEKRLALATVAGDVDLATPQGRLVARLKGSVAAHETEHKKARQRRAARQKAERGYPNWSKAFGYLPGPNGPEPDPRTAPLVKQAYADILAGASLGDVCRRWNDAGAFTITGRPWTTTTLSKFLRKPRNAGLRAYKGARYGPVDRDAIVGKAQWSPLVDEATFWAAQAVLDAPGRAPGRKSVRRHLLTGLAGCGKCGNHLAGSYRTDGKVVYVCKACHGVAILADNIVPILYHIVAERLAMPDAVDLLRSEIHDAAEAETIRLELETLYGELDRLAVERAEGLLTARQVKISTDIVNAKITKLQARQQDQERLRVLDGIPLGTPQVAGKIAELSPDRFRAVLDVLAEVVVQPVGKSGRVSNPERVRVNWR

SEQ ID NO: 2682 - protein, 469 aa, synthetic construct
MSYTTPVRAAVYLRISEDRSGEQLGVARQREDCLKLCDQRKWVPVEYLDNDVSASTGERRPAYEQMLADITAGKIAAVVAWDLDRLHRRPIELEAFMSLADEKRLALATVAGDVDLATPQGRLVARLKGCVAAHETEHKKARQRRAARQKAERGHPNWSKAFGYLPGPNGPEPDPRTAPLVKQAYADILAGASLGDVCRQWNDAGAFTITGRPWTTTTLSKFLRKPRNAGLRAYKGARYGPVDRGAIVGKAQWSPLVDEATFWAAQAVLDAPGRAPGRKSVRRHLLTGLAGCGKCGNHLAGSYRADGRVVYVCKACHGVAILADNIEPILYHIVAERLAMPDAVDLLRREIHDAAEAETVRLELETLYGELDRLAVERAEGLLTARQVKISTDIVNAKITKLQACQLDQERLRVLDGIPLGTPQVAGTIAELSPDRFRAVLDVLAEVVVQPVGKCGRVSNPERVQVNWR

SEQ ID NO: 2683 - protein, 452 aa, synthetic construct
MKAAIYIRVSTREQVENYSIHAQTEKLTALCRSKDWDVYDIFIDGGYSGSNMNRPALNEMLSKLHEIDAVVVYRLDRLSRSQRDTITLIEEYFLKNNVEFVSLSETLDTSSPFGRAMIGILSVFAQLERETIRDRMVMGKIKRIEAGLPLTTAKGRTFGYDVIDTKLYINEEEARQLRLIYDIFEEERSITFLQKRLKKLGFKVRTYNCYNNWLTNDLYCGYVSYKDKVHVKGIHEPIISEEQFYRVQEIFARMGKNPNMNRDSASLLNNLVVCSKCGLGFVHRRKDAMSRDKKYHYRYYSCKTYKHIHELEKCGNKIWRADKLEELIINRVNDYSLASRNVDKEDELDSLNEKLKIEHAKKKRLFDLYINGSYEVSELDSVMNDIDAQINYYESQIEANEELKKNKKIQENLAHLATVDFDSLEFREKQLYLKSLINKIYIDGEQVTIEWL

SEQ ID NO: 2684 - protein, 485 aa, synthetic construct
MTKKVAIYTRVSTTNQAEEGFSIDEQIDRLTKYAEAMGWQVSDTYTDAGFSGAKLERPAMQRLINDIENKAFDTVLVYKLDRLSRSVRDTLYLVKDVFTKNKIDFISLNESIDTSSAMGSLFLTILSAINEFERENIKERMTMGKLGRAKSGKSMMWTKTAFGYYHNRKTGILEIVPLQATIVEQIFTDYLSGISLTKLRDKLNESGHIGKDIPWSYRTLRQTLDNPVYCGYIKFKDSLFEGMHKPIIPYETYLKVQKELEERQQQTYERNNNPRPFQAKYMLSGMARCGYCGAPLKIVLGHKRKDGSRTMKYHCANRFPRKTKGVTVYNDNKRCDSGTYDLSNLENAVIDNLIGFQENNDSLLKIINGNNQPILDTSNFEKQISQIDKKIRKNSDLYLNDFITMDELKDRTDSLQAEKKLLEAKISENKFNDSTDVFELVKTQLGSIPINELSYDNKKKIVNNLVSKVDVTADNVDIIFKFQLA

SEQ ID NO: 2685 - protein, 485 aa, synthetic construct
MTKKVAIYTRVSTTNQAEEGFSIDEQIDRLTKYAEAMGWQVSDTYTDAGFSGAKLERPAMQRLINDIENKAFDTVLVYKLDRLSRSVRDTLYLVKDVFTKNKIDFISLNESINTSSAMGSLFLTILSAINEFERENIKERMTMGKLGRAKSGKSMMWTKTAFGYYHNRKTGILEIVPLQATIVEQIFTDYLSGISLTKLRDKLNESGHIGKDIPWSYRTLRQTLDNPVYCGYIKFKDSLFEGMHKPIIPYGTYLRVQKELEERQQQTYERNNNPRPFQAKYMLSGTARCGYCGAPLKIVLGHKRKDGSRTMKYHCANRFPRKTKGVTVYNDNKKCDSGTYDLSNLENTVIDNLIGLQENNDSLLKIINGNNQPILDTSSFKKQISQIDKKIQKNSDLYLNDFITMDELKARTDSLQAEKKLLEAKISENKFNDSTDVFKLVKTQLGSIPINELSYDDKKKIVNNLVSKVDVTADNVGIIFKFQLA

SEQ ID NO: 2686 - protein, 485 aa, synthetic construct
MTKKVAIYTRVSTTNQAEEGFSIDEQIDRLTKYAEAMGWQVSDTYTDAGLSGAKLERPAMQRLINDIENKAFDTVLVYKLDRLSRSVRDTLYLVKDVFTKNKIDFISLNESIDTSSAMGSLFLTILSAINEFERENIKERMTMGKLGRAKSGKSMMWTKTAFGYYHNRETGILEIVPQQATIVEQIFTDYLSGISLTKLRDKLNESGHIGKDIPWSYRTLRQTLDNPVYCGYIKFKDGLFEGMHEPIIPYETYLKVQKELEERQQQTYERNNNPRPFQAKYMLSGMARCGYCGAPLRIVLGHKRKDGSRTMKYHCANRFPRKTKGITVYNDNKKCDSGTYDLSSLENIVIDNLIGFQEDNDSLLKIINGNNQPILDTSSIRKQISQIDKKIQKNGDLYLNDFITMGELKDRTDRLQAEKKLLKAKISENKFNDSTDVFELVKTQLGSIPINELSYDNKKKIVNNLVSKVDVTADDVVIIFKFQPA

SEQ ID NO: 2687 - protein, 469 aa, synthetic construct
MSYTTPVRAAVYLRISEDRSGEQLGVARQREDCLKLCGQRKWVPVEYLDNDVSASTGKRRPAYEQMLADITAGKIAAVVAWDLDRLHRRPVELEAFMSLADEKRLALATVAGDVDLATPQGRLVARLKGCVAAHETEHKKARQRRAARQKAERGHPNWSKAFGYLPGPNGPEPDPQTAPLVKQAYADILAGASLGDVCRQWNDAGAFTITGRPWTTTTLSKFLRKPRNAGLRAYKGARYGPVDRDAIVGKAQWSPLVDEATFWAAQAVLDAPGRAPGRKSVRRHLLTGLAGCGKCGNHLAGGHRTDGRVVYVCKACHGVAILADNIEPILYHIVAERLAMPDAVDLLRREIHDTAEAETTRLELETLYGELDCLAVERAEGLLTARQVKISTDIVNAKITRLQARQLDQERLRVFDGIPLGTPQVAGMIAELSPDRFRAVLDVLAEVVVQPVGKGGRIFNPERVQVNWR

SEQ ID NO: 2688 - protein, 452 aa, synthetic construct
MKAAIYIRVSTREQVENYSIQAQTEKLTALCRSKDWDVYDIFIDGGYSGSNMNRPALNEMLSKLHEIDAVVVYRLDRLSRSQRDTITLIEEYFLKNNVEFVSLSETLDTGSPFGRAMIGILSVFAQLERETIRDRMVMGKIKRIEAGLPLTTAKGRTFGYDVIDTKLYINEEEAKQLQLIYDIFEEEQSITSLQKRLKKLGFKVHTYNRYSNWLTNDLYCGYVSYKDKVHVKGIHEPIISEEQFYRVQEIFARMVKNPNMNRDSASLLNNLVVCSKCGLGFVHRRKDAMSRDKKYHYRYYSCKTYKHIHELEKCGNKTWRADKLEELIINRVNNYSLASRNVDKEDELDSLNEKLKIEHAKRRRLFDLYINGSYDVSGLDSMMNDIDAQINYYESQIEANEELKKNKQMQENLAELAAVDFDSLEFREKQLYLKSLINKIYIDGEQVTIEWL

SEQ ID NO: 2689 - protein, 485 aa, synthetic construct
MTKKVAIYTRVSTTNQAEEGFSIDEQNDRLTKYAEAMGWQVSDTYTDAGLSGAKLERPAMQRLINDIENKAFDTVLVYKLDRLSRSVRDTLYLVKDVFTKNKIDFISLSESIDTSSAMGSLFLTILSAINEFERENIKERMTMGKLGRAKSGKSMMWTKTAFGYYHNRETGILEIVPLQATIVEQIFTDYLSGISLTKLRDKLNESGHIGKDIPWSYRTLRQTLDNPVYCGYIKFKDSLFEGMHEPIIPYETYLRVQKELEERQQQTYERNNNPRPFQAKYMLSGMARCGYCGAPLRVVLGHKRKDGSRTMKYHCANRFPRKTKGVTVYNDNKKCDSGTYDLSNLENAVIDNLIGFQENNDSLLKIINGDNQPILDTCSLKKQICQIDKKIQKSSDLYLNDFITMDKLKDRTDSLQAEKELLKAKISENKFNGSTDVFELVRTQLGSIPINELSYDNKKKIVNNLVSKVDVTADSVDIIFKFQLA

SEQ ID NO: 2690 - protein, 485 aa, synthetic construct
MTKKVAIYTRVSTTNQAEEGFSIDEQVDRLTEYAEAMGWQVSDTYTDAGVSGAKLERPAMQRLINDIENKAFDTVLVYKLDRLSRSVRDTLYLVKDVFTKNKIDFISLNESIDTSSAMGSLFLTILSAINEFERENIKERMTMGKLGRAKSGKSMMWTKTAFGYYHNRKTGILEIVPLQATIVEQIFTDYLSGISLTKLRDKLNESGHIGKDIPWSYRTLRQTLDNPVYCGYIKFKDSLFEGMHKPIIPYETYLKVQKELEERQQQAYERNNNPRPFQAKYMLSGMARCGYCGAPLRIVLGRKRKDGSRTMKYHCANRFPRKTKGITVYNDNKKCDSGTYDLRSLENTVIDNLVGFQENSDSLLKIITDNNQPILDTSSFEKQISQIDKKIQKNSDLYLNDFITMDELKDRTDSLQAEKKQLKAKISENKFNDSTNVFELVKTQLGSIPINELSYDNKKKIVNNLVSKVDVTADNVDIIFKFQLA

SEQ ID NO: 2691 - protein, 469 aa, synthetic construct
MSYTTPMRAAVYLRISEDRSGEQLGVARQREDCLKLCDQRKWVPVEYLDNDVSASTGKRRPAYEQMLADITAGKIAAVVAWDLDRLHRRPIELEAFMSLADEKRLALATVAGDVDLATPQGRLVARLKGSVAAHETEHKKARQRRAARQKAERGLPNWSKAFGYLPGPNGPEPDPRTAPLVKQAYADILAGASLGDVCRQWNAAGAFTITGRPWTSTTLSKFLRKPRNAGLRAYKGARYGPVDRDAIVGRAQWSPLVDEATFWAAQAVLDAPGRAPGRKSVRRHLLTGLAGCGKCGNHLAGSYRTDGRVVYVCKACHGVAILADNIEPILYRIVAERLAMPDAVGLLRREIHDATEAETIRLGLETLYGELDRLAVERAEGLLTARQVKISTDIVSAKITKLQARQLDQERLRVLDGIPLGTPQVAGMIAELSPDRFRAVLDVLAEVVVQPVGKSGRTFNPERVRVNWR

SEQ ID NO: 2692 - protein, 485 aa, synthetic construct
MTKKVAIYTRVSTTNQAEEGFSIDEQIDRLTKYAEAMGWQVSGTYTDAGLSGAKLGRPAMQRLINDIENKAFDTVLVYKLDRLSRSVRDTLYLVKDVFTKNKIDFISLNESIDTSSAMGSLFLTILSAINEFERENIKERMTMGKLGRAKSGKSMMWTKTAFGYYHNRKTGILEIVPLQATIVEQIFTDYLSGISLTKLRDKLNESGHIGKDIPWSYRTLRQTLDNPVYCGYIKFKDSLFEGMHKPIIPYETYLKVQKELEERQQQTYERNNNPRPFQAKYMLSGMARCGYCGAPLKIVLGHKRKDGSRTMKYHCANRFPRKTKGVTVYNDNKRCDSGTYDLSNLENTVIDNLIGLQENNDGLLKIINGNNQPILDTSSFKKQISQIDKKIQKNGDLYLNDIITMDELKERTDSLQAEKKLLKAKISENKFNDSTDVFELVKAQLGSIPINELSYDNKKKIVNNLVSKVDVTADNVDIIFKFQLA

SEQ ID NO: 2693 - protein, 452 aa, synthetic construct
MKAAIYIRVSTREQVENYSIQAQTERLTALCRSKDWDVYDIFIDGGYSGSNMNRPALNEMLGKLHEIDAVVVYRLDRLSRSQRDTITLIEEYFLRNNVEFVSLSETLDTSSPFGRAMIGILSVFAQLERETIRDRMVMGKIKRIEAGLPLTTAKGRTFGYDVIDTKLYINEEEARQLQLIYDIFEEERSITSLQKRLKKLGFKVRTYNRYNNWLTNDLYCGYVSYKDKVHVKGIHEPIISEEQFYRVQEIFTRMGKNPNMNRDSASLLNNLVVCSKCGLGFVHRRKDAMSRDKKYHYRYYSCKTYKHIHELEKCGNKIWRADKLEELVINRVNNYSLACRDVDKEGELDSLNEKLKIEHAKKKRLFDLYINGSYEVSELDSMMGDIDAQISYYESQIEANEELKKNKKIQENLADLAVVDFDSLEFREKQLYLKRLINKIYIDGEQVTIEWL

SEQ ID NO: 2694 - protein, 469 aa, synthetic construct
MSYTNPVRAAVYLRISEDRSGEQLGVARQREDCLKLCGQRKWEPVEYLDNDVSASTGKRRPAYEQMLADITAGKIAAVVAWDLDRLHRRPIELEAFMSLADERRLALATVAGDVDLATPQGRLVARLKGCVAAHETEHKKARQRRAARQKAERGHPNWSKAFGYLPGPNGPEPDPRTAPLVKQAYADILAGASLGDVCRQWNDAGAFTITGRPWTTTTLSKFLRKPRNAGLRAYKGARYGPVDRDAIVGKAQWSPLVDEATFWVAQAVLDAPGRAPGRKSVRRHLLTGLAGCGKCGNHLAGSYRTDGRVVYVCKACHGVAILADNIEPILYHIVAERLAMPDAVDLLSCEVHDAAEAETTRLELEALYGELDRLAVERAEGLLTARQVKISTDIVNAKITKLQARQLDQERLRVFDGIPLGTPQVAGMIEELSPNRFRAVLDVLAEVVVQPVGKRGRIFNPERVQVNWR

SEQ ID NO: 2695 - protein, 469 aa, synthetic construct
MSYTTPVRAAVYLRISEDRSGEQLGVARQREDCLKLCDQRKWVPVEYLDNDVSASTGKRRPAYEQMLADITAGKIAAVVAWDLDRLHRRPIELEAFMSLADEKRLALATVAGDVDLATPQGRLVARLKGSVAAHETEHKKARQRRAARQKAERGHPNWSKAFGYLPGPNGPEPDPRTAPLVKQAYADILAGASLGDVCRQWNDAGALTITGRPWTTTTLSKFLRKPRNAGLRAYKGARYGPVDRDAIVGKAQWSPLVDEATFWAAQAVLDAPGRAPGRKSVRRHLLTGLAGCGKCGNHLAGSYRTDGQVVYVCKACYGVAILADNIVPTLYHVVAERLAMPDAVDLLRHEIHDAAEAEAIRLELEILYGELDRLAVERAEGLLTARQVKISTDIVNAKITKLQARQLDQERLRVFDGIPLGTPQVAGMIAELSPGRFRAVLDVLAEVVVQPVGRSGRIFNPERVQVNWR

SEQ ID NO: 2696 - protein, 469 aa, synthetic construct
MSYTTPVRAAVYLRISEDRSGEQLGVARQREDCLKLCDQRKWVPVEYLDNDVSASTGKRRPAYEQMLADITAGKIAAVVAWDLDRLHRRPIELEAFMSLADEKRLALATVAGDVDLATPQGRLVARLKGSVAAHETEHKKARQRRAARQKAERGHPNWSKAFGYLPGPNGPEPDPRTAPLVKQAYADVLAGASLGDVCRQWNDVGAFTVTGRPWTTTTLSKFLRKPRNAGLRAYKGVRYGPVDRDAIVGKAQWSPLVDEATFWAAQTVLDAPGRAPGRKSVRRHLLTGLAGCGKCGNHLAGSYRTDGRVVYVCKACHGVAILADNIEPMLYHIVAERLAMPDAVDLLRREIQDATEAEAIRLELETLYGELDRLAVERAEGLLTARQVKISTDIVNAKITKLQVRQQDQERLRVLGGIPLGTPQVAGMIAELSPDRFRAVLDVLAEVVVQPVGKGGRISSPGRVQVNWR

SEQ ID NO: 2697 - protein, 452 aa, synthetic construct
MKAAIYIRVSTQEQVENYSIQAQTEKLTALCRSKDWDVYDIFIDGGYSGSNMNRPALNEMLSKLHEIDAVVVYRLDRLSRSQRDTTTLIEEYFLKNNVEFVSLSETLDTSSPFGRAMIGILSVFAQLERETIRDRMVMGKIKRIEAGLPLTTAKGRTFGYDVIDTKLYINEEEAKQLQLIYDIFEEEQSITFLQKRLKKLGLKVHTYSRYNNWLTNDLYCGYVSYKDKVHVKGIHEPIISEEQFYRVQEIFTRMGKNPNMNRDSASLLSNLVVCSKCGLGFVHRSKDTMSRGKKYHYRYYSCKTYKHTHELEKCGNKIWRADILEELIINRANNYSFASRNVGKEDELDSLNEKLKIEHAKKRRLFDLYINGSYEVSELDSMMNDIDGQINYYESQIEANEGLKKNKRIRENLADLATVDFDSLEFREKQLYLKSLINKIYIDGEQVTIEWL

SEQ ID NO: 2698 - protein, 469 aa, synthetic construct
MCYTTPVRAAVYLRISEDRSGEQLGVARQREDCLKLCDQRKWVPVEYLDNDVSASTGRRRPAYEQMLADIAAGKIAAVVAWDLDRLHRRPIELEAFMSLADEKRLALATVAGDVDLATPQGRLVARLKGSVAAHETEHKKARQRRAARQKAERGHPNWSKAFGYLPGPNGPEPDPRTAPLVKQAYADILAGASIGDVCRQWNGAGALTITGRPWTTTTLSKFLRKPRNAGLRAYKGARYGPVDRDAIVGKAQWSPLVDEATFWAAQAVLDAPGRAPGRKSVRRHLLTGLAGCGKCGNRLAGSYRTDGRVVYVCKACHGVAILADNIEPILYHIVAERLAMPDAVDLLRREIHDAAEAETIRLELETLYGELDRLAVERAEGLLTARQVKISTDIVNAKITKLQTRQLDQERLRVFDGIPLGTPHVAGVVAELSPDRFRAVLDVLAEVVVQPVGKSGRIFNSERVQVNWR

SEQ ID NO: 2699 - protein, 485 aa, synthetic construct
MTKKVAIYTRVSTTNQAEEGFSIDEQIDRLTKYAEAMGWQVSDTYTDAGFSGAKLGRPAMQRLINDIENKAFDTVLVYKLDRLSRSVRDTLYLVKDVFTKNKIDFISLNESINTSSAMGSLFLTILSAINEFERENIKERMTMGKLGRAKSGKSMMWTKTAFGYYHNRKTGILEIVPLQATIVEQIFTDYLSGISLTKLRDKLNESGHIGKDIPWSYRTLRQTLDNPVYCGYIKFKDSLFEGMHKPIIPYETYLKVQKELEERQQQTYERNNNPRPFQAKYMLSGMARCGYCGAPLKIVLGHKRKDGSRTMKYHCANRFPRRTKGVTVYNDNKKCDSGTYDLSSLENAVIDNLIGLQENNDSLLKIINGNNQPILDASSFNKQISQIDKKIQKNSDLYLNDFITMDELKDRTDSLQAEKKLLKAKISENKFNDSTDVFELVKTQLGSIPINELSYDNKKKIVNNLVSKVDVTADNVDIIFKFQLA

SEQ ID NO: 2700 - protein, 452 aa, synthetic construct
MKAAIYIRVSTREQVENYSIQAQTEKLTALCRSKDWDVYDIFIDGGYSGSNMNRPALNEMLSKLHEIDAVVVYRLDRLSRSQRDTITLIEEYFLKNNVEFVSLSETLDTSSPFGRAMIGILSVFAQLERETIRDRMVMGKIKRIEAGLPLTTAKGRTFGYDVIDTKLYINEEEAKQLQLIYDIFEEEQSITFLQKRLKKLGFKVRTYNRYNNWLTNDLYCGYVSYKDKVHVKGIHEPIISEEQFYRVQEIFTRMGKNPNMNRDSASLLNNLVVCSKCGLGFVHRRKDAMSRDKKYHYRYYSCKTYKHIHELEKCGNKIWRADKLEELVINRVNSYSVASRNADKEDELDSLNEKLKIEHAKKRRLFDLYINGSCEVSELDSMMNDIDAQINYYESQIDANEELKKNKKIQENLADLASVDFDSLEFREKQLYLKSLINKIYIDGEQVTIEWL

SEQ ID NO: 2701 - protein, 452 aa, synthetic construct
MKAAIYIRVSTREQVENYSIQAQTEKLTALCRSKDWDVYDIFIDGGYSGSNMNRPALNEMLSKLHEIDAVVVYRLDRLSRSQRDTITLIEEYFLKNNVEFVSLSETLDTSSPFGRAMIGILSVFAQLERETIRDRMVMGKIKRVEAGLPLTTAKGRTFGYDVIDTKLYINEEEAKQLQLIYDIFEEERSITFLQKRLKKLGFKVHTYNRYNNWLTNDLYCGYVSYKDKVHVKGIHEPIISEEQFYRVQEIFTRMGKSPNMNRDSASLLNNLVVCSKCGLGFVHRRKDTMSRGKKYHYRYYSCKTYKHTHELEKCGNKIWRADKLEELVINRVNNHSFASRNVDKEDELASLNEKLRIEHAKKKRLFDLYINGSYEVSELDSMMNDIDAQINYYESQIEANEELKRNKKIQENLANLATVGYDSLEFREKQLYLKSLINKIYIDGELVTIEWL

SEQ ID NO: 2702 - protein, 485 aa, synthetic construct
MTKKVAIYTRVSTTNQAEEGFSIDEQIDRLTKYAEAMGWQVSDTYTDAGVSGAKLERPAMQRLINDIENKAFDTVLVYKLDRLSRSVRDTLYLVKDVFTKNKIDFISLNESIDTSSAMGSLFLTILSAVNEFERENIKERMTMGKLGRAKSGKSMMWTKTAFGYYHNRKTGILETVPLQATIVEQIFTDYLSGISLTKLRDKLNESGHIGKDIPWSYRTLRQTLDNPVYCGYIKFKGSLFEGLHKPIIPYETYRKVQKELEERQQQTYERNNNPRPFQAKYMLSGMARCGYCGAPLRIVLGRKRKDGSRTMKYHCANRFPRKTKGITVYNDNKKCDSGTYDLSDLENTVINNLIGFQENNDSLLKIINGDNQPILDTSSFKERISQIDKKIQKNSDLYLNDFITMDELKDRTDSLQAERKLLKAKISENKFNGSTNVFELVKTQLGSIPISELSYDDKKRIVNNLVNKVDVTADNVDIIFKFQLA

SEQ ID NO: 2703 - protein, 485 aa, synthetic construct
MTKKVAIYTRVSTTNQAEEGFSIDEQIDRLTKYAEAMGWQVSGTYTDAGSSGAKLERPAMQRLINDIENKAFDTVLVYKLDRLSRSVRDTLYLVKDVFTKNKIDFISLNESIDTSSAMGSLFLTILSAINEFERENIRERMTMGKLGRAKSGKSMMWTKTAFGYYHNRKTGILEIVPLQATIVEQIFTDYLSGISLTKLRDKLNESGHIGKDIPWSYRTLRQTLDNPVYCGYIKFKGSLFEGMHKPIIPYETYLKAQKELEERQQQTYERNNNPRPFQAKYMLSGMARCGYCGAPLRIVLGHKRKDGSRTMKYHCANRFPRKTKGVAVYNDNKKCDSGTYDLSGLENTVIDSLIGLQENNDSLLKIINSNNRPILDTSSFKEQISQIDKKIQKNSDLYLNDFITMDELKDRTDSLQAEKKLLKAKISENKFNDSTDVFELVKTQLGSIPISELSYDDKKKIVNNLVSKVDVTADNVDIIFKFQLA

SEQ ID NO: 2704 - protein, 452 aa, synthetic construct
MKAAIYIRVSTREQVENYSIQAQTEKLTALCRSKDWDVYDTFIDGGYSGSNMNRPALNEMLSKLHEIDAVVVYRLDRLSRSQRDTITLIEEYFLKNNVEFVSLSETLDTSSPFGRAMIGILSVFAQLERETIRDRMVMGKIKRIEAGLPLTTAKGRTFGYDVIDTKLYVNEEEAKQLQLIYDIFEEEQSITLLQKRLKKLGYKVRTYNRYNNWLTNDLYCGYVSYKDKVHVKGIHEPIISEEQFYRVQEIFTRMGKNPNMNRDSASLLNGLVVCSKCGLGFVHRRKDAMSRDKKYHYRYYSCKTYKHIHELEKCGNKIWRADKLEELIINRVNNYSLAGRNVDKEDELDSLNEKLKIEHAKKKRLFDLYINGSYEVSELDSMMSDIDAQINCYESQIEANEELKKNKRIQENLADLATVDFDSLEFHEKQLYLKSLINKIYIDGEQVTIEWL

SEQ ID NO: 2705 - protein, 485 aa, synthetic construct
MTKKVAIYTRVSTTNQAEEGFSIDEQIDRLTKYAEAMGWQVSDTYTDAGFSGAKLERPAMQRLINDIENKAFDTVLVYKLDRLSRSVRDTLYLVKDVFTKSKIDFISLSESIDTSSAMGSLFLTILSAINEFERENIKERMTMGKLGRAKSGKSMMWTKTAFGYYHNRKTGILEIVPLQATIVEQIFTDYLSGISLTKLRDKLNESGHIGKDIPWSYRTLRQTLDNPVYCGYIKFKDSLFEGMHKPIIPYETYLKVQKELEERQQQTYERNNNPRPFQAKYMLSGMARCGYCGAPLRIALGRKRKDGSRTMKYHCANRFPRKTKGVTVYNDNKKCDSGTYDLSYLENTVIDNLIGFQENNDSLLKIINGKNQPILDTSSFKKQISQIDKKIQKNSDLYLNDFITMDELKDRTDSLQAEKKLLKAKISENKFNDSTDVFELVKTRLGSIPISELSYDNKKKIVNSLVSKVDVTADSVDIIFKFQLA

SEQ ID NO: 2706 - protein, 469 aa, synthetic construct
MCYTTPVRAAVYLRISEDRSGEQLGVARQREDCLKLCGQRKWVPVEYLDNDVSASTGKRRPAYEQMLADITAGKIAAVVAWDLDRLHRRPIELEAFMSLADEKRLALATVAGDVDLATPQGRLVARLKGSVAAHETEHKKVRQRRAARQKAERGLPNWSKAFGYLPGPNGPEPDPRTAPLVKQAYADILAGASLGDVCRQWNDAGAFTITGGPWATTTLSKFLRKPRNAGLRAYKGARYGPVDRDAIVGKAQWSPLVDEATFWAAQAVLDAPGRAPGRKSVRRHLLTGLAGCGKCGNHLAGSCRTDGRVVYVCKACHGVSILAVNIEPILYHVVAERLAKPDAVDLLRREIHDAAEAVTIRLELETLYGELDRLAVERAEGLLTARQVRISTDIVNAKITKLRACQLDQERLRVFDGIPLGTPQVAGMIAELSPNRFRAVLDVLAEVVVQPVGKSGRIFNPERVQVNWR

SEQ ID NO: 2707 - protein, 452 aa, synthetic construct
MKAAIYIRVSTREQVENYSIQAQTEKLTALCRSKDWDVYDIFIDGGYSGSNMNRPALNEMLSKLHEIDAVVVYRLDRLSRSQRDTITLIEEYFLKNNVEFVSLSETLDTSSPFGRAMIGILSVFAQLERETIRDRMVMGKIKRVEAGLPLTTAKGRTFGYDVIDTKLHINEEEAKQLQLIYDIFEEEQSITFLQKRLKKLGFKVRTYNRYSNWLTNDLYCGYVSYKDKVHVKGIHEPIISEEQFHRVQEIFTRMGKNPNMNRDSASLLNNLVVCSKCGLGFVHRRKDTMSRGKKYHYRYYSCKTYKHTHELDKCGNKIWRADKLEELIINRVNNYSFASRNVGKEDELDSLNEKLRIEHAKKKRLFDLYINGSYEVSELDSMMSDIDAQINYYEGQIEANEELKKNKKIQENLADLATMDYDSLEFREKQLYLKSLINKIYIDGEQVTIEWL

SEQ ID NO: 2708 - protein, 469 aa, synthetic construct
MSYTTPVRAAVYLRISEDRSGEQQGVARQREDCLKLCDQRKWVPVEYLDNDVSASTGKRRPAYEQMLADITAGKIAAVVAWDLDRLHRRPIELEAFMGLADEKRLALATVAGDVDLATPQGRLVARLKGSVAAHETEHKKARQRRAARQKAERGYPNWSKAFGYLPGPNGPEPDPRTAPLVKQAYADILAGASLGDVCRQWNAAGAFTITGRPWATTTLSKFLRKPRNAGLRAYKGARYGPVDRDAIVGKAQWSPLVDEATFWAAQAVLDAPGRAPGRKSVRRHLLTGLAGCGKCGNHLAGSYRTDGRVVYVCKACHGVAILADNIEPILYHIVAERLAMPDAVDLLRREILDAAEAETIRLELKTLYGELDRLAVERAEGLLTARQVKISTDIVNAKITKLRACQLDQERLRVFGGIPLGTPQVAGIIAELSPDRFRAVLDVLAEVVVQPVGKSGRIFNPERVQVNWR

SEQ ID NO: 2709 - protein, 452 aa, synthetic construct
MKAAIYIRVSTREQVENYSIQAQTEKLTALCRSKDWDVYDIFIDGGYSGSNMNRPALNEMLSKLHEIDAVVVYRLDRLSRSQRDTITLIEEYFLKNNVEFVSLSETLDTSSPFGRAMIGILSVFAQLERETIRDRMVMGKIKRIEAGLPLTTAKGRTFGYDVIDTKLYINEEEARQLQLIYDIFEEEQSITFLQKRLKKLGFKVHTYNRYSSWLTNDLYCGYVSYKDKVHVKGIHEPIISEEQFYRVQEIFTRMSKNPNMNRESASLLNNLVVCSKCGLGFVHRRKDTVSRGKKYHYRYYSCKTYKHIHELEKCGNKIWRADKLEELVINRVNNYSFASRNVDKEDELDSLSEELKIEHAKRKRLFDLYINGSYEVSELDSMMNDIDAQINYYESQIVANEELKRNKKIQENLANLATVDYDSLEFREKQLYLKSLINKIYIDGEQVIIEWL

SEQ ID NO: 2710 - protein, 452 aa, synthetic construct
MKAAIYIRVSTREQVENYSIQAQTEKLTALCRSKDWDVYDIFIDGGYSGSNMNRPALNEMLSKLHEIDAVVVYRLDRLSRSQRDTITLIEEYFLKNNVEFVSLSETLDTSSPFGRAMIGILSVFAQLERETIRDRMVMGKIKRIEAGLPLTTAKGRTFGYDVIDTKLYINEEEAKQLQLIYDIFEEEQSITSLQKRLKKLGLKVHTYNRYNNWLTNDLYCGYVSYKDKVHVKGIHEPIISEEQFYRVQEIFIRMGKNPNMNRDSASLLNNLVVCSKCGLGFVHRRKDTTSRGKKYHYRYYSCKTYKHTHELEKCGNKIWRADKLEELVINRVNSYSFASRSVDKEDELGSLNEKLKIEHAKKKRLFGLYINGGYEVSELDSMMNDIDAQINYYESQIEANEELKKNKKIQENLADLATVDFDSLEFREKQLYLRSLINKIYIDGEQVTIEWL

SEQ ID NO: 2711 - protein, 452 aa, synthetic construct
MKAAIYIRVSTREQVENYSIQAQTEKLTALCRSKDWDVYDIFIDGGYSGGNMNRPALNEMLSKLHEIDAVVVYRLDRLSRSQRDTITLIEEYFLKNNVEFVSLSETLDTSSPFGRAMIGILSVFAQLERETIRDRMVMGKIKRIEAGLPLTTAKGRTFGYDVIDTKLYINEEEAKQLQLIYDIFEEERSITFLQKRLKKLGFRVRSYSRYNNWLTNDLYCGYVSYKDKVHVKGIHEPIISEEQFYRVQEIFTRMGKNPNMNRDSASLLNNLVVCSKCGRGFVHRRKDAMSRDKKYHYRYYSCKTYKHIHELERCGNKIWRADKLEELIINRVNNYSFASRNVDKESELDSLNEKLKIEHAKKKRLFDLYISGSYEVSELDSMMSDIDAQINYYESQIEANEELRKNKKIQENLAYLATVDFDSLEFREKQLYLKSLISKIYIDGEQVTIEWL

SEQ ID NO: 2712 - protein, 485 aa, synthetic construct
MTKKVAIYTRVSTTNQAEEGFSIDEQIDRLTKYAEAMGWQVSDTYTDAGLSGAKLERPAMQRLINDIESKAFDTVLVYKLDRLSRSVRDTLYLVKDVFTKNKIDFISLNESIDTSSAMGSLFLTILSAINEFERENIKERMTMGKLGRAKSGKSMMWTKTAFGYYHNRKTGILEIVPLQATIVEQIFTDYLSGISLTKLRDKLNESGHIGKDIPWSYRTLRQTLDNPVYCGYIKFKDSLFEGMHKPIIPYETYLKVQKELEERQQQAYERNNNPRPFQAKYMLSGMARCGYCGAPLKIVLGHKRKDGSRTMKYHCANRFPRRTKGVTVYNDNKKCDSGTYDLSTLENTVIDNLVGFQENNDNLLKIINGSNQPILDTSSFKKQISQIDKKIQKNSELYLNDFITMDELKDRTDSLQAEKKLLRAKISENKFNDSTDVFELVKTQLGSIPINELSYDNKKKIVNNLVSKVDVTADNVVIIFKFQLA

SEQ ID NO: 2713 - protein, 452 aa, synthetic construct
MKAAIYIRVSTQEQVGNYSIQAQTEKLTALCRSKDWDVYDIFIDGGYSGSNMNRPALNEMLSKLHEIDAVVVYRLDRLSRSQRDTTTLIEEYFLKNNVEFVSLSETLDTSSPFGRAMIGILSVFAQLERETIRDRMVMGKIKRIEAGLPLTTAKGRTFGYDVIGTKLYINEEEAKQLRLIYDIFEEEQSITSLQKRLKKLGFKVRTYNRYNNWLTNDLYCGYVSYKDKVHVKGIHEPIISEEQFYRVQEIFTRMGKNPNMNRDSASLLNNLVVCSKCGLGFVHRSKDTMSRGKKYRYRYYSCKTYKHTHELEKCGNKTWRADKLEELIINRVNNYSFASRNVDKEGELDSLNEKLEIEHAKKKRLFDLYINGSYEVSELDSMMNDIDAQINYYESQIEANEKLKKNKRIQENLADLATVDFDSLEFREKQLYLKSLINKIYIDGEQVTIEWL

SEQ ID NO: 2714 - protein, 452 aa, synthetic construct
MKAAIYIRVSTREQVENYSIQAQTEKLTALCRSKDWDVYDIFIDGGYSGSNMNRPALNEMLSKLHEIDAVVVYRLDRLSRSQRDTITLIEEHFLKNNVEFVSLSETLDTSSPFGRAMIGILSVFAQLERETIRDRMVMGKIKRIEAGLPLTTAKGRTFGYDVIDTKLYINEEEAKQLQLIYDIFEEERSITFLQKRLKKLGFKVRTYNRYNNWLTNDLYCGYVSYKDKVHVKGIHEPIISEEQFYRVQEIFARMGKNPNMNRDSASLLNNLVVCSKCGLGFVHRRKDAMGRDKKYHYRYYSCKTYKHIHELEKCGNKIWRADKLEELIINRVNNYSLASRNVDKEDELDSLNEKLKIEHAKKKRLFDLYINGSYEVRELDSMMNDIDAQISYYESQIEANKELKKNKKIQENLAHLATVDFDSLEFREKQLYLKSLINKIYIDGEQVTIEWL

SEQ ID NO: 2715 - protein, 485 aa, synthetic construct
MIKKVAIYTRVSTTNQAEEGFSIDEQIDRLTKYAEAMGWQVSDTYTDAGFSGAKLERPAMQRLINDVENKAFDTVLVYKLDRLSRSVRDTLYLVKDVFTKNKIDFISLNECIDTSSAMGSLFLTILSAINEFERENIKERMTMGKLGRAKSGKSMMWTKTAFGYYHNRKTGILEIVPLQATIVEQIFTDYLSGISLTKLRDKLNESGHIGKDIPWSYRTLRQTLDNPVYCGYIKFKDSLFEGMHKPIIPYETYLKVQKELEERQQQTYVRNNNPRPFQAKYMLSGMARCGYCGAPLRIALGHKRKDGSRTMKYHCANRFPRKTKGVTVYNDNKKCDSGTYDLSNLENTVIDSLIGFQENDDSLLKIINGNNQPILDTSSFKKQISQIDKKIQKNSDLYLNDFITMDELKDRTDSLQAEKKLLKAKISENKLNDSTDVFELVKTQLGSIPINELSYDNKKRIVNNLVSKVDVTADNVDIIFKFQLA

SEQ ID NO: 2716 - protein, 469 aa, synthetic construct
MSYTTPVRAAVYLRISEDRSGEQLGVARQREDCLKLCDQRKWEPVEYLDNDVSASTGKRRPAYEQMLADITAGKIGAVVAWDLDRLHRRPIELEAFMSLADEKRLALATVAGDVDLATPQGRLVARLKGCVAAHETEHKKARQRRAARQKAERGYPNWSKAFGYLPGPDGPEPDPRTAPLVKQAYADILAGASLGDVCRRWNDAGAFTITGRPWTTTALSKFLRKPRNAGLRAYKGARYGPVDRDAIVGKAQWSPLVDEATFWAAQAVLDAPGRAPGRKSVRRHLLTGLAGCGKCGNHLAGSYRTDGRVVYVCKACHGVAILADNIEPILYHIVAERLAMPDAVDLLRREIHDAAEAETIRLELEALYGELDRLAVERAEGLLTARQVKISTDIVDAKITKLQARQLDQERLRVLDGIPLGTPQVAGVIAELSPDRFRAVLDVLAEVIVQPVGKGGRIFNPERVQVNWR

SEQ ID NO: 2717 - protein, 485 aa, synthetic construct
MTKKVAIYTRVSTTNQAEEGFSIDEQIDRLTKYAEAMGWQVSDTYTDAGISGAKLERPAMQRLINDIENKAFDTVLVYKLDRLSRSVRDTLYLVKDVFTKNKIDFISLNESIDTSSAMGSLFLTILSAINEFERENIKERMTMGKLGRAKSGKSMMWTKTAFGYYHNRKTGILEIVPLQATIVEQIFTDYLSGISLTKLRDKLNESGHIGKDIPWSYRTLRQTLDNPVYCGYIKFKGSLFEGMHKPIIPYETYLKVQKELEERQQQTYERNNNPRPFQAKYMLSGMARCGYCGAPLRIVLGHKRKDGSRIMKYHCANRVPRKTKGITVYNDNKKCDSGTYDLSNLENTVIDNLIGFQENNDSLLKIINGNNQQVLDTSSFKKQISLIDKKIQKNSDLYLNDFITMDELKDRTDSLQAEKKLLKAKISENKFNDSTDVFELVKTQLGSIPINELSYDNKKKIVNNLVSKVDVTADNVDIIFKFQLA

SEQ ID NO: 2718 - protein, 485 aa, synthetic construct
MTKKVAIYTRVSTTNQAEEGFSIDEQIDRLTKYAEAMGWQVSDTYTDAGFSGAKLVRPAMQRLINDIENKAFDTVLVYKLDRLSRSVRDTLHLVKDVFTKNKIDFISLNESIDTSSAMGSLFLTILSAINEFERENIKERMTMGKLGRAKSGKSMMWTKTAFGYYHNRKTGVLEIVPLQATIVEQIFTDYLSGISLTKLRDKLNESGHIGKDIPWSYRTLRQTLDNPVYCGYIKFKGSLFEGMHKPIIPYETYLRVQKELEERQQQTYERNNNPRPFQAKYMLSGMARCGYCGAPLRIVLGHKRKDGSRTMKYHCANRFPRKTKGITVYNDNKKCDSGTYDLNNLENTVIDILIGFQENNDSLLKIINGNNQPILDTSSFKKQISQIDKKIQKNSDLYLNDFITMDELKERTDSLQAEKKLLEAKISENKFNDSTDVFELVKIQLGSIPINELSYDNKKKIVNNLVSKVDVTADSVDIIFKFQLA

SEQ ID NO: 2719 - protein, 485 aa, synthetic construct
MTKKVAIYTRVSTTNQAEEGFSIDEQIDRLTKYAEAMGWQVSGTYTDAGLSGAKLERPAMQRLINDIEDKAFDTVLVYKLDRLSRCVRDTLYLVKDVFTKNKIDFISLNESIDTSSAMGSLFLTILSAINEFERENIKERMTMGKLGRAKSGKSMMWTKTAFGYYHNRKTGILEIVPQQATIVEQIFTDYLSGISLTKLRDKLNESGHIGKDIPWSYRTLRQTLDNPVYCGYIKFKDSLFEGMHKPIIPYETYLKVQKELEERQQQTYERNNNPRPFQAKYMLSGMARCGYCGAPLKIVLGHKRKDGSRTMKYHCTNRFPRKTKGVTVYNDNKKCDSGTYDLGNLENTVIDNLIGLQENNDSLSKIINGNDQPILDTSSLKKQISQIDKKIQKNSDLYLNDFITMDELKDRTDSLQAEKKLLRAKISESKFSDSTDVFELVKTQLGSIPINELSYDNKKKIVNNLVSKVDVTADNVDIIFKFQLA

SEQ ID NO: 2720 - protein, 452 aa, synthetic construct
MKAAIYIRVSTREQVENYSIQAQTEKLTALCRSKDWDVYDIFVDGGYSGSNMNRPALNEMLSKLHEIDAVVVYRLDRLSRSQRDTITLIEEYFLKNNVEFVSLSETLDTSSPFGRAMIGILSVFAQLERETIRDRMVMGKIKRIEAGLPLTTAKGRTFGYDVIDTKLYINEEEAKQLQLIYDIFEEEQSITFLQKRLKKLGFKVRSYNRYNNWLTNDLYCGYVSYKDKVHVKGIHEPIISEEQFYRVQEIFTRMGRNPNMNRGSASLLNNLVVCGKCGLGFVHRRKEIVSRGKKYHYRYYSCKTYKHIHELEKCGNKIWRADKLEELIINRVNDYSLASRNVDKEDELDSLNEKLKTEHAKKKRLFDLYINGSYEVSELDSMMNDIDARINYYESQIEANEELKKNKRTQENLAYLTTVDFDSLEFREKQLYLKSLISKIYIDGEQVTIEWL

SEQ ID NO: 2721 - protein, 485 aa, synthetic construct
MTKKVAIYTRVSTTNQAEEGFSIDEQIDRLTKYAEAMGWQVSDTYTDAGSSGAKLERPAMQRLINDTETKTFDTVLVYKLDRLSRSVRDTLYLVKDVFTKNKIDFISLSESIDTSSAMGSLFLTILSAINEFERENIKERMTMGKLGRARSGKSMMWTKTAFGYYHNRKTGVLEIVPLQATIVEQIFTDYLSGISLTKLRDKLNEGGHIGKDIPWSYRTLRQTLDNPVYCGYIKFKDSLFEGMHKPIIPYETYLKVQKELEERQQQTYERNNNPRPFQAKYMLSGMARCGYCGAPLKIVLGHKRKDGSRTLKYHCANRSPRKTKGVTVYNDNKKCDSGTYDLSNLENTVIDNLIGFQENNDSLLKIINGNNQPILDTSSFEKQISQIDKKIQKNSDLYLNDFITMDELKDRTNSLQAEKKLLKAKISENKFNDSTDVFELVRTQLGSIPINELSYDDKKRIVNSLVSKVDVTADNVDIIFKFQLA

SEQ ID NO: 2722 - protein, 452 aa, synthetic construct
MKAAIYIRVSTQEQVGNYSIQAQTEKLTALCRSKDWDVYDIFIDGGYSGSNMNRPALNEMLSKLHEIDAVVVYRLDRLSRSQRDTTTLIEEYFLKNNVEFVSLSETLDTSSPFGRAMIGILSVFAQLERETIRDRTVMGKIKRIEAGLPLTTAKGRTFGYDVIDTKLYINEEEAKQLQLIYDIFEEEQSITFLQKRLKKLGFKVCTYNRYSNWLTNDLYCGYVSYKDKVHVKGIHEPIISEEQFYRVQEIFTRMGKNPNMNRDSASLLSNLVVCSKCGLGFVHRSKDTMSRGKKYHYRYYSCKTYKHTHELEKCGNKTWRADKLEELIINRVNNYSFAGRNVDKEDELDSLNEKLKIEHAKKKRLFDLYINGSYEVSELDSMMNDIDAQINYYESQIEANEELKKNKKIQENLADLATVDFDSLGFREKQLYLKSLINKIYIDGEQVTIEWL

SEQ ID NO: 2723 - protein, 452 aa, synthetic construct
MKAAIYIRVSTREQVENYSIQAQTEKLTALCRSKDWDVYDIFIDGGYSGSNMNRPALNEMLGKLHEIDAVVVYRLDRLSRSQRDTITLIEEYFLKNNVEFVSLSETLDTSSPFGRAMIGILSVFAQLERETIRDRMVMGKIKRIEAGLPLTTAKGRTFGYDVIDTKLYINEEEAKQLQLIYDIFEEEQSITSLQKRLKELGFKVRTYNRYSNWLTNDLYCGYVSYKDKVHVKGIHEPIISEEQFYRVQEIFTRMGKNPNINRDSASLLNNLVVCSKCGLGFVHRRKDTMSRGKKYRYRYYSCKTYKHIHELEKCGNKIWRADKLEELIIDRVNNYSFASRNADKEDELDSLNVKLRIEHAKKKRLFDLYINGSYEVSELDSMVNDIDAQINHYESQIEANEELKKSKKIQENLADLATVDFDSLEFREKQLYLKGLINKIYIDGEQVTIEWL

SEQ ID NO: 2724 - protein, 469 aa, synthetic construct
MHYTTPVRAAVYLRISEDRSGEQLGVARQREDCLKLCDQRKWVPVEYLDNDVSASTGKRRPAYEQMLADITAGKIAAVVAWDLDRLHRRPVELEAFMSLADEKRLALATVAGDVDLATPQGRLVARLKGCVAAHETEHKKARQRRAARQKAERGHPNWSKAFGYLPGPNGPEPDPRTAPLVKQAYADILAGASLGDVCRQWNDAGAFTITGRRWTTTTLSKFLRKPRNAGLRAYKGARYGPVDRNAIVGKAQWSPLVDEATFWAAQAVLDAPGRAPGRKSVRRHLLTGLAGCGKCGNHLAGSYRTDGRVVYVCKACHGVAILAGNIEPLLYHIVAERLAMPDAVDLLRREIHDAAEAEAIRLELETLYGELDRLAVERAEGLLTARQVKISTDIVNAKITELQARRLDQERLRVLDGIPLGTPQVAGMIAELSPDRFRAVLDVLAEVVVQPVGKSGRISNPERVQVNWR

SEQ ID NO: 2725 - protein, 452 aa, synthetic construct
MKAAIYIRVSTREQVENYSIQAQTEKLTALCRSKDWDVYDIFIDGGYSGSNMNRPALNEMLSRLHEIDAVVVYRLDRLSRSQRDTITLIEEYFLKNNVEFVSLSETLDTSSPFGRAMIGILSVFAQLERETIRDRMVMGKIKRIEAGLPLTTAKGRTFGYDVIDTKLYINEEEAKQLQLIYDIFEEEQSITFLQKRLKKLGFKVRTYNRYNNWLTNDLYCGYVRYKDKVHVKGIHEPIISEEQFYRVQEIFARMGKNPNMNRDSASLLNNLVVCSKCGLGFVHRRKDIMSRDKKYHYRYYSCKTYKHIHELEKCGNKIWRADKLEELVINRVNNYSFESRSADKEVELDSLNGKLKTEHAKKKRLFDLYINGSYEVSELDSMMNDIDAQINYYESQIEASEELKKNKKIQENLANLATVDFDSLEFREKQLYLKSLINKIYIDGEQVTIEWL

SEQ ID NO: 2726 - protein, 485 aa, synthetic construct
MTKKVAIYTRVSTTNQAEEGFSIDEQIDRLTKYAEAMGWQVSDTYTDAGHSGAKLERPAMQRLINDIENKAFDTVLVYKLDRLSRSVRDTLYLVKDVFTKNKIDFISLNESINTSSAMGSLFLTILSAINEFERENIRERMTMGKLGRAKSGKSMMWTKTAFGYYHNRKTGILEIVPLQATIVEQIFTDYLSGISLTKLRDKLNESGHIGKDIPWSYRTLRQTLDNPVYCGYIKFKGSLFGGMHKPIIPYETYLKVQKELDKRQQQTYKRNNNPRPFQAKYMLSGMARCGYCGAPLRIALGRKRKDGSRTMKYHCANRFPRKTKGVTVYNGNKKCDSGTYDLSNLENTVIDNLIGFQENNESLLKIINGNNQPILDTSSFKKQIGQIDKKIQKNSDLYLNDLITMDELKDRTDSLQAEKKLLEVKISENKLNDSTDVFELVKTQLGSIPINELSYDSKKKIVNNLVSKVDVTADSVDIIFKFQLA

SEQ ID NO: 2727 - protein, 452 aa, synthetic construct
MKAAIYIRVSTREQVENYSIQAQTEKLTALCRSKDWDVYDIFIDGGYSGSNMNRPALNEMLSKLHEIDAVVVYRLDRLSRSQRDTITLIEEYFLKNNVEFVSLSETLDTSSPFGRAMIGILSVFAQLERETIRDRMVMGKIKRIEAGLPLTTAKGRTFGYDVIDTKLYINEEEAKQLRLIYDIFEEEQSITFLQKRLKKLGFKVRTYNRYNNWLTNDLYCGYVSYKDKVHVKGIHEPIISEEQFYRVQEIFTRMGKNPNMNRDSASLLNNLVVCSKCGLGFVHRRKDAMSRDKKYHYRYYSCKTYKHIHELEKCGNKIWRADKLEELIINRVNNYSLASRNVDKEDELDSLNEKLKIEHAKKRRLFDLYINGSYEVSKLDSMMNDIDAQINYYESQIEVNEELKKNKKIQENLAYLATVDFDSLEFREKQLYLKSLINKIYIDGEQVTIEWL

SEQ ID NO: 2728 - protein, 469 aa, synthetic construct
MSYTTPVRAAVYLRISEDRSGEQLGVARQREDCLKLCGQRKWVPVEYLDNDVSASTGKRRPAYEQMLADIAAGKIAAVVAWDLDRLHRRPIELEAFMSLADEKRLALATVAGDVDLATPQGRLVARLKGSVAAHETEHKKARQRRAARQKAERGLPNWSKAFGYLPGPNGPEPDPRTAPLVKQAYTDILAGASLGDVCRQWNDAGAFTITGRPWTTTTLSKFLRKPRNAGLRAYKGARYGPVDRDAIVGKAQWSPLVDEVTFWAAQAVLDAPGRAPGRKSVRRHLLTGLAGCGKCGNHLAGSYRTDGRVVYVCKTCHGVSILAVNIEPILYHIVAERLAMPDAVDLLCREIHDAAGAETIRLELETLYGELDRLAVERAEGLLTARQVKISTDIVNAKITKLQARQLDQERLRVFDGIPLGTPQVAGMIAELSPDRFRAVLDVLAEVVVQPVGRNGRIFNSERVQVNWR

SEQ ID NO: 2729 - protein, 469 aa, synthetic construct
MSYTTPVRAAVYLRISEDRSGEQLGVARQREDCLKLCDQRKWVPVEYLDNDVSASDGKRRPAYEQMLADITAGKIAAVVAWDLDRLHRRPIELEAFMSLADEKCLALATVAGDVDLATPQGRLVARLKGSVAAHETEHKKARQRRAARQKAERGHPNWSKAFGYLPGPNGPEPDPRTAPLVKQAYADILAGASLGDVCRQWNDAGAFTITGRPWTTTTLSKFLRKPRNAGLRAYKGARYGPVDRDAIVGKAQWSPLVDEATFWAAQAVLDAPGRAPGRKSVRRHLLTGLAGCGKCGNHLAGSYRTDGRVVYVCKACHGVAILADNIEPILYYIVAERLAMPDAADLLRREIHDATEAETIRLELETLYGELDRLAVERAEGLLTARQVKISTDIVNAKITKLQARQLDQERLRVFDGIPLGTPQVAGTIAELSPDRFRAVLDVLAEVVVQPVGKSGRIFNPERVQVNWR

SEQ ID NO: 2730 - protein, 452 aa, synthetic construct
MKAAIYIRVSTQEQVENYSIQAQIEKLTALCRSKDWDVYDIFIDGGYSGSNMNRPALNEMLSKLHEIDAVVVYRLDRLSRSQRDTTTLIEEYFLKNNVEFVSLCETLDTSSPFGRAMIGILSVFAQLERETIRDRMVMGKIKRIEAGLPLTTAKGRTFGYDVIDTKLYVNEEEAKQLQLIYDIFEEEQSITSLQKRLKKLGFKVRTYNRYNNWLTNDLYCGYVSYKDEVHVKGIHEPIISEEQFYRVQEIFTRMGKNPNMNRDSASLLSNLVVCSKCGLGFVHRSKDTMSCGKKYHYRYYSCKTYKHTHELEKCGNKTWRADRLEELIINRVNNYSFASRNVDEEDKLDSLNEKLKIEHAKKKRLFDLYINGSYEVSELDSMMNDIDAQINYYESQIEVNEELKKNKKIQENLVVLATVDFDSLEFREKQLYLKSLINKIYIDGEQVTIEWL

SEQ ID NO: 2731 - protein, 452 aa, synthetic construct
MKAAIYIRVSTREQVENYSIQAQTEKLTALCRSKDWDVYDIFIDGGYSGSNMNRPALNEMLSKLHEIDAVVVYRLDRLSRSQRDTITLIEEYFLKNNVEFVSLSETLDTSSPFGRAMIGILSVFAQLERETIRDRMVMGKIKRIEAGLPLTTAKGRTFGYDVIDTKLYINEEEAKQLQLIYDIFEEEQSITFLQKRLKKLGFKVRTYNRYNNWLTNDLYCGYVSYKDKVHVKGIHEPIISEEQFYRVQEIFARMGKNPNMNRESASLLNNLVVCSKCGLGFVHRRKDAMSRDKKYHYRYYSCKTYKHIHELEKCGNKIWRADELEELIINRVNNYSLAGRNVDKEDELDSLNEKLKTEHAKKRRLFDLYINGSYEVSELDSMMNDIDAQINYYESQIEANEELRKSKKIQENLANLAAVDFDSLEFREKQLYLKSLISKIYIDGEQVTIEWL

SEQ ID NO: 2732 - protein, 469 aa, synthetic construct
MSYTTPVRAAVYLRISEDRSGEQLGVARQREDCLKLCDQRKWVPVEYLDNDVSASTGKRRPAYEQMLADIAAGKIAAVVAWDLDRLHRRPIELEAFMSLADEKRLALATVAGDVDLATPQGRLVARLKGSVAAHETEHKKARQRRAARQKAELGRPNWSKAFGYLPGPNGPEPDPRTAPLVKQAYADILAGASLGDVCRRWNDAGAFTITGRPWTTTTLSKFLRKPRNAGLRAYKGARYGPVDRDAIVGKAQWSPLVDEATFWAAQAVLDAPGRAPGRKSVRRHLLTGLAGCGKCGNHLAGSYRTDGRVVYVCKACHGVAILADNIEPILYHIVAERLAMPDAVDLLRREIHDAAEAETIRLELETLYGELDRLAAERAEGLLTARQVKISTDIVNAKITKLQARQLDQERLRVFDGIPLGTPQVAGMIAELSPDRFRAVLDVLAEVVVQPVGKSGRIFNTERVQVNWR

SEQ ID NO: 2733 - protein, 469 aa, synthetic construct
MSYTTPMRAAVYLRISEDRSGEQLGVARQREDCLKLCGQRKWVPVEYLDNDVSASTGKRRPAYEQMLADITAGKITAVVAWDLDRLHRRPIELEAFMSLADEKRLALATVAGDVDLATPQGRLVARLKGSVAAHETEHKKARQRRAARQKAERGHPNWSKAFGYLPGPNGPEPDPRTAPLVKQAYADILAGASLGDVCRQWNDAGASTITGRPWTTTTLSKFLRKPRNAGLRAYKGARYGPVDRDAIVGKAQWSPLVDEATFWAAQAVLDAPGRAPGRKSVRRHLLTGLAGCGKCGNHLAGSYRTDGRVVYVCKACHGVAILADNIEPILYHIVAERLAMPDAVDLLRREIHDVTEAETIRLELETLYGELDRLAVERAEGLLTARQVKISTDIVNAKITKLQARQLDQERLRVFDGIPLGTPQVAGMIAELSPDRFRAVLDVLAEVVVQPVGKSGRTFNPERVQVNWR

SEQ ID NO: 2734 - protein, 485 aa, synthetic construct
MTKKVAIYTRVSTTNQAEEGFSIDEQIDRLTKYAEAMGWQVSDTYTDAGSSGAKLERPAMQRLINDIENKAFDTVLVYKLDRLSRSVRDTLYLVKDVFTKNKIDFISLNESIDTSSAMGSLFLTILSAINEFERENIKERMTMGKLGRAKSGKSMMWTKTAFGYYHNRKTGILEIVPLQATIVEQIFNDYLSGISLTKLRDKLNESGHIGKDIPWSYRTLRQTLDNPVYCGYIKFKDSLFEGMHKPIIPYETYLKVQKELEGRQQQTYERNNNPRPFQAKYMLSGMARCGYCGAPLKIVLGHKRKDGSRTMKYHCANRFPRKIKGVTVYNDNKKCDSGTYDLSNLENTVIDNLIGFQENNDSLLKIINGNNQPVLDTSSFEKQISQIDKKIQKNSDLYLNDFITMDELKDRTDSLQAEKKLLKAKTSESKFNDSADVFELVKTQLGSIPINELSYDNKKKIVNNLVSKVDVTADNVDIIFKFQLA

SEQ ID NO: 2735 - protein, 452 aa, synthetic construct
MKAAIYIRVSTREQVENYSIQAQTEKLTALCRSKDWDVYDIFIDGGYSGSNMNRPALNEMLSRLHEIDAVVVYRLDRLSRSQRDTITLIEEYFLKNNVEFVSLNETLDTSSPFGRAMIGILSVFAQLERETIRDRMVMGKIKRIEAGLPLTTAKGRTFGYDVIDAKLYINEEEAKQLQLIYDIFEEEQSITFLQRRLKKLGFKVRTYSCYNNWLTNDLYCGYVSYKDRVHVKGIHEPIISEEQFYRVQEIFTRMGKNPNMNRDSASLLNNLVVCSKCGLGFVHRRKDAMSRDKKYHYRYYSCKTYKHIHELEKCGNKIWRADKLEELIINRVNNYSLASRNVDKEDELDSLNEKLKIEHAKKKRLFDLYINGSCEVSELDSMMNDIDAQINYYVSQIEANEELKKNKKIQGNLAGLATVDFGSLEFREKQLYLKSLINKIYIDGEQVTIEWL

SEQ ID NO: 2736 - protein, 469 aa, synthetic construct
MSYTTPVRAAVYLRISEDRSGEQLGVARQREDCLKLCDQRKWVPVEYLDNDVSASTGKRRPAYEQMLADITAGKIAAVVAWDLDRLHRRPIELEAFMSLADEKRLALATVAGDVDLATPQGRLVARLKGCVAAHETEHKKARQRRAARQKAERGHPNWSKAFGYLPGPNGPEPDPRTAPLVRQAYADILAGASLGDVCRQWNDAGAFTITGRPWTTTTLSKFLRKPRNAGLRAYKGARYGPVDRDAIVGKAQWSPLVDEATFWAAQAVLDAPGRAPGRKSVRRHLLTGLAGCGKCGNHLAGSYRTDGRVVYVCKACHGVAILADNIEPILYHIVAERLAMPDAVNLLRREFHDAAEAETIRLELETLYGELDRLAVERAEGLLTARQVKVSTDIVNAKITRLQARQLDQERLRVFDGIPLGTPQVAGMIAELSPDRFRAVLDVLAEVVVQPVGKGGRIFNPERVQVNWR

SEQ ID NO: 2737 - protein, 469 aa, synthetic construct
MSYTTPVRAAVYLRISEDRSGEQLGVARQREDCLKLCDQRKWVPVEYLDNDVSASTGKRRPAYEQMLADITAGKIVAVVAWDLDRLHRRPIELEAFMSLADEKRLALATVAGDVDLATPQGRLVARLKASVAAHETEHKKARQRRAARQKAERGHPNWSKAFGYLPGPNGPEPDPRTAPLVKQAYADILAGASLGDVCRQWNDAGAFTITGRPWTTTTLSKFLRKPRNAGLRAYKGARYGPVDRDAIVGKAQWSPLVDEATFWAAQAVLDAPDRAPGRKSVRRHLLTGLASCGKCGNHLAGSYRTDGQIVYVCKACHGVSILAVNIEPILYRIVAERLAMPDAVDLLRRGAHDAAEAETIRLELETLHGELDRLAVERAEGLLTARQVKISTDIVDAKITKLQARQQDQERLRVLDGIPLGTPQVAGMIAELSPDRFRAVLDVLAEVVVQPVGKSGRIFNPERVQVYWR

SEQ ID NO: 2738 - protein, 485 aa, synthetic construct
MTKKVAIYTRVSTTNQAEEGFSIDEQIDRLTKYAEAMGWQVSDTYTDAGFSGAKLERPAMQRLINDIENKAFDTVLVYKLDRLSRSVRDTLYLVKDVFTKNKIDFISLNESINTSSAMGSLFLTILSAINEFERENIKERMTMGKLGRAKSGKSMMWTKTAFGYYHNRRTGILEIVPLQATIVEQIFTDYLSGISLTKLRDKLNESGHIGKDIPWSYRTLRQTLDNPVYCGYIKFKDSLFEGMHKPIIPYETYLKVQKELEERQQQTYERNNNPRPFQAKYMLSGTARCGYCGAPLRIVLGHKRKDGSRTMKYHCANRFPRKTKGTTAYNDNKKCDSGTYDLSNLENTVIDNLIGFQENNDGLLKIINGNNQPILDTSSFEKQISQIDKKIQKNSDLYLNDFITMDELKNRTDSLQAEKKLLEAKISENKFNDSTDVFELVKTQLGSIPINELSYDNKKKIVNNLVSKVDVTADNVDIIFKFLLA

SEQ ID NO: 2739 - protein, 469 aa, synthetic construct
MCYTTPVRAAVYLRISEDRSGEQLGVARQREDCLKLCDQRKWVPVEYLDNDVSASTGKRRPAYEQMLADITAGKIAAVVAWDLDRLHRRPIELEAFMCLADEKRLALATVAGDVDLATPQGRLVARLKGSVAAHETEHKKARQRRAARQKAERGHPNWSKAFGYLPGPNGPEPDPRTAPLVKQAYADILAGASLGDVCRQWNDAGAFTITGRPWATTALSKFLRKPRNAGLRAYKGARYGPVDRDAIVGKAQWSPLVDEATFWAAQAVLDAPGRAPGRKSVRRHLLSGLAGCGKCGCHLAGSYRTDGKVVYVCKACHGVSILADNIEPILYHIVVERLAMPDAVDLLRREIHDAAEAETIRLELETLYGELDRLAVERAEGLLAARQVKISTDIVNAKITKLQARQLDQERLRVFDGIPLGTPQVAGMIAELSPDRFRAVLDVLAEVVVQPVGKGGRIFNTERVQVNWR

SEQ ID NO: 2740 - protein, 485 aa, synthetic construct
MTKKVAIYTRVSTTNQAEEGFSIDEQIDRLTKYAEAMGWQVGDTYTDAGFSGAKLERPAMQRLINDIENKAFDTVLVYKLDRLSRSVRDTLYLVKDVFTKNRIDFISLNESIDTSSAMGSLFLTILSAINEFERENIKERMAMGKLGRAKSGKSMMWTKTAFGYYHNRKTGILEIVPLQATIVEQIFTDYLSGISLTKLRDKLNENGHIGKDIPWSYRTLRQTLDNPVYCGYIKFKGSLFEGMHKPIIPYETYLKVQRELEERQQQTYERNNNPRPFQTKYMLSGMARCGYCGAPLRIVLGHKRKDGSRTMKYHCANRFPRKTKGVTVYNDSRKCDSGAYDLSNLENTVIDNLIGFQENNDSLLKIINGNNQPILDTSSFKEQISQIDKKIQKNSDLYLNDFITMEELKYRTDSLQAEKKLLKAKISENKFNDSTDVFELVKTQLGSIPINELSYDNKKKIVNNLVSKVDVTADNVDIIFKFQLA

SEQ ID NO: 2741 - protein, 485 aa, synthetic construct
MTKKVAIYTRVSTTNQAEEGFSIDEQIDRLTKYAEAMGWQVSDTYTDAGLSGAKLERPAMQRLINDIENKAFDTVLVYKLDRLSRSVRDTLYLVKDVFTKNKIDFISLNESIDTSSAMGSLFLTILSAINEFERENIKERMTMGKLGRAKSGKSMMWTKTAFGYYHNRKTGILEIVPLQATIVEQIFTDYLSGISLTKLRDKLNESGHIGKDIPWSYRTLRQTLDNPVYCGYIKFKGSLFEGMHKPIIPYETYLKVQKELVERQQQTYERNNNPRPFQAKYMLSGMARCGYCGAPLRIVLGHKRKDGSRTMKYHCANRFPRKTEGVTVYNDNKKCDSGTYDLSNLENTVIDNLIGFQEDNDSLLKIINGNNQPTLDTSSFEEQIRQIDKKIQRNSDLYLNDFITMGELKDRTDSLQAEKKLLKAKISENKFNDSTDVFELVKTQLGSIPINELSYDNKKKIVNDLVSKVDVTADNVDIIFKFQLA

SEQ ID NO: 2742 - protein, 452 aa, synthetic construct
MKAAIYIRVSTREQVENYSIQAQTEKLTALCRSKDWDVYDIFIDGGYSGSNMNRPALSEMLSKLHEIDAVVVYRLDRLSRSQRDTITLIEEYFLKNNVEFVSLSETLDTSSPFGRAMIGILSVFAQLERETIRDRMVMGKIKRIEAGLPLTTAKGRTFGYDVIDTKLHINEEEAKQLQLIYDIFEEEQSITFLQKRLKKLGFKVRTYNHYNSWLTNDLYCGYVSYKDKVHVKGIHEPIISEEQFYRVQEIFTRMGKNPNMNRDSASLLNGLVVCSKCGLGFVHRRKDTMSRGKKYHYRYYSCKTYKHIHELEKCGNKIWRADKLEELVTDRVNNYSFASRNADKEDELDSLNEKLKIEHAKKRRLFELYINGSYEVSELDSMMNDIDAQINYYEGQIEANEELKKNKKIQENLANLATVDYDSLEFREKQLYLKSLINKIYIDGEQVTIEWL

SEQ ID NO: 2743 - protein, 485 aa, synthetic construct
MTKKVAIYTRVSTTNQAEEGFSIDEQIDRLTKYAEAMGWQVSDTYTDAGLSGAKLGRPAMQRLINDIENKAFDTVLVYKLDRLSRSVRDTLYLVKDVFTKNKIDFISLNESIDTSSAMGSLFLTILSAINEFERENIKERMTMGKLGRAKSGKSMMWTKTAFGYYHNRKTGILEIVPLQATIVEQIFTDYLSGISLTKLRDKLNESGHIGKDIPWSYRTLRQTLDNPVYCGYIKFKGSLFEGMHKPIIPYETYLKVQKELEERQQQAYERNNNPRPFQAKYMLSGMARCGYCGAPLRIVLGRKRKDGSRTMKYHCANRFPRKTKGVTVYNDNKKCDSGTYDLSNLENTVIDNLIGFQENNDSLLKIINGNNRPILDTSSFKKQISQIDKKIQKISDLYLNDFITMDELKDRTDSLQAEKKLLKAKISDNKFNDSTDVFELVKTQLGSIPISELSYDSKKKIVNNLVSKVDVTADNVDITFKFQLA

SEQ ID NO: 2744 - protein, 452 aa, synthetic construct
MKAAIYIRVSTREQVENYSIQAQTEKLTALCRSKDWDVYNIFIDGGYSGSNMNRPALNEMLSKLHEIDAVVVYRLDRLSRSQRDTITLIEEYFLKNNVEFVSLSETLDTSSPFGRAMIGILSVFAQLERETIRDRMVMGKIKRIEAGLPLTTAKGRTFGYDVIDTKLYINEEEAKQLQLIYDIFEEERSITFLQKRLKKLGFKVRTYNCYNNWLTNDLYCGYVSYKDKVHVKGIHEPIISEEQFYRVQEIFTRMGKNPNMNRDSASLLNNLVVCGKCGLGFVHRRKDAMSRDKKYHYRYYSCKTYKHIHELEKCGNKIWRADKLEELIIKRVNNYNLASRNVDKEDELDSLSEKLKIEHAKKKRLFDLYINGSYEMSELDSMMNDIDAQINYYESQIEANEELKKNKKIRENLAYLATVDFDSLEFREKQLYLKSLINKIYIDGEQVTIEWL

SEQ ID NO: 2745 - protein, 485 aa, synthetic construct
MTKKVAIYTRVSTTNQAEEGFSIDEQTDRLTKYAEAMGWQVSDTYIDAGFSGAKLERPAMQRLINDIESKAFDTVLVYKLDRLSRSVRDTLYLVKDVFTRNKIDFISLNESIDTSSAMGSLFLTILSAINEFERENIKERMTMGKLGRAKSGKSMMWTKTAFGYYHNRRTGILEIVPLQATIVEQIFTDYLSGISLTKLRDKLNESGHIGKDIPWSYRTLRQTLDNPVYCGYIKFKDSLFEGMHKPIIPYETYLKVQKELEERQQQTYERNNNPRPFQAKYMLSGMARCGYCGAPLRIVLGRKRKDGSRTMKYHCANRFPRKTEGITVYNDNKKCDSGTYDLSNLENTVIDNLIGLQENNDSLLKIIHGNNQPILDTSSFKKQISQIDKKIQKNSDLYLNDFITMDELKDRTDSLQAEKKLLQAKISENKFNDSTDVFELVKAQLGSIPINELSYDNKKKIVNNLVSKVDVTADNVDIIFKFQLA

SEQ ID NO: 2746 - protein, 452 aa, synthetic construct
MKAAIYIRVSTREQVENYSIQAQTEKLTALCRSKDWDVYDIFIDGGYSGSNMNRPALNEMLSKLHEIDVVVVYRLDRLSRSQRDTITLIEEYFLKNNVEFVSLSETLDTSSPFGRAMIGILSVFAQLERETIRDRMVMGKIKRVEAGLPLTTAKGRTFGYDVIDTKLYINEEEAKQLQLIYDIFEEERSITFLQKRLKKLGFKVRTYSRYNNWLTNDLYCGYVSYKDKVHVKGIHEPIISEEQFHRVQEIFTRMGKNPNMNRDSASLLNNLVVCGKCGLGFVHRRKDTTSRGKKYHYRYYSCKTYKHTHELEKCGNKIWRADRLEELIINRVNNYSFASRNVDKEDELDSLNENLKIEHAKKKRLFDLYINGSYEVSELDSMMSDIDAQINYYESQIEANEKLKKNKEIQESLADLATVDFGSLEFREKQLYLKSLINKIYIDGEQVTIEWL

SEQ ID NO: 2747 - protein, 451 aa, synthetic construct
MKAAIYIRVSTREQVENYSIQAQTEKLTALCRSKDWDVYDIFIDGGYSGSNMNRPALNEMLSKLHEIDAVVVYRLDRLSRSQRDTITLIEEYFLKNNVEFVSLSETLDTSSPFGRAMIGILSVFAQLERETIRDRMVMGKIKRVEAGLPLTTAKGRTFGYDVIDTKLYINEEEAKQLLIYDIFEEEQSIAFLQKRLKKLGFKVHTYNRYNNWLTNDLYCGYVSYKDKVHVKGIHEPIISEEQFYRVQEIFARMGKNPNMNRDSASLLNNLVVCSKCGLGFVHRRKDTMSRGKKYHYRYYSCKTYKHTHELEKCGNKIWRADRLEELIINRVNNYSFASRNADKEDELDSLNEKLKIEHAKRKRLFDLYINGSYEVSELDSMMNDIDAQINYYESQIEVNEELKKNKKIQENLADLATVDFDSLEFREKQLYLKSLINKIYIDGEQVTIEWL

SEQ ID NO: 2748 - protein, 485 aa, synthetic construct
MTKKVAIYTRVSTTNQAEEGFSIDEQIDRLTKYAEAMGWQVSDTYTDAGFSGAKLERPAMQRLINDIENRAFDTVLVYKLDRLSRSVRDTLHLVKDVFTKNKIDFISLSESIDTSSAMGSLFLTILSAINEFERENIKERMTMGKLGRAKSGKSMMWTKTAFGYYHNRKTGILEIVPLQATIVEQIFTDYLSGISLTKLRDKLNESGHIGKDIPWSYRTLRQTLDNPVYCGYIKFKDSLFEGMHKPIIPYETYLRVQKELKERQQQTYERNNNPRPFQAKYMLSGMARCGYCGAPLKIVLGHKRKDGSRTMKYHCANRFPRKTKGVTVYNDNKKCDSGTYDLGNLENTVIDNLIGFQENNDSLLKVINGNDQPILDTSSFEKQISQIDKKIQKNSDLYLNDFITMDELKDRTDSLQAEKKLLEAKISENKFNDSTDVFELVKTQLGSIPINELSYNNKKKIVNNLVSKVDVTADNVDIIFKFQLA

SEQ ID NO: 2749 - protein, 485 aa, synthetic construct
MTKKVAIYTRVSTTNQAEEGFSIDEQIDRLTKYAEAMGWQVSDTYTDAGFSGAKLERPAMQRLINDIENKAFDTVLVYKLDRLSRSVRDTLYMVKDVFTKNKIDFISLNESIDTSSAMGSLFLTILSAINEFERENIKERMTMGKLGRAKSGKSMMWTKTAFGYYHNRKTGILEIVPLQATIVEQIFTDYLSGISLTKLRDKLNESGHIGKDIPWSYRTLRQTLDNPVYCGYIKFKGSLFEGMHKPIIPYETYLKVQKELEERQQQTYERNNNPRPFQAKYMLSGMARCGYCGAPLRIVLGHKRKDGSRTMKYHCANRFPRKTRGVTVYNDNKKCDSGTYDLSNLENTVIDILIGFQENNDSLLKIINGNNQPFLDTSSLKKQISQIDKKIQKNSDLYLNDFITMDELKDRTDSLQAEKKLLKAKISENKFNDSTDVFELVKTQLGSIPINELSYGNKKKIVNNLVSKVDVTANNVDIIFKFQLA

SEQ ID NO: 2750 - protein, 485 aa, synthetic construct
MTKKVAIYTRVSTTNQAEEGFSIDEQIDRLTKYAEAMGWQVSDTYTDAGASGAKLERPAMQRLINDIENKAFDTVLVYKLDRLSRSVRDTLYLVKDVFTKNRIDFISLNESIDTSSAMGSLFLTILSAINEFERENIKERMTMGKLGRAKSGKSMMWTKTAFGYYHNRKTGILEIVPLQATIVEQIFTDYLSGISLTKLRDKLNESGHIGKDIPWSYRTLRQTLDNPVYCGYIKFKDSLFEGMHKPIIPYETYLKVQKELEERQQQTYERNNNPRPFQAKYMLSGMARCGYCGAPLRIVLGHRRKDGSRAMKYHCANRFPRRTKGITVYNDNKKCDSGTYDLSDLENTVIDNLIGFQENNDSLLKIINSNNQPILDTSSFKEQISQIDKKIQKNSDLYLNDLITMDELKDRTDSLQAKKKLLKAKISENKFNDSTDVFELVKAQLGSIPINELSYDNKKKIVNNLVSKVDVTADNVDIIFKFQLA

SEQ ID NO: 2751 - protein, 485 aa, synthetic construct
MTKKVAIYTRVSTTNQAEEGFSIDEQIDRLTKYAEAMGWQVSGTYTDAGSSGAKLERPAMQRLINDIENKAFGTVLVYKLDRLSRSVRDTLYLVKDVFTKNKIDFISLNESIDTSSAMGSLFLTILSAINEFERENIKERMTMGKLGRAKSGKSMMWTKTAFGYYHNRKTGILEIVPQQATIVEQIFTDYLSGISLTKLRDKLNESGHIGKDIPWSYRTLRQTLDNPVYCGYIKFKDSLFEGMHKPIIPYETYLKVQKELEERQQQTYERNNNPRPFQAKYMLSGMARCGYCGAPLKIVLGHKRKDGSRTMKYHCANRFPRKTKGVTVYNDKKKCDSGTYDLSNLENTVIDILIGFQDNNDSLLKVINGNNQPTLDTSSFKKQISQIDKKIQKNSDLYLNDFITMDELKDRTESLQAEKKLLEAKISEDELNNSTDVFELVKTQLGSIPISELSYDDKKKIVNNLVSKVDVTADNVDIIFKFQPA

SEQ ID NO: 2752 - protein, 452 aa, synthetic construct
MKAAIYIRVSTQEQVGNYSIQAQTEKLTALCRSKDWDVYDIFVDGGYSGSNMNRPALNEMLSKLHEIDAVVVYRLDRLSRSQRDTTTLIEEYFLKNNVEFVSLSETLDTSSPFGRAMIGILSVFAQLERETIRDRMVMGKIKRIEAGLPLTTARGRTFGYDVIDTRLYINEEEAKQLQLIYDIFEEEQSITFLQKRLKKLGFKVRSYNRYNNWLTNDLYCGYVSYKDKVHVKGIHEPIISEEQFYRVQEIFTRMGRNPNMNRGSASLLNNLVVCGKCGLGFVHRSKDTMSRGKKYHYRYYSCKTYKHTHELEKCGNKTWRADKLEELIINRVNNYSSASRNADKEDELDSLNEKLKIEYARKKRLFDLYINGSYEVSELDSMMSDIDAQINYYGSQIEANEELKKNKKTQENLAELAAVDFDSLGFREKQLYLKSLINKIYIDGEQVTIEWL

SEQ ID NO: 2753 - protein, 469 aa, synthetic construct
MCYTTPVCAAVYLRISEDRSGEQLGVARQREDCLKLCGQRKWVPVEYLDNDVSASTGKRRPAYEQMLADITAGKIAAVVAWDLDRLHRRPIELEAFMSLADEKRLALATVAGDVDLATPQGRLVARLKGSVAAHETEHKKARQRRAARQKAERGHPNWSKAFGYLPGPNGPEPDPRTAPLVEQAYADILAGASLGDVCRQWNDAGAFTITGRPWTTTTLSKFLRKPRNAGLRAYKGAPYGPVDRDAIVGKAQWSPLVDEATFWAAQAVLDAPGRAPGRKSVRRHLLTGLAGCGKCGNHLAGSYRTDGRVVYVCKACHGVAILADNIEPILYHIVAERLAMPNAVGLLRREIHDVAEAETIRLELETLYGELDCLAVERAEGLLTARQVKISTDIVNAKITKLQARQQDQERLRVLDGIPLGTPQVAGMIAELSPDRFRAVLDVLAEVVVLPVGKSGKTFNPERVQVNWR

SEQ ID NO: 2754 - protein, 485 aa, synthetic construct
MTKKVAIYTRVSTTNQAEEGFSIDEQIDRLTKYAEAMGWLVSDTYTDAGFSGAKLERPAMQRLINDIENKAFDTVLVYKLDRLSRSVRDTLYLVKDVFTKNKIDFISLNESINTSSAMGSLFLTILSAINEFERENIKERMTMGKLGRAKSGKSMMWTKTAFGYYHNRKTGILEIVPLQATIVEQIFTDYLSGISLTKLRDKLNESGHIGKDIPWSYRTLRQTLDNPVYCGYIKFKDSLFEGMHKPIIPYETYLKVQKELEERQQQTYERNNNPRPFQAKYMLSGVARCGYCGAPLRIVLGHKRKDGSRTMRYHCANRFPRKTKGVTVYNDNKKCDSGTYDLSNLENTVIDNLIGFQENNDRLLKIINGNNQPILDTSGFKKRISQIDKKIQKNSDLYLNDFITMDELKVRTDSLQAERKLLKAKISENRFNDSTDVFELVKTQLGSIPINELSYDNKKKIVNNLVSKVDVTADNVDIIFKFQLA

SEQ ID NO: 2755 - protein, 485 aa, synthetic construct
MTKKVAIYTRVSTTNQAEEGFSIDEQIDRLTKYAEAMGWQVSDTYTDAGFSGAKLERPAMQRLINDIEDKAFDTVLVYKLDRLSRSVRDTLHLVKDVFTRNKIDFISLNESIDTSSAMGSLFLTILSAINEFERENIKERMTMGKLGRAKSGKSMMWTKTAFGYYHNRKTGILEIVPLQATIVEQIFTDYLSGISLTKLRDKLNESGHIGKDIPWSYRTLRQTLDNPVYCGYIKFKGSLFEGMHKPIIPYETYLKVQKELEERQQQTYERNNNPRPFQAKYMLSGMARCGYCGAPLKIVLGHKRKDGSRTMKYHCANRFPRKTKGVTVYNDNKKCSSGTYDLSDLENTVIDNLIGFQENNDSLLKIINGNNQPILDTSNFKKQISQIDKRIQKNSDLYLNDFITMDELKDRTDSLLAEKKLLEAKISENKFNDSTDVFGLVKTQLGSIPINELSYDNKKKIVNNLVSKVDVTADNVDIIFKFQLA

SEQ ID NO: 2756 - protein, 452 aa, synthetic construct
MKTAIYIRVSTREQVENYSIQAQAEKLTALCRSKDWDVYDIFIDGGYSGSNMNRPALNEMLSKLHEIDAVVVYRLDRLSRSQRDTITLIEEYFLKNNVEFVSLSETLDTSSPFGRAMIGILSVFAQLERETIRDRMVMGKIKRIEAGLPLTTAKGRTFGYDVIDTKLYINEEEAKQLQLIYDIFEEEQSITLLQKRLKKLGFKVRTYNRYNNWLTNDLYCGYVSYKDKVHVKGIHEPIISEEQFYRVQEIFTRMGKNPNMNRGSASLLNNLVVCSKCGLGFVHRRKDAMSRDKKYHYRYYSCKTYKHIHELEKCGNKIWRADELEELVINRVNNYSFASRNADKEDELDSLNEKLKIEHAKKKRLFDLYVNGRYEVSELDSMMSDIDAQINYYESQIEANEELRKNKKIQENLAYLATVDFDSLEFREKQLYLKSLINKIYIDGEQVTIEWL

SEQ ID NO: 2757 - protein, 469 aa, synthetic construct
MSHTTPVRAAVYLRISEDRSGEQLGVTRQREDCLKLCGQRNWVPVEYLDNDVSASTGKRRPAYEQMLADITTGKIAAVVAWDLDRLHRRPIELEAFMSLADEKRLALATVAGDVDLATPQGRLVARLKGSVAAHETEHKKARQRRAARQKAERGYPNWSKAFGYLPGPNGPEPDPRTAPLVKQAYADILAGASLGDVCRQWNDVGAFTITGRPWTTTTLSKFLRKPRNAGLRAYKGARYGPVDRDAIVGKARWSPLVDEATFWAAQAVLDAPGRAPGRKSVRRHLLTGLAGCGKCGNHLAGSYRTDGRVVYVCKACHGVAILADNIEPILYHIVAERLATPDAVDLLRREIHDAAEAETIRLELETLYGELDRLAVERAEGLLTARQVKISTDIVNAKITKLQARQLDQERLRVFDGIPLGTPQVAGMVAELSPDRFRAVLDVLAEVVVQPVGKSGRIFNPERVQVNWR

SEQ ID NO: 2758 - protein, 469 aa, synthetic construct
MSYTTPVHAAVYLRISEDRSGEQLGVARQREDCLKLCVQRKWVPVEYLDNDVSASTGKRRPAYEQMLADITAGKIAAVVAWDLDRLHRRPIELEAFMSLADEKRLALATVAGDVDLATPQGRLVARLKGSVAAHETEHKKARQRRAARQKAERGYPNWSKAFGYLPGPNGPEPDPRTAPLVKQAYADILAGASLGDVCRQWNDAGAFTITGRPWTTTALSKFLRKPRNAGLRAYKGARYGPVDRDAIVGKARWSPLVDEATFWAAQAVLDAPGRTPGRKSVRRHLLTGLASCGKCGNHLAGSYRTDGKVVYVCKACHGVAILADNIEPILYHIVAERLAMPDAVDLLRREIHDAAEAETIRLELETLYGELDGLAVERAEGLLTARQVKVSTDIVNAKITKLQARQQDQERLRVLDGIPLGTPQVAGKIAELSPDRFRAVLDVLAEVVVRPVGKGGRIFNPERVQVNWR

SEQ ID NO: 2759 - protein, 452 aa, synthetic construct
MKAAIYIRVSTQEQVENYSIQAQTEKLTALCRSKDWDVYDIFIDGGYSGSNMNRPALNEMLSKLHEIDAVVVYRLDRLSRSQRDTTTLIEEYFLKNNVEFVSLSETLDTSSPFGRAMIGILSVFAQLERETIRDRTVMGKIKRIEAGLPLTTAKGRTFGYDVIDTKLYINEEEAKQLQLIYDIFEEEQSITSLQKRLKKLGFKVRTYNRYNNWLTNDLYCGYVSYKDKVHVKGIHEPIISEEQFYRVQEIFTRMGKKPNMNRDSASLLNNLVVCSKCGLGFVHRSKDTMSRGKKYHYRYYSCKTYKHTHELEKCGNKTWRADKLEELIINRVNNYSFASRNADKEDELDSLNEKLKIEHAKKKRLFDLYINGSYEVSELDSMMNDIDAQINYYESQIEANEELKRNKKIRENLADLATVDYDSLEFRDKQLYLKSLINKIYIDGEQVTIEWL

SEQ ID NO: 2760 - protein, 452 aa, synthetic construct
MKAAIYIRVSTREQVENYSIQAQTEKLTALCRSKDWDVYDIFIDGGYSGSNMNRPALNEMLSKLHEIDAVVVYRLDRLSRSQRDTITLIEEYFLKNNVEFVSLSETLDTSSPFGRAMIGILSVFAQLERETIRDRMVMGKIKRIEAGLPLTTAKGRTFGYDVIDTKLYINEEEAKQLQLIYDIFEEEQSITFLQKRLKKLGFKVRTYSRYNNWLTNDLYCGYVSYKDKVHVKGIHEPIISEEQFYRVQEIFTRMGKNPNMNRDSASLLNNLVVCSKCGLGFVHRRKDTMSRGKKYHYRYYSCKTYKHTHELEKCGNKIWRADKLEELIINRVNNYSFASRNVDKEDELDSLSEKLKIEHAKKKRLFDLYINGSYEVSELDSMMNDIDAQINYYESQTEANEELKKSKKIQENLAYLATVDFDSLEFREKQLYLKSLINKIYIDGEQVTIEWL

SEQ ID NO: 2761 - protein, 452 aa, synthetic construct
MKAAIYIRVSTQEQVENYSIQAQTEKLTALCRSKDWDVYDIFIDGGYSGSNMNRPALNEMLSKLYEIDAVVVYRLDRLSRSQRDTITLIEEHFLKNNVEFVSLSETLDTSSPFGRAMIGILSVFAQLERETIRDRMVMGKIKRIEAGLPLTTAKGRTFGYDVVDTKLYINEEEAKQLQLIYDIFEEEQSITFLQKRLKKLGFKVHTYNRYNNWLTNDLYCGYVSYKDRVHVKGIHEPIISEEQFYRVQEIFTRMGKNPNMNRDSASLLNNLVVCSKCGLGFVHRRKDTTNRGKKYHYRYYSCKTYKHTHELEKCGNKIWRADKLEELIINRVNNYSFASRNVDKEDELDSLNEKLKTEHAKRKRLFDLYINGSYGVGELDNMMSDIDAQINYYESQIKANEELKKNKKIQESLANLATVDFDSLEFREKQLYLKSLINKIYIDGEQVTIEWL

SEQ ID NO: 2762 - protein, 452 aa, synthetic construct
MKAAVYIRVSTREQVENYSIQAQTEKLTALCRSKGWDVYDIFIDGGYSGSNMNRPALNEMLSKLHEIDAVVVYRLDRLSRSQRDTITLIEEYFLKNNVEFVSLSETLDTSSPFGRAMIGILSVFAQLERETIRDRMVMGKIKRIEAGLPLTTAKGRTFGYDVIDTKLYINEEEAKQLQLIYDIFEEEQSITLLQKRLKKLGFKVRTYNRYNNWLTNDLYCGYVSYKDKVHVKGIHEPIISEEQFYRVQEIFTRMGKNPNMNRDSASLLNNLVVCSKCGLGFVHRRKDAMGRDKKYHYRYYSCKTYKHIHELEKCGNKIWRADKLEELIINRVNNYSLANRKVDKEDELDSLNEKLKIEHAKKKRLFDLYINGSYEASELDSMMNDIDAQINYYESQIEANEELKRNKKIQESLADLATVDFDSLEFREKQRYLKSLINKIYIDGEQVTIEWL

SEQ ID NO: 2763 - protein, 485 aa, synthetic construct
MTKKVAIYTRVSTTNQAEEGFSIDEQVDRLTKYAEAMGWQVSDTYTDAGLSGAKLERPAMQRLINDIENKAFDTVLVYKLDRLSRSVRDTLYLVKDVFTKNKIDFISLNESIDTSSAMGSLFLTILSAINEFERENIKERMTMGKLGRAKSGKSMMWTKTAFGYYHNRKTGILEIVPQQATIVEQIFTDYLSGISLTKLRDKLNESGHVGKDIPWSYRTLRQTLDNPVYCGYIKFKDSLFEGMHKPIIPYETYLKVQKELEERQQQAYERNNNPRPFQAKYMLSGMARCGYCGAPLRIVLGHKRKDGSRTMKYHCANRFPRKTKGVTVYNDNKKCDSGTYDLSNLENTVIDNLIGFQENNDSLLKIINGNNQPILDTSSFKEQISQIDKKIQKNSDLYLNDFITMDELKDRTGSLQAEKKLLKAKISENKFNDSTDVFELVKTQLGSIPINELSYDNKKKIVNNLVSKVDVTADNVDIIFKFQLA

SEQ ID NO: 2764 - protein, 469 aa, synthetic construct
MNYTTPVRAAVYLRISEDRSGEQLGVARQREDCLKLCDQRKWEPVEYLDNDVSASTGKRRPAYEQMLADITAGKIAAVVAWDLDRLHRRPIELEAFMSLADEKRLALATVAGDVDLATPQGRLVARLKGSVAAHETEHKKARQRRAARQKAERGHPNWSKAFGYLPGPNGPELDPRTAPLVKQAYADILAGASLGDVCRQWNAAGAFTITGRPWTTTTLSKFLRKPRNAGLRAYKGARYGPVDRDAIVGKAQWSPLVDEATFWAAQAVLDAPGRAPGRKSVRRHLLTGLADCGKCGNHLAGSYRTDGRVVYVCKACHGVAILADNIEPILYHIVAERLAMPDAVDLLRREIHDAAEAETIRLELETLYGELDRLAVERAEGLLTARQVKISTDIVSAKITKLQARQLDQERLRVLDGIPLGTPQVAGVIAKLSPDRFRAVLDVLAEVVVQPVGKSGRVFNPERVQVNWR

SEQ ID NO: 2765 - protein, 469 aa, synthetic construct
MSYTTPVRAAVYLRISEDRSGEQLGVARQREDCLKLCGQRKWVPVEYLDNDVSASTGKRRPAYEQMLADITAGKIAAVVAWDLDRLHRRPVELEAFMSLADEKRLALATVAGDVDLATPQGRLIARLKGSVAAHETEHKKARQRRAARQKAERGYPNWSKAFGYLPGPNGPEPDPRTAPLVRQAYADILAGASLGDVCRQWNDAGAFTITGRPWTTTALSKFLRKPRNAGLRAYKGARYGPVDRDAIVGKAQWSPLVDEATFWAAQAVLDAPGRAPGRKSVRRHLLTGLAGCGRCGNHLAGSYRTDGRVVYVCKACHGVAILADNIEPILYHIVAERLAMPDAVDLLRREVHDAAEAETIRLELETLYGELDRLAVERAEGLLTARQVKISTDVVNAKITELRTRQLDQERLRVFDGIPLGTPQVAGMIAELSPDRFRAVLDVLAEVVVLPVGKRGRIFNPGRVQVNWR

SEQ ID NO: 2766 - protein, 452 aa, synthetic construct
MKAAIYIRVSTREQVENYSIQAQTEKLTALCRSRDWDVYDTFIDGGYSGSNMNRPALNEMLSKLHEIDAVVVYRLDRLSRSQRDTITLIEEYFLKNNVEFVSLSETLDTSSPFGRAMIGILSVFAQLERETIRDRMVMGRIKRVEAGLPPTTAKGRTFGYDVIDTKLYINKEEAKQLQLIYDIFEEEQSITFLQKRLKELGFKVHTYNRYNNWLTNDLYCGYVSYKDKVHVKGIHEPIISEEQFYRVQEIFTRMGKNPNMNRGSASLLNNLVVCSKCGLGFVHRRKDAMSRDKKYHYRYYSCKTYKHIHELEKCGNKIWRADKLEELIINRVNDYSIASRNADKEDELVSLNEKLKIEHAKKKRLFDLYINGSYEVSELDSMMNDIDAQINYYESQIEANEELKKNKKIQETLAYLATVDFDSLEFREKQLYLKSLINKIYIDGEQVTIEWL

SEQ ID NO: 2767 - protein, 470 aa, synthetic construct
MSYTTPVRAAVYLRISEDRSGEQLGVARQREDCLKLCGQRKWVPVEYLDNDVSASTGKRRPAYEQMLADIAAGKIAAVVAWDLDRLHRRPIELEAFMSLADEKRLALATVAGDVDLATPQGRLVARLKGSVAAHETEHKKARQRRAARQKAERGYPNWSKAFGYLSGPNGPEPDPRTAPLVKQAYADILAGASLGDVCRQWNDAGAFTITGRPWITTTLSKFLRKPRNAGLRAYKGARYGPVDRDAIVGKAQWSPLVDEATFWAAQAVLDAPGRAPGRKSVRRHLLTGLAGCGKCGNHLAGSYRTGGQVVYVCKACHGVAILADNIEPILYHIVAERLAMPDAVDLLRREIHDAAEAETNRLELETLYGELDCLAVERAEGLLTARQVKISTDIVNAKITKLQARQLDQERLRVLDGVPLGTPQVAGTIAELSPDRFRAVLDVLAEVVVQPVGKSGRIFNPERVQVNWRQ

SEQ ID NO: 2768 - protein, 452 aa, synthetic construct
MKAAIYIRVSTREQVENYSIQAQTEKLTALCRSKDWDVYDIFIDGGYSGSNMNRPALNEMLSKLHEIDAVVVYRLDRLSRSQRDTITLIEEYFLKNNVEFVSLSETLDTSSPFGRAMIGILSVFAQLERETIRDRMVMGKIKRIEAGLPLTTAKGRTFGYDVIDTKLYINEEEAKQLQLIYDIFEEEQSITFLQKRLKELGFKVRTYNRYNNWLTNDLYCGYVSYKDKVHVKGIHEPIISEEQFYRVQEIFTRMGKNPNMNRDSASLLNNLVVCSKCGLGFVHHRKDAMSRDKKYHYRYYSCKTYKHIHELEKCGNKIWRADKLEELIINRVNNYSLAGRNVDKEDGLDSLNEKLKIEHAKKRRLFDLYINGSYEVSELDSMMNDIDAQINYYESQIEANEELKKNKQIQENLAELATVDFDSLEFREKQLYLKSLINKIYIDGEQVTIEWL

SEQ ID NO: 2769 - protein, 469 aa, synthetic construct
MSYTTPVRAAVYLRISEDRSGEQLGVARQREDCLKLCGQRSWVPVEYLDNDVSASTGKRRPAYEQMLADITAGKIAAVVAWDLDRLHRRPIELEAFMSLADEKRLALATVAGDVDLATPQGRLVARLKGCVAAHETEHKKARQRRAARQKAERGLPNWSKAFGYLPGPNGPEPDPRTAPLVKQAYADILAGASLGDVCRQWNDAGAFTITGRPWTTTALSKFLRKPRNAGLRAYKGARYGPVDRDAIVGKAQWSPLVDEATFWAAQAVLDAPGRAPGRKSVRRHLLTGLAGCGKCGNHLAGSYRTDGQVVYVCKACHGVSILADNIEPTLYHIVAERLAMPDAVGLLRREIHDAAEAETIRLELETLYGELDRLAVERAEGLLTARQVKISTDIVNAKITKLQARQLDQERLRVFDGIPLGTPQVAGVIAELSSDRFRAVLDVLAEVVVQPVGKSGRMFNPERVQVNWR

SEQ ID NO: 2770 - protein, 469 aa, synthetic construct
MCYTTPVRAAVYLRISEDRSGEQLGVARQREDCLKLCDQRKWVPVEYLDNDVSASTGKRRPAYEQMLADITAGKIAAVVAWDLDRLHRRPIELEAFMSLADEKRLALATVAGDVDLATPQGRLVARLKGSVAAHETEHKKARQRRAARQKAERGHPNWSKAFGYLPGPNGPEPDPRTAPLVKQAYADILAGASLGDVCRQWNDAGAFTITGRPWTTTTLSKFLRKPRNAGLRAYKGARYGPVDRDAIVGKAQWSPLVDEATFWAAQAVLDAPGRAPGRKSVRRHLLTGLAGCGKCGNHLAGSYRTDGRVVYVCKACHGVAILADNIEPILYHIVAERLAMPDAVDLLRREIHDVAEAETIRLELKTLYGELDRLAVERAEGLLTARQVKISTDIVNAKITELQARQLDQERLRVFDGIPLGTPQVAGVIAGLSPNRFRAVLDVLAEVVVQPVGKGGRIFNPERVQVNWR

SEQ ID NO: 2771 - protein, 485 aa, synthetic construct
MTKKVAIYIRVSTTNQAEEGFSIDEQIDRLTKYAEAMGWQVSDTYTDAGFSGAKLERPAMQRLINDIENKAFDTVLVYKLDRLSRSVRDTLYLVKDVFTKNKIDFISLNESINTSSAMGSLFLTILSAINEFERENIKERMTMGKLGRAKSGKSMMWTKTAFGYYHNRKTGILEIVPLQAAIVEQIFTDYLSGISLTKLRDKLNESGHIGKDIPWSYRTLRQTLDNPVYCGYIKFKDSLFEGMHKPIIPYETYLKVQKELEERQQQTYKRNNNPRPFQAKYMLSGMARCGYCGAPLRIVLGRKRKDGSRAMKYHCANRFPRKTKGITVYNNNKKCDSGTYDLSDLENTVIDNLIGFQENNDSLLKIINGNNQPILDTSSFKKQISQIDKKIQKNSELYLNDFITMDELKDRTDSLQAGKRLLVAKISENKSNDSTDVFELVKTRLGSIPINELSYDNKKKIVNNLVSKVDVTADNVDIIFKFQLA

SEQ ID NO: 2772 - protein, 452 aa, synthetic construct
MKAAIYIRVSTREQVENYSIQAQTEKLTALCRSKDWDVYDIFIDGGYSGSNMNRPALNEMLSKLHEIDAVVVYRLDRLSRSQRDTITLIEEYFLKNNVEFVSLSETLDTSSPFGRAMIGILSVFAQLERETIRDRMVMGKIKRIEAGLPLTTAKGRTFGYDVIDTKLYINEEEAKQLRLIYDIFEEEQSITFLQKRLKKLGFKVRTYNRYNNWLTNDLYCGYVSYKDRVHVKGIHEPIISEEQFYRVQEIFTRMGKNPNMNRDSASLLNNLVVCGRCGLGFVHRRKDAMSRDKKYHYRYYSCKTYKHIHELEKCGNKIWRADKLEELIINRVNNYSLASRNVDKGDELDSLNEKLKIEHAKRKRLFDLYINGSYDVSELDSMMNDIDAQINHYESQIEANEELKKNKQMQENLAELAAVDFDSLEFREKQLYLKSLINKIYIDGEQVTIEWL

SEQ ID NO: 2773 - protein, 485 aa, synthetic construct
MTKKVAIYTRVSTTNQAEEGFSIDEQIDRLTKYAEAMGWQVSDTYTDAGFSGAKLERPAMQRLINDIENKAFDTVLVYKLDRLSRSVRDTLHLVKDVFTKNKIDFISLSECIDTSSAMGSLFLTILSAINEFERENIKERMTMGKLGRAKSGKSMMWTKTAFGYYHNRKTGILEIVPLQATIVEQIFADYLSGISLTKLRDKLNEGGHIGKDIPWSYRTLRQTLDNPVYCGYIKFKGSLFEGMHKPIIPYETYLKVQKELEERQQQTYERNNNPRPFQAKYMLSGMARCGYCGAPLRVVLGHKRKDGSRTMKYHCANRFPRKTKGVTVYNDNKKCDSGTYDLRNLENTVIDNLTGFQENNDSLLKIINGNNQPILDTSSLKKQISQIDKKIQKNSDLYLNDFITMDELKERTDSLQAEKKLLKAKISENKFNDSTDVFELVKTQLGSIPISELSYDNKKRIVNNLVSKVDVTADNVDIIFKFQLA

SEQ ID NO: 2774 - protein, 452 aa, synthetic construct
MKAAIYIRVSTHEQVANYSIQAQTEKLTALCRSKDWDVYDIFIDGGYSGSNMNRPALNEMLSRLHEIDAVVVYRLDRLSRSQRDTTTLIEEYFLKNNVEFVSLSETLDTSSPFGRAMIGILSVFAQLERETIRDRMVMGKIKRIEAGLPLTTAKGRTFGYDVIDTKLYINEEEAKQLRLIYDIFEEEQSITLLQKRLKKLGFKVRTYNRYNNWLTNDLYCGYVSYKDKVRVKGIHEPIISEEQFYRVQEIFTRMGKNPNTNRDSASLLNNLVVCSKCGLGFVHRSKDTMSRGKKYHYRYYSCKTYKHTHELEKCGNKTWRADKLEELIINRVNNYSFASRNVDKEDELDSLNEKLKIEHAKKKRLFDLYINGSYEVSELDSMMNDIDAQIDYYESQIEANEGLKKNKKIQENLADLATVDFDSLEFREKQLYLKSLINKIYIDGEQVTIEWL

SEQ ID NO: 2775 - protein, 452 aa, synthetic construct
MKAAIYIRVSTREQVENYSIQAQTGKLTALCRSKGWDVYDIFVDGGYSGSNMNRPALNEMLSKLHEIDAVVVYRLDRLSRSQRDTITLIEEYFLKNNVEFVSLSETLDTSSPFGRAMIGILSVFAQLERETIRDRMVMGKIKRIEAGLPLTTAKGRTFGYDVIDTKLYINEEEAKQLQLIYDIFEEEQSITFLQKRLKKLGFKVRTYNCYNNWLTNDLYCGYVSYKDKVHVKGIHEPIISEEQFYRVQEIFTRMGKNPNMNRDSASLLNNLVVCSKCGLGFVHRRKDIMSRGKKYHYRYYSCKTYKHIHELEKCGNKIWRADKLEELIISRVNNYSVASRNVDKEDELDSLNEKLKIEHAKKKRLFDLYINGSYDVSELDSMMNDIDAQINYYESQIAANEELKKNKKIQGNLADLAAVDFDSLEFRDKQRYLKSLINKIYIDGEQVTIEWL

SEQ ID NO: 2776 - protein, 469 aa, synthetic construct
MSYTTPVRAAVYLRISEDRSGEQLGVARQREDCLKLCGQRKWVPVEYLDNDVSASTGKRRPAYEQMLADITAGKIAAVVAWDLDRLHRRPIELEAFMSLADEKRLALATVAGDVDLATPQGRLVARLKGSVAAHETEHKRARQRRAARQKAERGHPNWSKAFGYLPGPNGPEPDPRTAPLVKQAYADILAGASLGDVCRRWNDAGAFTITGRPWTTTTLSKFLRKPRNAGLRAYKGARYGPVDRDAIVGKAQWSPLVDEATFWAAQAVLDAPGRAPGRKSVRRHLLTGLAGCGKCGNHLAGSYRTDGRVVYVCKACHGIAILADNIEPILYHIVAERLAMPDAVDLLRREVHDAAGAETIRLELEALYGELDRLAVERAEGLLTARQVKISTDIVNAKIAKLQARQLDQERLRVFDGIPLGTPQVAGMIAGLSPDRFRAVLGVLAEVVVQPVGKSGRIFNPERVQVNWR

SEQ ID NO: 2777 - protein, 484 aa, synthetic construct
MTKKVAIYTRVSTTNQAEEGFSIDEQVDRLTKYAEAMGWQVSDTYTDAGSSGAKLERPAMQRLINDIENKAFDTVLVYKLDRLSRSVRDTLYLVKDVFTKNKIDFISLNESIDTSSAMGSLFLTILSAINEFERENIKERMTMGKLGRAKSGKSMMWTKTAFGYYHNRKTGILEIVPLQATIVEQIFTDYLSGISLTKLRDKLNESGHIGKDIPWSYRTLRQTLGNPVYCGYIKFKGSLFEGMHKPIIPYETYLKVKELEERQQQAYERNNNPRPFQAKYMLSGMARCGYCGAPLRIVLGHKRKDGSRTMKYHCANRFPRKTKGVTVYNDNKKCDSGTYDLSNLENTVIDNLIGFQENNDSLLKIINGNNQPILDTSSFKKQISQIDKKIQKNSDLYLNDFITMDELKDRTDSLQAEKKLLKAKISENKFNDSTDVFELVKTQLGNIPISELSYDNKRKIVNNLVSRVDVTADNVDIIFKFQLA

SEQ ID NO: 2778 - protein, 469 aa, synthetic construct; identical to SEQ ID NO: 685

SEQ ID NO: 2779 - protein, 452 aa, synthetic construct
MKAAIYIRVSTREQVENYSIQAQTEKLTALCRSKDWDVYDIFIDGGYSGSNMNRPALNEMLSKLHEIDAVVVYRLDRLSRSQRDTITLIEEYFLKNNVEFVSLSETLDTSSPFGRAMIGILSVFAQLERETIRDRMVMGKIKRIEAGLPLTTAKGRTFGYDVIDTKLYVNEEEAKQLRLIYDIFEEEQSITSLQKRLKKLGFKVRTYSCYNNWLTNDLYSGYVSYKDKVHVKGIHEPIISEEQFYRVQEIFTRMGKNPNMNRDSASLLNNLVVCSKCGLGFVHRRKDTMSRGKKYHYRYYSCKTYKHTHELEKCGNKIWRADKLEELIINRVNNYSLASRVADKEDELDSLNEKLKIEHAKKKRLFELYINGSYEVSELDSMMNDIDAQINYYESQIEVNEELKKNKKIQENLANLATVDYDSLEFREKQLYLKSLINKIYIDGEQVTIEWL

SEQ ID NO: 2780 - protein, 469 aa, synthetic construct
MSYTTPVRAAVYLRISEDRSGEQLGVARQREDCLKLCDQRKWVPVEYLDNDVSASTGKRRPAYEQMLADITAGKIAAVVAWDLDRLHRRPIELEAFMSLADEKRLALATVAGDVDLATPQGRLVARLKGSVAAHETEHKKARQRRAARQKAERGHPNWSRAFGYLPGPNGPEPDPRTAPLVKQAYADILAGASLGDVCRQWNDAGAFTITGRPWTATTLSKFLRKPRNAGLRAYKGARYGPVDRDAIVGKAQWSPLVDEATFWAAQAVLDAPGRAPGRKSVRRHLLTGLAGCGKCGNHLAGSYRTDGRVVYVCKACHGVAILADNIEPILYHIVAERLAMPDAVGLLRREIHDAAEAETIRLELETLYGELDRLAVERAEGLLTARQVKISTDIVNAKITKLQARQLDQERLRVFEGIPLGTPQVADMIAELSPDRFRAVLDVLAEVVVQPVGKSGRISNPERVQVNWR

SEQ ID NO: 2781 - protein, 452 aa, synthetic construct
MKAAIYIRVSTREQVENYSIQAQTEKLTALCRSKDWDVYDIFIDGGYSGSNMNRPALNEMLSKLHEIDAVVVYRLDRLSRSQRDTITLIEEYFLKNNVEFVSLSETLDTSSPFGRAMIGILSVFAQLERETIRDRMVMGKIKRIEAGLPLTTAKGRTFGYDVIDTKLYINEEEAKQLQLIYDIFEEEQSITSLQKRLKKLGFKVRTYSRYNSWLTNDLYCGYVSYKDKVHVKGIHEPIISEEQFHRVQEIFTRMGKNPNMNRDSASLLNNLVVCSKCGLGFVHRRKDTTSRGKKYRYRYYSCKTYKHIHELEKCGNKIWRADKLEELIINRVSNYSIASRNVDKEDELDSLNEKLKIEHARKKRLFDLYINGSYEVSELDSMMNDIDAQIDYYESQIEANEELRKNKKIQGNLANLATVDFDSLEFREKQLYLKSLINKIYIDGEQVTIEWL

SEQ ID NO: 2782 - protein, 469 aa, synthetic construct
MSYTTPVRAAVYLRISEDRSGEQLGVARQREDCLELCDQRKWVPVEYLDNDVSASTGKRRPAYEQMLADITAGKIAAVVAWDLDRLHRRPIELEAFMSLADEKRLALATVAGDVDLATPQGRLVARLKGSVAAHETEHKRARQRRAARQKAERGHPNWSKAFGYLPGPNGPVPDPRTAPLVRQAYADILAGASLGDVCRQWNDAGAFTITGRPWTTTTLSKFLRKPRNAGLRAYKGARYGPVDRDAIVGKAQWSPLVDEATFWAAQAVLDAPGRAPGRKSVRRHLLTGLAGCGKCGNHLAGSYRTDGRVVYVCKACHGVAILADNIEPILYHIVAKRLAMPDAVDLLRREIHDAAEAETIRLELETLYGELDRLAVERAEGLLTARQVKISTDVVNAKITKLQARQLDQERLRVLDGIPLGTPQAAGMIAELSPDRFRAVLDVLAEVVVQPVGKGGRAFNLERVQVNWR

SEQ ID NO: 2783 - protein, 469 aa, synthetic construct
MCYTTPVRAAVYLRISEDRSGKQLGVARQREDCLKLCGQRKWVPVEYLDNDVSASTGKRRPAYEQMLADITAGKIAAVVAWDLDRLHRRPVELEAFMSLADEKRLALATVAGDVDLATPQGRLVARLKGSVAAHETEHKKARQRRAARQKAECGYPNWSKAFGYLPGPNGPELDPRTAPLVKQAYADILAGASLGDVCRQWNNAGVLTITGRPWTTTTLSKFLRKPRNAGLRAYKGARYGPVDRDAIVGKARWSPLVDEATFWAAQAVLDAPGRAPGRKSVRRHLLTGLAGCGKCGNHLAGSYRTDGRVVYVCKACHGVAILADNIEPTLYRIVAERLAMPDAVDLLRREIHDAAEAETIRLELETLYGELDRLAVERAEGLLTARQVKISTDIVNAKITKLQARQLDQERLRVLDGIPLGTPQVAGMIAELSPDRFRAVLDVLAEVVVQPVGKSGRIFNPERVQVNWR

SEQ ID NO: 2784 - protein, 452 aa, synthetic construct
MKAAIYIRVSTREQVENYSIQAQTEKLTALCRSKDWDVYDIFTDGGYSGSNMNRPALNEMLSKLHEIDAVVVYRLDRLSRSQRDTITLIEEYFLKNNVEFVSLSETLDTSSPFGRAMIGILSVFAQLERETIRDRMVMGKIKRIEAGLPLTTAKGHTFGYDVIDTKLYINEEEAKQLQLIYDIFEEEQSITFLQKRLKKLGFKVRTYNCYNNWLTNDLYCGYVSYKDKVHVKGIHEPIISEEQFYRVQEIFARMGKNPNMNRDSASLLNNLVVCSKCGLGFVHRRKDAMSRDKKYHYRYYSCKTYKHIHELEKCGNKIWRADKLEELIINRVNNYSLASRNVDKEDELDSLNEKLEIEHAKKKRLFDLYINGSYEVSELDSMMNDIDAQISYYESQIEANEELKRNKEIQENLAYLATVDFDSLEFREKQLYLKSLINKIYIDGEQVTIEWL

SEQ ID NO: 2785 - protein, 485 aa, synthetic construct
MTKKVAIYTRVSTTNQAEEGFSIDEQIDRLTKYAEAMGWQVSDTYTDAGLSGAKLERPAMQRLINDIENKAFDTVLVYKLDRLSRSVRDTLYLVKDVFTKNKIDFISLNESIDTSSAMGSLFLTILSAINEFERENIKERMTMGKLGRAKSGKSMMWTKTAFGYYHNRKTGILEIVPLQATIVEQIFTDYLSGISLTKLRDKLNESGHIGKDIPWSYRTLRQTLDNPVYCGYIKFKDSLFEGMHKPIIPYETYLKVQKELEERQQQTYERNNNPRPFQAKYMLSGMARCGYCGAPLRIVLGHKRKDGSRTMKYHCANRFPRKTRGVTVYNDNKKCDSGTYDLSNLENTVIDNLIGFQENNDSLLKIINGNNQPTLDTSSFERQISQIDEKIQKDSDLYLNDFITMDELKDRTDSLQAAKKLLKAKISENKFNDSTGVFELVKTQLGSVPINELSYDNKKKIVNNLVSKVDVTADNVDIIFKFQLA

SEQ ID NO: 2786 - protein, 452 aa, synthetic construct
MKAAIYIRVSTREQVENYSIQAQTEKLTALCRSKDWVVYDIFVDGGYSGSNMNRPALNEMLSKLHEIDAVVVYRLDRLSRSQRDTITLIEEYFLKNNVEFVSLSETLDTSSPFGRAMIGILSVFAQLERETIRDRMVMGKIKRIEAGLPLTTAKGRTFGYDVIDTKLYINEEEAKQLQLVYDIFEEEQSITVLQKRLKKLGFKVHTYNRYNNWLTNDLYCGYVSYKDKVHVKGIHEPIISEEQFYRVQEIFTRMGKNPNMNRDSASLLNNLVVCSKCGLGFVHRRKDTTSRGKKYHYRYYSCKTYKHTHELEKCGNKIWRADKLEELVINRVNNYSLASRNVDKEDGLDSLNEKLKIEHAKKKRLFDLYINGSYEVSELDSMMNDIDAQINYYESQIEANEELKKNRKIQENLADLATVDFDSLEFREKQLYLKGLINKIYIDGEQVTIEWL

SEQ ID NO: 2787 - protein, 452 aa, synthetic construct
MKAAIYIRVSTREQVENYSIQAQTEKLTALCRSKDWDVYDIYIDGGYSGSNMNRPALNEMLSKLHEIDAVVVYRLDRLSRSQRDTITLIEEYFLKNNVEFVSLSETLDTSSPFGRAMIGILSVFAQLERETIRDRMVMGKIKRIEAGLPLTTAKGRTFGYDVIDTKLYINEEEAKQLQLIYDIFEEEQSITSLQKRLKKLGFKVRTYNRYNSWLTNDLYCGYVSYKDKVHVKGIHEPIISEEQFYRVQEIFTRMGKNPNVNRDSASLLNNLVVCSKCGLGFVHRRKDTMSRGKRYHYRYYSCKTYKHTHELEKCGNKIWRADRLEELIINRVNNYSFAGRNVGKEGELDSLNERLKVEHVKKRRLFDLYINGSYEVSELDSMMNDIDAQINYYESQIEANEELKKNKKIQESLADLATVDFDSLEFREKQLYLKSLINKIYIDGEQVTIEWL

SEQ ID NO: 2788 - protein, 469 aa, synthetic construct
MCYTTPVRAAVYLRISEDRSGEQLGVARQREDCLKLCDQHKWVPVEYLDNDVSASTGKRRPAYEQMLADITAGKIAAVVAWDLDRLHRRPIELEAFMSLADEKRLALATVAGDVDLATPQGRLVARLKGSVAAHETEHKKARQRRAARQKAERGYPNWSKAFGYLPGPNGPEPDPRTAPLVKRAYADILAGASLGDVCRQWNDAGAFTITGRPWTTTTLSKFLRKPRNAGLRAYKGARYGPVDRDAIVGKAQWSPLVDEATFWAAQAVLDAPGRAPGRKSVRRHLLTGLAGCGKCGNRLAGSCRTDGRVVYVCKACHGVSILADNIEPILYHIMAERLAMPNAVDLLRREIHDAAEAETIRLELETLYGELDRLAVERAEGLLTARQVKISTDIVNTKITKLQARQLDQERLRVLDGIPLGTPQVAGTIAELSPDRFRAVLGVLAEVVVQPVGKSGRIFNPERVQVNWR

SEQ ID NO: 2789 - protein, 485 aa, synthetic construct
MTKKVAIYTRVSTTNQAEEGFSIDEQIDRLTKYAEAMGWQVSDTYTDAGFSGAKLERPAMQRLINDIEDKAFDTVLVYKLDRLSRSVRDTLYLVKEVLTKNRIDFISLSESIDTSSAMGSLFLTILSAINEFERENIKERMTMGKLGRAKSGKSMMWTKTAFGYYHNRKTGILEIVPLQAAIVEQIFTDYLSGISLTKLRDKLNESGHIGKDIPWSYRTLRQTLDNPVYCGYIKFKDSLFEGMHKPIIPYETYLKVQKELEERQQQTYERNNNPRPFQAKYMLSGMARCGYCGAPLRIVLGHKRKDGSRTMKYHCANRFPRKTKGITVYNDNKKCDSGTYDLSNLENTVIDNLIGFQENNDSLLKIINGNNQPILDTSSFEKQISQIDKKIQKNSDLYLNDFITMDELKERTDSLQAEKKLLEAKISESKFNDSTDVFELVKTQLGSIPINELSYDNRKKIVNNLVSKVDVTADNVDIIFKFQLA

SEQ ID NO: 2790 - protein, 469 aa, synthetic construct; identical to SEQ ID NO: 1307

SEQ ID NO: 2791 - protein, 452 aa, synthetic construct
MKAAIYIRVSTREQVENYSIQAQTEKLTALCRSKDWEVYDIFVDGGYSGSNMNRPALNEMLSKLHEIDAVVVYRLDRLSRSQRDTITLIEEYFLKNNVEFVSLSETLDTSSPFGRAMIGILSVFAQLERETIRDRMVMGKIKRIEAGLPLTTAKGRTFGYDVIDAKLYINEEEAKQLQLIYDIFEEEQSITLLQKRLKKLGFKVHTYNRYNNWLTNDLYCGYVSYKDKVHVKGIHEPIISEEQFYRVHEIFTRMGKNPNMNRGSASLLNNLVVCGKCGLGFVHRRKDAMSRDKKYHYRYYSCKTYKHIHELEKCGNKIWRADKLEELIINRVNDYSVASRNVDKEDELDSLNEKLKIEHAKKKRLLDLYINGSYEVSELDSMMNDIDARINYYESQIEANEELKRNKKVQENLAYLATVDFDSLEFREKQLYLKSLINKIYIDGEQVTIEWL

SEQ ID NO: 2792 - protein, 485 aa, synthetic construct
MTKKVAIYTRVSTTNQAEEGFSIDEQIDRLTKYAEAMGWQVSDTYTDAGSSGAKLERPAMQRLINDIENKAFDTVLVYKLDRLSRSVRDTLYLVKDVFTKNKIDFISLNESIDTSSAMGSLFLTILSAINEFERENIKERMTMGKLGRAKSGKSMMWTKTAFGYYHNRKTGILEIVPLQATIVEQIFTDYLSGISLTKLRDKLNESGHIGKDIPWSYRTLRQTLDNPVYCGYIKFKDSLFEGMHKPIIPYETYLKVQKELGERQQQTYERNNNPRPFQAKYMLSGMARCGYCGAPLRIVLGHKRKDGSRTMKYHCANRFPRKTKGVTVYNDNKKCDSGTYDLSNLENTVIDNLIGFQENNDSLLKIINGNNQPILDTSSLKKQIGQIDKKIQKNSDLYLNDFITMDELKDRTDSLQAEKKLLIAKISENKFNGSTDVFELVKAQLGSIPINELSYVNKKKIVNNLVSKVDVTADSVDIIFKFQLP

SEQ ID NO: 2793 - protein, 469 aa, synthetic construct
MSYTTLVRAAVYLRISEDRSGEQLGVARQREDCLKLCDQRKWVPVEYLDNDVSASTGKRRPAYEQMLADITAGKIAAVVAWDLDRLHRRPIELEAFMSLADEKRLALATVAGDVDLATPQGRLVARLKGSVAAHETEHKKTRQRRAARQKAERGHPNWSKAFGYLPGPNGPEPDPRTAPLVKQAYADILAGASLGDVCRQWNDAGAFTITGRPWTTTTLSKFLRKPRNAGLRAYKGARYGPVDRDAIVGKAQWSPLVDEVTFWAAQAVLDAPGRAPGRKSVRRHLLTGLAGCGKCGNHLAGSYRTDGQVVYVCKACHGVSILADNIEPILYHIVAERLAMPDAVDLLRREIHDVAEAETIRLELETLYGELDCLAVERAEGLLTARQVKISTDIVNAKITKLQARQLDQERLRVFDGIPLGTPQVAGMIAELSPDRFRAVLDVLAEVVVQPVGKSGRIFNPERVQVNWR

SEQ ID NO: 2794 - protein, 469 aa, synthetic construct
MSYTTPVRAAVYLRISEDRSGEQLGVARQREDCLKLCGERKWVPVEYLDNDVSASTGRRRPAYEQMLVDITAGKIAAVVAWDLDRLHRRPVELETFMSLADEKRLALATVAGDVDLATPQGRLVARLKGSVAAHETEHKKARQRRAARQKAERGLPNWSKAFGYLPGPNGPEPDPRTAPLVKQAYADILAGASLGDVCRQWNDAGAFTVTGRPWTTTALSKFLRKPRNAGLREYKGARYGPVDRDAIVGKAQWSPLVDEATFWAAQAVLDAPGRAPGRKSVRRHLLTGLAGCGKCGNHLAGSYRTDGRVVYVCKACHGVAILADNIEPILYRIVAERLAMPDAVDLLRREVHDAAEAGTIRLELETLYGELDRLAVERAEGLLTARQVKISTDIVNAKITKLQARQLDQERLRVFDGIPLGTPQVAGVIAELSPDRFRAVLDVLAEVVVQPVGKSGRIFSPERVQVNWR

SEQ ID NO: 2795 - protein, 485 aa, synthetic construct
MTRKVAIYTRVSTTNQAEEGFSIDEQIDRLSKYAEAMGWQVSDTYTDAGFSGAKLERPAMQRLINDIENKAFDTVLVYKLDRLSRSVRDTLYLVKDVFTRNKIDFISLNECIDTSSAMGSLFLTILSAINEFERENIKERMTMGKLGRAKSGKSMMWTKTAFGYYHNRETGILEIVPLQATIVEQIFTDYLSGISLTKLRDKLNESGHIGKDIPWSYRTLRQTLDNPVYCGYIKFKDSLFEGMHKPIIPYETYLAVQKELEERQQQAYERNNNPRPFQAKYMLSGMVRCGYCGAPLRIVLGHKRKDGSRTMKYHCANRFPRKTKGVTVYNDNKKCDSGTYDLSNLENTVIDSLIGFQENNDSLLKIINGNNQPILDTSSFEKQISQIAKKIQKNSDLYLNDFITMDELKDRTDSLQAEKKLLKAKISENKFNDSTNVLELVKTQLGSIPINELSYDNKKKIVNNLVSKVDVTADNVDIIFKFQLA

SEQ ID NO: 2796 - protein, 452 aa, synthetic construct
MKAAIYIRVSTREQVENYSIQAQTEKLTALCRSKDWDVYDIFIDGGYSGSNMNRPALNEMLSKLHEIDAVVVYRLDRLSRSQRDTITLVEEYFLKNNVEFVSLSETLDTSSPFGRAMIGILSVFAQLERETIRDRMVMGKIKRIEAGLPLTTAKGRTFGYDVIDTKLYINEEEAKQLQLIYDIFEEVRSITFLQKRLKKLGFKVRTYNCYNNWLTNDLYCGYVSYKDKVRVKGIHEPIISEEQFYRVQEIFTRMGKNPNMNRDSASLLNNLVVCSKCGLGFVHRRKDAMSRDKKYHYRYYSCKTYKHIHELEKCGNKIWRADKLEELIINRVNNYSLASRNVGKEDELDSLNEKLKIEHAKKKRLFDLYINGSFEASELDSMMNDIDAQISYYESQIEANEELKKNKKIQENLADLATVDFDSLEFREKQLYLKSLINKIYIDGEQVTIEWL

SEQ ID NO: 2797 - protein, 485 aa, synthetic construct
MTKKVAIYTRVSTTNQAEEGFSIDEQIDRLTKYAEAMGWQVSDTYTDAGFSGAKLKRPAMQRLINDIENKAFDTVLVYKLDRLSRSVRDTLYLVKDVFTKNKIDFISLNESIDTSSAMGSLFLTILSAINEFERENIKERMTMGKLGRAKSGKSMMWTRTAFGYYHNRKTGILEIVPLQATIVEQIFTDYLSGISLTKLRDKLNESGHIGKDIPWSYRTLRQTLDNPVYCGYIKFKDSLFEGMHKPIIPYETYLKVQKELEERQQQAYERNNNPRPFQAKYMLSGMARCGYCGAPLRIVLGHKRKDGSRTMRYHCANRFPRKTKGVTVYNDNKKCDSGTYDLNNLENTVIGILIGFQENNDSLLKIINGNNQPTLDTSSFKKQISQIDKKIQKNSDLYLNDFITMDELKDRTNSLQAERKLLKAKISENKLNDGTDVFELVKTQLGSIPINELSYDNKKKIVNNLVSKVDVTADNVDIIFKFQLA

SEQ ID NO: 2798 - protein, 452 aa, synthetic construct
MKAAIYIRVSTQEQVGNYSIQAQTEKLTALCRSKDWDVYDVFVDGGYSGSNMNRPALNEMLSKLHEIDAVVVYRLDRLSRSQRDTTTLIEEYFLKNNVEFVSLSETLDTSSPFGRAMIGILSVFAQLERETIRDRMEMGKIKRVEAGLPLTTAKGRTFGYDVIDTKLYINEEEAKQLRLIYDIFEEEQSITSLQKRLKKLGFKVRTYNRYNNWLTNDLYCGYVSYKDKVHVKGIHEPIISEEQFYRVQEIFTRMGKNPNVNRDSASLLNNLVVCSKCGLGFVHRSKDTMSRGKKYHYRYYSCKTYKHTHELEKCGNKTWRADKLEELIISRVNNYSFASRNVDKEVELDSLNEKLKIEHAKKKRLFDLYINGSYEVSELDSMMNDIDAQIGYYESQIEANEELKKNKKIQENLANLATVDFDSLEFREKQLYLKSLINKIYIDGEQVTIEWL

SEQ ID NO: 2799 - protein, 469 aa, synthetic construct
MCYTTPVRAAVYLRISEDRSGEQLGVARQREDCLKLCDQRKWVPVEYLDNDVSASTGKRRPAYEQMLADITAGKIAAVVAWDLDRLHRRPVELEAFMSLADEKRLALATVAGDVDLATPQGRLVARLKGCVAAHETEHKKARQRRAARQKAERGLPNWSNAFGYLPGPNGPEPDPRTAPLVKQAYTDILAGASLGDVCRQWNDAGAFTITGRPWTTTALSKFLRKPRNAGLRAYKGARYGPVDRDAIVGKAQWSPLVDEATFWAAQAVLDAPGRAPGRKSVRRHLLTGLAGCGKCGNHLAGSYRTDGRVVYVCKACHGVSILADNIEPTLYRIVAERLAMPDAVDLLRREIHDAAEAETIRLELEILYGELDRLAVERAEGLLTARQVKVSTDIVNAKITKLQAHQLDQERLRVFDGIPLGTPQVAGMIAKLSPDRFRAVLDALAEVVVQPVGKRGGIFNPERVQVNWR

SEQ ID NO: 2800 - protein, 469 aa, synthetic construct
MSYTTPVRAAVYLRISEDRSGEQLGVARQREDCLKLCDQRKWEPVEYLDNDVSASTGKRRPAYEQMLADITAGKIAAVVAWDLDRLHRRPIELEAFMSLADEKRLALATVAGDVDLATPQGRLVARLKGSVAAHETEHKKARQRRAARQKAERGYPNWSKAFGYLPGPDGPEPDPRTAPLVKQAYADILAGASLGDVCRRWNGAGAFTITGRPWTTTTLSKFLRKPRNAGLRAYKGARYGPVDRDAIVGKAQWNPLVDEATFWAVQAVLDAPGRAPGRKSVRRHLLTGLAGCGKCGNHLAGSYRTDGRVVYVCKACHGVAILADNIEPILYHIVAERLAMPDAVDLLRREFHDAAEAEAIRLELETLYGELDRLAVERAGGLLTARQVKISTDIVNAKITKLQARQLDQERLRVFGGIPLGTPQVAGVIAELSPDRFRAVLDVLAEVVVQPVGKSGRIFNPERVQVNWR

SEQ ID NO: 2801 - protein, 485 aa, synthetic construct
MTKKVAIYTRVSTTNQAEEGFSIDEQIDRLTKYAEAMGWQVSDTYTDAGYSGAKLERPAMQRLINDIENKAFDTVLVYKLDRLSRSVRDTLYLVKDVFTKNKIDFISLNESIDTSSAMGSLFLTILSAINEFERENIKERMAMGKLGRAKSGKSMMWTKTAFGYYHNRKTGILEIVPLQATIVEQIFTDYLSGISLTKLRDRLNESGHIGKDIPWSYRTLRRTLDNPVYCGYIKFKDSLFEGMHKPIIPYETYLKVQKELEERQQQTYERNNNPRPFQAKYMLSGKARCGYCGAPLRIVLGHKRKDGSRTMKYHCANRFPRKTKGVTVYNDNKKCDSGTYDLRNLENTVIDNLIGFQENNESLLKIINGNNQPTLDTSSFKRQISQIDKKIQKISDLYLNDFITMGELKDRTDSLQAEKGPLKAKISENKFNDNTDVFELVKTQLGSIPINELSYDNKKKIVNNLVSKVDVTADNVDIIFKFQLA

SEQ ID NO: 2802 - protein, 469 aa, synthetic construct
MSYTTPVRAAVYLRISEDRSGEQLGVARQREDCLKLCGQRKWVPVEYLDNDVSASTGKRRPAYEQMLADITAGKIAAVVAWDLDRLHRRPIELEAFMSLADEKRLALATVAGDVDLATPQGRLVARLKGSVAAHETEHKRARQRRAARQKAERGYPNWSKAFGYLPGPNGPEPDPRTAPLVRQAYADILAGASLGDVCRQWNGAGALTVTGRLWTTTALSKFLRKPRNAGLRAYKGARYGPVDRDAIVGKAQWSPLVDEATFWAAQAVLDAPGRAPGRKSVRRHLLTGLAGCGKCGNHLAGSYRTDGRVVYVCKACHGVAILADNIEPILYHIVAERLAMPNAVDLLRRGIHDAAEAETIRLELETLYGELDRLAVERAEGLLTARQVKISTDIVSAKIAKVQARQLDQERLRVFDGIPLGTPQVAGMIAELSPDRFRAVLGVLAEVVVQPVGKSGRIFNPERVQVNWR

SEQ ID NO: 2803 - protein, 469 aa, synthetic construct
MSYTTPVRAAVYLRISEDRSGEQLGVARQREDCLKLCGQRKWVPVEYLDNDVSASTGKRRPAYEQMLADITAGKIAAVVAWDLDRLHRRPIELEAFMSLADEKRLALATVAGDVDLATPQGRLVARLKGSVAAHETEHKKARQRRAARQKAERGYPNWCKAFGYLPGPNGPEPDPRTAPLVKQAYADILAGASLGDVCRQWNGAGAFTITGRPWTTTTLSKFLRKPRNAGLRAYKGARYGPVDRNAIVGKAQWSPLVDEATFWAAQAVLDAPGRAPGRKSVRRHLLTGLAGCGKCGNHLAGSYRADGRVVYVCKACHGVAILADNIEPILYHIVAERLAMPDAADLLRREIHDAAEAGTIRLELEALYGELDRLAVERAEGLLTARQVKISTDIVNAKITELQARQQDQERLRVLDGIPLGTPQVAGMIAELSPDRFRAVLDVLARVVVQPVGKSGRIFNPERVQVNWR

SEQ ID NO: 2804 - protein, 469 aa, synthetic construct
MSYTTPVRAAVYLRISEDRSGEQLGVARQREDCLKLCGQRKWEPVEYLDNDVSASTGRRRPAYEQMLADITAGKITAVVAWDLDRLHRRPIELEAFMSLADEKRLALATVAGDVDLATPQGRLVARLKGSVAAHETEHKKARQRRAARQKAERGYPNWSKAFGYLPGPNGPEPDPRTAPLVKQAYADILAGASLGDVCRRWNDAGAFTITGRPWTTTTLSKFLRKPRNAGLRAYKGARYGPVDRDAIVGKAQWSPLVDEATFWAAQAVLDAPGRTPGRKSVRRHLLTGLAGCGKCGSHLAGSYRTDGRVVYVCKACHGVAVLADSIEPILYHIVAERLAMPDAVDLLRREIHDAAEAETIRLELETLYGELDRLAVERAEGLLTARQVKISTDIVNAKITKLQARQLDQERLRVFDGIPLGTPQVADVIAELSPDRFRAVLDVLVDVVVQPVGKGGRIFNPERVQVNWR

SEQ ID NO: 2805 - protein, 485 aa, synthetic construct
MTRKVAIYTRVSTTNQAEEGFSIDEQIDRLTKYAEAMGWQVSDTYTDAGCSGAKLERPAMQRLISGIENKAFDTVLVYKLDRLSRSVRDTLYLVKDVFTKNKVDFISLNESIDTSSAMGSLFLTILSAINEFERENIKERMTMGKLGRAKSGKSMMWTKTAFGYYHNRKTGILEIVPLQATIVEQIFTDYLSGISLTKLRDKLNESGHIGKDIPWSYRTLRQTLDNPVYCGYIKFKDSLFEGMHKPIIPYETYLKVQKELEERQQQTYERNSNPRPFQAKYMLSGMARCGYCGAPLRIVLGHKRKDGSRTMRYHCANRFPRKTKGITVYNDNKKCDSGTYDLSNLENTVIDYLIGLQENNDSLLKIINGNNQPILDTSSLKKQISQIDKKIQKNSDLYLNDFITMDELKDRTDSLQAEKKLLKAKISENKFNDSTDVFELVKTQLGSIPINELSYDDKKRIVNNLVSKVDVTADNVDIIFKFQLA

SEQ ID NO: 2806 - protein, 452 aa, synthetic construct
MKAAIYIRVSTQEQVENYSIQAQTEKLTALCRSKDWDVYDIFIDGGYSGSNMNRPALNEMLSKLHEIDAVVVYRLDRLSRSQRDTTTLIEEYFLKNNVEFVSLSETLDTSSPFGRAMIGILSVFAQLERETIRDRMVMGKIKRIEAGLPLTTAKGRTFGYDVVDTKLYINEEEAKQLRLIYDIFEEEQSITFLQKRLKKLGFKVHTYNRYNNWLTNDLYCGYVSYKDKVHVKGIHEPIISEEQFYRVQEIFTRMGKNPNMNRDSASLLNNLVVCSKCGLGFVHRSKDTMCRGKKYHYRYYSCKTYKHTHELEKCGNKTWRADKLEELIINRVNNYSFASRNVDKEDELDSLNEKLKIEHAKKRRLFDLYINGSYEVSELDSMMNDIDAQINYYESRIGANEELKENKKIQENLAYLATVDFDGLEFREKQLYLKSLINKIYIDGEQVTIEWL

SEQ ID NO: 2807 - protein, 452 aa, synthetic construct
MKAAIYIRVSTREQVENYSIQAQTEKLTALCRSKDWDVYDIFVDGGYSGSNMNRPALNEMLSKLHEIDAVVVYRLDRLSRSQRDTITLIEEYFLKNNVEFVSLSETLDTSSPFGRAMIGILSVFAQLERETIRDRMVMGKIKRIEAGLPLTTAKGRTFGYDVIDSKLYINKEEAKQLQLIYDIFEEEQSITFLQRRLKKLGFKVRTYNRYNNWLTNDLYCGYVSYKDKVHVKGIHEPIISEEQFHRVQEIFARMGKNPNMNRDSASLLNNLVVCSKCGLGFVHRRKDATSRDKKYHYRYYSCKTYKHIHELEKCGNKIWRADKLEELIINRVNNYSFASRNAGKEDELDSLNEKLKIEHAKKKRLFDLYINGSYEVSELDSMMNDIDAQISYYESQIEANEGLKKNKKIQENLAYLATVDFGSLEFREKQLYLKSLINKIYIDGEQVTIEWL

SEQ ID NO: 2808 - protein, 452 aa, synthetic construct
MKAAIYIRVSTQEQVENYSIQAQTEKLTALCRSKDWDVYDIFIDGGYSGSNMNRPALNEMLSKLHEIDAVVVYRLDRLSRSQRDTTTLIEEYFLKNDVEFVSLSETLDTSSPFGRAMIGILSVFAQLERETIRDRMVMGKIKRIEAGLPLTTAKGRTFGYDVIDTKLYINEEEAKQLQLIYDIFEEEQSITSLQKRLKKLGFKVRTYNRYNSWLTNDLYCGYVSYKDKVHVKGIHEPIISEEQFYRVQEIFTRMGKNPNMNRGSASLLNNLVVCSKCGLGFVHRSKDTMSGGKKYHYRYYSCKTYKHTHELEKCGNKTWRADKLEELIISRVNNYSFASRSVDKEDELDSLNEKLKIEHAKKKRLFDLYINGSYEVSELDSVMNDIDARINYYESQIEANEELKKNKKIQENLAELATVDFDSLEFREKQLYLKSLINKIYIDGEQVTIEWL

SEQ ID NO: 2809 - protein, 469 aa, synthetic construct
MCYTTPVRAAVYLRISEDRSGEQLGVARQREDCLKLCGQRRWEPVEYLDNDVSASTGKRRPAYEQMLADITAGKIAAVVAWDLDRLHRRPIELEAFMSLADEKRLALATVAGDVDLATPQGRLVARLKGSVAAHETEHKKARQRRAARQKAERGLPNWSKAFGYLPGPNGPEPDPRTAPLVEQAYADILAGASLGDVCRQWNDAGAFTITGRPWTTTTLSKFLRKPRNAGLRAYKGARYGPVDRGAIVGKAQWSPLVDEATFWAAQAVLDAPGRAPGRKSVRRHLLTGLAGCGKCGNHLAGSYRTDGRVVYVCKACYGVAILADNIEPILYHIVAERLAMPDAVDLLRREIHDAAEAETIRLELETLYGELDHLAVERAEGLLTARQVKISTDIVNAKITKLRARQLDQERLRVFDGIPLGSPQVAGMIAELSPDRFRAVLDVLAEVVVQPVGKSGRIFNPGRVRVNWR

SEQ ID NO: 2810 - protein, 469 aa, synthetic construct
MSYTTPVRAAVYLRISEDRSGEQLGVARQREDCLKLCDQRKWVPVEYLDNDVSASTGKRRPAYEQMLADITAGKIAAVVAWDLDRLHRRPVELEAFMSLADEKRLALATVAGDVDLATPQGRLVARLKGSVAAHETEHKRARQRRAARQKAERGHPNWSKAFGYLPGPDGPEPDPRTAPLVKQAYADILAGASLGDVCRQWNDAGAFTITGRPWTTTTLSKFLRKPRNAGLRAYKGARYGPVDRDAIVGKARWSPLVDEATFWAAQAVLDAPGRAPGRKSVRRHLLTGLAGCGKCGNHLAGSYRADGRVVYVCKACHGVAILADNIEPILYHIVAERLAMPDAVDMLRREIHDAAEAETIRLELETLYGELDRLAVERAEGLLTARQVKISTDIVNAKITKLQARQLDQGRLRVLDGIPLGTPQVAGVIAGLSPDRFRAVLDVLAEVVVQPVGQGGRIFNPERVQVNWR

SEQ ID NO: 2811 - protein, 469 aa, synthetic construct
MSYTTPVRAAVYLRISEDRSGEQLGVARQREDCLKLCDQRKWVPVEYLDNDVSASTGKRRPAYEQMLADITAGKIAAVVAWDLDRLHRRPVELEAFMSLADEKRLALATVAGDVDLATPQGRLVARLKGCVAAHETEHKKARQRRAARQKAERGLPNWSKAFGYLPGPNGPEPDPRTAPLVKQAYADILAGASLGDVCRQWNDAGAFTITGRPWTTTALSKFLRKPRNAGLRAYKGARYGPVDRDAIVGKAQWSPLVDEATFWAAQAVLDAPGRAPGRKSVRRHLLTGLAGCGKCGNHLAGSCRTDGRVVYVCKACHGVSILAVNIEPILYHIVAERLAKPDAVDLLRREIHDAAEAEAIRLELETLHGELDRLAVERAEGLLTARQVKISTDIVNAKITKLQARQLDQERLHVFDGIPLGTPQVAGMIAKLSPDRFRAVLDVLAEVVVQSVGKSGRIFNPERVQVNWR

SEQ ID NO: 2812 - protein, 485 aa, synthetic construct
MTKRVAIYTRVSTTSQAEEGFSIDEQIDRLTKYAEAMGWQVSDTYTDAGSSGAKLERPAMQRLINDIENKVFDTVLVYKLDRLSRSVRDTLYLVKDVFTKNKIDFISLNESIDTSSAMGSLFLTILSAINEFERENIKERMTMGKLGRAKSGKSMMWTKTAFGYYHNRKTGILEIVPLQATIVEQIFTDYLSGISLTKLRDKLNESGHIGKDIPWSYRTLRQTLDNPVYCGYIKFKGSLFEGMHKPIIPYETYLKVQKELEERQQQTYERNNNPRPFQAKYMLSGMARCGYCGAPLKIVLGHKRKDGSRTMKYHCANRFPRKTKGITVYNDNKKCDSGTYELSNLENTVIDNLVGLQENNDSLLKIISGNNQPILDTSSLKKQISQIDKKIRKNSDLYLNDFITMDELKDRTDSLQAEKKLLKAKISENKFNDSTDVFELVKTQLGSIPINELSYDNKKKIVNNLVSKVDVTADNVVIIFKFQLA

SEQ ID NO: 2813 - protein, 469 aa, synthetic construct
MSYTTPVRAAVYLRISEDRSGEQLGVARQREDCLKLCGQRKWVPVEYLDNDVSASTGKRRPAYEQMLVDITAGKIAAVVAWDLDRLHRRPIELEAFMSLADEKRLALATVAGDVDLATPQGRLVARLKASVAAHEIEHKKARQRRAARQKAERGHPNWSKAFGYLPGPNGPEPDPRTAPLVKQAYADILAGASLGDVCRRWNDAGAFTITGRPWTTTTLSKFLRKPRNAGLRAYKGARYGPVDRDAIVGKAQWSPLVDEATFWAAQAVLDAPGRAPGRKSVRRHLLTGLAGCGKCGNHLAGSYRTDGRVVYVCKACHGVAILADNIEPVLYHVVAERLAMPDAVDLLCREIHDAAEAEAIRLELETLYGELDRLAVERAEGLLTARQVKISTDIVNAKITKLQARQLDQERLRVFDGIPLGTPQVAGMIAELSPDRFRAVLDVLAEVVVQPVGRSGRIFNPERVQVNWR

SEQ ID NO: 2814 - protein, 452 aa, synthetic construct
MKAAIYIRVSTREQVENYSIQAQTEKLTALCRSKDWDVYDIFVDGGYSGSNMNRPALNEMLSKLHEIDAVVVYRLDRLSRSQRDTITLIEEHFLKNNVEFVSLSETLDTSSPFGRAMIGILSVFAQLERETIRDRMVMGKIKRIEAGLPLTTAKGRTFGYDVIDTKLYVNEEEAKQLQLIYDIFEEEQSITFLQKRLKKLGFKVHTYNRYNNWLTNDLYCGYVSYKDKVHVKGIHEPIISEEQFYRVQEIFTRMGKNPNMNRDSASLLNNLVVCSKCGLGFVHRRKDAISRDKKYHYRYYSCKTYKHIHELEKCGNKIWRADKLEELIINRVNNYSLASRNVDKEDELDSLNEKLRIEHAKKKRLFDLYINGSYEVSELDSMMNDIDAQINYYESQIEANEELKKNKRIRENLAELATVDFDSLEFREKQLYLKSLINKIYIDGEQVTIEWL

SEQ ID NO: 2815 - protein, 469 aa, synthetic construct
MSYTTPVRAAVYLRISEDRSGEQLGVARQREDCLKLCGQRKWEPVEYLDNDVSASTGKRRPAYEQMLADITAGKIAAVVAWDLDRLHRRPIELEAFMSLADEKRLALATVAGDVDLATPQGRLVARLKGSVAAHETEHKKARQRRAARQKAERGYPNWSKAFGYLPGPNGPEPDPRTAPLVKQAYADILAGASLGDVCRQWNNAGAYTITGRPWTTTTLSKFLRKPRNAGLRAYKGARYGPVDRDAIVGKAQWSPLVDEATFWAAQAVLDAPGRAPGRKSVRRHLLTGLAGCGKCGNHLAGSYRTDGRVVYVCKACHGVAILADNIEPILYHIVAERLAMPDAVDLLRREIHDAAEAETIRLELETLYGELDRLAVERAEGLLTARQVKISTDIVNAKITKLQARQLDQERLRVFNGIPLGTPQVAGMIAELSPDRFRAVLDVLAEVVVQPVGKSGRIFNPERVQVNWR

SEQ ID NO: 2816 - protein, 485 aa, synthetic construct
MTKKVAIYTRVSTTHQAEEGFSIDEQIDRLTKYAEAMGWQVSDTYTDAGFSGAKLERPAMQRLINDIENKAFDTVLVYKLDRLSRSVRDTLYLVKDVFAKNKIDFVSLNESINTSSAMGSLFLTILSAINEFERENIKERMTMGKLGRAKSGKSMMWTKTAFGYYHNRKTGILEIVPLQAAIVEQIFTDYLSGISLTKLRDKLNESGHIGKDIPWSYRTLRQTLGNPVYCGYIKFKDSLFEGMHKPIVPYETYLKVQKELEERQQQTYERNNNPRPFQAKYMLSGMARCGYCGAPLRIVLGHKRKDGSRTMKYHCANRFPRKTKGITVYNDNKKCDSGTYDLSNLESIVIDNLIGFQENNDSLLKIINGNNQPILDTSSFKKRISQIDKKIQKNSDLYLNDFTTLDELKDRTDSLQAEKKLLKAKISENKFNDSTDVFELVKTQLGSIPINELSYDNKKKIVNNLVSRVDVTADNVDIIFKFQPA

SEQ ID NO: 2817 - protein, 469 aa, synthetic construct
MCYTTPVRAAVYLRISEDRGGEQLGVARQREDCLKLCDQRKWVPVEYLDNDVSASTGKRRPAYEQMLADITAGKIAAVVAWDLDRLHRRPIELEAFMSLADEKRLALATVAGDVDLATPQGRLVARLKGSVAAHETEHKKARQRRAARQKAERGYPNWSKAFGYLPGPNGPEPDPRTAPLVKRAYADILAGASLGDVCRRWNDAGAFTITGRPWTTTTLSKFLRKPRNAGLRAYKGARYGPVDRDAIVGKAQWSPLVDEATFWAAQAVLDAPGRAPGRKSVRRHLLTGLAGCGKCGNHLAGSYRTDGRVVYVCKACHGIAILADNLEPILYHVVAERLAMPDAVDLLRREIHDAAEAETIRLELQTLCGELDRLAVERAEGLLTARQVKISTDIVNAKITKLQACQLDQERLRVLDGIPLGTPQVAGMIAELSPDRFRAVLDVLAEVVVQPVGKSGRIFNPERVQVNWR

SEQ ID NO: 2818 - protein, 469 aa, synthetic construct
MSYTTPVRAAVYLRISEDRSGEQLGVARQREDCLKLCDQRKWVPVEYLDNDVSASTGKRRPAYEQMLADITAGKIAAVVAWDLDRLHRRPVELEAFMSLADEKRLALATVAGDVDLATPQGRLVARLKGCVAAHETEHKKARQRRAARQKAERGHPNWSRAFGYLPGPNGPEPDPRTAPLVKQAYADILAGASLGDVCRQWNGAGAVTITGRPWTTTTLSKFLRKPRNAGLRAYKGARYGPVDRDAIVGKAQWSPLVDEASFWAAQAVLDAPGRAPGRKSVRRHLLTGLAGCGKCGNHLAGSYRTDGQVVYVCKVCHGVSILAVNIVPTLYHIVAERLAMPDAVDLLRREIHDAAEAETIRLELETLYGELDRLAVERAEGLLTARQVKISTDIVNAKITELQARQLDQERLRVLDGIPLGTPRVADMIAELSPDRFRAVLDVLAEVVVQPVGKSGRIFNPERVQVNWR

SEQ ID NO: 2819 - protein, 469 aa, synthetic construct
MSYTTPVRAAVYLRISEDRSGEQLGVARQREDCLKLCGQRNWVPVEYLDNDVSASTGKRRPAYEQMLADITAGKIAAVVVWDLDRLHRRPIELEAFMSLADEKRLALATVAGDVDLATPQGRLVARLKGCVAAHETEHKKARQRRAARQKAERGHPNWSKAFGYLPGPNGPEPDPRTAPLVKQAYTDILAGASLGDVCRQWNDAGAFTITGRPWTTATLSKFLRKPRNAGLRAYKGARYGPVDRDAIVGKAQWSPLVDEATFWAAQAVLDAPGRAPGRKSVRRHLLTGLAGCGKCGNHLAGSYRTDGRVVYVCKACHGVAILADNIEPILYHIVAERLAMPDAVDLLRREIHDAAEAETIRLELETLYGELDRLAVERAEGLLTARQVKISTDIVNAKIAKLQARQLDQERLRVFEGIPLGTPQVAGMIAKLSPDRFRAVLDVLAEVVVRPAGKSGRIFNPERVQVNWR

SEQ ID NO: 2820 - protein, 452 aa, synthetic construct
MKAAIYIRVSTREQVENYSIQAQTEKLTALCRGKDWDVYDIFIDGGYSGSNMNRPALNEMLSKLHEIDAVVVYRLDRLSRSQRDTIALIEEYFLKNNVEFVSLSETLDTSSPFGRAMIGILSVFAQLERETIRDRMVMGKIKRIEAGLPLTTAKGRTFGYDVIDTKLYINEEEAKQLQLIYDIFEEEQSITSLQKRLKKLGFKVRTYNCYNSWLTNDLYCGYVSYKDKVHVKGIHEPIISEEQFYRVQEIFTRMGKNPNMNRDSASLLNNLVVCSKCGLGFVHRRKDTTSRGKRYHYRYYSCKTYKHIHELEKCGNKIWRADKLEELIINRVNNYSLASRVADKEDELDSLNEKLKIEHAKRKRLFELYINGSYEVSVLDSMMNDIDAQISYYESQIEANEELKKNKKIQESLTDLATVDFDSLEFREKQLYLKSLINKIYIDGEQVTIEWL

SEQ ID NO: 2821 - protein, 485 aa, synthetic construct
MTKKVAIYTRVSTTNQAEEGFSIDEQIDRLTKYAEAMGWQVSDTYTDAGLSGTKLERPAIQRLINDIENKAFDTVLVYKLDRLSRSVRDTLYLVKDVFTKNKIDFISLSESIDTSSAMGSLFLTILSAINEFERENIKERMTMGKLGRAKSGKSMMWTKTAFGYYHNRKTGILEIVPLQATIVEQIFTDYLSGISLTKLRDKLNESGHIGKDIPWSYRTLRQTLDNPVYCGYIKFKGSLFEGMHKPIIPYETYLKVQKELEERQRQTYERNNNPRPFQAKYMLSGMVRCGYCGAPLRIVLGHKRKDGSRTMKYHCANRFPRKTKGVTVYNDNKKCDSGTYDLSNLENTVIDNLIGFQENNDSLLKIINGNNQPILDTSSFKKQISQIDKKIQKNSDLYLNDFITMDELKDRTDSLQAEKKLLKAKISENKFNDSTDVFELVKAQLGSIPINELSYDNKKKIVNNLVSKVDVTADNVDIIFKFQLA

SEQ ID NO: 2822 - protein, 452 aa, synthetic construct
MKAAIYIRVSTREQVENYSIQAQTEKLTALCRSKDWDVYDIFIDGGYSGSNMNRPALNEMLSKLHEIDAVVVYRLDRLSRSQRDTITLIEEYFLKNNVEFVSLSETLDTSSPFGRAMIGILSVFAQLERETIRDRMVMGKIKRIEAGLPLTTAKGRTFGYDVIDTKLYINEEEAKQLQLIYDIFEEEQSITFLQKRLKKLGFKVHTYNRYNNWLTNDLYCGYVSYKDKVHVKGIHEPIISEEQFYRVQEIFTRMGKNPNMNRDSASLLNNLVVCSKCGLGFVHRRKDTMSRGKKYHYRYYSCKTYKHIHELEKCGNKIWRADKLEELIINRVNNYSLASRNVDREDELDSLSEKLKAEHAKKKRLFDLYINGSYGVSELDSMMSDIDAQISYYESQIEANEELRKNKKIRENLADLVTVDYDSLEFREKQLYLKSLINKIYIDGEQVTIEWL

SEQ ID NO: 2823 - protein, 452 aa, synthetic construct
MKAAIYIRVSTREQVENYSIQAQTERLTALCRSKDWDVYDIFIDGGYSGSNMNRPALNEMLSKLHEIDAVVVYRLDRLSRSQRDTITLIEEYFLKNNVEFVSLSETLDTSSPFGRAMIGILSVFAQLERETIRDRMVMGKIKRIEAGLPLTTAKGRTFGYDVIDSKLYINEEEAKQLQLIYDIFEEEQSITFLQKRLKKLGFKVRSYNRYNNWLTNDLYCGYVSYKDKVHVKGIHEPIISEEQFYRVQEILARMGKNPNMNRSSASLLNNLVVCSRCGLGFVHRRKDAMSRNKKYHYRYYSCKTYKHIHELEKCGNKIWRADKLEELIINRVNNYGLASRNVDKEDELDSLNEKLKIEHAKKKRLFELYINGSYEVSELDSMMNDIDAQINYYESQIEANEELRKNKKIQEDLAHLATVDFDSLEFREKQLYLKSLINKIYIDGEQVTIEWL

SEQ ID NO: 2824 - protein, 485 aa, synthetic construct
MIRKVAIYTRVSTTSQAEEGFSIDEQIDRLTKYAEAMGWQVSDTYTDAGFSGAKLERPAMQRLINDIENKVFDTVLVYKLDRLSRSVRDTLYLVKDVFTENKIDFISLNECIDTSSAMGSLFLTILSAINEFERENIKERMTMGKLGRAKSGKSMMWTKTAFGYYHNRKTGILEIVPLQATIVEQIFTDYLSGTSLTKLRDKLNESGHIGKDIPWSYRTLRQTLDNPVYCGYIKFKGSLFEGMHKPIIPYETYLKVQKELEERQQQTYERNNNPRPFQAKYMLSGMARCGYCGAPLRIVLGHKRKDGSRTMKYHCANRFPRKTKGVTAYNDNKKCDSGTYDLSNLENTVIDNLIGLQEDNDSLLKIINGNNQPILDTSSFKKQISQIDKKIQKNSGLYLNGFITMDELKDRTDSLQAEKKLLKAKISENKFNDSTDVFELVKTQLGSIPINELSYDNKKKIVNNLVSKVVVTEDNVDIIFRFQLA

SEQ ID NO: 2825 - protein, 452 aa, synthetic construct
MKAAIYIRVSTQEQVGNYSIQAQTEKLTALCRSKDWDVYDIFIDGGYSGSNMNRPALNEMLSKLHEIDAVVVYRLDRLSRSQRDTTTLIEEYFLKNNVEFVSLSETLDTSSPFGRAMIGILSVFAQLERETIRDRMVMGKIKRIEAGLPLTTAKGRTFGYDVIDTKLYINEEEAKQLQLIYDIFEEEQSITSLQKRLKKLGFKVRTYNRYSNWLTNDLYCGYVSYKDKVHVKGIHEPIISEEQFYRVQEIFTRMGKNPNVNRDSASLLNNLVVCSKCGLGFVHRSKDTMSRGKKYHYRYYSCKTYKHTHELEKCGNKTWRADKLEELIISRVNNYSFAGRSVDKEDELDSLNEKLKIEHAKKKRLFDLYINGSYEVSELDSMMNDINAQINYYESQIEANGELKENKKIQENLAELATVDFDSLEFREKQLYLKSLINKIYIDGEQVTIEWL

SEQ ID NO: 2826 - protein, 469 aa, synthetic construct
MCYITPVRAAVYLRISEDRRGEQLGVARQREDCLKLCGQRKWEPVEYLDNDVSASTGRRRPAYEQMLADITAGKIAAVVAWDLDRLHRRPLELEAFMSLADEKRLALATVAGDVDLATPQGRLVARLKGSVAAHETEHKKARQRRAARQKAERGHPNWSKAFGYLPGPNGPEPDPRTAPLVKQAYADILAGASLGDVCRQWNDAGAFTITGRPWTSTALSKFLRKPRNAGLRAYKGARYGPVDRDAIVGKAQWSPLVDEATFWAAQAVLDAPGRAPGRKSVRRHLLTGLAGCGKCGNHLAGSYRTDGRVVYVCKACHGVAILADNIEPILYHIVAERLAMPDAVDLLRREIHDAAEAETFRLELETLYDELDRLAVERAEGLLTARQVKISTDIVNAKITKLQARQLDQERLRVLDGIPLGTPQVAGMIAELSPDRFRAVLDVLVEVVVQPVGKSGRIFNPERVQVNWR

SEQ ID NO: 2827 - protein, 469 aa, synthetic construct
MSYTTPVRAAVYLRISEDRSGEQLGVARQREDCLNLCDQRKWVPVEYLDNDVSASTGKRRPAYEQMLADITAGKIAAVVAWDLDRLHRRPVELEAFMSLADEKRLALATVAGDVDLATPQGRLVARLKGCVAAHETEHKKARQRRAARQKAERGHPNWSKAFGYLPGPNGPEPDPRTAPLVKQAYADILAGASLGDVCRQWNDAGAFTITGRPWTSTTLSKFLRKPRNAGLRAYKGARYGPVDRDAIVGKAQWSPLVDEATFWAAQAVLDAPGRAPGRKSVRRHLLTGLAGCGKCGNHLAGSYRTDGRVVYVCKACHGVAILADNIEPFLYHIVAERLAMPDAVDLLRREAHDAAEAETIRLELDTLYGELDRLAVERAEGLLTARQVKISTDIVNAKIARLRACQLDQERLRVFDGIPLGTPQVAGMIAELSPDRFRAVLDVLAEVVVQPVGKRGRIFNPERVRVNWR

SEQ ID NO: 2828 - protein, 485 aa, synthetic construct
MTKKVAIYTRVSTTNQAEEGFSIDEQIDRLTKYAEAMGWQVSGTYTDAGLSGAKLERPAMQRLINDIENKAFDTVLVYKLDRLSRSVRDTLYLVKDVFTKNKIDFISLNESIDTSSAMGSLFLTILSAINEFERENIKERMTMGKLGRARSGKSMMWTKTAFGYYHNRKTGILEIVPLQATIVEQIFTDYLSGISLTKLRDKLNESGHIGKDIPWSYRTLRQTLDNPVYCGYIKFKDSLFEGMHKPIIPYETYLRVQKELEERQQQTYERNNNPRPFQAKYMLSGMARCGYCGAPLRIVLGRKRKDGSRTMKYHCTNRFPRKTKGITVYNDNKKCDSGTYDLSNLENTVIDCLIGFQENNDSLLKIINGNNQPILDTSSLKKQISQIDKKIQKNSELYLNDFITMDELKDRTDSLQAEKKLLKAKISENKFNDSTDVFELVKTQLGSIPINELSYDNKKKIVNNLVSKVDVTADNVDIIFKFQLA

SEQ ID NO: 2829 - protein, 485 aa, synthetic construct
MTKKVAIYTRVSTTNQAEEGFSIDEQVDRLTKYAEAMGWQVSGTYTDAGFSGAKLGRPAMQRLINDIENKAFDTVLVYKLDRLSRSVRDTLYLVKDVFTKNKIDFISLNESIDTSSAMGSLFLTILSAINEFERENIKERMTMGKLGRAKSGKSMMWTKTAFGYYHNRKTGILEIVPLQATIVEQIFTDYLSGISLTKLRDKLNESGHIGKDIPWSYRTLRQTLDNPVYCGYIKFKDSLFEGLHKPIIPYETYLKVQKELGERQQQTYERNNNPRPFQAKYMLSGMARCGYCGAPLRIVLGHKRKDGSRTMKYHCANRFPRKTQGVTVYNDNKKCDSGTYDLSNLENTVIDSLIGLQENNDSLLKIINGNNQPIPDTSSFKKQINQIDKKIQKNSDLFLNDFITMDELKDRTDSLRAERKLLKAKISENKFNDSTDVFELVKTQLGSIPINELSYDNKKKIVNNLVSKVDVTADNVDIIFKFQLA

SEQ ID NO: 2830 - protein, 452 aa, synthetic construct
MKAAIYIRVSTREQVENYSVQAQTEKLTALCRSKDWEVYDIFIDGGYSGSNMNRPALNEMLSKLHEIDAVVVYRLDRLSRSQRDTITLIEEYFLKNNVEFVSLSETLDTSSPFGRAMIGILSVFAQLERETIRDRMVMGKIKRIEAGLPLTTAKGRTFGYDVIDTKLYINEEEAKQLQLIYDIFEEEQSITSLQKRLKKLGFKVRTYNRYNNWLTNDLYCGYVSYKDKVHVKGVHEPIISEEQFYRVQEIFTRMGKNPNMNRDSASLLNNLVVCGKCGLGFVHRRKDIMSRGKKYHYRYYSCKTYKHIHELEKCGNKIWRADKLEELIINRVNNYSLASRNVDKDDELDSLSEKLKIEHAKKKRLFDLYINGSYEVSELDSMMNDIDAQISYYGSRIEANEELKKDKKIQENLAYLATVDFDSLEFREKQLYLKSLINKIYIDGEQVTIEWL

SEQ ID NO: 2831 - protein, 452 aa, synthetic construct
MKAAIYIRVSTQEQVGNYSIQAQTEKLTALCRSKDWDVYDIFIDGGYSGSNMNRPALNEMLSKLHEIDAVVVYRLDRLSRSQRDTTTLIEEYFLKNNVEFVSLSETLDTSSPFGRAMIGILSVFAQLERETIRDRMVMGKIKRIEAGLPLTTAKGRTFGYDVIDTKLYINEEEARQLQLIYDIFEEEQSITSLQKRLKKLGLKVRTYNRYNNWLTNDLYCGYVSYKDKVHVKGIHEPIISEEQFYRVQEIFTRMGKNPSMNRDSASLLNNLVVCSKCGLGFVHRSKDTTCRGKKYHYRYYSCKTYKHTHELEKCGNKTWRADKLEELIISRVNNYSLASRNVDKEDELDSLNEKLKIEHAKKKRLFDLYINGSYEVSELDSMMDDIDAQINYYESQIEASEELKKNKKIQENLAGLATVDFDSLEFREKQLYLKSLINKIYIDGEQVTIEWL

SEQ ID NO: 2832 - protein, 452 aa, synthetic construct
MKAAIYIRVSTREQVENYSIQAQTEKLTALCRSKDWDVYDIFIDGGYSGSNMNRPALNEMLSKLHEIDAVVVYRLDRLSRSQRDTITLIEEYFLKNNVEFVSLSETLDTSSPFGRAMIGILSVFAQLERETIRDRMVMGKIKRIEAGLPLTTAKGRTFGYDVIDTKLYINEEEAKQLQLIYDIFEEEQSITFLQKRLKKLGFKVHTYNCYNNWLTNDLYCGYVSYKDKVRVKGIHEPIISEEQFYRVQEIFTRMGKNPNMNRGSASLLNNLVVCGKCGLGFVHRRKDAMSRDKKYHYRYYSCKTYKHIHELEKCGNKIWRADKLEELIINRVNDYSLASRNVDKEDELDSLNEKLKIEHAKKKRLFDLYINGSYEVSELDSMMNDIDAQINYYESQIEANEELKRNKKIQENLADLATVDFDSLEFREKQRYLKSLINKIYIDGEQVTIEWL

SEQ ID NO: 2833 - protein, 452 aa, synthetic construct
MKAAIYIRVSTREQVENYSIQAQTEKLTALCRSKDWDVYDIFIDGGYSGSNMNRPALNEMLSKLHEIGAVVVYRLDRLSRSQRDTITLIEEYFLKNNVEFVSLSETLDTSSPFGRAMIGILSVFAQLERETIRDRMVMGKIKRIEAGLPLTTAKGRTFGYDVIDTKLYINEEEARQLQLIYDIFEEEQSITFLQKRLKELGFKVRTYSRYNSWLTNDLYCGYVSYKDKVHVKGIHEPIISEEQFYRVQEIFTRMGKNPNMNRDSASLLSNLVVCSKCGLGFVHRRKDTMSRGKKYHYRYYSCKTYKHTHELEKCGNKIWRADKLEELIISRVSNYSFASRNADKEDELDSLNEKLKIEHAKKKRLFDLYINGSYEVSELDSMMSDIDAQINYYESQIEANEELRKNKKIQKNLADLATVDYDSLEFREKQLYLKSLINKIYIDGEQVTIEWL

SEQ ID NO: 2834 - protein, 452 aa, synthetic construct
MKAAIYIRVSTREQVENYSIQAQTEKLTALCRSKDWDVYDIFIDGGYSGSNMNRPALNEMLSKLHEIDAVVVYRLDRLSRSQRDTITLIEEYFLKNNVEFVSLSETLDTSSPFGRAMIGILSVFAQLERETIRDRMVMGKIKRIEAGLPLTTAKGRTFGYDVIDTKLYINEEEAKLLRLIYDIFEEEQSITYLQKRLKKLGFKVRTYSCYNNWLTNDLYCGYVSYKDKVRVKGIHEPIISEEQFYRVQEIFTRMGKNPNMNRDSASLLNNLVVCSKCGLGFVHRRKDTMSRGKKYHYRYYSCKTYKHTHELEKCGNKIWRADKLEELIINRVNNYSFASRNADIEDELDSLNEKLKIEHAKKKRLFDLYINGSYEVSELDSLMNGIDAQINYYESQIEANEGLKKNKKIQENLANLATVDYDSLEFREKQLYLKSLINKIYIDGEQVTIEWL

SEQ ID NO: 2835 - protein, 452 aa, synthetic construct
MKAAIYIRVSTREQVENYSIQAQTERLTALCRSKDWDVYDIFIDGGYSGSNMNRPALNEMLSKLHEIDAVVVYRLDRLSRSQRDTITLIEEYFLKNNVEFVSLSETLDTSSPFGRAMIGILSVFAQLERETIRDRMVMGKIKRIEAGLPLTTAKGRTFGYDVIDTKLYINEEEAKQLQLIYDIFEEEQSITSLQKRLKKLGFKVHSYNRYNNWLTNDLYCGYVSYKDKVHVKGIHEPIISEEQFYRVQEIFTRMGKNPNMNRESASLLNNLVVCSKCGLGFVHRRKDAMSRDKKYHYRYYSCKTYKHIHELEKCGNKIWRADKLEELIINRVNNYSLASRNVDKEDELDSLNEKLKIEHAKKKRLFDLYINGRYEVSELDSMMNDIDAQINHCESQIEANEELKKNKQIQENLANLATVDFDSLEFREKQRYLKSLINKIYIDGEQVTIEWL

SEQ ID NO: 2836 - protein, 469 aa, synthetic construct
MSYTTPVRAAVYLRISEDRSGEQLGVARQREDCLKLCGQRKWVPVEYLDNDVSASTGKRRPAYEQMLADITAGKIAAVVAWDLDRLHRRPIELEAFMSLADEKRLALATVAGDVDLATPQGRLVARLKGSVAAHETEHKKARQRRAARQKAERGYPNWSKAFGYLPGPNGPEPDPRTAPLVKQAYTDILAGASLGDVCRQWNAAGAFTITGRPWTTTTLSKFLRKPRNAGLRAYKGARYGPVDRDAIVGKAQWSPLVDEATFWAAQAVLDAPGRAPGRKSVRRHLLTGLAGCGKCGNHLAGSYRTDGRVVYVCKACHGVAILADNIEPILYHIVAERLAMPDAVDLLRREIHDAAEAETVRLELETLYGELDRLAVERAEGLLTARQVKISTDIVYAKITKLQARQLDQERLRVLDGIPLGTPQVAGMIAELSPDRFRAVLDALAEVVVQPVGKGGRIFNPERVQVNWR

SEQ ID NO: 2837 - protein, 469 aa, synthetic construct
MSYTTPVRAAVYLRISEDRSGEQLGVARQREDCLKLCGQRKWEPVEYLDNDVSASTGKRRPAYERMLADITAGKIAAVVAWDLDRLHRRPIELEAFMSLADEKRLALATVAGDVDLATPQGRLVARLKGSVAAHETEHKKARQRRAARQKAERGHPNWSKAFGYRPGPNGPEPDPRTAPLVKQAYVDILAGASLGDVCRQWNDAGALTITGRPWTTTTLSKFLRKPRNAGLRAYKGARYGPVDRDAIVGKAQWSPLVDEATFWAAQAVLDAPGRAPGRKSVRRHLLTGLAGCGKCGYHLAGSYRTDGRVVYVCKACHGVAILADNIEPILYHIVAERLAMPDAVDLLRCDIHDAAEAETIRLELETLYGELDRLAAERAEGLLTARQVKISTDIVNAKITKLQARQLDQERLRVFDGIPLGTPQVAGMIAELSPNRFRAVLGVLAEVVVQPVGKSGRIFNPERVQVNWR

SEQ ID NO: 2838 - protein, 452 aa, synthetic construct
MKAAIYIRVSTREQVENYSIQAQTEKLTALCRSKDWDVYDIFIDGGYSGSNMNRPALNEMLSKLHEIDAVVVYRLDRLSRSQRDTITLIEEYFLKNNVEFVSLSETLDTSSPFGRAMIGILSVFAQLERETIRDRMVMGKIKRVEAGLPLTTAKGRTFGYDVIDTKLYINEEEAKQLQLIYDIFEEEQSITLLQKRLKKLGLKVRTYNRYNSWLTNDLYCGYVSYKDKVHVKGIHEPIISEEQFYRVQEIFTRMGKNPNMNRGSASLLNNLVVCGKCGLGFVHRRKDTVSRGKKYHYRYYSCKTYKHIHELEKCGNKIWRADKLEELIINRVNNYSFASRNVDKEDELDSLNEKLKIEHAKKKRLFDLYINGSYEVSELDSMMNDIDAQINYYESQIEADEELKKNKKIQENLANLATVDYDSLEFREKQLYLKSLINKIYIDGEQVTIEWL

SEQ ID NO: 2839 - protein, 485 aa, synthetic construct
MTKKVAIYTRVSTTNQAEEGFSINEQIDRLTKYAEAMGWQVSDTYTDAGFSGAKLERPAMQRLINDIGNKVFDTVLVYKLDRLSRSVRDTLYLVKDVFTKNKIDFISLNESIDTSSAMGSLFLTILSAINEFERENIKERMTMGKLGRAKSGKSMMWTKTAFGYYHNRETGILEIVPLQATIVEQIFTDYLSGISLTKLRDKLNESGHIGKDIPWSYRTLRQTLDNPVYCGYIKFKDSLFEGMHKPIIPYETYLKVQIELEERQQQTYERNNNPRPFQAKYMLSGMARCGYCGAPLKIVLGHKRKDGSRTKKYHCANRFPRKTKGVTVYNDNKKCDSGTYDLSNLENTVIDNLIGFQENNDSLLKIINGNNQPILDTSSFKKQISQIDKKIQKNSDLYLNDFITMDELKDRTDSLQAEKKLLEAKISENKFNDSTDVFEQVKTQLGSIPINELSYDNKKKIVNNLVSKVDVTADNVDIIFKFQLA

SEQ ID NO: 2840 - protein, 469 aa, synthetic construct
MSYTTPVRAAVYLRISEDRSGEQLGVARQREDCLKLCDQRKWVPVEYLDNDVSASTGKRRPAYEQMLTDITAGKIAAVVAWDLDRLHRRPIELEAFMSLADEKRLALATVAGDVDLATPQGRLVARLKGCVAAHETEHKKARQRRAARQKAERGYPNWSKAFGYLPGPNGPEPDPRTAPLVKQAYADILAGASLGDVCRQWNDAGAFTITGRPWSTTALSKFLRKPRNAGLRAYRGARYGPVDRDAIVGKAQWSPLVDEATFWAAQAVLDAPGRAPGRKSVRRHLLTGLAGCGKCGNHLAGSYRTDGRVAYVCKACHGVSILADNIEPFLYHIVAERLAMPDAVGLLRREVHDAAEAETIRLELEALYGELDRLAVERAEGLLTARQVKIITDIVNAKITKLQARQLDQERLRVLDGVPLGTPQVAGMIAELSPDRFRAVLDVLVEVVVQPVGKSGRISNPERVQVSWR

SEQ ID NO: 2841 - protein, 452 aa, synthetic construct
MKAAIYIRVSTREQVENYSIQAQTEKLTALCRSKDWDVYDIFIDGGYSGSNMNRPALNEMLSKLHEIDAVVVYRLDRLSRNQRDTITLIEEYFLKNNVEFVSLSETLDTSSPFGRAMIGILSVFAQLERETIRDRMVMGKIKRIEAGLPLTTAKGRTFGYDVIDTKLYINEEEAKQLQLIYDIFEEEQSITFLQKRLKKLGFKVRTYNRYNNWLTNDLYCGYVSYKDKVHVKGIHEPIISEEQFYRVQEIFTRMGKNPNMNRDSASLLNNLVVCGKCGLSFVHRRKDAMSRDKKYHYRYYSCKTYKHIHELEKCGNKIWRADKLEELIIDRVNNYSVAGRNVDKEDELDSLNEKLKIEHAKKKRLFDLYINGSYEVSELDSMMNDIDAQISYYESQIEANEELKKDKKIQENLANLATVDFDSLEFREKQLYLKSLINKIYIDGEQVTIEWL

SEQ ID NO: 2842 - protein, 452 aa, synthetic construct
MKAAIYIRVSTREQVENYSIQAQTEKLTALCRSKDWDVYDIFIDGGYSGSNMNRPALNEMLSKLHEIDAVVVYRLDRLSRSQRDTITLIEEYFLKNNVEFVSLSETLDTSSPFGRAMIGILSVFAQLERETIRDRMVMGKIKRIEAGLPLTTAKGRTFGYDVIDTKLYINEEEAKQLRLIYDIFEEEQSITFLQKRLKELGFKVRTYNRYNNWLTNDLYCGYVSYKDKVHVKGIHEPIISEEQFYRVQEIFTRMGKNPNMNRDSASLLNNLVVCGKCGLGFVHRRKDAMSRDKKYHYRYYSCKTYKHIHELEKCGNKIWRADELEELIINRVNNYSLASRNVDKEDELDSLNEKLKIEHAKKKRLFDLYINGSYEVSELDSMMKDIDAQINYHESQIKANEGLKKNKKIQENLAELATVDFDSLEFREKQLYLKSLINKIYIDGEQVTIEWL

SEQ ID NO: 2843 - protein, 485 aa, synthetic construct
MTKKVAIYTRVSTTNQAEEGFSIDEQVDRLTKYAEAMGWQVSDTYTDAGFSGAKLERPAMQRLISDIENKAFDTVLVYKLDRLTRSVRDTLYLVKDVFTKNKIDFISLNESIDTSSAMGSLFLTILSAINEFERENIKERMTMGKLGRAKSGKSMMWTKTAFGYYHNRKTGILEIVPLQATIVEQIFTDYLSGISLTKLRDKLNESGHIGKDIPWSYRTLRQTLDNPVYCGYIKFKDSLFEGMHKPIIPYETYLKVQKELEERQQQAYERNNNPRPFQAKYMLSGMARCGYCGAPLKIVLGHKRKDGSRTMKYHCANRFPRKTKGVTVYNDNKKCDSGTYDLSDLENTVIDNLIGFQENSDSLLKIINGNNQPILDTSSFEKQISQIDKKIRKDSDLYLNDFITMDELKDRTDSLQAEKKLLKAKINENKFNDSADVFELVKTQLGSIPINELSYDNKKKIVNNLVSKVDVTADNVDIVFKFQLT

SEQ ID NO: 2844 - protein, 469 aa, synthetic construct
MSYTTPVRAAVYLRISEDRSGEQLGVARQREDCLKLCGQRKWEPVEYLDNDVSASTGKRRPAYEQMLADITAGKIAAVVAWDLDRLHRRPIELEAFMSLADEKRLALATVAGDVDLATPQGRLVARLKGSVAAHETEHKKARQRRAARQKAERGHPNWSKAFGYLPGPNGPEPDPRTAPLVKQAYADILVGASLGDVCRQWNDAGAFTITGRPWTTTTLSKFLRKPRNAGLRAYKGARYGPVDRDAIVGKAQWSPLVDEATFWAAQAVLDAPGRAPGRKSVRRHLLTGLAGCGKCGNHLAGSYRTDGRVVYVCKACHGVAILADNIVPILYHIVAERLAMPEAVDLLRREIHDAAEAETIRLELEALYGELDRLAVERAEGLLTARQVKISTDIVNAKITKLQAQQLDQERLRVFDGIPLGTPQVAGVIAELSPDRFRAVLDVLAEVVVQPVGKSGRIFNPERVQVNWR

SEQ ID NO: 2845 - protein, 485 aa, synthetic construct
MTKKVAIYTRVSTTNQAEEGFSIDEQIDRLTKYAEAMGWQVSDTYTDAGLSGAKLGRPALQRLINDIENKAFDTVLVYKLDRLSRSVRDTLYLVKDVFTKNKIDFISLNESIDTSSAMGSLFLTILSAINEFERENIKERMTMGKLGRAKSGKSMMWTKTAFGYYHNRRTGILEIVPLQATIVEQIFTDYLSGISLTKLRDKLNESGHIGKDIPWSYRTLRQTLDNPVYCGYIRFKDSLFEGMHKPIIPYETYLKVQKELEERQQQTYERNNNPRPFQAKYMLSGMARCGYCGAPLRIVLGHKRKDGSRTMKYHCANRFPRKTKGVTVYNDNKKCDSGTYDLSDLENTVIDNLIGLQENNDSLLKIISGNNQPILDTSSFEKQISQIDKKIQKSSDLYLNDFITMDELKDRTDSLRAEKKLLKAKISGNKSDDGTDVFELVKTQLGSIPINELSYDNKKRIVNNLVSKVDVTADNVDIIFKFQLA

SEQ ID NO: 2846 - protein, 452 aa, synthetic construct
MKAAIYIRVSTREQVENYSIQAQTEKLTALCRSKGWDVYDIFIDGGYSGSNMNRPALNEMLSKLHEIDAVVVYRLDRLSRSQRDTITLIEEYFLKNNVEFVSLSETLDTSSPFGRAMIGILSVFAQLERETIRDRMVMGKIKRIEAGLPLTTAKGRTFGYDVIDTKLYINEEEAKQLQLIYDIFEEEQSITSLQKRLKKLGFKVHTYNRYNNWLTNDLYCGYVSYKDKVHVKGIHEPIISEEQFYRVQEIFTRMGKNPNMNRDSASLLNNLVVCSKCGLGFVHRRKDAMSRDKKYHYRYYSCKTYKHVHELEKCGNKIWRADKLEELIIDRVNNYSLASRNADKEDELDSLNERLKIEHAKKRRLFDLYINGSYEVSELDSMMNDIDAQINYYESQIEANKELKKNKKIQENLADLATVDFDSLEFREKQLYLKSLINKIYIDGEQVTIEWL

SEQ ID NO: 2847 - protein, 485 aa, synthetic construct
MTKKVAIYTRVSTTNQAEEGFSIDEQIDRLTKYAEAMGWQVCDTYTDAGFSGAKLERPAMQRLISDIENKAFDTVLVYKLDRLSRSARDTLYLVKDVFTKNKIDFISLNESIDTSSAMGSLFLTILSAINEFERENIKERMIMGKLGRAKSGKSMMWTKTAFGYYHNRKTGILEIVPLQATIVEQIFTDYLSGISLTKLRDKLNESGHIGKDIPWSYRTLRQTLDNPVYCGYIKFKDSLFEGMHKPIIPYETYLKVQKELEERQQQAYERNNNPRPFQAKYMLSGMARCGYCGAPLRVVLGHKRKDGSRTMKYHCANRFPRKTKGVTVYNDNKKCDSGTYDLSNLENTVIDNLIGFQENNDSLLKIINGNNQPILDTSSFKKQISQIDKKIQKNSDLYLNDFITMDELRDRTDSLQAEKELLKAKISENQFNDSTDVFELVKTQLGSIPINELSYDNKKKIVNNLVSKVDVTADNVDIIFKFQLA

SEQ ID NO: 2848 - protein, 469 aa, synthetic construct
MSYTTPVRAAVYLRISEDRSGEQLGVARQREDCLKLCGQRKWVPVEYLDNDVSASTGKRRPAYEQMLADITAGKIAAVVAWDLDRLHRRPIELEAFMSLADERRLALATVAGDVDLATPQGRLVARLKGSVAAHETEHKKARQRRAARQKAERGLPNWSKAFGYLPGPNGPEPDPRTAPLVKQAYADILAGASLGDVCRQWNAAGASTITGRPWTTTALSKFLRKPRNAGLRAYKGAPYGPVDRNAIVGKAQWSPLVDEATFWAAQAVLDAPGRAPGRRSVRRHLLTGLAGCGKCGNHLAGSYRTDGRVVYVCKACHGVAILADNIVPILYHIVAERLAVPDAVDLLRREIHDTAEAETIRLELETLYGELDRLAVERAEGLLTARQVKISTDIVNAKITKLQAHQLDQERLRVLDGIPLGTPQVAGMIAELSPDRFRAVLDVLAEVVVQPVGKSGRIFNPERVQVNWR

SEQ ID NO: 2849 - protein, 485 aa, synthetic construct
MSKKVAIYTRVSTTNQAEEGFSIDEQIDRLTKYAEAMGWQVSDTYTDAGLSGAKLERPAMRRLINDIENKAFDTVLVYKLDRLSRSVRDTLYLVKDVFTKNKIDFISLNESIDTSSAMGSLFLTILSAINEFERENIKERMTMGKLGRAKSGKSMMWTKTAFGYYHNRKTGILEIAPLQATIVEQIFTDYLSGTSLTKLRDKLNEGGHIGKDIPWSYRTLRQTLDNPVYCGYIKFKDSLFEGMHKPIIPYETYLKVQKELEERQQQAYERNNNPRPFQAKYMLSGMARCGYCGAPLRIVLGHKRKDGSRTMKYHCANRFPRKTKGVTVYNDNKKCDSGTYDLSNLENTVIDSLIGLQENNDSLLKIINGNNQPILDTRSFKKQISQIDKKIQKNSDLYLNDFITMDELKDRTDSLQAEKKLLEAKISENKLNDSTGVFELVKTQLGSIPINELSYDNKKKIVNNLVSKVDVTADNVDIIFKFQLA

SEQ ID NO: 2850 - protein, 485 aa, synthetic construct
MTKKVAIYTRVSTTSQAEEGFSIDEQIDRLTKYAEAMGWQVSDTYTDAGFSGAKLERPAMQRLINDIENKAFDTVLVYKLDRLSRSVRDTLYLVKDVFTKNKIDFISLNECIDTSSAMGSLFLTILSAINEFERENIKERMTMGKLGRAKSGKSMMWTKTAFGYYHNRKTGILEIVPRQATIVEQIFTDYLSGISLTKLRDKLNESGHIGKDIPWSYRTLRQTLDNPVYCGYIKFKDSLFEGMHKPIIPYETYLKVQKELEVRQQQAYERNNNPRPFQAKYMLSGLARCGYCGAPLRIVLGHKRKDGSRTMKYHCANRFPRKTKGVTVYNDSKKCDSGTYDLSDLENTVIDNLIGSQENNDSLLKIINGNNQPILDTSSFKEQISQIDKKIQKNSDLYLNDFITMDELKVRTDSLQAEKKLLKAKISENKFNDSTDVFELVKTQLGSIPINELSYDDKKKIVNNLVSKVDVTADNVDIIFKFQLA

SEQ ID NO: 2851 - protein, 469 aa, synthetic construct
MSYTTPVRAAVYLRISEDRSGEQLGVARQREDCLKLCDQRKWVPVEYLDNDVSASTGKRRPAYEQMLADITAGKIAAVVAWDLDRLHRRPIELEAFMSLADEKRLALATVAGDVDLATPQGRLVARLKGCVAAHETEHKKARQRRAARQKAERGHPNWSKAFGYLPGPNGPEPDPRTAPLVKQAYADILAGASLGDVCRRWNDAGVFTITGRPWTTTTLSKFLRKPRNAGLRAYKGARYGPVDRDAIVGKAQWSPLVDEATFWAAQAVLDAPGRAPGRKSVRRHLLTGLAGCGKCGNHLAGSYRTDGQVVYVCKACYGVAILADNIVPILYHVVAERLAMPDAVDLLRHEIHDAAEAETIRLELETLYGELDRLAVERAEGLLTARQVKISTDIVNAKITRLQARQLNQERLRVLDGIPLGTPQVAGAIAELSPDRFRAVLDVLAEVVVQPVGKSGRIFNPERVQVSWR

SEQ ID NO: 2852 - protein, 452 aa, synthetic construct
MKAAIYIRVSTQEQVGNYSIQAQTEKLTALCRSKDWDVYDIFVDGGYSGSNMNRPALNEMLSKLHEIDAVVVYRLDRLSRSQRDTTTLIEEYFLKNNVEFVSLSETLDTSSPFGRAMIGILSVFAQLERETIRDRMVMGKIKRIEAGLPLTTAKGRTFGYDVVDTKLYINEEEAKQLQLIYDIFEEEQSITSLQKRLKRLGFKVRTYSRYNNWLTNDLYCGYVSYKDKVHVKGIHEPIISEEQFYRVQEIFTRMGKNPNMNRDSASLLSNLVVCSKCGLSFVHRSKDTMSRGKKYHYRYYSCKTYKHTHELEKCGNKIWRADKLEELIINRVNNYSFASCSADKDDELDSLNEKLKIEHAKKRRLFDLYISGSYEVSELDSMMNDIDAQINYYESQIGANEEQRKNKKIQENLADLAAVDFDNLEFREKRLYLKSLINKIYIDGERVTIEWL

SEQ ID NO: 2853 - protein, 452 aa, synthetic construct
MKAAIYIRVSTREQVENYSIQAQTEKLTALCRSKDWDVYDIFIDGGYSGSNMNRPALNEMLSKLHEIDAVVVYRLDRLSRSQRDTITLIEEYFLKNNVEFVSLSETLDTSSPFGRAMIGILSVFAQLERETIRDRMVMGKIKRIEAGLPLTTAKGRTFGYDVIDTKLYINEEEAKQLQLIYDIFEEEQSITFLQKRLKKLGFKVRTYNRYNNWLTNDLYCGYVSYKDKVHVKGIHEPIISEEQFYRVQEIFARMGKNPNMNRNSASLLNNLVVCSKCGLGFVHRRKDAMSRDKKYHYRYYSCKTYKHIHELEKCGNKIWRADKLEELIINRVNNYSLASRNVDKEDELDSLNEKLKIEHAKKRRLFDLYISGRYEVSELDSMMNDIDAQINYYESQIEANEELKKNKKIQENLAYLATVDFDSLEFREKQLYLKSLINKIYIDGEQVTIEWL

SEQ ID NO: 2854 - protein, 485 aa, synthetic construct
MTKKVAIYTRVSTTNQAEEGFSIDEQTDRLTKYAEAMGWQVSDTYTDAGFSGAKLERPAMQRLINDIENKAFDTVLVYKLDRLSRSVRDTLYLVKDVFTKNKIDFISLNESIDTSSAMGSLFLTILSAINEFERENIKERMTMGKLGRAKSGKSMMWTKTAFGYYHNRKTGILEIVPLQATIVEQIFTDYLSGISLTRLRDKLNESGHIGKDIPWSYRTLRQTLDNPVYCGYIKFKDSLFEGMHKPIIPYETYLKVQKELGERQQQTYERNNNPRPFQAKYMLSGMARCGYCGAPLRIVLGHKRKDGSRTMKYHCANRFPRKTKGVTVYNDNKKCDSGTYDLSDLENTVIGNLIGFQENDDSLLKIINGNNQPILDTSSLKKQISQIDKKIQKNSDLYLNDFITMDELKDRTDSLQAEKKLLKARISENKFNDSSDVFELVKAQLGSIPINELSYDNKKKIVNSLVSKVDVTADSVDIIFKFQLA

SEQ ID NO: 2855 - protein, 452 aa, synthetic construct
MKAAIYIRVSTREQVENYSIQAQTEKLTALCRSKDWDVYDIFIDGGYSGSNMNRPALNEMLSKLHEVDAVVVYRLDRLSRSQRDTITMIEEYFLRNNVEFVSLSETLDTSSPFGRAMIGILSVFAQLERETIRDRMVMGKIKRIEAGLPLTTAKGRTFGYDVIDTKLYINEEEAKQLQLIYDIFEEEQSITLLQKRLKKLGFKVRTYNRYNSWLTNDLYCGYVSYKDKVHVKGIHEPIISEEQFYRVQEIFTRMGKNPNMYRDSASLLNSLVVCSKCGLGFVHRRKDTTSRGKKYHYRYYSCKTYKHTHELEKCGNKIWRADKLEELIINRVNNYSFASRNVDREDELDSLNEKLKIEHAKKKRLFDLYINGGYEVSELDSMMNDIDAQINYYESQIEANGELKKDKKIQESLANLATVDYDSLEFREKQLYLKSLINKIYIDGEQVTIEWL

SEQ ID NO: 2856 - protein, 452 aa, synthetic construct
MKAAIYIRVSTREQVENYSIQAQTEKLTALCRSKDWDVYDIFIDGGYSGSNMNRPALNEMLSKLHEIDAVVVYRLDRLSRSQRDTITLIEEYFLKNNVEFVSLSETLDTSSPFGRAMIGILSVFAQLERETIRDRMAMGKIKRIEAGLPLTTAKGRTFGYDVIDTKLHINEEEAKQLRLIYDIFEEEQSITFLQKRLKKLGFKVRTYNRYNNWLTNDLYCGYVSYKDKVHVKGIHEPIISEEQFYRVQEIFARMGKNPNMNRESASLLNSLVVCSKCGLGFVHRRKDTVSRGKKYHYRYYSCKTYKHTHELEKCGNKIWRADKLEELIINRVSNYSFASRNVDKEDELDSLNEKLKTEHAKRKRLFDLYINGGYEVSELDSMMNDIDAQINYYESQIEANEELKKNKKIQENLANLATVDYDSLEFREKQLYLKSLINKIYIDGEQVTIEWL

SEQ ID NO: 2857 - protein, 452 aa, synthetic construct
MKAAIYIRVSTREQVENYSIQAQTEKLTALCRSKDWDVYDIFIDGGYSGSNMNRPALNEMLSKLHEIDAVVVYRLDRLSRSQRDTITLIEEYFLKNNVEFVSLSETLDTSSPFGRAMIGILSVFAQLERETIRDRMVMGKIKRIEAGLPLTTAKGRTFGYDVIDTKLYINEEEAKQLQLIYDIFEEEQSITLLQKRLKKLGFKVRTYNRYNSWLTNDLYCGYVSYKDKVHVKGIHEPIISEEQFYRVQEIFTRMGKNPNMNRDSASLLNNLVVCSKCGLGFVHRRKDTMSRGKKYHYRYYSCKTYKHIHELEKCGNKIWRADKLEELVIDRVNNYSIASRNVDKEDELDSLNEKLRIEHAKKKRLFDLYINGSYGVSELDSMMNDIDAQINYYEGQIEANEELKKNKKIQENLAGLATVDFDSLEFREKQLYLKSLINKIYIDGEQVTIEWL

SEQ ID NO: 2858 - protein, 469 aa, synthetic construct
MSYTTPVRAAVYLRISEDRSGEQLGVARQREDCLKLCGQRKWVPVEYLDNDVSASTGKRRPAYEQMLADITAGKIAAVVAWDLDRLHRRPVELEAFMSLADERRLALATVAGDVDLATPQGRLVARLKGCVAAHETEHKKARQRRAARQKAERGLPNWSKAFGYLPGPNGPEPDPRTAPLVKQAYADILAGASLGDVCRQWNDAGAFTITGRPWTTTTLSKFLRKPRNAGLRAYKGARYGPVDRDAIVGKAQWSPLVDETTFWAAQAVLDAPGRAPGRKSVRRHLLTGLAGCGKCGNHLAGSYRTDGRVVYVCKACHGVAILADNIEPVLYHIVAERLAMPNAVDLLRRGIHDAAEAETIRLELETLYGELDRLAVERTEGLLTARQVKISTDIVSAKITKLQAHQLDQERLRVFDGIPLGTPQVADAIAELSPDRFRAVLDVLAEVVVQPVGKGGRVFSPERVQVNWR

SEQ ID NO: 2859 - protein, 452 aa, synthetic construct
MKAAIYIRVSTREQVENYSIQAQTEKLTALCRSKDWDVYDIFIDGGYSGSNMNRPALNEMLSKLHEIDAVVVYRLDRLSRSQRDTITLIEEYFLKNNVEFVSLSETLDTSSPFGRAMIGILSVFAQLERETIRDRMVMGKIKRIEAGLPLTTAKGRTFGYDVVDTRLYINEEEARQLQLIYDIFEEEQSITFLQKRLKKLGFKVHTYNRYNNWLTNDLYCGYVSYKDKVHVRGIHEPIISEEQFYRVQEIFTRMGKNPNMNRDSASLLNSLVVCSKCGLGYVHRRKDTMSRGKKYHYRYYSCKTYKHIHELEKCGNKIWRADKLEELIINRVNNYSFASRNVDKEDELNSLNEKLKIEHAKKRRLFDLYINGSYEVSELDSMMNDIDAQINYYESQIEANEELKKNKKIQENLAELATVDFGSLEFREKQLYLKSLINKIYIDGEQVTIEWL

SEQ ID NO: 2860 - protein, 486 aa, synthetic construct
MTKKVAIYTRVSTTNQAEEGFSIDEQIDRLTKYAEAMGWLVSDTYTDAGFSGGKLERPAMQRLINDIENKAFDTVLVYKLDRLSRSVRDTLYLVKEVFTKNEIDFISLNESIDTSSAMGSLFLTILSAINEFERESIKERMTMGKLGRAKSGKSMMWTKTAFGYYHNRKTGILEIVPLQATIVEQIFTDYLSGISLTKLRDKLNESGHIGKDIPWSYRTLRQTLDNPVYCGYIKFKDSLFEGMHKPIIPYETYLKVQKELEERQQQTYERNNNPRPFQAKYMLSGMARCGYCGAPLRIVLGHKRKDGSRTMKYHCANRFPRKTKGITVYNDDKKCDSGTYDLSNLENTVIGILIGFQENNDSLLRIINGNNQPILDTSSFKKQISQIDKKIQRNSDLYLDGFITMDELKDRTDSLQAEKKLLKAKISENKFNDSTDVFELVKTQLGSIPINELSYDNKKKIVNSLVSKVDVTADNVDIIFKFQLTQ

SEQ ID NO: 2861 - protein, 452 aa, synthetic construct
MKAAIYIRVSTREQVENYSIQAQTEKLTALCRSKDWDVYDIFIDGGYSGSNVNRPALNEMLSKLHEIDAVVVYRLDRLSRSQRDTITLIEEYFLKNNVEFVSLSETLDTSSPFGRAMIGILSVFAQLERETIRDRMVMGKIKRIEAGLPLTTAKGRTFGYDVIDTKLYINEEEAKQLQLIYDIFEEEQSITFLQKRLKKLGFKVRTYNCYNNWLTNDLYCGYVSYKDKVHVKGIHEPIIGEEQFYRVQEIFTRMGKNPNMNRDSASLLNNLVVCSKCGLGFVHRRKDIMGRGKKYHYRYYSCKTYKHIHELEKCGNKIWRADKLEELIISRVNDYSFASRNVDKENELDSLNEKLKIEHAKKKRLFDLYINGSYEVSELDRMMSDIDAQINYYESQIEANEELKKNKKIQENLAYLATVDFDSLEFREKQLYLKSLISKIYIDGEQVTIEWL

SEQ ID NO: 2862 - protein, 452 aa, synthetic construct
MKAAIYIRVSTREQVENYSIQAQTEKLTALCRSKDWDVYDIFVDGGYSGSNMNRPALNEMLSKLHEIDAVVVYRLDRLSRSQRDTITLIEEYFLKNNVEFVSLSETLDTSSPFGRAMIGILSVFAQLERETIRDRMVMGKIKRIEAGLPLTTAKGRTFGYDVIDTKLYINEEEARQLRLIYDIFEEEQSITFLQKRLKELGFKVRTYNRYSNWLTNDLYCGYVSYKDKVHVKGIHEPIISEEQFYRVQEIFTRTGKNPNMNRDSASLLNNLVVCSKCGLGFVHRRKDIMSRGKRYHYRYYSCKTYKHIHELEKCGNKIWRADKLEELIINRVNNYSFASRNADKEDELDSLNEKLKIEHAKKKRLFDLYINGSCEVSELDSMMNDIDAQINYYESQIEANEERKKNKKIQENLAHLATVDFDSLEFREKQLYLKSLINKIYIDGEQVTIEWL

SEQ ID NO: 2863 - protein, 452 aa, synthetic construct
MKAAIYIRVSTQEQVENYSIQAQTEKLTALCRSKDWDVYDIFIDGGYSGSNMNRPALNEMLSKLHEIDAVVVYRLDRLSRSQRDTTTLIEEYFLKNNVEFVSLSETLDTSSPFGRAMIGILSVFAQLERETIRDRMVMGKIKRIEAGLPLTTAKGRTFGYDVIDTKLYINEEEAKQLRLIYDIFEEEQSITSLQKRLKKLGFKVRTYNRYNNWLTNDLYCGYVSYKDKVHVKGIHEPIISEEQFYRVQEIFTRMGKNPNMNRDSASLLSNLVVCSKCGLGFVHRSKDTMSRGKKYHYRYYSCKTYKHTHELEKCGNKTWRADKLEELIINRVNNYSFASRNADKEDELDGLNEKLKIEHAKKRRLFDLYINGSYEMSELDSMMNDIDAQINYYESQIEANEELSRNKKIRENLADLATVDFDSLEFREKQLYLKSLINKIYIDGEQVTIEWL

SEQ ID NO: 2864 - protein, 485 aa, synthetic construct
MTKKVAIYTRVSTINQAEEGFSIDEQIDRLTKYAEAMGWQVSDTYTDAGSSGAKLERPAMQRLINDIENKAFDTVLVYKLDRLSRSVRDTLYLVKDVFTKNKIDFISLNESIDTSSAMGSLFLTILSAINEFERENIKERMTMGKLGRAKSGKSMMWTKTAFGYYHNRKTGILEIVPLQATIVEQIFTDYLSGISLTKLRDKLNESGHIGKDIPWSYRTLRQTLDNPVYCGYIKFKGSLFEGMHKPIIPYETYLKVQKELEERQQQTYERNNNPRPFQAKYMLSGMARCGYCGAPLRIVLGHKRKDGSRTMKYHCANRFPRKTKGVTVYNDNKKCDSGTYDLSNLENTVIDNLIGFQENNDSLLKIINGNNQPILDTSSFKKQISQIDRKIQKNSDLYLNDLITMDELKDRTDSLLAEKKLLKAKISEDKLSDSTDVFELVKTQLGSIPINELSYDNKKKIVNNLVSKVDVTADNVDIIFKFQLA

SEQ ID NO: 2865 - protein, 469 aa, synthetic construct
MCYTTPVRAAVYLRISEDRSGEQLGVARQREDCLKLCDQRKWVPVEYLDNDVSASTGKRRPAYEQMLADITAGKIAAVVAWDLDRLHRRPIELEAFMSLADEKRLALATVAGDVDLATPQGRLVARLKGCVAAHETEHKKARQRRAARQKAERGYPNWSKAFGYLPGPNGPEPDPRTAPLVKQAYADILAGASLGDVCRQWNDAGAFTITGRPWTTTTLSKFLRKPRNAGLRTYKGARYGPVDRDAIVGKAQWSPIVDEATFWAAQAALDAPGRAPGRKSVRRHLLTGLAGCGKCGSHLAGSYRTDGRVVYVCKACHGVAILADNIEPILYHIVAERLATPDAVDLLRREIHDAAEAETIRQELETLYGELDRLAVERAEGLLTARQVKISTDIVNAKITKLQARQLDQERLRVLDGIPLGTPQVAGTIAELSPDRFRAVLDVLAEVVVQPVGKSGRIFNPERVQVNWR

SEQ ID NO: 2866 - protein, 485 aa, synthetic construct
MTKKVAIYTRVSTTNQAEEGFSIDEQIDRLTKYAEAVGWQVSDTYTDAGFSGAKLERPAMQRLINDIENKAFDTVLVYKLDRLSRSVRDTLYLVKDVFAKNKIGFISLNESINTSSAMGGLFLTILSAINEFERENIKERMTMGKLGRAKSGKSMMWTKTAFGYYHNRKTGILEIVPLQATIVEQIFTDYLSGISLTKLRDKLNESGHIGKDIPWSYRTLRQTLDNPVYCGYIKFKGSLFEGMHKPIIPYETYLRVQKELGERQQQTYERNNNPRPFQAKYMLSGMARCGYCGAPLRIVLGHKRKDGSRTMKYHCANRFPRKTKGVTVYNDNKKCDSGTYDLSNLENTVIDTLIGFQENNDSLLKIINGNSQPILDTSSFKKQISQIDKKIQKNSDLYLNDFITMDELKERTDSLQAEKKLLKAKISENKFSDSTDVFELVKAQLGSIPINELSYDNKKKIVNNLVSKVDVTADNVDIIFKFQLA

SEQ ID NO: 2867 - protein, 485 aa, synthetic construct
MTKKVAIYTRVSTTNQAEEGFSIDEQIDRLTKYAEAMGWQVSDTYTDAGFSGAKLERPAMQRLINDIEYKAFDTVLVYKLDRLSRSVRDTLYLVKDVFTKNKIDFISLNESINTSSAMGSLFLTILSAINEFERENIKERMTMGKLGRAKSGKSMMWTKTAFGYYHNRKTGILEIVPLQAAIVEQIFTDYLSGISLTKLRDKLNESGHIGKDIPWSYRTLRQTLDNPVYCGYIKFKDSLFEGMHKPIIPYETYLKVQKELEERQQQTYERNNNPRPFQAKYMLSSMARCGYCGAPLRIVLGHKRKDGSRTMKYHCANRFPRKTKGVTVYNANKKCDSGTYDLSNLENTVIDNLIGLQENNDSLLKIINGNSQPIPDTSSFKKQISQIDKKIQKNSDLYLNDFITMDELKDRTDSLQAEKKLLKAKISENKSNDSTDVFELVKTQLGSIPINELSYDNKKKIVNNLVSKVDVTADNVDIIFKFQLA

SEQ ID NO: 2868 - protein, 485 aa, synthetic construct
MIKKVAIYTRVSTTNQAEEGFSIDEQIDRLTKYAEAMGWQVSDTYTDAGLSGAKLERPAMQRLINDIENKAFDTVLVYKLDRLSRSVRDTLYLVKDVFTKNKIDFISLNEGIDTSSAMGSLFLTILSAINEFERETIKERMTMGKLGRAKSGKSMMWTKTAFGYYHNRKTGILEIVPLQATIVEQIFTDYLSGISLTKLRDKLNESGHIGKDIPWSYRTLRQTLDNPVYCGYIKFKDSLFEGMHKPIIPYETYLKVQKELEERQQQTYERNNNPRPFQARYMLSGMARCGYCGAPLKIVLGHKRKDGSRTMKYHCANRFPRKTKGVTVYNDNEKCDSGTYDLGSLENTVIDNLIGFQENNDRLLKIINGNNQPILETSSFKKQISQIDKKIQKNSDLYLNDFITMDELKDRTNSLQAEKELLKAKISEYKSNDSTDVFELVKTQLGSIPINELSYDGKKKIVNNLVSKVDVTADNVDIIFKFQQA

SEQ ID NO: 2869 - protein, 485 aa, synthetic construct
MTKKVAIYTRVSTANQAEEGFSIDEQIGRLTKYAEAMGWQVSDTYTDAGFSGAKLERPAMQRLINDIENKAFDTVLVYKLDRLSRSVRDTLYLVKDVFTKNKIDFISLNESIDTSSAMGSLFLTILSAINEFERENIKERMTMGKLGRAKSGKSMMWTKTAFGYYHNRETGILEIVPLQATIVEQIFTDYLSGISLTKLRDKLNERGHIGKDIPWSYRTLRQTLDNPVYCGYIKFKDSLFEGMHKPIIPYETYLKVQKELEERQRQAYERNNNPRPFQAKYMLSGMARCGYCGAPLRIVLGHKRKDGSRTMKYHCANRFPRKTRGVTVYNDNKKCDSGTYDLSNLENTVIDNLIGFQEDNDSLLKIINGNNQPVLDTSSFKKQISQIDKKIQKNSDLYLNDFITMDELKDRTDSLQAEKKLLKAKISENKFNDSTDVFELVKTQLGSIPINELSYDNKRKIVNNLVSKVDVTADNVDIIFKFQLA

SEQ ID NO: 2870 - protein, 485 aa, synthetic construct
MTKKVAIYTRVSTTNQAEEGFSIDEQIDRLTKYAEAMGWQVSDTYTDAGLSGAKLDRPAMRRLINDIENKAFDTVLVYKLDRLSRSVRDTLYLVKDVFTKNKIDFISLNESIDTSSAMGSLFLTILSAINEFEREDIKERMTMGKLGRAKSGKSMMWTKTAFGYYHNRKTGILEIVPLQAAIVEQIFTDYLSGISLTKLRDKLNESGHIGKDIPWSYRTLRQTLDNPVYCGYIKFKDSLFEGLHKPIIPYETYLKVQKELGERQQQTYERNNNPRPFQAKYMLSGMARCGYCGAPLRIVLGHKRKDGSRTMKYHCANRFPRRTKGVTVYNDNRKCDSGTYDLSDLENTVIDNLIGFQENSDSLLKIINGNNQPVLDTSSFKKQISQIDKKIQKNSDLYLNDFITMGELKDRTDSLQAEKKLLEAKISENKFNDSTDVFELVKTQLGSIPINELSYDNKKKIVNNLVSKVDVTADNVDIIFKFQLA

SEQ ID NO: 2871 - protein, 469 aa, synthetic construct
MSYTTPVRAAVYLRISEDRSGEQLGVARQREDCLKLCGQRKWVPVEYLDNDVSASTGKRRPAYEQMLADITAGRIAAVVAWDLDRLHRRPIELEAFMSLADEKRLALATVAGDVDLATPQGRLVARLKGCVAAHETEHKKARQRRAARQKAERGYPNWSKAFGYLPGPNGPEPDQRTAPLVKQAYADILAGASLGDVCRQWNDAGAFTITGRPWTTTTLSKFLRKPRNAGLRAYKGARYGPVDRDAIVGKAQWSPLVDEATFWAAQAVLDAPGRAPGRKSVRRHLLTGLAGCGKCGNHLAGSYRTNGRVVYVCKACYGVAILADNIEPILYHIVAERLATPDAVDLLRREIHDAAEAETIRLELETLYGELDRLAVERAEGLLTARQVKISTDIVNAKITKLQARQLDQERLRVLDGIPLGTPQVAGMIAELSPDRFRAVLDVLAEVVVQPVGKSGRILNPERVQVNWR

SEQ ID NO: 2872 - protein, 452 aa, synthetic construct
MKAAIYIRVSTREQVENYSIQAQTEKLTALCRSKDWDVYDIFVDGGYSGSNMNRPALNEMLSKLHEIDAVVVYRLDRLSRSQRDTITLIEEYFLKNNVEFVSLSETLDTSSPFGRAMIGILSVFAQLERETIRDRMVMGKIKRIEAGLPLTTAKGRTFGYDVIDTKLYINEEEAKQLRLIYDIFEEVQSITFLQKRLKKLGFKVRTYNCYNNWLTNDLYCGYVSYKDKVHVKGIHEPIISEEQFYRVQEIFTRMGKNPNMNRESASLLNSLVVCSKCGLGFVHRRKDTMSRDKKYHYRYYSCKTYKHIHELEKCGNKIWRADKLEELIINRVNDYSLASRSVDKENELDSLNEKLKIEHAKKKRLFDLYINGSYEVSELDSMMSDIDAQINHYESQIEANEELRRNKKIQENLAGLATVDFDSLEFREKQLYLKSLINKIYIDGGQVTIEWL

SEQ ID NO: 2873 - protein, 485 aa, synthetic construct
MTRKVAIYTRVSTTNQAEEGFSIDEQIDRLTKYAEAVGWQVSDTYTDAGFSGAKLERPAMQRLINDIENKAFDTVLVYKLDRLSRSVRDTLYLVKDVFTKNKIDFISLNESIDTSSAMGGLFLTILSAINEFERENIKERMTMGKLGRAKSGKSMMWTKTAFGYYHNRKTGILEIVPQQATIVEQIFTEYLNGISLTKLRDKLNESGHIGKDIPWSYRTLRQTLDNPVYCGYIKFKDSLFEGMHKPIISHETYLKVQKELEERQQQACERNNNPRPFQAKYMLSGMARCGYCGAPLKIVLGHKRKDGSRTTKYHCANRFPRKTKGVTVYNDNKKCDSGTYDLSNLENTVIDNLVGFQENNDSLLKIINGNNQPILDTSSLKKQISQIDKKIQKNSELYLNDFITMDELKDRTDSLLAEKKLLKAKISENRFNDSTDVLELVKSQLGSIPINELSYDNKKKIVNNLVSKVDVTADNVDIIFKFQLA

SEQ ID NO: 2874 - protein, 469 aa, synthetic construct
MSYTTPVRAAVYLRISEDRSGEQLGVARQREDCLKLCGQRKWVPVEYLDNDVSASTGKRRPAYEQMLADIAAGKIAAVVAWDLDRLHRRPIELEAFMSLADEKRLALATVAGDVDLATPQGRLVARLKGSVAAHETEHKKARQRRAARQKAERGHPNWSKAFGYLPGPNGPEPDPRTAPLVKQAYADILAGASLGDVCRQWNDAGAFTITGRPWTTTALSKFLRKPRNAGLRAYKGARYGPVDRDAIVGKAQWSPLVDEATFWAAQAVLDAPGRAPGRKSVRRHLLTGLAGCGKCGNHLAGSYRTDGRVVYVCKACHGVAILADNIEPILYHTVAERLAMPNAADLLRREIHDAAEAETIRLELETLYGELDRLAVERAEGLLTARQVKISTDIVNAKITRLQARQLDQERLRMFDGIPLGTPQVAGTIAELSPDRFRAVLDVLAEVVVQPVGKSGRIFNPERVQVNWR

SEQ ID NO: 2875 - protein, 452 aa, synthetic construct
MKAAIYIRVSTREQVENYSIQAQTEKLTALCRSKDWDVYDIFVDGGYSGSNMNRPALNEMLSKLHEIDAVVVYRLDRLSRSQRDTITLIEEYFLKNNVEFVSLSETLDTSSPFGRAMIGILSVFAQLERETIRDRMVMGKIKRVEAGLPLTTAKGRTFGYDVIDTKLYINEEEAKQLQLIYDIFEEEQSITFLQKRLKKLGFKVRTYNRYNNWLTNDLYCGYVSYKDKVHVKGIHEPIISEEQFYRVQEIFTRMGKNPNMNRNSASLLNNLVVCGKCGLGFVHRRKDAVSRDKKYHYRYYSCKTYKHIHELEKCGNKIWRADKLEELIINRVSNYSLASRNVDKEDELDSLNEKLKMEHAKKKRLFDLYINGSYEVSELDGMMNDIDAQINYYESQIEANEELKKNKKIQENLADLATVDFDSLEFREKQLYLKSLINKIYIDGEQVTIEWL

SEQ ID NO: 2876 - protein, 452 aa, synthetic construct
MKAAIYIRVSTREQVENYSIQAQTEKLTALCRSKDWDVYDIFVDGGYSGSNMNRPALNEMLSKLHEIDAVVVYRLDRLSRSQRDTITLIEEYFLKNNVEFVSLSETLDTSSPFGRAMIGILSVFAQLERETIRDRMVMGKIKRIEAGLPLTTAKGRTFGYDVIDTKLYINEEEAKQLQLIYDIFEEEQSITCLQKRLKKLGFKVRTYNRYNNWLTNDLYCGYVSYKDKVHVKGIHEPIISEEQFYRVQEIFTRMGKNPNMNRNSASLLNNLVVCSKCGLGFVHRRKDIMSRGKKYHYRYYSCKTYKHIHELEKCGNKIWRADKLEELVINRVNNYSLASRNVDKEDELDSLNEKLKIEHAKKKRLFDLYINGSYEVSELDSMMSDIDAQINYYESQIEANEELKRNKKIQENLANLATVDFDSLEFREKQLYLKNLIDKIYIDGEQVTIEWL

SEQ ID NO: 2877 - protein, 452 aa, synthetic construct
MKAAIYIRVSTQEQVGNYSIQAQTEKLTALCRSKDWDVYDIFVDGGYSGSNMNRPALNEMLSKLHEIDAVVVYRLDRLSRSQRDTTTLIEEYFLKNNVEFVSLSETLDTSSPFGRAMIGILSVFAQLERETIRDRMVMGKIKRIEAGLPLTTAKGRTFGYDVIDTKLYINEEEAKQLRLIYDIFEEEQSITSLQKRLKKLGFKVRTYNRYNNWLTNDLYCGYVSYKDKVHVKGIHEPIISEEQFYRVQEIFTRKGKNPNMNRDSASLLNNLVVCSKCGLGFVHRSKDTMSGGKKYHYRYYSCKTYKHTHELEKCGNKTWRADKLEELIINRVNNYSFASRNADKEDELDSLSEKLKIEHAKKKRLFNLYINGSYEVSELDSMMNDIDAQINYYESQIEANEELKKSKKIQENLADLATVDFDSLGFREKQLYLKSLISKIYIDGEQVTIEWL

SEQ ID NO: 2878 - protein, 452 aa, synthetic construct
MKAAIYIRVSTHEQVANYSIQAQTEKLTALCRSKDWDVYDIFVDGGYSGSNMNRPALNEMLSKLHEIDAVVVYRLDRLSRSQRDTTTLIEEYFLKNNVEFVSLSETLDTSSPFGRAMIGILSVFAQLERETIRDRMVMGKIKRIEAGLPLTTAKGRTFGYDVIDTKLYINEEEAKQLRLIYDIFEEVQSITSLQKRLKKLGFKVRTYNRYSNWLTNDLYCGYVSYKDKVHVKGIHEPIISEEQFYRVQEIFTRMGKNPNMNRDSASLLNNLVVCGKCGLGFVHRSKDTTSRGKKYHYRYYSCKTYKHTHELEKCGNKTWRADKLEELVINRVNNYSFASRNVDKEDELDSLNEKLKIEHARKKRLFDLYIDGSYEVSELDGMMSDIDAQINYYESRIEASEELKKNKKIQENLADLATVDFDSLEFREKQMYLKSLINKIYIDGEQVTIEWL

SEQ ID NO: 2879 - protein, 485 aa, synthetic construct
MTKKVAIYTRVSTTNQAEEGFSIDEQIDRLTKYAEAMGWQVSDTYTDAGLSGAKLERPAMQRLINDIENKAFDTVLVYKLDRLSRSVRDTLYLVKDVFTRNKIDFISLNESIDTSSAMGSLFLTILSAINEFERENIKERMTMGKLGRAKSGKSMMWTKTAFGYYHNRKTGILEIVPLQATIVEQIFTDYLSGISLTKLRDKLNESGHIGKDIPWSYRTLRQTLDNPVYCGYIKFKGSLFEGTHKPIIPYETYLKVQKELEVRQQQTYERNNNPRPFQAKYMLSGMARCGYCGAPLKIVLGHKRKDGSRTMKYHCANRFPRKTEGVTVYNDNKECDSGTYDLRNLENTVIDNLIGLQENNDSLLKIINGNNQPILDTSSFKEQISQIDKKIQKNSDLYLNDFITMDELKDRTDSLQAEKKLLKAKISENKFNDSADVFELVKTQLGSIPINELSYDSKKKLVNNLVSKVDVTADNVDIIFKFQPA

SEQ ID NO: 2880 - protein, 452 aa, synthetic construct
MKAAIYIRVSTQEQVENYSIQAQTEKLTALCRSKDWDVYDIFIDGGYSGSNMNRPALNEMLSKLHEIDAVVVYRLDRLSRSQRDTTTLIEEYFLKNNVEFVSLSETLDTSSPFGRAMIGILSVFAQLERETIRDRMVMGKIKRIEAGLPLTTAKGRTFGYDVIDTKLYINEEEAKQLQLIYDIFEEEQSITFLQKRLKKLGFKVRTYNRYNNWLTNDLYCGYVSYKDKVHVKGIHEPIISEEQFYRVQEIFTRMGKNPNMNRDNASLLSNLVVCSKCGLGFVHRSKDTMSRGKKYHYRYYSCKTYKHTHELEKCGNKTWRADKLEELIINRVNDYSFASRSADKEDGLDSLNEKLKTEHAKRKRLFDLYINGSYEVSELDSMMNDIDAQINYYESQIEAKEELRKNKKIQENLAELATVDFDSLEFREKQLYLKSLINKIYIDGEQVTIEWL

SEQ ID NO: 2881 - protein, 452 aa, synthetic construct
MKAAIYIRVSTREQVENYSIQAQTEKLTALCRSKDWDVYDVFIDGGYSGSNMNRPALNEMLSKLHEIDAVVVYRLDRLSRSQRDTITLIEEYFLKNNVEFVSLSETLDTSSPFGRAMIGILSVFAQLERETIRDRMVMGKIKRIEAGLPLTTAKGRTFGYDVIDTKLYINEEEAKQLRLIYDIFEEEQSITSLQKRLKKLGFKVRTYNRYNNWLTNDLYCGYVSYKDKVHVKGIHEPIISEEQFYRVQEIFTRMGKNPNMNRDSASLLNNLVVCGKCGLGFVHRRKDAVSRDKKYHYRYYSCKTYKHIHELEKCGNKIWRADELEELIINRVNNYSLASRNVDKEDELDSLNEKLKIEHAKKRRLFDLYINGSSEVSELDSMMNDIDAQISYYESQIEASEELKKNKKIQENLARLATVDFDSLEFREKQLYLKSLINKIYIDGEQVTIEWL

SEQ ID NO: 2882 - protein, 452 aa, synthetic construct
MKAAIYIRVSTQEQVGNYSIQAQTEKLTALCRSKDWDVYDIFIDGGYSGSNMNRPALNEMLSKLHEIDAVVVYRLDRLSRSQRDTTTLIEEYFLKNNVEFVSLSETLDTSSPFGRAMIGILSVFAQLERETIRDRMVMGKIKRIEAGLPLTTAKGRTFGYDVIDTKLYINEEEAKQLQLIYDIFEEEQSITFLQKRLKKLGLKVRAYNRYNNWLTNDLYCGYVSYKDKVRVKGIHEPIISEEQFYRVQEIFTRMGKNPNMNRDSASLLSNLVVCSKCGLGFVHRSKDTMSRGKKYHYRYYSCKTYKHTHELEKCGNKIWRADKLEELIINRVNNYSFASRSVGKEDELDSLNEKLKIEHAKKKRLFDLYINGSYEVSELDSMMNDIDAQINYYESQIEANEELRKTKKIQENLADLATVDFDGLEFRDKQLYLKSLINKIYIDGEQVTIEWL

SEQ ID NO: 2883 - protein, 469 aa, synthetic construct
MSYTTPVRAAVYLRISEDRSGEQLGVARQREDCLKLCGQRKWVPVEYLDNDVSASTGKRRPAYEQMLADITAGKIAAVVAWDLDRLHRRPIELEAFMSLADEKRLALATVAGDVDLATPQGRLVARLKASVAAHETEHKKARQRRAARQKAERGHPNWSKAFGYLPGPNGPEPDPRTAPLVKQAYADILAGASLGDVCRRWNDAGAFTITGRPWTITTLSKFLRRPRNAGLRAYKGARYGPVDRDAIVGKAQWSPLVDEATFWAAQAVLDAPGRAPGRKSVRRHLLTGLAGCGKCGNHLAGSYRTDGRVVYVCKACHGVAILADNIEPFLYHIVAERLAMPDAVDLLRREIRDAAEAETIRLELGTLYGELDRLAVERAEGLLTARQVKISTDIVNAKITKLQTRQLDQERLRVFDGIPLGTPQVAGVIAELSPNRFRAVLDVLAEVVVQPVGKGGRIFNPERVQVNWR

SEQ ID NO: 2884 - protein, 452 aa, synthetic construct
MKAAIYIRVSTREQVENYSIQAQTEKLTALCCSKDWDVYDIFIDGGYSGSNMNRPALNEMLSKLHEIDAVVVYRLDRLSRSQRDTITLIEEYFLKNNVEFVSLSETLDTSSPFGRAMIGILSVFAQLERETIRDRMVMGKIKRVEAGLPLTTAKGRTFGYDVIDAKLYINEEEAKQLQLIYDIFEEEQSITLLQKRLKKLGFKVRTYNRYNNWLTNDLYCGYVSYKDKVHVKGIHEPIISEEQFYRVQEIFTRMGKNPNTNRESASLLNNLVVCCKCGLGFVHRRKDTTSRGKKYHYRYYSCKTYKHIHELEKCGNKIWRADILEELIINRVNNYSFASRNVDKEDELDSLNEKLRIEHAKKKRLFDLYINGSYEVSELDCMMNDIDAQINYYESQIEANDELKKDKKIQESLANLATVDYDSLEFREKQLYLKSLINKIYIDGEQVTIEWL

SEQ ID NO: 2885 - protein, 452 aa, synthetic construct
MKAAIYIRVSTREQVENYSIQAQTEKLTALCRSKDWDVYDIFIDGGYSGSNMNRPALNEMLSKLHEIDAVVVYRLDRLSRSQRDTITLIEEFFLKNNVEFVSLSETLDTSSPFGRAMIGILSVFAQLERETIRDRMVMGKIKRIEAGLPLTTAKGRTFGYDVIDTKLYVNEEEARQLQLIYDIFEEEQSITFLQKRLKELGFKVRTYNRYNNWLTNDLYCGYVSYKDKVHVKGIHEPIISEEQFYRVQEIFTRMGKNPNMNRDSASLLNNLVVCSKCGLGFVHRRKDAMSRDKKYHYRYYSCKTYKHIHELEKCGNKIWRADKLEELIINRVSNYSVAGRDVDKEDELDSLNEKLKIEHAKKKRLFELYINGSYEVSELDSMMDGIDAQINYYESQIEASEELKKNKKIQENLANLATVDFDSLGFREKQLYLKSLINKIYIDGEQVTIEWL

SEQ ID NO: 2886 - protein, 452 aa, synthetic construct
MKAAIYIRVSTREQVENYSIQAQTEKLTALCRSKDWDVYDIFVDGGYSGSNMNRPALDEMLSKLHEIDAVVVYRLDRLSRSQRDTITLIEEYFLKNNVEFVSLSETLDTSSPFGRAMIGILSVFAQLERETIRDRMVMGKIKRIEAGLPLITAKGRTFGYDVIDTKLYINEEEAKQLQLIYDIFEEEQSITSLQKRLKKLGLKVHTYNRYNNWLTNDLYCGYVSYKDKVHVKGIHEPIISEEQFYRVQEIFARTGKNPNMNRDSASLLNNLVVCSKCGLGFVHRRKDIMSHGKKYHYRYYSCKTYKHIHELEKCGNKIWRADKLEELIINRVNNYSLASRTVDKEDELDSLNEKLKIEHAKKKRLFDLYINGRFEVSELDSMMNDIDAQINYYESQIEANEELKKNKQIQENLANLATVDFDSLEFREKQRYLKSLINKIYIDGEQVTIEWL

SEQ ID NO: 2887 - protein, 452 aa, synthetic construct
MKAAIYIRVSTREQVENYSIQAQTEKLTALCRSKDWDVYDIFVDGGYSGSNMNRPALNEMLSKLHEIDAVVVYRLDRLSRSQRDTITLIEEYFLKNNVEFVSLSETLDTSSPFGRAMIGILSVFAQLERETIRDRMVMGKIKRIEAGLPLTTAKGRTFGYDVIDTKLYINEEEAKQLQLIYDIFEEEQSITSLQKRLKKLGFKVRTYNRYNNWLTNDLYCGYVSYKDKVHVKGIHEPIISEEQFYRVQEIFARMGKNPNMNRDSASLLNNLVVCSKCGLGFVHRRKDIMSRGKKYHYRYYSCKTYKHIHELEKCGNKIWRADKLEELIINRVNNYSFASRNADKEDELNSLNEKLKMEHAKKKRLFDLYINGSYEVSELDSMMNDIDAQISYYESQIEANGELKKNKKIQENLADLATVDFDSLEFREKQLYLKSLINKIYIDGEQVTIEWL

SEQ ID NO: 2888 - protein, 452 aa, synthetic construct
MKAAIYIRVSTQEQVGNYSIQAQTEKLTALCRSKDWDVYDVFIDGGYSGSNMNRPALNEMLSKLHEIDAVVVYRLDRLSRSQRDTTTLIEEYFLKNNVEFVSLSETLDTSSPFGRAMIGILSVFAQLERETIRDRMVMGKIKRIEAGLPLTTAKGRTFGYDVIDTKLYINEEEAKQLQLIYDIFEEEQSITSLQKRLKELGFKVRTYNRYSNWLTNDLYCGYVSYKDEVHVKGIHEPIISEEQFYRVQEIFTRMGKNPNMNRDSASLLNNLVVCSKCGLSFVHRSKDTMSRGKKYHYRYYSCKTYKHTHELEKCGNKTWRADKLEELIINRVNDYSFASRNVDKEDELDSLNEKLKTERAKRKRLFELYINGSYEVSELDSMMSDIDAQINHYEGQIEANEKLKKNKKIQENLADLATMDFDSLELREKQLYLKSLINKIYIDGEQVTIEWL

SEQ ID NO: 2889 - protein, 469 aa, synthetic construct
MSYTTLVRAAVYLRISEDRSGEQLGVARQREDCLKLCDQRKWVPVEYLDNDVSASTGKRRPAYEQMLADITAGKIAAVVAWDLDRLHRRPTELEAFMSLADEKRLALATVAGDVDLATPQGRLVARLKACVAAHETEHKKARQRRAARQKAERGYPNWSKAFGYLPGPNGPEPDPRTAPLVKQAYADILAGASLGDVCRQWNDAGAFTITGRPWTTTTLSKFLRKPRNAGLRAYKGARYGPVDRDAIVGKAQWSPLVDEATFWAAQAVLDAPGRAPGRKSVRRHLLTGLAGCGKCGNHLAGSYRTDGRVVYVCKACHGVAILADNIEPILYHIVAERLAMPDAVDLLRCEVHDAAEAETTRLELEALYGELDRLAVERAEGLLTARQVKISTDIVNAKITKLRARQLDQERLRVFDGIPLGTPQVAGTIAELSPARFRAVLDVLAEVVVQPVGKSGRAFNPERVQVNWR

SEQ ID NO: 2890 - protein, 452 aa, synthetic construct
MKAAIYIRVSTREQVENYSIQAQTEKLTALCRSKGWDVYGIFTDGGYSGSNMNRPALNEMLSKLHEIDAVVVYRLDRLSRSQRDTITLIEEYFLKNNVEFVSLSETLDTSSPFGRAMIGILSVFAQLERETIRDRMVMGKIKRIEAGLPLTTAKGRTFGYDVIDTKLYINEEEAKQLQLIYDIFEEEQSITFLQKRLKKLGFKVRTYNCYNNWLTNDLYCGYVSYKDKVHVKGIHEPIISEEQFYRVQEIFARVGRNPNMNRDSASLLNNLVVCSKCGLGFVHRRKDAMSRDKKYHYRYYSCKTYKHIHELEKCGNKIWRADKLEELVINRVNNYSLASRNVDREDELDSLNVKLKIEHAKKKRLFDLYINGSYEVSELDSMMNDIDAQINYYESQIAANEVLKKNKKIQENLANLATVDFDSLEFREKQLYLKSLINKIYIDGEQVTIEWL

SEQ ID NO: 2891 - protein, 469 aa, synthetic construct
MSYTTPVRAAVYLRISEDRSGEQLGVARQREDCLKLCDQRKWVPVEYLDNDVSASTGKRRPAYEQMLADITAGKIAAVVAWDLDRLHRRPVELEAFMSLADEKRLALATVAGDVDLATPQGRLVARLKGCVAAHETEHKKARQRRAARQKAERGLPNWSKAFGYLPGPNGPEPDPRTAPLVKQAYADILAGASLGDVCRQWNAAGAFTITGRPWTTTALSKFLRKPRNAGLRAYKGARYGPVNRDAIVGKAQWSPLVDEATFWAAQAVLDAPGRAPGRKSVRRHLLTGLAGCGKCGNHLAGSYRTDGRVVYVCKACHGVAILAENIEPILYHIVAERLAMPDAVDLLRRETHDAAEAETIRLELETLYGELDCLAVERAEGLLTARQVKISTDIVNAKITKLKARQLDQERLRVFDGIPLGTPQVAGMIAELSPDRFRAVLDVLAEVVVQPAGKSGRIFNPERVQVNWR

SEQ ID NO: 2892 - protein, 469 aa, synthetic construct
MSYTTPVRAAVYLRISEDRSGEQLGVARQREDCLKLCGQRKWVPVEYLDNDVSASTGKRRPAYEQMLADITAGKIAAVVAWDLDRLHRRPIELEAFMSLADEKRLALATVAGDVDLATPQGRLVARLKGSVAAHETEHKKARQRRAARQKAERGHPNWSKAFGYLPGPNGPEPDPRTAPLVKQAYADILAGASLGDVCRQWNGAGALTITGRPWTTTTLSKFLRKPRNAGLRAYKGARYGPVDRDAIVGKAQWSPLVDEATFWAAQAVLDAPGRAPGRKSVRRHLLTGLAGCGKCGNHLAGSYRTDGRVVYVCKACHGVAILADNIVPILYHIVAERLAMPDAVDLLRREIHDAAEAETIRLELETLCGELDRLAVERAEGLLTARQVKICTDIVNAKITKLQARQLDQERLRVLDGIPLGTPQVAGMIAELSPDRFRAVLDVLAEVVVQPVGKSGRVFNPERVQVNWR

SEQ ID NO: 2893 - protein, 452 aa, synthetic construct
MKAAIYIRVSTREQVENYSIQAQTEKLTALCRSKDWDVYDIFIDGGYSGSNMNRPALNEMLSKLHEIDAVVVYRLDRLSRSQRDTITLIEEYFLKNNVEFVSLSETLDTSSPFGRAMIGILSVFAQLERETIRDRMVMGKIKRVEAGLPLTTAKGRTFGYDVIDTRLYINEEEAKQLQLIYDIFEEEQSITFLQKRLKKLGFKVRTYNCYNNWLTNDLYCGYVSYKDKVHVKGIHEPIISEEQFYRVQEIFTRMGKNPNMNRDSASLLNGLVVCSKCGLGFVHRRKDTMSRDKKYHYRYYSCKTYKHIHELEKCGNKIWRADKLEELIINRVNNYSLANRNVGKEDELDSLNERLRIEHAKKKRLFDLYINGSYEVSELDSMMSDIDMQINYYESQIEANEKLKKNKKIQESLANLATVDFDSLEFREKQLYLKSLINKIYIDGEQVTIEWL

SEQ ID NO: 2894 - protein, 485 aa, synthetic construct
MTKKVAIYTRVSTTNQAEEGFSIDEQIDRLTKYAEAMGWQVSDTYTDAGLSGAKLERPAMQRLINDIENKAFDTVLVYKLDRLSRSVRDTLYLVKDVFTKNKIDFISLNESIDTSSAMGSLFLTILSAINEFERENIKERMTMGKLGRAKSGKSMMWTKTAFGYYHNRKTGILEIAPLQATIVEQIFTDYLSGISLTKLRDKLNESGHIGKDIPWSYRTLRQTLDNPVYCGYIKFKDSLFEGMHKPIIPYETYLKVQKELEERQQQAYERNNNPRPFQAKYMLSGMARCGYCGAPLKIVLGRKRKDGSRTMKYHCANRFPRKTKGVTVYNDNRKCDSGTYDLRNLENTVIDNLIGFQEDNDSLLKIINGNNQPILDTSSFEKQISQIDKRIQKNSDLYLNDFITMDELKDRTDSLQAEKKLLKAKISENKFNDSTDVLELVKTQLGSVPISELSYDDKKKIVNNLVSRVDVTADNVDIIFKFQLA

SEQ ID NO: 2895 - protein, 452 aa, synthetic construct
MKAAIYIRVSTREQVENYSIQAQTEKLTALCRSKDWDVYDTFIDGGYSGSNMNRPALNEMLSKLHEIDAVVVYRLDRLSRSQRDTITLIEEYFLKNNVEFVSLSETLDTSSPFGRAMIGILSVFAQLERETIRDRMVMGKIKRIEAGLPLTTAKGRTFGYDVIDTKLYINEEEAKQLRLIYDIFEEEQSITSLQKRLKKLGFKVHTYNRYNNWLTNDLYCGYVSYKDKVHVKGIHEPIISEEQFYRVQEIFTRMGKSPNMNRDSASLLNNLVVCGKCGLGFVHRRKGIMSRGKKYHYRYYSCKTYKHIHELEKCGNKIWRADKLEELIINRVSNYSHASRNVDKDDELYSLNEKLKVEHAKRRRLFDLYINGSYEVSELDSMMNDIDAQINHYESQIEANEELKKNKKIQENLADLATVDFDSLEFREKQLYLKSLINKIYIDGEQVTIEWL

SEQ ID NO: 2896 - protein, 485 aa, synthetic construct
MTKKVAIYTRVSTANQAEEGFSIDEQVDRLTKYAEAMGWQVSDTYTDAGFSGAKLERPAMQRLINDIENKAFDTVLVYKLDRLSRSVRDTLYLVKDVFTRNKIDFISLTESIDTSSAMGSLFLTILSAIHEFERENIKERMTMGKLGRAKSGKSMMWTKTAFGYYHNRKTGILEIVPLQAAIVKQIFTDYLSGISLTKLRDKLNESGHIGKDIPWSYRTLRQTLDNPVYCGYIKFKDSLFEGMHKPIIPYETYLKVQKELEERQQQTYERNNNPRPFQAKYMLSGMARCGYCGAPLRIVLGRKRKDGSRTMKYHCTNRFPRKTKGITVYNDNKKCDSGTYDLSNLENTVIDNLIGFQENSDSLLKIINGNNQPILDTSSFKEQISQIDKKIQKNSDLYLNDFITMDELKDRTDSLQAEKKLLKAKISENKFNDSTDVFELVKTQLGSIPINELSYDNKKKIVNDLVSKVDVTADNVDIIFKFQLA

SEQ ID NO: 2897 - protein, 485 aa, synthetic construct
MTRKVAIYTRVSTTNQAEEGFSIDEQIDRLTKYAEAMGWQVSDTYTDAGFSGAKLERPAMQRLINDIENKAFDTVLVYKLDRLSRSVRDTLHLVKDVFTKNKIDFISLNESIDTSSAMGSLFLTILSAINEFERENIKERMTMGKLGRAKSGKSMMWTKTAFGYYHNRKTGILEIVPLQATIVEQIFTDYLSGISLTKLRDKLNESGHIGKDIPWSYRTLRQTLDNPVYCGYIKFKDSLFEGMHKPIIPYETYLKVQKELEERQQQTYERNNNPRPFQAKYMLSGMARCGYCGAPLRIVLGHKRKDGSRTMKYHCANRFPRKTKGVTVYNDNKKCDSGTYDLSNLENTVIDILIGFQENDDSLLKIINGNNQPILDTSSFKERISQIDKKIQKNSDLYLNDFITMDELKDRTDSLQAEKKLLKAKISENKFNDSTDVFELVKTQLGSIPINGLSYDNKKKIVNNLVSKVDVTADNVDIIFKFQLA

SEQ ID NO: 2898 - protein, 485 aa, synthetic construct
MTKKVAIYTRVSTTNQAEEGFSIDEQIDRLTKYAEAMGWQVSDTYTDAGISGAKLERPAMQRMINDIENKAFDTVLVYKLDRLSRSVRDTLYLVKDVFTKNKIDFISLNESIDTSSAMGSLFLTILSAINEFERENIRERMTMGKLGRAKSGKSMMWTKTAFGYYHNRKTGILEIVPLQATIVEQIFTDYLSGISLTKLRDKLNESGHIGKDIPWSYRTLRQTLDNPVYCGYIKFKGSLFEGMHKPIIPYETYLKVQKELEERQQQTYERNNNPRPFQAKYMLSGMARCGYCGAPLRIVLGHKRKDGSRTMKYHCANRFPRKTKGVTVYNDNNKCDSGTYDLSNLENTVIDILIGFQENNDSLLKTINGNNQPILDTSSFKKQISRIDKKIQKISDLYLNDFITMDELKDRTDSLQAEKKLLKAKIRENKFNDSTDVFELVKTQLGSIPINELSYDNKKKIVNNLVSKVDVTADNVDIIFKFQLA

SEQ ID NO: 2899 - protein, 452 aa, synthetic construct
MKAAIYIRVSTREQVENYSIQAQTEKLTALCRSKDWDVYDIFIDGGYSGSNMNRPALNEMLSKLHEIDAVVVYRLDRLSRSQRDTITLIEEYFLKNNVEFVSLSETLDTSSPFGRAMIGILSVFAQLERETIRDRMVMGKIKRIEAGLPLTTAKGRTFGYDVVDTKLYINEGEARQLQLIYDIFEEEQSITFLQKRLKKLGFKVRTYNRYNDWLTNDLYCGYVSYKDKVHVKGIHEPIISEEQFYRVQEIFTRMGKNPNMNRGSASLLNNLVVCSKCGLGFVHRRKDTMSRGKKYHYRYYSCKTYKHTHELEKCGNKIWRADKLEELIISRVHNYSLASRNVDKEDELDSLNEKLKIEHAKKKRLFDLYVNGSYEVSELDSMMNDIDAQINYYESQIEANEELKKNKKIQENLANLASVDYDSLEFREKQLYLKSLINKIYIDGEQVIIEWL

SEQ ID NO: 2900 - protein, 485 aa, synthetic construct
MTKKVAIYTRVSTTNQAEEGFSIDEQIDRLTKYAAAMDWQVSDTYTDAGFSGAKLERPAMQRLINDIENKAFDTVLVYKLDRLSRSVRDTLYLVKEVFTKNKIDFISLNESIDTSSAMGSLFLTILSAINEFERENIKERMTMGKLGRAKSGKSMMWTKTAFGYHHNRKTGILEIVPLQATIVEQIFTDYLSGINLTKLRDKLNESGHIGKDIPWSYRTLRQTLDNPVYCGYIKFKDNLFEGMHKPIIPYETYLKVQKELEERQQQTYERNNNPRPFQAKYMLSGMARCGYCGAPLRIVLGHKRKDGSRTMKYHCANRYPRKTKGVTVYNDNKKCDSGTYDLSNLEDTVIDNLISFQENNDSLLKIINGNNQPILDTSSFKKQISQIDKKIQKNSDLYLNDFITMDELKDRTDSLLAERKLLKAKISENKFNDSTDVFELVKTQLGSIPINELSYDNKKKIVNNLVSKVDVTADNVDIIFKFQLA

SEQ ID NO: 2901 - protein, 485 aa, synthetic construct
MTKKVAIYTRVSTTNQAEEGFSIDEQIDRLTKYAEAMGWQVSDTYTDAGVSGAKLERPAMQRLINDIENKAFDTVLVYKLDRLSRSVRDTLYLVKDVFTKNKIDFISLGESIDTSSAMGSLFLTILSAINEFERENIKERMTMGKLGRAKSGKSMMWTKTAFGYHHNRKTGILEIVPLQAAIVEQIFTDYLSGISLTKLRDKLNESGHIGKDIPWSYRTLRQTLDNPVYCGYIKFKDSLFEGMHKPIIPYETYLKVQKELEERQQQTYERNNNPRPFQAKYMLSGVARCGYCGAPLRIVLGHKRKDGSRTMKYHCANRFPRKTKGVTVYNDNKKCDSGTYDLSNLENTVIDNLVGFQENNDSLLKIINGNNQPILDASSFKEQISQIDKKIQKNSDLHLNDFITMDELKDRTNSLQAEKKLLKAKISETKFNDSTDVFELVKTQLGSIPINELSYENKKKIVNNLVSKVDVTADNVDIIFKFQLA

SEQ ID NO: 2902 - protein, 469 aa, synthetic construct
MSYTTPVRAAVYLRISEDRSGEQLGVARQREDCLKLCGQRKWVPVEYLDNDVSASTGKRRPAYEQMLADITAGKIAAVVAWDLDRLHRRPIELEAFMSLADEKRLALATVAGDVDLATPQGRLVARLKGSVAAHETEHKKARQRRAARQKAERGYPNWSKAFGYLPGPNGPEPDPRTAPLVRQAYADILAGASLGDVCRQWNDAGAFTITGRPWTTTALSKFLRKPRNAGLRAYKGARYGPVDRDAIVGKAQWSPLVDEATFWAAQAVLDAPGRAPGRKSVRRHLLTGLAGCGKCGNHLAGSYSTDGRVVYVCKACHGVAILADNIEPILYHIVAERLAMPDAVGLLRREIHDAAEAETIRLELETLYGELDRLAVERAEGLLTARQVKISTDIVNAKITKLQARQLDQERLRVFDGIPLGTPRVAGMIAELSPDRFRAVLDVLAEVVVQPVGKGGRIFNPERVRVNWR

SEQ ID NO: 2903 - protein, 452 aa, synthetic construct
MKAAIYIRVSTREQVENYSIQAQTEKLTALCRSKDWDVYDIFIDGGYSGSNMNRPALNEMLSKLHEIDAVVVYRLDRLSRSQRDTITLIEEYFLKNNVEFVSLSETLDTSSPFGRAMIGILSVFAQLERETIRDRMVMGKIKRIEAGLPLTTAKGRTFGYDVIDTKLYINEEEAKQLQLIYDIFEEEQSITFLQKRLKKLGFKVHTYNRYNNWLTNDLYCGYVGYKDKVHVKGIHEPIISEEQFYRVQEIFARMGKNPNMNRDSASLLNNLVVCSKCGLGFVHRRKDAMSRDKKYHYRYYSCKTYKHIHELEKCGNKIWRADKLEELIINRVNNYSLAGRNVDKEDELDSLNEKLKIEHAKKKRLFDLYVNGNYEVSELDSMMNDIDAQINYYESQIEANEELKKDKKIQENLANLATVDFDSLEFREKQLYLKSLINKIYIDGEQVTIEWL

SEQ ID NO: 2904 - protein, 485 aa, synthetic construct
MTKKVAIYTRVSTTNQAEEGFSIDEQIDRLTKYAEAMGWQVSDTYTDAGCSGAKLERPAMQRLINDIENRAFDTVLVYKLDRLSRSVRDTLYLVKDVFTKNKIDFISLNESIDTSSAMGSLFLTILSAINEFERENIKERMTMGKLGRAKSGKSMMWTKTAFGYYHNRKTGILEIVPLQATIVEQIFTDYLSGISLTKLRDKLNESGHIGKDIPWSYRTLRQTLDNPVYCGYIKFKGSLFEGMHKPIIPYETYLRVQKELEERQQQTYERNNNPRPFQAKYMLSGMARCGYCGAPLKIVLGHKRKDGSRTMKYHCANRFPRKTRGVTVYNDNKKCDSGTYDLSNLENTVIDNLIGFQENNDSLLEIINGNNQPILDTSSLKKQISQIDKKIQKNSDLYLNDFITMDELKDRTGSLQAEKKLLKAKISENKFNDSTDVFELVKTQLGSIPINELSYDNKKKIVNNLVSKVDVTADNVDIIFKFQLA

SEQ ID NO: 2905 - protein, 485 aa, synthetic construct
MTKKVAIYTRVSTTNQAEEGFSIDEQIDRLTKYAEAMGWQVSDTYTDAGFSGAKLERPAMQRLINDIENKAFDTVLVYKLDRLSRSVRDTLYLVKDVFTKNKIDFISLSESIDTSSAMGSLFLTILSAINEFERENIKERMTMGKLGRAKSGKSMMWTKTAFGYYHNRKTGILEVVPLQATIVEQIFTDYLSGISLTKLRDKLNESGHIGKDIPWSYRTLRQTLDNPVYCGYIKFKDSLFEGMHKPIIPYETYLKVQKELEERQQQTYERNNNPRPFQAKYMLSGMARCGYCGAPLRIVLGHKRKDGSRTMKYHCANRFPRKTKGVTVYNDNKKCDSGTYDLSNLENTVIDNLIGFQENNDSLLKIINGNSQPSLDTSSFKEQISQIDKKIQKNSDLYLNDFITMDELKDRTDSLQAEKKLLKAKISENKFNDSTVVFELVKTQLGSIPINELSYDNKKKIVNSLVSKVDVTADNVDIIFKFQLT

SEQ ID NO: 2906 - protein, 452 aa, synthetic construct
MKAAIYIRVSTREQVENYSIQAQTEKLTALCRSKGWDVYDIFTDGGYSGSSMNRPALNEMLSKLHEIDAVVVYRLDRLSRSQRDTITLIEEYFLKNNVEFVSLSETLDTSSPFGRAMIGILSVFAQLERETIRDRMVMGKIKRVEAGLPLTTAKGRTFGYDVIDTKLYINEEEAKQLQLIYDIFEEVQSITSLQKRLKKLGFKVRTYNRYNSWLTNDLYCGYVSYKDKVHVKGVHEPIISEEQFYRVQEIFTRMGKNPNMNRDSASLLSNLVVCSKCGLGFVHRRKDTTSHGKKYHYRYYSCKTYKHIHELEKCGNKIWRADKLEELIIHRVNNYSFASRNVDEEDELDSLNEKLKIERAKKKRLFDLYINGSYEVSELDSMMNDIDAQINYYESQIEANEELRKNKKIQESLANLATVDYDSLEFREKQLYLKSLINKIYIDGEQVTIEWL

SEQ ID NO: 2907 - protein, 452 aa, synthetic construct
MKAAIYIRVSTREQVENYSIQAQTERLTALCRSKDWDVYDIFIDGGYSGSNMNRPALNEMLSKLHEIDAVVVYRLDRLSRSQRDTITLIEEYFLKNNVEFVSLSETLDTSSPFGRAMIGILSVFAQLERETIRDRMVMGKIKRIEAGLPLTTAKGRTFGYDVIDTKLYINEEEAKQLRLIYDIFEEEQSITSLQKRLKKLGFKVRTYNRYNNWLTNDLYCGYVSYKDKVHVKGIHEPIISEEQFYRVQEIFARMGKNPNMNRGSASLLNNLVVCSKCGLGFVHRRKDTMSRDKKYHYRYYSCKTYKHIHELEKCGNKIWRADKLEELIINRVNNYSLASRNVDKEDELDSLNEKLKIEHAKKKRLFDLYINGSYEVSELDSMMSDIDAQINYYESQIEASEELKKNKKIQENLADLATVDFDSLEFREKQLFLKSLINKIYIDGEQVTIEWL

SEQ ID NO: 2908 - protein, 485 aa, synthetic construct
MTKKVAIYTRVSTTNQAEEGFSIDEQTDRLTKYAEAMGWQVSDTYTDAGFSGAKLERPAMQRLINDIGNKAFDTVLVYKLDRLSRSVRDTLYLVKDVFTKNKIDFISLNESIDTSSAMGSLFLTILSAINEFERENIKERMTMGKLGRAKSGKSMMWTKTAFGYYHNRKTGILEIVPLQATIVEQIFTDYLSGISLTKLRDKLNESGHIGKDIPWSYRTLRQTLDNPVYCGYIKFKDSLFEGMHKPIIPYETYLKVQRELEERQQQTYERNNNPRPFQAKYMLSGMARCGYCGAPLRIVLGHKRKDGSRTMKYHCANRFPRKTKGVTVYNDNKKCDSGTYDLSDLENTVIDNLIGFQENSDSLLKIINGNNQPILDTSSFKKQISQIDKKIQKNSDLYLNDFITMDELKDRTDSLQAEKKLLKAKVSENKFNSSTDVFELVKTQLGSIPINELSYDNKKKIVNNLVSKVDVTADNVDIIFKFQLA

SEQ ID NO: 2909 - protein, 452 aa, synthetic construct
MKAAIYIRVSTQEQVGNYSIQAQTEKLTALCRSKDWDVYDIFIDGGYSGSNMNRPALNEMLSKLHEIDAVVVYRLDRLSRSQRDTTTLIEEYFLKNNVEFVSLSETLDTSSPFGRAMIGILSVFAQLERETIRDRMVMGKIKRIEAGLPLTTAKGRTFGYDVIDTKLYINEEEARQLQLIYDIFEEEQSITSLQKRLKKLGFKVRTYNRYNNWLTNDLYCGYVSYKDKVHVKGIHEPIISEEQFYRVQEIFTRMGKNPNMNRDSASLLSNLVVCSKCGLGFVHRSKDTMSRGKKYHYRYYSCKTYKHAHELEKCGNKTWRADKLEELIINRVNNYSFASRNADKEDELDSLNEKLKIEHARKKRLFDLYINGSYEVSELDSMMNDIDAQINYYESQIEANEELKRNKKIQENLADLATVDFDSLEFREKQLYLKSLINKIYIDGEQVTIEWL

SEQ ID NO: 2910 - protein, 452 aa, synthetic construct
MKAAIYIRVSTREQVENYSIQAQTEKLTALCRSKDWDVYDVFIDGGYSGSNMDRPALNEMLSKLHEIDAVVVYRLDRLSRSQRDTITLIEEYFLKNNVEFVSLSETLDTSSPFGRAMIGILSVFAQLERETIRDRMVMGKIKRIEAGLPLTTAKGRTFGYDVIDTKLYINEEEAKQLQLIYDIFEEEQSITFLQKRLKKLGFKVRTYNCYNNWLTNDLYCGYVSYKDKVHVKGIHEPIISEEQFYRVQEIFARMGKNPNMNRDSASLLNNLVVCSKCGLSFVHRRKDAMGRDKKYHYRYYSCKTYKHIHELEKCGNKIWRADELEELIINRVSNYSLASRNADKEDELDGLNEKLKIEHAKKKRLFDLYINGSYEVSELDSMMNDIDAQINFYESQIEASEGLKRNREVQENLADLATVDFDSLEFREKQLYLKSLINKIYIDGEQVTIEWL

SEQ ID NO: 2911 - protein, 452 aa, synthetic construct
MKAAIYIRVSTREQVENYSIQAQTEKLTALCRSKDWDVYDIFIDGGYSGSNMNRPALNEMLSKLHEIDAVVVYRLDRLSRSQRDTITLIEEYFLKNNVEFVSLSETLDTSSPFGRAMIGILSVFAQLERETIRDRMVMGKIKRIEAGLPLTTAKGRTFGYDVIDTKLYINEEEAKQLQLIYDIFEEERSITFLQKRLKKLGFKVRTYNCYNNWLTNDLYCGYVSYKDKVHVKGIHEPIISEEQFNRVQEIFTRMGKNPNMNRDSASLLNNLVVCSKCGLSFVHRRKDAMGRDKKYHYRYYSCKTYKHIHELEKCGNKIWRADKLEELIIDRVNNYSLAGHNVGKEDELDSLNERLRIEHAKKKRLFDLYINGSYDVSELDSMMNDIDAQINYYEGQIEANGELKKSKGIQESLANLATVDFDSLEFREKQLYLKSLINKIYIDGEQVTIEWL

SEQ ID NO: 2912 - protein, 452 aa, synthetic construct
MKAAIYIRVSTQEQVGNYSIQAQTEKLTALCRSKDWDVYDIFIDGGYSGSNMNRPALNEMLSKLHEIDAVVVYRLDRLSRSQRDTTTLIEEYFLKNNVEFVSLSETLDTSSPFGRAMIGILSVFAQLERETIRDRMVMGKIKRIEAGLPLTTAKGRTFGYDVIDTKLYINEEEAKHLQLIYDIFEEEQSITFLQKRLKKLGFKVRTYNRYNNWLTNDLYCGYVSYKDKVHVKGIHEPIISEEQFYRVQEIFASMGKNPNMNRDSASLLSNLVVCSKCGLGFVHRSKDTMSRGKKYHYRYYSCKTYKHTHELEKCGNKTWRADKLEELVINRVNNYSFASRNVDKEDELDSLNEKLKVEHAKRKRLFDLYINGSYEVSELDSMMNDIDAQINYYESQIEANEELKKNKKIQETLADLATVDFDSLEFREKQLYLKSLISKIYIDGEQVTIEWL

SEQ ID NO: 2913 - protein, 469 aa, synthetic construct
MCYTTPVRAAVYLRISEDRSGEQLGVARQREDCLKLCDQRKWVPVEYLDNDVSASTGKRRPAYEQMLADITAGEIAAVVAWDLDRLHRRPIELEAFMSLADEKRLALATVAGDVDLATPQGRLVARLKGSVAAHETEHKKARQRRAARQKAERGLPNWSKAFGYLPGPNGPEPDPRTAPLVKQAYADILAGASLGDVCRQWNAAGAFTITGRPWTTTTLSKFLRKPRNAGLRAYKGTRYGPVDRDAIVGKAQWSPLVDEATFWAAQAVLDAPGRAPGRKSVRRHLLTGLAGCGKCGNHLAGSYRTDGRVVYVCKACHGVAILADNIEPILYHIVAERLAMPDAVDLLRREIHDAAEAETIRLELETLYGELDRLAVERAEGLLTARQVKISTDIVNAKITKLRACQLDQERLRVFDGIPLGTPQVVGMIAELSPDRFRAVLDVLAEVVVQPVGKSGRIFNPERVQVNWR

SEQ ID NO: 2914 - protein, 485 aa, synthetic construct
MTKKVAIYIRVSTTNQAEEGFSIDEQIDRLTKYAEVMGWQVSGTYTDAGFSGAKLERPAMQRLINDIENKAFDTVLVYKLDRLSRSVRDTLYLVKDVFTKNKIDFISLNESIDTSSAMGSLFLTILSAINEFERENIKERMTMGKLGRAKSGKSMMWSKTAFGYYHNRRTGILEVVPLQATIVEQIFTDYLSGISLTKLRDKLNESGHIGKDIPWSYRTLRQTLDNPVYCGYIKFKDSLFEGMHKPIIPYETYLKVQKELEGRQQQTYERNNNPRPFQAKYMLSGMARCGYCGAPLRIVLGHKRKDGSRTMKYHCANRFPRKTKGVTVYNDNKKCDSGTYDLSSLENTVVDNLIGLQENNDRLLKIIDGNNQPILDTSSFKEQISQIDKKIQKNSDLYLNDFITMDELKDRTNSLQAEKKLLKAKISENKFNDSTDVFELVKTQLGSIPINELSYDDKKKIVNNLVSKVDVTADNVDIIFKFQLA

SEQ ID NO: 2915 - protein, 469 aa, synthetic construct
MCYTTPVRAAVYLRISEDRSGEQLGVARQREDCLELCGQRKWVPVEYLDNDVSASTGKRRPAYEQMLADITAGKIAAVVAWDLDRLHRRPIELEAFMSLADEKRLALATVAGDVDLATPQGRLVARLKGSVAAHETEHKKARQRRAARQKAERGHPNWSKAFGYLPGPNGPEPDPRTAPLVKQAYADILAGASLGDVCRQWNNAGAFTTTGRPWTTTTLSKFLRKPRNAGLRAYKGAPYGPVDRDAIVGKAQWSPLVDEATFWAAQAVLDAPGRAPGRKSVRRHLLTGLAGCGKCGNRLAGSYRTDGRVVYVCKACHGVAILADNIEPILYNIVAERLAMPDAVDLLRREIHDAAEAETIRLGLETLYGELDRLAVERAEGLLTARQVKISTDIVNAKITKLQARQLDQERLRVLDGIPLGTPQVAGMIAELSPDRFRAVLDVLAEVVVQPVGKSGRIFNPERVRVNWR

SEQ ID NO: 2916 - protein, 452 aa, synthetic construct
MKAAIYIRVSTREQVENYSIQAQTEKLTALCCSKDWDVYDIFIDGGYSGSNMNRPALNEMLSKLHEIDAVVVYRLDRLSRSQRDTITLIEEYFLKNNVEFVSLSETLDTSSPFGRAMIGILSVFAQLERETIRDRMVMGKIKRIEAGLPLTTAKGRTFGYDVIDTKLYINEEEAKQLQLIYDIFEEEQSITFLQKRMKKLGFRVRTYNCYNNWLTNDLYCGYVSYKDKVHVKGIHEPIISEEQFYRVQEIFTRMGKNPNMNRDSASLLNNLVVCSKCGLGFVHRRKDAMSRDKKYHYRYYSCKTYKHIHELEKCGNKIWRADKLEELIINRVNNYSLASRNVDKEDELDRLSEKLKIEHAKKKRLFDLYLNGSYEVSELDSMMNDIDAQISYYESQIEANEALIKNKKIQENLADLATVDFDSLEFREKQLYLKSLINKIYIDGEQVTIEWL

SEQ ID NO: 2917 - protein, 485 aa, synthetic construct
MTKKVAIYTRVSTTNQAEEGFSIDEQIDRLTKYAEAMGWQVSDTYTDAGFSGAKLERPAMQRLINDIENKAFDTVLVYKLDRLSRSVRDTLYLVKEVFTKNKIDFISLNESIDTSSAMGSLFLTILSAINEFERENIKERMTMGKLGRAKSGKSMMWTKTAFGYYHNRKTGILEIVPLQATIVEQIFTDYLSGISLTKLRDKLNESGHIGKDIPWSYRTLRQTLDNPVYCGYIKFKDSLFEGMHKPIIPYETYLKVQKELEVRQQQAYERNNNPRPFQAKYMLSGMARCGYCGAPLKIVLGRKRKDGSRTMKYHCANRFPRKTKGVTVYNDNKKCDSGTYDLSNLENTVIDNLIGFQEDNDSLLKIINGNNQPILDTSSFKKQISQIDKKIQKNSDLYLNDFITMDELKDRTDSLQAEKKLLKAKISENKCNDSTDVFELVKTQLGSIPINELSYDNKKKIVNNLVSKVDVTADNVDIIFKFQLA

SEQ ID NO: 2918 - protein, 452 aa, synthetic construct
MKAAIYIRVSTREQVENYSIRAQTEKLTALCRSKDWDVYDIFIDGGYSGSNMNRPALNEMLSKLHEIDAVVVYRLDRLSRSQRDTITLIEEYFLKNNVEFVSLSETLDTSSPFGRAMIGILSVFAQLERETIRDRMVMGKIKRIEAGLPLTTAKGRTFGYDVIDTKLYVNEEEAKQLQLIYDIFEEEQSITFLQRRLKRLGFKVRTYNRYHNWLTNDLYCGYVSYKDKVHVKGIHEPIISEEQFYRVQEIFTRMGKNPNMNRDSASLLNNLVVCSKCGLSFVHRRKDAKSRDKKYHYRYYSCKTYKHIHELEKCGNKIWRADKLEELIINRVNNYSLASRNVDKEDELDSLNEKLKTEHAKKKRLFDLYINGSYEVSELDSMMNDIDAQINYYESQIEANEELKKSKKIQENLADLATVDFDSLEFREKQLYLKSLINKIYIDGEQVTIEWL

SEQ ID NO: 2919 - protein, 452 aa, synthetic construct
MKAAIYIRVSTREQVENYSIQAQTEKLTALCRSKDWDVYDIFIDGGYSGSNMNRPALNEMLSKLHEIDAVVVYRLDRLSRSQRDTITLIEEYFLKNNVEFVSLSETLDTSSPFGRAMIGILSVFAQLERETIRDRMVMGKIKRVEAGLPLTTAKGRTFGYDVIDTKLYINEEEAKQLQLIYDIFEEEQSITFLQKRLKKLGFKVRTYSCYNSWLTNDLYCGYVSYKDKVHVKGIHEPIISEGQFYRVQEIFARMGKNPNMNRDSASLLNNLVVCSKCGLGFVHRRKDTMSRGKKYHYRYYSCKTYKHTHELEKCGNKIWRADKLEELVINRVSSYGFASRNVDKEDELDSLNEKLKVEHAKRKRLFDLYINGSYNVSELDSIMNDIDAQINYYESQIETNEELKKNKKIQENLADLVTVDFDSLEFREKQLYLKSLINKIYIDGERVTIEWL

SEQ ID NO: 2920 - protein, 452 aa, synthetic construct
MKAAIYIRVSTQEQVGNYSIQAQTEKLTALCRSKDWDVYDIFVDGGYSGSNMNRPALNEMLSKLHEIDAVVVYRLDRLSRSQRDTTTLIEEYFLKNNVEFVSLSETLDTSSPFGRAMIGILSVFAQLERETIRDRMVMGKIKRIEAGLPLTTAKGRTFGYDVIDTKLYINEEEAKQLQLIYDIFEEEQSITFLQKRLKKLGFKVRTYNRYNSWLTNDLYCGYVSYKDKVHVKGIHEPIISEEQFYRVQEIFTRMGKNPNMNRDSASLLSNLVVCSKCGLGFVHRSKDTMSRGKKYHYRYYSCKTYKHTHELEKCGNKTWRADKLEELIISRVNNYSFASRSVDKEDELDSLNEKLRMEHAKKKRLFDLYINGSCEASELDSMMNDIDAQINCYESQIEASEELKKNRKIQENLADLATVDFDSLEFREKRLYLKSLINKIYIDGEQVTIEWL

SEQ ID NO: 2921 - protein, 485 aa, synthetic construct
MTKKVAIYTRVSTTNQAEEGFSVDEQIDRLTKYAEAMGWQVSDTYTDAGFSGAKLERPAMQRLINDIENKAFDTVLVYKLDRLSRSVRDTLYLVKDVFTKNKIDFISLSESIDTSSAMGSLFLTILSAINEFERENIKERMTMGKLGRAKSGKSMMWTKTAFGYYHNRKTGILEIVPLQATIVEQIFTDYLSGISLTKLRDKLNESGHIGKDIPWSYRTLRQTLDNPVYCGYIKFKDSLFEGMHKPIIPYETYLKVQRELEERQQQTYERNNNPRPFQAKYMLSGMARCGYCGAPLRIVLGHKRKDGSRTMKYHCANRFPRKTKGVTVYNDNKKCDSGTYDLSNLENTVIDNLTGLQENNDSLLKIINGSNQPILDTSGLKKQISQIETKIQRNSDLYLNDFITMDELKVRTDSLQAEKKLLKAKISENKFSDSTDVFELVKTQLGSIPINELSYDNKKKIVNNLVSKVDVTADNVDIIFKFQLA

SEQ ID NO: 2922 - protein, 452 aa, synthetic construct
MKAAIYIRVSTREQVENYSIQAQTEKLTALCRSKDWDVYDIFIDGGYSGSNMNRPALNEMLSKLHEIDAVVVYRLDRLSRSQRDTITLIEEYFLKNNVEFVSLSETLDTSSPFGRAMIGILSVFAQLERETIRDRMVMGRIKRIEAGLPLTTAKGRTFGYDVIDTKLYINEEEAKQLQLIYDIFEEEQSITFLQKRLKKLGFKVRTYNRYNSWLTNDLYCGYVSYKDKVHVKGIHEPIISEEQFYRVQEIFTRMGKNPNMNRDSASLLNSLVVCSRCGLGFVHRRKDTMSRGKKYHYRYYSCKTYKHTHELEKCGNKIWRADKLEELIISRVNNYSFASRNVDKEGELDSLNEKLEIEHAKKKRLFDLYVNGSYEVSELDSMMNDIDAQINYYESQIEANEELRKNKKIQESLANLATVDYDSLEFREKQLYLKSLINKIYIDGEQVTIEWL

SEQ ID NO: 2923 - protein, 485 aa, synthetic construct
MTRKVAIYTRVSTTNQAEEGFSIDEQIDRLTKYAEAMGWQVSDTYTDAGFSGAKLERPAMQRLINDIENKAFDTVLVYKLDRLSRSVRDTLYLVKDVFTKNKIDFISLNESINTSSAMGSLFLTILSAINEFERENIKERMTMGKLGRAKSGKSMMWTKTAFGYHHNRETGILEIVPLQATIVEQIFTDYLSGISLTKLRDKLNESGHIGRDIPWSYRTLRQTLDNPVYCGYIKFKDSLFEGMHKPIIPYETYLRVQKELEERQQQTYERNNNPRPFQAKYMLSGMARCGYCGAPLRIVLGHKRKDGSRTMKYHCANRFPRKTKGVTVYNDSKKCDSGTYDLSNLENTVIGILIGFQENNDSLLKIINGNNQPILETSSFKKRISQIDKKIQKNSDLYLNDFITMDELKGRTDSLQAEKKLLKAKIGEDKFNDSTDVFELVKAQLGSIPINELSYDNKKKIVNNLVSKVDVTADNVDIIFKFQLA

SEQ ID NO: 2924 - protein, 469 aa, synthetic construct
MSYTTPVRAAVYLRISEDRSGEQLGVARQREDCLKLCGQRKWVPVEYLDNDVSASTGKRRPAYEQMLADITAGKIAAVVAWDLDRLHRRPIELEAFMSLADEKRLALATVAGDVDLATPQGRLVARLKGSVAAHETEHKKARQRRAARQKAERGLPNWSKAFGYLPGPNGPEPDPRTAPLVKQAYADILAGASLGDVCRQWNGAGAFTVTGRPWTTTALSKFLRKPRNAGLRAYKGARYGPVDRDAIVGKAQWSPLVDEATFWAAQAVLDAPGRAPGRKSVRRHLLTGLAGCGKCGNHLAGSYRTDGRVVYVCKACHGVAILADNIEPILYHIVAERLAMPDAVDLLHREIHDAAEAETIRLELETLHGELDRLAVERAEGLLTARQVKISTDVVNAKITKLQARQLDQERLRVFEGIPLGTPQVAGMIAELSPDRFRAVLDVLAEVVVQPVGKSGRIFNPERVQVNWR

SEQ ID NO: 2925 - protein, 452 aa, synthetic construct
MKAAIYIRVSTQEQVGNYSIQAQTEKLTALCRSKGWDVYDIFIDGGYSGSNMNRPALNEMLSKLHEIDAVVVYRLDRLSRSQRDTTTLIEEYFLKNNVEFVSLSETLDTSSPFGRAMIGILSVFAQLERETIRDRMVMGKIKRIEAGLPLTTAKGRTFGYDVIDTKLYINEEEAKQLRLIYDIFEEEQSITFLQKRLKKLGFKVRTYNRYNNWLTNDLYCGYVSYKDKVHVKGIHEPIISEEQFYRVQEIFTRMGKNPSMNRDSASLLSSLVVCSKCGLGFVHRSKDTMSRGKKYHYRYYSCKTYKHTHELEKCGNKTWRADKLEELIINRVNNYSFASRNVGKEDELDYLNEKLKIEHAKKKRLFDLYINGSYEVSELDSMMSDIDAQINYYESQIEANEELKENKKIQENLADLATVDFDSLEFREKQLYLKSLINKIYIDGEQVTIEWL

SEQ ID NO: 2926 - protein, 452 aa, synthetic construct
MKAAIYIRVSTREQVENFSIQAQTEKLTALCRSKGWDVYDIFIDGGYGGSNMNRPALNEMLSRLHEIDAVVVYRLDRLSRSQRDTITLIEEYFLKNNVEFVSLSETLDTSSPFGRAMIGILSVFAQLERETIRDRMVMGKIKRIESGLPLTTAKGRTFGYDVIDTKLYINEEEARQLQLIYDIFEEEQSITFLQKRLKKLGLKVRSYSRYNNWLTNDLYCGYVSYKDKVHVKGIHEPIISEEQFYRVQEIFTRMGKNPNMNRDSASLLSGLVVCSKCGLGFVHRRKDTTSRGKKYHYRYYSCKTYKHTHELERCGNKIWRADELEELIINRVNNYSFASRNADKEDELDGLNEKLKIEHAKKKRLFDLYINGSYEVCELDSMMNDIDAQINYYENQIVANEELKKNKKIQENLADLATVDFDSLEFRERQRYLKSLINKIYIDGEQVTIEWL

SEQ ID NO: 2927 - protein, 469 aa, synthetic construct
MSYTTPVRAAVYLRISEDRSGEQLGVARQREDCLKLCGQRKWVPVEYLDNDVSASTGKRRPAYEQMLADITAGKIAAVVAWDLDRLHRRPVELEAFMSLADEKRLALATVAGDVDLATPQGRLVARLKGCVAAHETEHKRARQRRAARQKAERGHPNWSKAFGYLPGLNGPEPDPRTAPLVKQAYADILAGASLGDVCRQWNDAGAFTITGRPWTSTTLSKFLRKPRNAGLRAYKGARYGPVDRSAIVGKAQWSPLVDEATFWAAQAVLDAPGRAPGRKSVRRHLLTGLAGCGKCGNHLAGSCRTDGRVVYVCKACHGVAILADNIEPILYHIVAERLAMPDAVNLLRREIYDATEAETIRQELETLYGELDRLAVERAEGLLTGRQVKISTDIVNAKITRLQARQLDQERLRVFDGIPLGTPQVAGMIAELSPDRFRAVLDVLAEVVVQPVGKSGRISNPERVQVNWR

SEQ ID NO: 2928 - protein, 452 aa, synthetic construct
MKAAIYIRVSTREQVENYSIQAQTEKLTALCRSKDWDVYDIFIDGGYSGSNMNRPALNEMLSKLHEIDAVVVYRLDRLSRSQRDTITLIEEYFLKNNVEFVSLSETLDTSSPFGRAMIGILSVFAQLERETIRDRMVMGKIKRIEAGLPLTTAKGRTFGYDVIGTKLYINEEEAKQLQLIYDIFEEEQSITFLQKRLKKLGFKVRTYNRYNNWLTNDLYCGYVSYKDKVHVKGIHEPIISEEQFYRVQEIFTRMDKNPNMNRDSASLLNSLVVCSKCGLGFVHRRKDTTSRGKKYHYRYYSCKTYKHTHELEKCGNKIWRADTLEELIINRVNNYSFASRSVDKEDELDSLNEKLKIEHAKKKRLFDLYINGSYEVSELGSMMSDIDAQINYYESQIEANEELKKDKKIQEGLANLATVDYDSLEFREKQLYLKSLINKIYIDGEQVTIEWL

SEQ ID NO: 2929 - protein, 469 aa, synthetic construct
MSYTTPVRAAVYLRISEDRSGEQLGVARQREDCLKLCGHRKWVPVEYLDNDVSASTGKRRPAYEQMLADIAAGKIAAVVAWDLDRLHRRPIELEAFMSLADEKRLALATVAGDVDLATPQGRLVARLKASVAAHETEHKKARQRRAARQKAERGLPNWSKAFGYLPGPNGPEPDPRTAPLVRQAYADILAGASLGDVCRQWNDAGAFTITGRPWTTTTLSKFLRKPRNAGLRAYKGARYGPVDRDAIVGKAQWSPLVDEATFWAAQAVLDAPGRAPGRKSVRRHLLTGLAGCGKCGNHLAGSYRTDGQVVYVCKACHGVSILAVNIEPILYHIVAERLAVPDAVDLLRREIHDAAEAETIRLELETLYGELDRLAVERAEGLLTARQVRISTDIVNAKITKLQARQLDHERLRVFDGIPLGTPQVAGMIAVLSPDRFRAVLDVLAEVVVQPVGKSGRISNPERVQVNWR

SEQ ID NO: 2930 - protein, 452 aa, synthetic construct
MKAAIYIRVSTREQVENYSIQAQTEKLTALCRSKDWDVYDIFIDGGYSGSNMNRPALNEMLSKLREIDAVVVYRLDRLSRSQRDTITLIEGYFLRNNVEFVSLSETLDTSSPFGRAMIGILSVFAQLERETIRDRMVMGKIKRVEAGLPLTTAKGRTFGYDVVDTKLYVNEEEAKQLQLIYDIFEEEQSITFLQKRLKKLGFKVRTYNCYNNWLTNDLYCGYVSYKDKVHVKGIHEPIISEEQFYRVQEVFTRMGKNPNMNRGSASLLNNLVVCSKCGLGFVHRRKDIVSRGKKYHYRYYSCKTYKHIHELEKCGNKIWRADKLEELIINRVNNYSLASRNVDKEDELGSLNEKLKIEHAKKRRLFDLYINGRYEVSELDSMMNDIDAQINYYESQIEANEELRKNKKIRENLAELATVDFDSLEFREKQLYLKSLINKIYIDGEQVTIEWL

SEQ ID NO: 2931 - protein, 452 aa, synthetic construct
MKAAIYIRVSTQEQVENYSIQAQTEKLTALCRSKDWDVYDIFIDGGYSGSNMNRPALNEMLGKLHEIDAVVVYRLDRLSRSQRDTITLIEEYFLKNNVEFVSLSETLDTSSPFGRAMIGILSVFAQLERETIRDRMVMGKIKRIEAGLPLTTAKGRTFGYDVIDTKLYINEEEAKQLRLIYDIFEEEQSITFLQKRLKKLGFKVRTYNCYNNWLTNDLYCGYVSYKDKVHVKGIHEPIISEEQFHRVQEIFTRMGKNPNMNRDSASLLNNLVVCSKCGLGFVHRRKDTMSRGKKYHYRYYSCKTYKHIHELEKCGNKIWRADKLEELIINRVNNYSIASRNVDKEDELDSLNEKLKIEHAKKKRLFDLYINGGYEVSELDSMMNDIDAQINYYESQIEANEELKKNKKIQEGLANLATVDYDSLEFREKQLYLKSLINKIYIDGEQVTIEWL

SEQ ID NO: 2932 - protein, 452 aa, synthetic construct
MKAAIYIRVSTQEQVGNYSIQAQTEKLTALCRSKDWDVYDIFIDGGYSGSNMNRPALNEMLSKLHEIDAVVVYRLDRLSRSQRDTTTLIEEYFLKNNVEFVSLSETLDTSSPFGRAMIGILSVFAQLERETIRDRMVMGKIKRIEAGLPLTTAKGRTFGYDVVDTRLYINEEEAKQLRLIYDIFEEEQSITFLQKRLKKLGFKVRTYNRYNNWLTNDLYCGYVSYKDKVHVKGIHEPIISEEQFYRVQEIFTRMGKNPNMNRDSASLLNNLVVCSKCGLSFVHRSKDTMSRGKKYHYRYYSCKTYKHTHELEKCGNKTWRADKLEELIINRVNNYSFVSRNVDREDELDSLNEKLKIEHAKKKRLFDLYISGSYEASELDGMMNDIDAQINYYESQIEANEELKKNKKIQENLADLATVDFDSLEFREKQLYLKSLINKIYIDDEQVTIEWL

SEQ ID NO: 2933 - protein, 452 aa, synthetic construct
MKAAIYIRVSTREQVENYSIQAQTEKLTALCRSKDWDVYDIFIDGGYSGSNMNRPALNEMLNKLHEIDAVVVYRLDRLSRSQRDTITLIEEYFLKNNVEFVSLSETLDTSSPFGRAMIGILSVFAQLERETIRDRMVMGKIKRIEAGLPLTTAKGRTFGYDVIDTKLYINEEEAKQLQLIYDIFEEEQSITFLQKRLKKLGFKVRTYSCYNNWLTNDLYCGYVSYKDKVHVKGIHEPIISEEQFYRVQEIFTRMGKNPNMNRDSASLLSNMVVCSKCGLGFVHRRKDTMSRGKKYHYRYYSCKTYKHTHELEKCGNKIWRADKLEELIINRVNNYSFASRNVDKEDELDSLNEKLKIEHAKRKRLFDLYINGSYEVSELDSLMNDIDAQINYYESQIEANEELKRNKKIQENLADLATVDYDSLEFREKQRYLKSLINKIYIDGEQVTIEWL

SEQ ID NO: 2934 - protein, 452 aa, synthetic construct
MKAAIYIRVSTREQVENYSIQAQTEKLTALCRSKDWDVYDVFIDGGYSGSNMNRPALNEMLSKLHEIDAVVVYRLDRLSRSQRDTITLIEEYFLKNNVEFVSLSETLDTSSPFGRAMIGILSVFAQLERETIRDRMVMGKIKRIEAGLPLTTAKGRTFGYDVIDTKLYINEEEAKQLQLIYDIFEEEQSITFLQKRLKKLGFKVHTYNRYNNWLTNDLYCGYVSYKDKVHVKGIHEPIISEEQFYRVQEIFTRMGKNPNMNRGSASLLNNLVVCGKCGLGFVHRRKDAMSRDKKYHYRYYSCKTYKHIHELEKCGNKIWRADKLEELIIGRVNSYSLASRNVDKEDELDSLNEKLKIEHAKKKRLFDLYINGSYEVSELDSMMSDVDAQINYYESQIKANEELKKNKKIQENLAYLATVDFDSLEFREKQLYLKSLIDKIYIDGEQVTIEWL

SEQ ID NO: 2935 - protein, 469 aa, synthetic construct
MSYTTPVRAAVYLRISEDRSGEQLGVARQREDCLKLCDQRKWVPVEYLDNDVSASTGKRRPAYEQMLADITTGKIAAVVAWDLDRLHRRPIELEAFMCLADEKRLALATVAGDVDLATPQGRLVARLKGSVAAHETEHKKARQRRAARQKAERGHPNWSKAFGYLPGPDGPEPDPRTAPLVKQAYVDILAGASLGDVCRQWNAVGALTITGRPWTTTTLSKFLRKPRNAGLRAYKGARHGPVDRDAIVGKAQWGPLVDEATFWAAQAVLDAPGRAPGRKSVRRHLLTGLAGCGKCGYHLAGSYRTDGRVVYVCKACHGVAILADNIEPILYHIVAERLAMPDAVDLLRREIRDAAEAETIRLGLETLYGELDRLAVERAEGLLTARQVKISTDIVNAKITKLQTRQLDQERLRVFDGIPLGTPQVAGMIAELSPDRFRAVLDVLAEVVVQPVGKGGRIFNPERVQVNWR

SEQ ID NO: 2936 - protein, 469 aa, synthetic construct
MSYTTPVRAAVYLRISEDRSGEQLGVARQREDCLKLCDQRKWVPVEYLDNDVSASTGKRRPAYEQMLADITAGEIAAVVAWDLDRLHRRPTELEAFMSLADEKRLALATVAGDVDLATPQGRLVARLKGSVAAHETEHKKARQRRAARQKAERGYPNWSKAFGYLPGPNGPEPDPRTAPLVRQAYADILAGASLGDVCRQWNDAGAFTIAGRPWTTTTLSKFLRKPRNAGLRAYKGARYGPVDRDAIVGKAQWSPLVDEATFWAAQAVLDAPGRAPGRKSVRRHLLTGLAGCGKCGNHLAGSHRADGKVVYVCKACHGVAILADNIVPILYHIVAERLAMPDAVDLLRREIHDVAEAETVRLELETLYGELDRLAVERAEGLLTARQVKISTDIVNAKITKLQTRQLDQERLRVLDGIPLGTPQVAGMIAELSPDRFRAVLDVLAEVVVQPVGKSGRIFNPERVQVNWR

SEQ ID NO: 2937 - protein, 485 aa, synthetic construct
MTKKVAIYTRVSTTNQAEEGFSIDEQIDRLTKYAEAMGWQVSDTYTDAGISGAKLERPAMQRLINDIENKAFDTVLVYKLDRLSRSVRDTLYLVKDVFTKNKIDFISLNESIDTSSAMGSLFLTILSAINEFERENIKERMTMGKLGRAKSGKSMMWTKTAFGYYHNRKTGILEIVPLQATIVEQIFADYLSGISLTKLRDKLNESGHIGKDIPWSYRTLRQTLDNPVYCGYIKFKDSLFEGMHKPIIPYETYLKVQKELEKRQQQTYERNNNPRPFQAKYMLSGMARCGYCGAPLRIVLGHRRKDGSRTMKYHCANRFPRKTKGVTVYNDNKKCDSGTYDLSNLENAVIDKLIGFQENNDSLLKIINDNNQPILDTSSFKKQISQIDKKIQKNSDLYLNDFITMDELKDRTDSLQAEKKLLKAKISENKFNDSTDVFELVKTQLGSIPINELSYDNKKKIVNNLVSKVDVTADSVDIIFKFQLA

SEQ ID NO: 2938 - protein, 452 aa, synthetic construct
MKAAIYIRVSTREQVENYSIQAQTEKLTALCRSKDWDVYDVFIDGGYSGSNMNRPALNEMLSKLREIDAVVVYRLDRLSRSQRDTITLIEEYFLKNNVEFVSLSETLDTSSPFGRAMIGILSVFAQLERETIRDRMVMGKIKRIEAGLPLTTAKGRTFGYDVIDTKLYINEEEAKQLQLIYDIFEEEQSITFLQKRLKKLGFKVRTYNRYNSWLTNDLYCGYVSYKDKVHVKGIHEPIISEEQFYRVQEIFTRMGKNPNMNRDSASLLNNLVVCSKCGLGFVHRRKDAMSRDKKYHYRYYSCKTYKHIHELEKCGNKIWRADKLEELIINRVNNYSFASRNKEKEDELGSLNEKLKVEHAKKKRLFDLYINGNYEVSELDSMMNDIDAQINYYESQIETIKELKKNRKIQENLAHLATVDFDSLEFREKQLYLKSLINKIYIDGEQVTIEWL

SEQ ID NO: 2939 - protein, 485 aa, synthetic construct
MTKKVAIYTRVSTTNQAEEGFSIDEQTDRLTKYAEAMGWQVCDTYTDAGFSGAKLERPAMQRLINDIENKAFDTVLVYKLDRLSRSVRDTLYLVKDVFTKNKIDFISLNESINTSSAMGSLFLTILSAINEFERENIKERMTMGKLGRAKSGKSMMWAKTAFGYYHNRKTGILEIAPLQATIVEQIFTDYLSGISLTKLRDKLNESGHIGKDIPWSYRTLRQTLDNPVYCGYIKFKDSLFEGLHEPIIPYETYLKVQKELEERQQQTYGRNNNPRPFQAKYMLSGMARCGYCGAPLKIVLGHKRKDGSRTMKYHCANRSPRKTKGVTVYNDNKRCDSGAYDLSNLENAVIDNLIGFQENNDSLLKIINGNNQPILDTSSFKEQISQIDKKIQKNSDLYLNDFITMDELRDRTDSLQAEKKLLIAKISENKLNDSTDVFELVKTQLGSIPISELSYDNKKKIVNNLVSKVDVTADNVDIIFKFQLA

SEQ ID NO: 2940 - protein, 452 aa, synthetic construct
MKAAIYIRVSTQEQVGNYSIQAQTEKLTALCRSKGWDVYDIFIDGGYSGSNMNRPALNEMLSKLHEIDAVVVYRLDRLSRSQRDTTTLIEEYFLKNNVEFVSLSETLDTSSPFGRAMIGILSVFAQLERETIRDRMVMGKIKRIEAGLPLTTAKGRTFGYDVIDTKLYINEEEAKQLQLIYDIFEEEQSITSLQKRLKKLGLKVRTYNRYNNWLTNDLYCGYVSYKDKVHVKGIHEPIISEEQFYRVQEIFTRMGKNPNMNRDSASLLNNLVVCGKCGLSFVHRSKDTMSRGKKYHYRYYSCKTYKHTHELEKCGNKTWRADKLEELIINRVNNNSFASRNVDQEDELDSLNEKLKIEHARKKRLFDLYINGSYEVSELDSMMNDIDAQINYYESQIEANEGPKKDKKIQENLAGLATVDIDSLEFREKQLYLKSLINKIYIDGEQVTIEWL

SEQ ID NO: 2941 - protein, 469 aa, synthetic construct
MSYTTPVRAAVYLRISEDRSGEQLGVARQREDCLKLCDQRKWEPVEYLDNDVSASTGKRRPAYEQMLADITAGKIAAVVAWDLDRLHRRPIELEAFMSLADEKRLALATVAGDVDLATPQGRLVARLKGSVAAHETEHKRARQRRAARQKAERGHPNWSKAFGYLPGPNGPEPDPRTAPLVKQAYADILAGASLGDVCRQWNDAGAFTITGRPWTTTTLSKFLRKPRNAGLRAYKGARYGPVDRDAIVGKAQWSPLVDEATFWAAQAVLDAPGRAPGRRSVRRHLLTGLAGCGKCGNYLAGGHRTDGRVVYVCKACHGVAILADSIEPILYHIVAERLAMPDAVDLLRREIHDTAEAETIRLELETLYGELDRLAVERAEGLLTARQVKISTDIVNAKITKLQARQLDQERLRVFDGIPLGTPQVAGMIAELSPDRFRAVLDVLAEVVVRPVGKSGRIFNPERVQVNWR

SEQ ID NO: 2942 - protein, 452 aa, synthetic construct
MKAAIYIRVSTREQVENYSIQAQTEKLTALCRSKDWDVYDIFIDGGYSGSNMNRPALNEMLSKLHEIDAVVVYRLDRLSRSQRDTITLIEEYFLKNNVEFVSLGETLDTSSPFGRAMIGILSVFAQLERETIRDRMVMGKIKRIEAGLPLTTAKGRTFGYDVIDTKLYINEEEARQLRLIYDIFEEEQSITFLQKRLKKLGFKVRTYSRYNSWLTNDLYCGYVSYKDKVHVKGIHEPIISEEQFYRVQEIFARMGKNPNMNRDSASLLNSLVVCSKCGLGFVHRRKDTVSRGKKYRYRYYSCKTYKHTHELEKCGNKIWRADKLEELVINRVSNYSFASRNVDKEDELDSLNEKLKIEHARKKRLFDLYINGSYEVSELDSMMNDIDAQISYYESQIEANEELKKNKKIQENLAGLATVDFDSLEFREKQLYLKSLINKIYIDGEQVTIEWL

SEQ ID NO: 2943 - protein, 469 aa, synthetic construct
MSYTTPVRAAVYLRISEDRSGEQLGVARQREDCLKLCGQRKWVPVEYLDNDVSASTGKRRPAYERMLADITAGKIAAVVAWDLDRLHRRPIELEAFMSLADEKRLALATVAGDVDLATPQGRLVARLKGSVAAHETEHKKARQRRAARQKAERGHPNWSKAFGYLPGPNGPEPDPRTAPLVKQAYADILAGASLGDVCRQWNGAGAFTITGRPWATTTLSKFLRKPRNAGLRAYKGARYGPVDRDAIVGKAQWSPLVDEATFWAAQAVLDAPGRAPGRKSVRRHLLTGLAGCGKCGNHLAGSYRTDGRVVYVCKACHGVAILADNIEPILYHIVAERLAMPDAADLLRREIHDAAEAETIRLELETLYGELDRLAVERAEGLLTARQVKISTDIVNAKITKLQARQLDQERLRVLDGIPLGTPQVAGMIAELSPDRFRAVLDVLAEVVVQPVGKSGRIFNPERVQVNWR

SEQ ID NO: 2944 - protein, 469 aa, synthetic construct
MSYTTPVRAAVYLRISEDRSGEQLGVARQREDCLKLCGQRKWVPVEYLDNDVSASTGKRRPAYEQMLADITAGKIAAVVAWDLDRLHRRPIELEAFMSLADEKRLALATVAGDVDLATPQGRLVARLKGSVAAHETEHKKARQRRAARQKAERGYPNWSKAFGYRQGPNGPEPDPRTAPLVKQAYADILAGASLGDVCRRWNDAGAFTITGRPWTTTTLSKFLRKPRNAGLRAYKGARYGPVDRDAIVGKAQWSPLVDEATFWAAQAVLDAPGRAPGRKSVRRHLLTGLAGCGKCGNHLAGSYRTDGKVVYVCKACHGVAILADNIEPVLHHIVAERLAMPDAVDLLRREIHDAAEAETIRLELETLYGELDRLAVERAEGLLTARQVKISTDIVNAKVIKLQARQLDQERLRVFGGIPLGTPQVAGMIAELSPDRFRAVLDVLAEVVVQPAGKSGRIFNPKRVQVNWR

SEQ ID NO: 2945 - protein, 469 aa, synthetic construct
MSYTTPVRAAVYLRISEDRSGEQLGVARQREDCLKLCDQRKWVPVEYLDNDVSASTGKRRPAYEQMLADITAGKIAAVVAWDLDRLHRRPIELEAFMSLADEKRLALATVAGDVDLATPQGRLVARLKGSVAAHETEHKKARQRRAARQKAERGHPNWSKAFGYLPGPNGPEPDPRTAPLVKQAYADILAGASLGDVCRRWNDAGAFTITGRPWTTTTLSKFLRKPRNAGLRAYKGARYGPVDRDAIVGKAQWSPLVDEATFWAAQAVLDAPGRAPGRKSVRRHLLTGLAGCGKCGNHLAGSYRTDGRVVYVCKACHGVAILADNIEPILHHIVAERLAMPDAVGLLRREVHDAAEAETIRLELETLYDELDHLAVERAEGLLTARQVKISTDIVNAKITKLQACQLDQERLRLLDGIPLGTPQVAGVIAELSPDRFRAVLDVLAEVVVQPVGKSGRIFNPERVQVNWR

SEQ ID NO: 2946 - protein, 469 aa, synthetic construct
MSYTTPVRAAVYLRISEDRSGEQLGVARQREDCLKLCDQHKWVPVEYLDNDVSASTGKRRPAYEQMLADITAGKIAAVVAWDLDRLHRRPIELETFMCLADEKRLALATVAGDVDLATPQGRLVARLKGSVAAHETEHKKARQRRAAKQKAERGYPNWSRAFGYLPGPNGPEPDPRTAPLVKQAYADILAGASLGDVCRQWNGAGAFTITGRPWTTTTLSKFLRKPRNAGLRAYKGARYGPVDRDAIVGKAQWSPLVDEATFWAAQAVLDAPGRAPGRKSVRRHLLTGLAGCGKCGNHLAGSYRTDGRVVYVCKACHGIAILAENIEPILYHIVAERLAMPGAADLLRREVHDAAEAETIRLELESLYGELDRLAVERAEGLLTARQVKISTDIVNAKITKLQAHQLDQERLRVFDGIPLGTSQVAGMIAELSPDRFRAVLDVLAEVVVRPVGKSGRSFNPERVQVNWR

SEQ ID NO: 2947 - protein, 452 aa, synthetic construct
MKAAIYIRVSTREQVENYSIQAQTEKLTALCRSKDWDVYDIFIDGGYSGSNMNRPALNEMLSKLHEIDAVVVYRLDRLSRSQRDTITLIEEYFLKNNVEFVSLSETLDTSSPFGRAMIGILSVFAQLERETIRDRMVMGKIKRIEAGLPLTTAKGRTFGYDVIDTKLYINEEEAKQLQLIYDIFEEEQSITFLQKRLKKLGFKVRTYNRYNNWLTNDLYCGYVSYKDKVRVKGIHEPIISEEQFYRVQEIFTRMGKNPNMNRDSASLLNSLVVCSRCGLGFVHRRKDIMSHGKKYHYRYYSCKTYKHIHELEKCGNKIWRADKLEELIINRVNNYSLASRNVDKEGELDSLNEKLKIEHAKKKRLFELYINGSYEVSELDSMMSDIDAQISYYESQIEANEELKKNKKIQEDLAHLATVDFDSLEFREKQLYLKSLINKIYIDGEQVTIEWL

SEQ ID NO: 2948 - protein, 452 aa, synthetic construct
MKAAIYIRVSTREQVENYSIQAQTEKLTALCRSKDWDVYDIFIDGGYSGSNMNRPALNEMLSKLHEIDAVVVYRLDRLSRSQRDTITLIEEYFLKNNVEFVSLSETLDTSSPFGRAMIGILSVFAQLERETIRDRMVMGKIKRIEAGLPLTTAKGRTFGYDVIDTKLYINEEEAKQLQLIYDIFEEEQSIALLQRRLKELGFKVRTYNRYNNWLTNDLYCGYVSYKDKVHVKGIHEPIISEEQFYRVQEIFTRMGKNPNMNRDSASLLNNLVVCSKCGLGFVHRRKDTVSRGKKYHYRYYSCKTYKHIHELEKCGNKIWRADKLEELIINRVNDYSFASRDVDKGDELDSLNGKLKIEHAKKKRLFDLYINGSYEVSELDSMMNDIDAQINYYESQIEANEELKKNKKIQENLADLTTVDFDSLEFREKQLYLKSLINKIYIDGEQVTIEWL

SEQ ID NO: 2949 - protein, 452 aa, synthetic construct
MKAAIYIRVSTREQVENYSIQAQTEKLTALCRSKDWDVYDIFIDGGYSGSNMNRPALNEMLSKLHEIDAVVVYRLDRLSRSQRDTITLIEEYFLKNNVEFVSLSETLDTSSPFGRAMIGILSVFAQLERETIRDRMAMGKIKRIEAGLPLTTAKGRTFGYDVIDTKLYINEEEAKQLRLIYDIFEEERSITLLQKRLKRLGFKVHTYNRYNSWLTNDLYCGYVSYKDKVHVKGIHEPIISEEQFYRVQEIFTRVSKNPNMNRGSASLLNNLVVCSKCGLSFVHRRKDTMSRGKKYHYRYYSCKTYKHTHELEKCGNKIWRADKLEELIIDRVNNYSLASRNVDKEDELDSLNEKLKIEHAKKRRLFDLYINGSYEVSELDSMMNDIDAQINYYERQIGANEELKKNKKIQENLADLATVDFDSLEFRDKQLYLKGLINKIYIDGEQVTIEWL

SEQ ID NO: 2950 - protein, 452 aa, synthetic construct
MKAAIYIRVSTQEQVGNYSIQAQTEKLTALCRSKDWDVYDIFVDGGYSGSNMNRPALNEMLSKLHEIDAVVVYRLDRLSRSQRDTTTLIEEYFLKNNVEFVSLSETLDTSSPFGRAMIGILSVFAQLERETIRDRMVMGKIKRIEAGLPLTTAKGRTFGYDVIDTKLYINEEEAKQLRLIYDIFEEEQSITSLQKRLKKLGFKVRTYNRYNSWLTNDLYCGYVSYKDKVHVKGIHEPIISEEQFYRVQEIFTRMGKNPNMNRGSASLLNNLVVCSKCGLGFVHRSKDTMSRGKKYHYRYYSCKTYKHTHELEKCGNKTWRADKLEELIINRVNNYSFAGRNADKEDELDSLNEKLKIEHAKKKRLFDLYINGSYEVSELDSMMNDIDAQINYYGSQIEANEELKKNKKIQENLADLATVDFDSLEFREKRLYLKSLINKIYIDGEQVTIEWL

SEQ ID NO: 2951 - protein, 452 aa, synthetic construct
MKAAIYIRVSTQEQVENYSIQAQTEKLTALCRSKDWDVYDIFIDGGYSGSNMNRPALNEMLSKLHEIDAVVVYRLDRLSRSQRDTTTLIEEYFLKNNVEFVSLSETLDTSSPFGRAMIGILSVFAQLERETIRDRMVMGKIKRIEAGLPLTTAKGRTFGYDVIDTKLYINEEEAKQLQLIYDIFEEEQSITFLQKRLKKLGFKVHTYNRYNNWLTNDLYCGYVSYKDKVHVKGIHEPIISEEQFYRVQEIFTRMGKNPNMNRDSASLLSNLVVCSKCGLGFVHRSKDTMSRGKKYHYRYYSCKTYKHTHELEKCGNKTWRADKLEELVINRVNNYSFASRNVDKEDELDSLNEKLRIEHAKKKRLFDLYINGSYEVSRLDSMMSDIDAQINHYESQIEADEKLKKNKKIQENLADLATMDFDSLEFREKQLYLKSLINKIYIDGEQVTIEWL

SEQ ID NO: 2952 - protein, 485 aa, synthetic construct
MTKKVAIYTRVSTTNQAEEGFSIDEQIDRLTKYAEAMGWQVSDTYTDAGFSGAKLERPAMQRLINDIENKAFDTVLVYKLDRLSRSVRDTLHLVKDVFTKNKIDFISLSESIDTGSAMGSLFLTILSAINEFERENIKERMTMGKLGRAKSGKSMMWAKTAFGYYHNRKTGILEIVPLQATIVEQIFTDYLSGISLTKLRDKLNESGHIGKDIPWSYRTLRQTLDNPVYCGYIKFKGSLFEGMHKPIIPYETYLKVQKELEERQQQTYERNNNPRPFQAKYMLSGMARCGYCGAPLRIVLGHKRKDGSRTMKYHCANRFPRKTKGVTVYNDNKKCDSGAYDLSNLENTVIDNLIGLQENNDSLLKIINGNNQPILDTSSFKKQISQIDKKIQKNSDLYLNDFITMDELKDRTDSLQAEKKLLKAKISENKFNDSTDVFELVKTQLGSIPINELSYDNKKKIVNNLVSKVDVTADNVDIIFKFQLA

SEQ ID NO: 2953 - protein, 485 aa, synthetic construct
MTKKVAIYTRVSTTNQAEEGFSIDEQIDRLTKYAEAMGWQVSDTYTDAGSSGAKLERPAMQRLINDIENKAFDTVLVYKLDRLSRSVRDTLYLVKDVFTKNKIDFISLNESIDTSSAMGSLFLTVLSAINEFERENIKERMTMGKLGRAKSGKSMMWTKPAFGYYHNRKTGILEIVPLQATIVEQIFTDYLSGISLTKLRDKLNESGHIGKDIPWSYRTLRQTLDNPVYCGYIKFKDSLFEGMHEPIIPYETYLKVQKELEERQQQTYERNNNPRPFQAKYMLSGMARCGYCGAPLRIVLGHKRKDGSRTKKYHCANRFPRKTKGVTVYNDNKRCDSGTYDLSNLENTVIDYLIGFQENNDSLLKIINGNNQPILDTSSFKKQISQIDKKIQKNSDLYLNDFITMDELKDRTDSLQAEKKLLIAKISETKFNDSTDVFELVKTQLGSIPINELSYDNKKKIVNNLVSKVDVTADSVDIIFKFQLA

SEQ ID NO: 2954 - protein, 452 aa, synthetic construct
MKAAIYIRVSTREQVENYSIQAQTEKLTALCRSKDWDVYDIFIDGGYSGSNMNRPALNEMLNKLHEIDAVVVYRLDRLSRSQRDTITLIEEYFLKNNVEFVSLSETLDTSSPFGRAMIGILSVFAQLERETIRDRMVMGKIKRVEAGLPLTTAKGRTFGYDVIDTKLYINEEEAKQLQLIYDIFEEEQSITFLQKRLKKLGFKVHTYNRYNNWLTNDLYCGYVSYKDKVHVKGVHEPIISEEQFYRVQEIFTRMGKNPNMNRDSASLLNSLVVCSKCGLGFVHRRKDTTSRGKKYHYRYYSCKTYKHTHELEKCGNKIWRADKLEELIINRVNSYSFASRNVDKEDELDSLNEKLKIEHAKRKRLFDLYINGSCEVSELDSMMNDIDAQINYYESQIEANEELKKDKKIQESLANLATVDFDSLEFREKQRYLKSLINKIYIDGEQVTIEWL

SEQ ID NO: 2955 - protein, 452 aa, synthetic construct
MKAAIYIRVSTREQVENYSIQAQTEKLTALCRSKDWDVYDIFIDGGYSGSNMNRPALNEMLSKLHEIDAVVVYRLDRLSRSQRDTITLIEEYFLKNNVEFVSLSETLDTSSPFGRAMIGILSVFAQLERETIRDRMVMGKIKRVEAGLPLTTAKGRTFGYDVIDTKLYINEEEARQLQLIYDIFEEEQSITFLQKRLKKLGFKVHTYNRYNNWLTNDLYCGYVSYKDKVRAKGVHEPIISEEQFYRVQEIFTRMGKNPNMNRDSASLLNNLVVCGKCGLGFVHRRKDTSSRGKRYHYRYYSCKTYKHTHELEKCGNKIWRADKLEELIINRVRNYRFASRNVDKEDELDGLNEKLKIEHARRKRLFDLYINGSYEVGELDSMMNDIDAQINYYESQIEANEELKKNKKIQENLASLATVDYDSLGFREKQQYLKSLIDKIYIDGEQVTIEWL

SEQ ID NO: 2956 - protein, 452 aa, synthetic construct
MKAAIYIRVSTREQVENYSIQAQTEKLTALCRSKDWDVYDIFIDGGYSGSNMNRPALNEMLSKLHEIDAVVVYRLDRLSRSQRDTITLIEEYFLKNNVEFVSLSETLDTSSPFGRAMIGILSVFAQLERETIRDRMVMGKIKRIEAGLPLTTAKGRTFGYDVIDSRLYINEEEAKQLRLIYDIFEEERSISFLQKRLKKLGFKVRTYNRYNNWLTNDLYCGYVSYKDKVHVKGIHEPIISEEQFYRVQEIFTRMGKNPNMNRDSASLLNNLVVCSKCGLGFVHRRKDTMSRGKKYHYRYYSCKTYKHTHELEKCGNKIWRADKLEELIINRVNNYSFASRNVDKEDELDSLNEKLKIEHAKKKRLFDLYINGSYEASELDGMMNDIDAQINHYESQIEANEELKKDKKIQENLANLATVDYDSLEFREKQLYLKSLINKIYIDGELVTIEWL

SEQ ID NO: 2957 - protein, 485 aa, synthetic construct
MTKKVAIYTRVSTTNQAEEGFSIDEQTDRLTKYAEAMGWQVSDTYTDAGFSGAKLERPAMQRLINDIENKAFDTVLVYKLDRLSRSVRDTLYLVKDVFTRNKIDFISLNESIDTSSAMGSLFLTILSAINEFERENIKERMTMGKLGRAKSGKSMMWTKTAFGYYHNRKTGILEIVPLQATIVEQIFTDYLSGISLTKLRDKLNESGHIGKDIPWSYRTLRQTLDNPVYCGYIKFKDSLFEGMHKPIIPYETYLKVQKELEERQQQTYERNNNPRPFQAKYMLSGMARCGYCGAPLKIVLGHKRKDGSRTMKYHCANRFPRKTKGVTVYNDNKKCDSGTYDLSDLENTVIDNLVGFQENNDSLLKIINGNNQPILDTSSSKKQISQIDRKIQKNSDLYLNDFTTMDELKDRTDSLQAEKKLLKAKISENKFNDSTDVFELVKTQLGSIPINELSYDDKKKIVNNLVSKVDVTADNVDIIFKFQLA

SEQ ID NO: 2958 - protein, 452 aa, synthetic construct
MKAAIYIRVSTQEQVENYSIQAQTEKLTALCRSKDWDVYDIFIDGGYSGSNMNRPALNEMLSKLHEIDAVVVYRLDRLSRSQRDTTTLIEEYFLKNNVEFVSLSETLDTSSPFGRAMIGILSVFAQLERETIRDRMVMGKIKRIEAGLPLTTAKGRTFGYDVIDTKLYINEEEAKQLQLIYDIFEEEQSITFLQKRLKKLGFKVRTYNRYNSWLTNDLYCGYVSYKDKVHVKGIHEPIISEEQFYRVQEIFTRMGKNPNMNRGNASLLSNLVVCSKCGLGFVHRSKDTMSRGKKYHYRYYSCKTYKHTHELEKCGNKTWRADKLEELIINRVSNYSSASRNVDKEDELDSLNEKLEVEHAKKKRLFDLYINGSYEVSELDSMMNDIDAQINYYESQIEANEKLKKNKKIQENLADLAAVDFDSLEFREKRLYLKSLINKIYIDGEQVTIEWL

SEQ ID NO: 2959 - protein, 485 aa, synthetic construct
MTKKVAIYTRVSTTNQAEEGFSIDEQADRLTKYAEAMGWQVCGTYTDAGFSGAKLERPAMQRLINDIENEAFDTVLVYKLDRLSRSVRDTLYLVKDVFTKNKIDFISLNESIDTSSAMGSLFLTILSAVNEFERENIKERMTMGKLGRAKSGKSMMWTKTAFGYYHNRRTGILEIVPLQATIVEQIFTDYLSGISLTKLRDKLNESGHIGKDIPWSYRTLRQTLDNPVYCGYIKFKDSLFEGMHKPIIPYETYLKVQKELEERQQQTYGRNNNPRPFQAKYMLSGMARCGYCGAPLRIVLGHKRKDGSRTMKYHCANRFPRKTKGVTVYNDNKRCDSGTYDLSNLENTVIDNLIGFQEDNDSLLSLINGNNQPILDTSSLKKQISQIDKKIQKNSDLYLNDLITMDELKDRTDSLQAEKKLLKAKISENKFNDSTDVFELVKTQLGSIPINELSYDNKKKIVNNLVSKVDVTADNVDIVFKFQLA

SEQ ID NO: 2960 - protein, 469 aa, synthetic construct
MSNTTPVRAAVYLRISEDRSGEQLGVARQREDCLELCAQRKWVPVEYLDNDVSASTGKRRPAYEQMLADITAGKIAAVVAWDLDRLHRRPIELEAFMCLADEKRLALATVAGDVDLATPQGRLVARLKGSVAAHETEHKKARQRRAARQKAERGHPNWSKAFGYLPGPNGPEPDPRTAPLVKQAYADILAGASLGDVCRQWNAAGALTITGRPWTSTTLSKFLRKPRNAGLRAYKGARYGPVDRDAIVGKAQWSPLVDEATFWAAQAVLDAPGRAPGRKSVRRHLLTGLAGCGKCGNHLAGSYRTDGRVVYVCKTCHGVAILADNIEPILYHIVAEHLAMPDAVELLRREIHDAAEAETIRLELETLYGELDRLAVERAEGLLTARQVKISTDIVDAKITKLQARQQDQERLRVLDGIPLGTPQVAGVIAELSPDRFRAVLDVLAEVVVQPVGKGGRIFNPERVQVNWR

SEQ ID NO: 2961 - protein, 452 aa, synthetic construct
MKAAIYIRVSTREQVENYSIQAQTEKLTALCRSKDWDVYDIFIDGGYSGSNMNRPALNEMLSKLHEIDAVVVYRLDRLSRSQRDTITLIEEYFLKNNVEFVSLSETLDTSSPFGRAMIGILSVFAQLERETIRDRMVMGKIKRIEAGLPLTTAKGRTFGYDVVDTKLYINEEEAKQLQLIYDIFEEEQSITFLQKRLKKLGFKVRTYNRYRNWLTNDLYCGYVSYKDKVHVKGIHEPIISEEQFYRVQEIFTRMGKNPNMNRGSASLLNNLVVCGKCGLGFVHRRKDAMSRSKKYHYRYYSCKTYKHIHELEKCGNKIWRADKLEELIINRVNNYSLAGRNVDKEDVLDSLNEKLKTEHAKKKRLFDLYINGRYEVSELDSMMNDIDAQINYYESQIEANEELKKNKKIQENLAHLATVDFDSLEFREKQLYLKSLINKIYIDGEQVTIEWL

SEQ ID NO: 2962 - protein, 452 aa, synthetic construct
MKAAIYIRVSTREQVENYSIQAQTEKLTALCRSKDWDVYDIFIDGGYSGSNMNRPALNEMLSKLHEIDAVVVYRLDRLSRSQRDTITLIEEYFLKNSVEFVSLSETLDTSSPFGRAMIGILSVFAQLERETIRDRMVMGKIKRIEAGLPLTTAKGRTFGYDVIDTKLYINEEEAKQLQLIYDIFEEEQSITFLQKRLKKLGFKVRTYSCYNNWLTNDLYCGYVSYKDKVHVKGIHEPIISEEQFYRVQEIFARMGKSPNMNRDSVSLLNNLVVCSKCGLGFVHRRKDTTSRGKKYHYRYYSCKTYKHTHELEKCGNKIWRADKLEELIINRVNNYSSASRNVDKGDELDSLNEKLKIEHAKKKRLFDLYINGSYEVSVLDSMMNDIDAQINYYESQIEANEGLRKSKKIQENLAEPATVDFDSLEFREKQLYLKSLINKIYIDGEQVTIEWL

SEQ ID NO: 2963 - protein, 452 aa, synthetic construct
MKAAIYIRVSTREQVENYSIQAQTEKLTALCRSKDWGVYDIFIDGGYSGSNMNRPALNEMLSKLHEIDAVVVYRLDRLSRSQRDTITLIEEYFLKNNVEFVSLSETLDTSSPFGRAMIGILSVFAQLERETIRDRMVMGKIKRIEAGLPLTTAKGRTFGYDVIDTKLYINEEEAKQLQLIYDIFEEEQSITSLQKRLKKLGFKVRTYNRYNNWLTNDLYCGYVSYKDKVHVKGIHEPIISEEQFYRVQEIFTRMGKSPNMNRDSASLLSSLVVCSKCGLGFVHRRKDATSRDKKYHYRYYSCKTYKHIHELEKCGNKIWRADKLEELIINRVNNYSLASRNVDKEDELDSLSEKLKIEHAKKKRLFDLYVNGSYEVSELDSMMNDIDARINYYESQIEANEELKKNKKIQVNLANLATVDFDSLEFREKQLYLKSLINKIYIDGEQVTIEWL

SEQ ID NO: 2964 - protein, 452 aa, synthetic construct
MKAAIYIRVSTQEQVGNYSIQAQTEKLTALCRSKGWDVYDIFIDGGYSGSNMNRPALNEMLSKLHEIDAVVVYRLDRLSRSQRDTTTLIEEYFLKNNVEFVSLSETLDTSSPFGRAMIGILSVFAQLERETIRDRMVMGKIKRIEAGLPLTTAKGRTFGYDVIDTRLYINEEEAKQLRLIYDIFEEEQSITFLQKRLKKLGFKVRTYNRYNNWLTNDLYCGYVSYKDKVHVKGIHEPIISEEQFYRVQEIFTRMGRNPNMNRDSASLLNNLVVCSKCGLGFVHRSKDTMCRGKKYHYRYYSCKTYKHTHELEKCGNKTWRADKLEELIINRVNDYSFASRNADKGDELDSLNEKLKIEHARKKRLFDLYINGGYEVSELDSMMNDIDAQIDYYESQIEAKEELKKNKKIQENLADLATVDFDSLEFREKQLYLKSLINKIYIDGEQVTIEWL

SEQ ID NO: 2965 - protein, 469 aa, synthetic construct
MCYTTPVRAAVYLRISEDRSGEQLGVARQREDCLKLCDQRKWEPVEYLDNDVSASTGKRRPAYEQMLADITAGKIAAVVAWDLDRLHRRPIELEAFMCLADEKRLALATVAGDVDLATPQGRLVARLKGSVAAHETEHKRERQRRAARQKAERGHPNWSKAFGYLPGPNGPEPDPRTAPLVEQAYADILAGASLGDVCRQWNDAGAFTITGRPWTTTTLSKFLRKPRNAGLRAYKGAGYGPVDRDTIVGKAQWSPLVDEATFWATQAVLDAPGRAPGRKSVRRHLLTGLAGCGKCGNHLAGSYRTDGRVVYVCKACHGVAILADNIEPILYHIVAERLAMPDAADLLRREIHDAAEAETIRLELETLYGELDRLAVERAEGLLTARQVKISTDIVNAKITKLQARQLDQERLRVLGGIPLGTPQVAGMIAELSPDRFRAVLDSLAEVVVQPVGKGSRIFNPERVQVNWR

SEQ ID NO: 2966 - protein, 469 aa, synthetic construct
MSYTTPVRAAVYLRISEDRSGEQLGVARQREDCLKLCGQRKWEPVEYLDNDVSASTGKRRPAYEQMLADITAGKIAAVVAWDLDRLHRRPIELEAFMSLADEKRLALATVAGDVDLATPQGRLVARLKGSVAAHETEHKKARQRRAARQKAERGHPNWSKAFGYQPGPNGPEPDPRTAPLVKQAYADILAGASLGDVCRQWNDAAAFTITGRPWTSTALSKFLRKPRNAGLRAYKGARYGPVDRDAIVGKAQWSPLVDEATFWAAQAVLDAPGRAPGRKSVRRHLLTGLAGCGKCGNHLAGSYRTDGRVVYVCKACHGVAILADNIEPILYRIVAERLAMPDAVDLLRREIHDAAEAETIRLELETLYGELDCLAVERAEGLLTARQVKISTDIVNAKITRLQARQLDQERLRVLDGIPLGTPQVAGMIAELSPDRFRAVLDVLAEVVVLPVGKGGKIFNPERVQVNWR

SEQ ID NO: 2967 - protein, 485 aa, synthetic construct
MTKKVAIYTRVSTINQAEEGFSIDEQIDRLTKYAEAMGWRVSGAYTDAGFSGAKLERPAMQRLINDIENKAFDTVLVYKLDRLSRSVRDTLYLVKDVFTKNKIDFISLNESINTSSAMGSLFLTILSAINEFERENIKERMTMGKLGRAKSGKSMMWTKTAFGYYHNRKTGILEIVPLQATIVEQIFTDYLSGISLTKLRDKLNESGHIGKDIPWSYRTLRQTLDNPVYCGYIKFKDSLFEGMHKPIIPYETYLKVQRELEERQQQTYERNNNPRPFQAKYMLSGVARCGYCGAPLKIVLGHKRKDGSRTMKYHCANRFPRKTKGITVYNDNKKCDSGTYDLSNLENTVIDNLIGFQENNDSLLKITNGNNQPILDTNSFKKQISQIDKKIRKNSDLYLNDLITMDELKDRTDSLQAEKKLLKAKISENKFNDSTDVFELVKAQLGSIPINELSYDNKKKIVNNLVSKVDVTADNVDIIFKFQLA

SEQ ID NO: 2968 - protein, 452 aa, synthetic construct
MKAAIYIRVSTREQVENYSIQAQTEKLTALCRSKDWDVYDIFVDGGYSGSNMNRPALNEMLSKLHEIDAVVVYRLDRLSRSQRDTITLIEEYFLRNNVEFVSLSETLDTSSPFGRAMIGILSVFAQLERETIRDRMVMGKIKRIEAGLPLTTAKGRTFGYDVIDTKLYINEGEAKQLQLIYDIFEEEQSITSLQKRLKKLGFKVRTYNRYNNWLTNDLYCGYVSYKDKVHVKGIHEPIISEEQFYRVQEIFTRMGRNPNMNRDSASLLNNLVVCSKCGLGFVHRRKDAMSRDKKYHYRYYSCKTYKHIHELEKCGNKIWRADELEELIINHVNDYSLASRNVDKEDELDSLNERLEIERARKKRLFDLYINGSYEVSELDSMMNDIDAQINYYESQIEANEELRKNKKIQENLAYLATVDFDSLEFREKQLYLKSLINKIYIDGEQVTIEWL

SEQ ID NO: 2969 - protein, 485 aa, synthetic construct
MTKKVAIYTRVSTTNQAEEGFSIDEQVDRLTKYAEAMGWRVSDTYTDAGFSGAKLKRPAMQRLINDIENKAFDTVLVYKLDRLSRSVRDTLYLVKDVFTKNKIDFISLNESIDTSSAMGSLFLTILSAINEFERENIKERMTMGKLGRAKSGKSMMWTKTAFGYYHNRKTGILEIVPLQATIVEQIFTDYLSGISLTKLRDKLNESGHIGKDIPWSYRTLRQTLDNPVYCGYIKFKDSLFEGMHKPIIPYETYLKVQKELEERQQQTYERNNNPRPFQAKYMLSGMARCGYCGAPLRIVLGHKRKDGSRTMKYHCANRFPRKTKGVTVYNGNKKCDSGSYDLSNLENTVIDNLIGLQETSDSLLKIINGNNQPILDTSSLKKQISQIDKKIQKNSDLYLNDFITMDELKDRTDSLQAEKRLLKAKISENKCNDSTDVFELVKTQLGSIPINELSYDNKKKIVNNLVSKVDVTADNVDIIFKFQLA

SEQ ID NO: 2970 - protein, 452 aa, synthetic construct
MKAAIYIRVSTQEQVENYSIQAQTEKLTALCRSKDWDVYDIFIDGGYSGSNMNRPALNEMLSKLHEIDAVVVYRLDRLSRSQRDTTTLIEEYFLKNNVEFVSLSETLDTSSPFGRAMIGILSVFAQLERETIRDRMVMGKIKRIEAGLPLTTAKGRTFGYDVIDTKLYINEEEAKQLQLIYDIFEEEQSITFLQKRLKKLGFKVRTYNRYNNWLTNDLYCGYVSYKDKVHVKGIHEPIISEEQFYRVQEIFTRMGKNPNMNRDSASLLNNLVVCSKCGLGFVHRSKDTMSRGKKYHYRYYSCKTYKHTHELEKCGNKTWRADKLEELIINRVNNYSFASRNVDKEDELDSLNEKLEIEHAKKKRLFDLYINGSYEVGELDSMMNDIDAQINYYESQIEANEELKKNKKIQENLADLATVDFDNLEFREKRLYLKSLINKIYIDGEQVTIEWL

SEQ ID NO: 2971 - protein, 452 aa, synthetic construct
MKAAIYIRVSTHEQVANYSIQAQTEKLTALCRSKDWDVYDIFIDGGYSGSNMNRPALNEMLSKLHEIDAVVVYRLDRLSRSQRDTTTLIEEYFLKNNVEFVSLSETLDTSSPFGRAMIGILSVFAQLERETIRDRMVMGKIKRIEAGLPLTTAKGRTFGYDVIDTKLYINKEEAKQLQLIYDIFEEEQSITSLQKRLKELGFKVRTYSRYNNWLTNDLYCGYVSYKDKVHVKGIHEPIISEEQFYRVQEIFTRMGKSPNMNRDSASLLNNLVVCSKCGLGFVHRSKDTMSRGKKYHYRYYSCKTYKHTHELEKCGNKTWRADKLEELIISRVNNYSFASRNVDKEDELDSLNEKLKIEHAKKRRLFDLYISGSYEVSELDSVMNDIDAQINYYESRIEANEELKKNKKVQENLAELATVDFDSLEFREKQLYLKSLINKIHIDGEQVTIEWL

SEQ ID NO: 2972 - protein, 452 aa, synthetic construct
MKAAIYIRVSTQEQVGNYSIQAQTEKLTALCRSKDWDVYDIFVDGGYSGSNMNRPALNEMLSKLHEIDAVVVYRLDRLSRSQRDTTTLIEEYFLKNNVEFVSLSETLDTSSPFGRAMIGILSVFAQLERETIRDRMVMGKIKRIEAGLPLTTAKGRTFGYDVIDTKLYINEEEAKQLQLIYDIFEEEQSITSLQKRLKKLGFKVRTYNRYNNWLTNDLYCGYVSYKDKVHVKGIHEPIISEEQFYRVQEIFTRMGKSPNMNRDSASLLSNLVVCSKCGLGFVHRSKDTMSRGKKYHYRYYSCKTYKHTHELEKCGNKIWRADRLEELIISRVNNYSYASRNADKEDELDSLSEKLKVEHAKKNRLFDLYINGSCEMSVLDSMMNDIDAQINYYESQIEANEELKKNKKIQENLANLATVDFDSLEFREKQLYLKSLINKIYIDGEQVTIEWL

SEQ ID NO: 2973 - protein, 452 aa, synthetic construct
MKAAIYIRVSTREQVENYSIQAQTEKLTALCRSKDWDVYDIFIDGGYSGSNMNRPALNEMLSKLHEIDAVVVYRLDRLSRSQRDTITLIEEYFLKNNVEFMSLSETLDTSSPSGRAMIGILSVFAQLERETIRDRMVMGKIKRIEAGLPLTTAKGRTFGYDVIDTRLYINEEEAKQLRLIYDIFEEERSITFLQKRLKKLGFKVRTYSCYNNWLTNDLYCGYVSYKDKVHVKGIHEPIISEEQFYRVQEIFTRMGKNPNMNRDSASLLNNLVVCSKCGLGFVHRRKDTTSRGKKYHYRYYSCKTYKHIHELEKCGNKIWRADKLEELIINRVNNYSFASHNVDKEDELDSLNEKLKIEHAKKKRLFDLYINGSYEVSELDCMMNDIDAQINYYESQIEASEELKKDKKIQESLANPATVDYDSLEFREKQLYLKSLINKIYIDGEQVTIEWL

SEQ ID NO: 2974 - protein, 469 aa, synthetic construct
MSYTTPVRAAVYLRISEDRSGEQLGVARQREDCLKLCAQRKWVPVEYLDNDVSASTGKRRPAYEQMLADITAGRIAAVVAWDLDRLHRRPVELEAFMSLADEKRLALATVAGDVDLATPQGRLVARLKGCVAAHETEHKKARQRRAARQKAERGLPNWSKAFGYLPGPNGPEPDPRTAPLVKQAYADILAGASLGDVCRQWNDAGAFTITGRPWTTTILSKFLRKPRNAGLRAYKGARYGPVDRDAIVGKAQWSPLVDEATFWAAQAVLDAPGRAPGRKSVRRHLLTGLAGCGKCGNHLAGSYRTDGRVVYVCKACHGVAILADNIEPVLYHIVAERLAMPDAVDLLRREIHDAAEAETIRLELETLYGELDRLAVERAEGLLTARQVKISTDIVNAKITKLQARQLDQERLRVLDGIPLGTPQVAGVIAELSPDRFRAVLDVLAEVVVQPVGKSGRTFNPERVQVNWR

SEQ ID NO: 2975 - protein, 469 aa, synthetic construct
MCYITPVRAAVYLRISEDRSGEQLGVARQREDCLKLCGQRKWVPVEYLDNDVSASTGKRRPAYEQMLADITAGKIAAVVAWDLDRLHRRPIELEAFMSLADEKRLALATVAGDVDLATPQGRLVARLKGCVAAHETEHKKARQRRAARQKAERGHPNWSKAFGYLPGPNGPEPDPRTAPLVKQAYADILAGASLGDVCRQWNDAGAFTITGGPWTTTTLSKFLRKPRNAGLREYKGARYGPVDRDAIVGKAQWSPLVDEATFWAAQAVLDAPGRAPGRKSVRRHLLTGLAGCGKCGNHLAGSYRTDGQVVYVCKACHGVSILAVNIEPILYHIVAERLAMPDAVDLLRREVHDAAEAETIRLELETLYGELDRLAVERAEGLLTARQVKICTDIVNAKITKLQARQLNQERLRVLDGIPLGTPQVAGAIAELSPDRFRAVLDVLAEVVVQPVGKSGRVFNPERVQVNWR

SEQ ID NO: 2976 - protein, 452 aa, synthetic construct
MKAAIYIRVSTREQVENYSIQAQTEKLTALCRSKDWDVYDIFVDGGYSGSNMNRPALNEMLNKLHEIDAVVVYRLDRLSRSQRDTITLIEEYFLKNNVEFVSLSETLDTSSPFGRAMIGILSVFAQLERETIRDRMVMGKIKRIEAGLPLTTARGRTFGYDVIDTKLYINEEEAKQLQLIYDIFEEEQSITSLQRRLKKLGFKVHTYNRYNNWLTNDLYCGYVSYKDKVHVKGIHEPIISEEQFYRVQEIFTRMGKNPNMNRDSASLLNNLVVCSKCGLGFVHRRKDAMSRDKKYHYRYYSCKTYKHIHELEKCGNKIWRADKLEELIINRVNSYSLVSRNMDKEDELDSLNEKLKIEHAKKRRLFDLYINGSYEVSELDGMMYDIDAQINYYESQIEANEELKKNKKIQENLAYLATVDFDSLEFREKQLYLKSLINKIYIDGEQVTIEWL

SEQ ID NO: 2977 - protein, 469 aa, synthetic construct
MSYTTPVRAAVYLRISEDRSGEQLGVARQREDCLKLCGQRKWVPVEYLDNDVSASTGKRRPAYEQMLADITAGKIAAVVAWDLDRLHRRPIELEAFMSLADEKRLALATVAGDVDLATPQGRLVARLKGCVAAHETEHKKARQRRAARQKAERGHPNWSKAFGYLPGPNGPEPDPRTAPLVKQAYADILAGASLGDVCRRWNDAGAFTITGRPWTTTTLSKFLRKPRNAGLRAYKGARYGPVDRDAIVGKARWSPLVDEATFWAAQAVLDAPGRAPGRKSVRRHLLTGLAGCGKCGNHLAGSHRTDGRVVYVCKACHGVVILADNIEPILYHIVAERLAMPDAVDLLRREVHGAAEAETIRQELETLYGELDRLAVERAEGLLTARQVKISTDIVNAKITKLQARRLDQERLRVFDGIPLGTPQVAGVIAELSPDRFRAVLDVLAEVVVQPVGKGGRISNPERVQVNWR

SEQ ID NO: 2978 - protein, 469 aa, synthetic construct
MSYTTPVRAAVYLRISEDRSGEQLGVARQREDCLKLCAQRKWVPVEYLDNDVSASTGKRRPAYEQMLADITAGKIAAVVAWDLDRLHRRPVELEAFMSLADEKRLALATVAGDVDLATPQGRLVARLKGSVAAHETEHKKARQRRAARQKAERGLPNWSKAFGYLPGPNGPEPDPRTAPLVRQAYADILAGASLGDVCRQWNAAGAFTITGRPWTTTALSKFLRKPRNAGLRAYKGARYGPVDRDAIVGKAQWSPLVDEATFWAAQAVLDAPGRAPGRKSVRRHLLTGLAGCGKCGNHLAGSYRTDGQVAYVCKACHGVSILAVNIEPILYHIVAERLAMPDAVDLLRREIYDAAEAETIRLELETLHGELDRLAVERAEGLLTARQVKISTDIVSAKITKLQARQLDQERLRVFNGIPLGTPQVAGMIAELSPDRFRAVLDVLAEVVVQPVGKSGRISSPERVQVNWR

SEQ ID NO: 2979 - protein, 469 aa, synthetic construct
MCYTTPVRAAVYLRISEDRSGEQLGVARQREDCLKLCGQRNWEPVEYLDNDVSASTGKRRPAYEQMLADITAGKIAAVVAWDLDRLHRRPIELEAFMSLADEKRLALATVAGDVDLATPQGRLVARLKGSVAAHETEHKKARQRRAARQKAERGHPNWSKAFGYLPGPNGPEPDPRTAPLVKQAYADILAGASLGDVCRQWNDAGAFTVTGRPWTATTLSKFLRKPRNAGLRAYKGARYGPVDRDAIVGKARWSPLVDEATFWAAQAVLDAPGRAPGRKSVRRHLLTGLAGCGKCGNHLAGSYRTDGRVVYVCKACHGVAILADNIEPILYRIVAERLAMPDAVDLLRREIHDAAEAETIRLELETLYGELDRLAVERAEGLLTARQVKISTDIVNAKITKLQARQLDQERLRVFDGIPLGTPQVAGIIAELSPNRFRAVLDVLAEVVVQPVGKSGRVFNPERVQVNWR

SEQ ID NO: 2980 - protein, 452 aa, synthetic construct
MKAAIYIRVSTQEQVGNYSIQAQTEKLTALCRSKDWDVYDIFIDGGYSGSNMNRPALNEMLSKLHEIDAVVVYRLDRLSRSQRDTTTLIEEYFLKNNVEFVSLSETLDTSSPFGRAMIGILSVFAQLERETIRDRMVMGKIKRIEAGLPLTTAKGRTFGYDVIDTKLYINEEEAKQLQLIYDIFEEEQSITSLQKRLKKLGFKVRAYNRYNNWLTNDLYCGYVSYKDKVHVKGIHEPIISEEQFYRVQEIFTRMGKNPNMNRGSASLLNNLVVCSKCGLGFVHRSKDTMCRGKKYHYRYYSCKTYKHTHELEKCGNKTWRADKLEELIINRVNNYSFASRNVDKEDELDSLNEKLKIEHAKKERLFNLYINGSYEVSELDSMMNDIDAQINYYESQIEANGELKENKKIQENLADLATVDFDGLEFRDKQLYLKSLINKIYIDGEQVTIEWL

SEQ ID NO: 2981 - protein, 452 aa, synthetic construct
MKAAIYIRVSTREQVENYSIQAQTEKLTALCRSKDWDVYDIFIDGGYSGSNMNRPALNEMLSKLHEIDAVVVYRLDRLSRSQRDTITLIEEYFLKNNVEFVSLSETLDTSSPFGRAMIGILSVFAQLERETIRDRMVMGKIKRIEAGLPLTTAKGRTFGYDVIDTKLYINEEEAKQLQLIYDIFEEERSITSLQKRLKKLGFKVHTYNRYNNWLTNDLYCGYVSYKDKVHVKGIHEPIISEEQFYRVQEIFTRMGKNPNMNRDSASLLNNLVVCSKCGLGFVHRRKDAMSRDKKYHYRYYSCKTYKHIHELEKCGNKIWRADRLEELIISRVNNYSLASRYVDKEDELDSLNEKLKIEHAKKRRLFDLYINGSYEVSELDSMMNDIDAQINYYEGQIEANEELRENKKIQENLAHLATVDFDSLEFREKQLYLKSLINKIYIDGEQVTIEWL

SEQ ID NO: 2982 - protein, 452 aa, synthetic construct
MKAAIYIRVSTREQVENYSIQAQTEKLTALCRSKDWDVYDIFIDGGYSGSNMNRPALNEMLSKLHEIDAVVVYRLDRLSRSQRDTITLIEEYFLKNNVEFVSLSETLDTSSPFGRAMIGILSVFAQLERETIRDRMVMGKIKRIEAGLPLTTAKGRTFGYDVIDTKLYINEEEAKQLQLIYDIFEEEQSITFLQKRLKKLGFKVRTYSRYNNWLTNDLYCGYVSYKDKVHVKGIHEPIISEEQFYRVQEIFTRMGKNPNMNRDSASLLSNLVVCSKCGLGFVHRRKDTTSRGKKYHYRYYSCKTYKHTHELEKCGNKIWRADKLEELIINRVNNYSFASRNVDKEDELDSLNEKLKIEHAKKKRLFDLYINGSYEMSELDSMMNDIDAQINYYESQIEANEELKKNKKIQENLADLATVDYDNLGFREKQLYLKSLINKIYIDGEQVIIEWL

SEQ ID NO: 2983 - protein, 452 aa, synthetic construct
MKAAIYIRVSTQEQVGNYSIQAQTEKLTALCRSKDWDVYDIFIDGGYSGSNMNRPALNEMLSKLHEIDAVVVYRLDRLSRSQRDTTTLIEEYFLKSNVEFVSLSETLDTSSPFGRAMIGILSVFAQLERETIRDRMVMGKIKRIEAGLPLTTAKGRTFGYDVIDTKLYVNEEEAKQLRLIYDIFEEEQSITLLQKRLKKLGFKVRTYNRYNNWLTNDLYCGYVSYKDKVHVKGIHEPIISEEQFYRVQEIFTRMGKNPNMNRDSASLLNSLVVCSKCGLSFVHRSKDTMSRGKKYHYRYYSCKTYKHTHELEKCGNKTWRADKLEELIISRVNNYSFASRNVDKEDELDSLNEKLKIEHAKKKRLFDLYINGSYEVSELDSMMNDIDAQIDYYESQIEANEELKKNKKIQENLADLATVDFDSLEFREKQLYLKSLINKIYIDGEQVTIEWL

SEQ ID NO: 2984 - protein, 485 aa, synthetic construct
MTKKVAIYTRVSTTNQAEEGFSIDEQIDRLTKYAEAMGWQVSDTYTDAGSSGAKLKRPAMQRLINDIENKAFDTVLVYKLDRLSRSVRDTLYLVKDVFTKNKIDFISLNESIDTSSAMGSLFLTILSAINEFERENIKERMTMGKLGRAKSGKSMMWTKTAFGYYHNRETGILEIVPLQATIVEQIFTDYLSGISLTKLRDKLNESGHIGKDIPWSYRTLRQTLDNPVYCGYIKFKDSLFEGMHKPIIPYETYLKVQKELEERQQQTYERNNNPRPFQAKYMLSGMARCGYCGAPLRIVLGHKRKDGSRTMKYHCANRFPRKTRGVTVYNDNKKCDSGTYDLSDLENTVIDTLIGFQENNDSLLKIISGNNQPILDTSSFKKQISQIDKKIQKNSDLYLNDFITMDELKDRTDSLQAEKKQLKAKISESKFNDSTDVFELVKTQLGNIPINELSYDDKKKIVNNLVSKVDVTAANVDIIFKFQLA

SEQ ID NO: 2985 - protein, 485 aa, synthetic construct
MTKKVAIYTRVSTTNQAEEGFSIDEQTDRLTKYAEAMGWQVSDTYTDAGFSGAKLERPAMQRLINDIENKAFDTVLVYKLDRLSRSVRDTLHLVKDVFTKNKIDFISLNESIDTSSAMGSLFLTILSAINEFERENIKERMTMGKLGRAKSGKSMMWTKTAFGYYHNRKTGILEVVPLQATIVEQIFTDYLSGISLTKLRDKLNGSGHIGKDIPWSYRTLRQTLDNPVYCGYIKFKDSLFEGMHKPIIPYETYLKVQKELEERQQQTYERNNNPRPFQAKYMLSGMARCGYCGAPLKIVLGHKRKDGSRTMKYHCANRFPRKTRGVTVYNDNKKCDSGTYDLSNLENTVIDNLIDLQENNDSLLKIINGNNQPILDTSSFKKQISQIDKKIQKNSDLYLNDFITMDELRARTDSLQAEKKLLKANISENKFNDSTDVFELVKTLLGSIPINELSYDNKKKIVNNLVSKVDVTADSVDIIFKFQLV

SEQ ID NO: 2986 - protein, 485 aa, synthetic construct
MTKKVAIYTRVSTTNQAEEGFSIDEQIDRLTKYAEAMGWQVSDTYTDAGLSGAKLERPAMQRLINDIENKAFDTVLVYKLDRLSRSVRDTLYLVKDVFTKNKIDFISLNESIDTSSAMGSLFLTILSAINEFERENVKERMTMGKLGRAKSGKSMMWTKTAFGYYHNRRTGILDIVPLQATVVEQIFTDYLSGISLTKLRDKLNESGHIGKDIPWSYRTLRQTLDNPVYCGYIKFKGSLYEGMHKPIIPYETYLKVQKELEERQQQTYERNNNPRPFQAKYMLSGMARCGYCGAPLRIVLGHKRKDGSRTMKYHCANRFPRKTKGVTVYNDNKKCDSGTYDLSNLENTVIDNLIGFQENNDSLLKIINGNNQPILDTSSLKKQISQIDKKIQRNSDLYLNDFITMDELKDRTDSLQAEKKLLKAKISENKFNDSTDVFELVKAQLGSIPINELSYDNKKKIVNNLVSKVDVTADDVDIIFKFQLA

SEQ ID NO: 2987 - protein, 485 aa, synthetic construct
MTKKVAIYTRVSTTNQAEEGFSIDEQIDRLTKYAEAMGWQVSDTYTDAGLSGAKLERPAMQRLINDIENKAFDTVLVYRLDRLSRSVRDTLYLVKDVFTKNKIDFISLNESIDTSSAMGSLFLTILSAINEFERENIKERMTMGKLGRAKSGKSMMWTKTAFGYHHNRKTGILEIVPLQATIVEQIFTDYLGGISLTKLRDKLNESGHIGKDIPWSYRTLRQTLDNPVYCGYIKFKDSLFEGMHKPIIPHETYLKVQKELEERQQQTYERNNNPRPFQAKYMLSGLARCGYCGAPLRIVLGHKRKDGSRTMKYHCANRFPRKTKGITVYNDNKKCDSGTYDLSNLENTVIDNLIGLQENNDSLLEIINGNNQPILDTSSFKKQISQIDKKIQKISDLYLNDFITMDELKDRTDSLQAEKKLLKAKISENRFNDSTDVFELVKTQLGSIPINELSYDNKKKIVNNLVSKVDVTADNVDIIFKFQLA

SEQ ID NO: 2988 - protein, 452 aa, synthetic construct
MKAAIYIRVSTREQVENYSIQAQTERLTALCRSKGWDVYDIFIDGGYSGSNMNRPALNEMLSKLHEIDAVVVYRLDRLSRSQRDTITLIEEYFLKNNVEFVSLSETLDTSSPFGRAMIGILSVFAQLERETIRDRMVMGKIKRIEAGLPLTTAKGRTFGYDVIDTKLYINEEEAKQLQLIYDIFEEEQSITFLQKRLKKLGFKVRTYSCYNNWLTNDLYCGYVSYKDKVHVKGIHEPIISEEQFYRVQEIFTRMGKNPNMNRDSASLLNNLVVCSKCGLGFVHRRKDAMSRDKKYHYRYYSCKTYKHIHELEKCGNKIWRADELEELIINRVNNYSLASRNVDKEDELDSLNEKLRIEHAKKRRLFDLYINGSYEVSELDSMMNDIDAQISYYESQIEANEELKKNKKIQENLAGLATVDFDSLEFREKQRYLKSLINKIYIDGEQVTIEWL

SEQ ID NO: 2989 - protein, 469 aa, synthetic construct
MSYITPVCAAVYLRISEDRSGEQLGVARQREDCLKLCDQRKWVPVEYLDNDVSASTGKRRPAYDQMLADITAGKIAAVVAWDLDRLHRRPIELETFMSLADEKRLALATVAGDVDLATPQGRLVARLKGSVAAHETEHKKARQRRAARQKAERGHPNWSKAFGYLPGPNGPEPDPRTAPLVKQAYADILAGASLGDVRRQWNDAGAFTITGRPWTTTALSKFLRKPRNAGLRTYKGARYGPVDRDAIVGKAQWSPLVDEATFWAAQAVLDAPGRAPGRKSVRRHLLTGLAGCGKCGNHLAGSCRTDGRVVYVCKACHGVAILADNIEPILYHIVAERLAMSDAVDLLRREVHDAAEAETIRLELETLYGELDRLAVERAEGLLTARQVKISTDIVNAKITKLQARQLDQERLRVFDGIPLGTPQVAGKIAELSPDRFRAVLDVLAEVVVQPVGKSGRIFNPERVQVNWR

SEQ ID NO: 2990 - protein, 469 aa, synthetic construct
MSYTTPVRAAVYLRISEDRSGEQLGVARQREDCLKLCGQRKWVPVEYLDNDVSASTGKRRPAYEQMLADITAGKVEAVVAWDLDRLHRRPIELEAFMSLADEKRLALATVAGDVDLATPQGRLVARLKGCVAAHETEHKKARQRRAARQKAERGLPNWSKAFGYLPGPNGPEPDPRTAPLVKQAYADILAGASLGDVCRRWNDAGAFTITGRPWTTTTLSKFLRKPRNAGLRAYKGARYGPVDRDAIVGKAQWSPLVDEAIFWAAQAVLDAPGRAPGRKSVRRHLLTGLAGCGKCGNHLAGSYRTDGRVVYVCKTCHGIAILADIIEPILYHIVAERLAMPDAVDLLRREVHDAAEAETIRLELETLYGELDRLAVERAEGLLTARQVKISTDIVNAKITRLQARQLDQERLRVLDGIPLGTPQVAGMIAELSPDRFRAVLDVLAEVVVQPVGKSGRIFNPERVQVNWR

SEQ ID NO: 2991 - protein, 452 aa, synthetic construct
MKAAIYIRVSTREQVENYSIQAQTEKLTALCRSKGWDVYDIFIDGGYSGSNMNRPALNEMLSKLHEIDAVVVYRLDRLSRSQRDTITLIEEYFLKNNVEFVSLSETLDTSSPFGRAMIGILSVFAQLERETIRDRMVMGKIKRVEAGLPLTTAKGRAFGYDVIDTKLYINEEEAKQLQLIYDIFEEEQSITFLQKRLKKLGFKVRTYNRYISWLTNDLYCGYVSYKDKVHVKGIHEPIISEEQFYRVQEIFTRMGKNPNMNRDSASLLNNLVVCSKCGLGYVHRRKDTTSRGKRYHYRYYSCKTYKHIHELEKCGNKIWRADKLEELIISRVNNYSLASRNVDKEDELDSLNEKLKIEHARRKRLFDLYINGSYEVSELDSMMNDIDARINYYESQIEANEELKRNKKIQENLANLATVDYDSLEFREKQLYLKSLINKIYIDGEQVTIEWL

SEQ ID NO: 2992 - protein, 485 aa, synthetic construct
MTKKVAIYTRVSTTNQAEEGFSIDEQIDRLTKYAEAMGWQVSDTYTDAGFSGAKLERPAMQRLINDIENKAFDTVLVYKLDRLSRSVRDTLHLVKDVFTKNKIDFISLNESIDTSSAMGSLFLTILSAINEFERENIKERMTMGKLGRAKSGKSMMWTKTAFGYYHNRKTGILEIVPPQATIVEQIFTDYLSGISLTKLRDKLNESGHIGKDIPWSYRTLRQTLDNPVYCGYIKFKGSLFEGMHKPIIPYETYLKVQKELEERQQQTYERNNNPRPFQAKYMLSGMARCGYCGAPLRIVLGHKRKDGSRTMKYHCANRFPRKTKGVTVYNDNKKCDSGTYDLSNLENTVVDILTGFQENNDSLLKIINGNNQPILDTSSFKKQISQIEKKIQKNSDLYLNDFITMDELKDRTDSLQAEKELLKAKISENKFNDSTDVFELVKTQLGSIPINELSYDNKKKIVNNLVSKVDVTADNVDIIFKFQLA

SEQ ID NO: 2993 - protein, 469 aa, synthetic construct
MSYTTPVRAAVYLRISEDRSGEQLGVARQREDCLKLCDQRKWVPVEYLDNDVSASTGKRRPAYEQMLADITAGKIAAVVAWDLDRLHRRPIELEAFMSLADERRLALATVAGDVDLATPQGRLVARLKGSVAAHETEHKKARQRRAARQKAEHGLPNWSKAFGYLPGPNGPEPDPRTAPLVKQAYADILAGASLGDVCRQWNAAGAFTITGRPWTTTALSKFLRKPRNAGLRAYKGARYGPVDRDAIVGKAQWSPLVDEATFWAAQAVLDAPGRAPGRKSVRRHLLTGLAGCGKCGNHLAGSYRTDGQIVYVCKACHGVSILAVNIEPILYRIVAERLAMPDAVDLLRREIHDAAEAETIRLELETLYGELDRLAVERAEGLLTARQVRISTDIVSAKITKLQARQQDQERLRVLDGIPLGTPQVAGAIAELSPDRFRAVLDVLAEVVVQPVGKSSRIFNPGRVQVNWR

SEQ ID NO: 2994 - protein, 469 aa, synthetic construct
MSYTTPVRAAVYLRISEDRSGEQLGVARQREDCLKLCDQRKWVPVEYLDNDVSASTGKRRPAYEQMLADITAGKIAAVVAWDLDRLHRRPVELEAFMSLADEKRLALATVAGDVDLATPQGRLVARLKGSVAAHETEHKRARQRRAARQKAERGHPNWSKAFGYLPGPNGPEPDPRTAPLVKQAYADILAGASLGDVCRRWNDAGAFTITGRPWTTTTLSKFLRKPRNAGLRTYKGARYGPVDRDAIVGKAQWSPLVDEATFWAAQAVLDAPGRAPGRKSVRRHLLTGLAGCGKCGNHLAGSHRTDGRVAYVCKACHGVAILADNIEPILYHIVAERLAMPDAVDLLRREIHDAAEAEAIRLELETLYGELDRLAVERAEGLLTARQVKISTDIVNAKITKLQARQLDQERLRVLDGIPLGTPQVAGMIAELSPDRFRAVLDVLAEVAVQPVGKSGRIFNPERVQVNWR

SEQ ID NO: 2995 - protein, 485 aa, synthetic construct
MTKKVAIYTRVSTTNQAEEGFSIDEQIDRLTKYAEAMGWQVSDTYTDAGFSGAKLERPAMQRLINDIENEAFDTVLVYKLDRLSRSVRDTLYLVKDVFTKNKIDFISLNESIDTSSAMGSLFLTILSAINEFERENIKERMTMGKLGRAKSGKSMMWTKTAFGYYHNRKTGILEIVPLQATIVEQIFTDYLSGISLTKLRDKLNESGHIGKDIPWSYRTLRQTLDNPVYCGYIKFKDSLFEGMHKPIIPYETYLKVQKELEERQQQAYERNNNPRPFQAKYMLSGMARCGYCGAPLRIVLGRKRKDGSRTMKYHCANRFPRKAKGVTVYNDNKKCDSGTYDLSNLENTVIDNLIGFQENNDSLLKIINGNDQPILDTCSFKERISQIDKKIQRNSDLYLNDFITMDELRDRTDSLQAEKKLLKAKISENKFNDSTDVLELVKTQLGSIPINELSYDSKKKIVNNLVSKVDVTADNVDIIFKFQLA

SEQ ID NO: 2996 - protein, 485 aa, synthetic construct
MTKKVAIYTRVSTTNQAEEGFSIDEQIDRLTKYAEAMGWQVSDTYTDAGLSGAKLERPAMQRLINDIENKAFDTVLVYKLDRLSRSVRDTLYLVKDVFTKNKIDFISLNESIDTSSAMGSLFLTILSAINEFERENIKERMTMGKLGRAKSGKSMMWTKTAFGYYHNRKTGILEIVPLQAAIVEQIFTDYLSGISLTKLRDKLNESGHIGKDIPWSYRTLRQTLDNPVYCGYIKFKDSLFEGMHKPIIPYETYLKVQKELEERQQQTYERNNNPRPFQAKYMLSGMARCGYCGAPLRIVLGHKRKDGSRTMKYHCANRFPRKTKGVTVYNDNKKCDSGTYDLSNLENTVIDNLTGFQENSDGLLKIINGNNQPTLDTSSFKKQISQIDKKIQKNSDLYLNDFITMDELRDRTDSLQAEKKRLKAKISENKFSDSADVFELVKAQLGSIPINELSYVNKKKIVNNLVSKVDVTADNVDIIFKFQLA

SEQ ID NO: 2997 - protein, 485 aa, synthetic construct
MTKKVAIYTRVSTTNQAEEGFSIDEQIDRLTKYAEAMGWQVSDTYTDAGLSGAKLERPAMQRLINDIENKAFDTVLVYKLDRLSRSVRDTLYLVKDVFTKNKIDFISLNESIDTSSAMGSLFLTILSAINEFERENIKERMTMGKLGRAKSGKSMMWTKTAFGYYHNRKTGILEIVPLQATIVEQIFTDYLSGISLTKLRDKLNESGHIGKDIPWSHRTLRQTLDNPVYCGYIKFKDSLFEGMHKPIIPYETYLKVQKELEERQQQTYERNNNPRPFQAKYMLSGMARCGYCGAPLKIVLGHKRKDGSRTMKYHCANRFPRKTKGITVYNDNKKCDSGTYDLSSLENTVVDNLIGFQEDNDSLLKIINGNNQPILDTSSFKKQISQIDKKIQKNSDLYLNDFITMDELKDRTDSLQAEKKLLKAKISENKFNDSTDVFELVKTQLGSIPINELSYDNKKKIVNNLVSKVDVTADNVDIIFKFQLA

SEQ ID NO: 2998 - protein, 452 aa, synthetic construct
MKAAIYIRVSTQEQVGNYSIQAQTEKLTALCRSKDWDVYDIFVDGGYSGSNMNRPALNEMLSKLHEIDAVVVYRLDRLSRSQRDTTTLIEEYFLKNNVEFVSLSETLDTSSPFGRAMIGILSVFAQLERETIRDRMVMGKIKRIEAGLPLTTAKGRTFGYDVIDTKLYINEEEARQLRLIYDIFEEEQSITFLQKRLKKLGFKVRSYNRYNNWLTNDLYCGYVSYKDKVHVKGIHEPIISEEQFYRVQEIFTRMGKNPNMNRDSASLLNNLVVCSKCGLGFVHRSKDTMSRGKKYHYRYYSCKTYKHTHELEKCGNKTWRADKLEELIISRVNNYSFASRNVDKEDELDSLNEKLKIEHAKKKRLFDLYINGSYEVSELDSMMSDIDAQINYYESQIGAYEELKKTKKIQENLADLATVDFDSLEFREKQLYLKSLINKIYVDGEQVTIEWL

SEQ ID NO: 2999 - protein, 485 aa, synthetic construct
MTKKVAIYTRVSTTNQAEEGFSIDEQIDRLTKYAEAMGWQVSDTYTDAGFSGAKLERPAMQRLINDIENKAFDTVLVYKLDRLSRSVRDTLHLVKDVFTKNKIDFISLNESIDTSSAMGSLFLTILSAINEFERENIKERMTMGKLGRAKSGKSMMWTKTAFGYHHNRKTGILEIVPLQATIVEQIFTDYLSGISLTKLRDKLNESGHIGKDIPWSYRTLRQTLDNPVYCGYIKFKDSLFEGMHKAIIPYETYLKVQKELEERQQQTYERNNNPRPFQAKYMLSGMARCGYCGAPLRIVLGHKRKDGSRTMKYHCANRFPRKTKGITVYNDNKKCDSGTYDLSTLENTVIDNLIGLQENNDSLLKIINGDSQPILDTSSFKKQISQIDKKIQKNSDLYLNDFITMDELKDRTDSLQAEKKLLKAKISENKFSDSTDVFELVKTQLGSIPINELSYDSKKKIVNNLVSKVDVTADNVDIIFKFQLA

SEQ ID NO: 3000 - protein, 485 aa, synthetic construct
MTKKVAIYTRVSTTNQAEEGFSIDEQIDRLTKYAEAMGWQVSDTYTDAGCSGAKLERPAMQRLISDIENKAFDTVLVYKLDRLSRSVRDTLYLVKDVFTKNKIDFISLNESIDTSSAMGSLFLTILSAINEFERESIKERMTMGKLGRAKSGKSMMWTKTAFGYYHNRKTGILEIVPLQATIVEQIFTDYLSGISLTKLRDKLNESGHVGKDIPWSYRTLRQTLDNPVYCGYIKFKDSLFEGMHKPIIPYETYLKVQKELEERQQQTYERNNNPRPFQAKYMLSGMARCGYCGAPLKIVLGRKRRDGSRTMKYHCANRFPRKTKGVTVYNDNKKCDSGTYDLSNLENTVIGNLIGFQENNDSLLKIINGNNQPILDTSSFKEQISQIDKKIQKNSDLYLNDFITMDELKDRTDSLRAEKKLLKAKISENKLNDSTDVFELVKTQLGSIPINELSYDDQKKIVNNLVSKVDVTADNVDIIFKFQLA

SEQ ID NO: 3001 - protein, 452 aa, synthetic construct
MKAAIYIRVSTQEQVENYSIQAQTEKLTALCRSKGWDVYDIFIDGGYSGSNMNRPALNEMLSKLHEIDAVVVYRLDRLSRSQRDTTTLIEEYFLKNNVEFVSLSETLDTSSPFGRAMIGILSVFAQLERETIRDRMVMGKIKRIEAGLPLTTAKGRTFGYDVIDTKLYINEEEAKQLRLIYDIFEEEQSITSLQKRLKELGFKVRTYNRYNNWLTNDLYCGYVSYKDKVHVKGIHEPIISEEQFYRVQEIFTRMGKNPNMNRDSASLLSNLVVCSKCGLGFVHRSKDTMSRGKKYHYRYYSCKTYKHTHELEKCGNKTWRADKLEELIINRVNNYSFVSRNVDKEDDLDSLNEKLRIEHAKKKRLFDLYINGSYEVSELDSMMSDIDAQINHYESQIEANEKLKKNKKVQENLADLATMDFDSLEFREKQLYLKSLINKIYIDGEQVTIEWL

SEQ ID NO: 3002 - protein, 452 aa, synthetic construct
MKAAIYIRVSTREQVENYSVQAQTEKLTALCRSKDWDVYDIFIDGGYSGSNMNRPALNEMLSKLHEIDAVVVYRLDRLSRSQRDTITLIEEYFLKNNVEFVSLSETLDTSSPFGRAMIGILSVFAQLERETIRDRMVMGKIKRIEAGLPLTTAKGRTFGYDVIDTKLYINEEEAKQLRLIYDIFEEEQSITFLQKRLKKLGFKVRAYNRYNNWLTNDLYCGYVSYKDKVHVKGIHEPIISEEQFYRVQEIFARMGKNPNMNRDSASLLNNLVVCSKCGLGFVHRRKDAMSRDKKYHYRYYSCKTYKHIHELEKCGNKIWRADKLEELIINRVNSYSVAGRNVDKEDELDSLNEKLRIEHAKKKRLFDLYINGSYEVSELDSMMNDIDAQINYYESQIEANEELKKNKKIQEDLAHLATVDFDSLEFREKQLYLKSLINKIYIDGEQVTIEWL

SEQ ID NO: 3003 - protein, 452 aa, synthetic construct
MKAAIYIRVSTREQVENYSIQAQTEKLTALCRSKDWDVYGIFIDGGYSGSDMNRPALNEMLSKLHEIDAVVVYRLDRLSRSQRDTITLIEEYFLKNNVEFVSLSETLDTSSPFGRAMIGILSVFAQLERETIRDRMVMGKIKRVEAGLPLTTAKGRTFGYDVIDTKLYINEEEAKQLQLIYDIFEEEQSITFLQKRLKKLGFKVHTYNRYNSWLTNDLYCGYVSYKDKVHVKGIHEPIISEEQFYRVQEIFTRMGKNPNMNRDSASLLNGLVVCSKCGLGFVHRRKDTTSRGKKYHYRYYSCKTYKHIHELEKCGNKIWRADRLEELIINRVNNYSLASRNVDEEDELDSLNEKLKIEHAKKKRLFDLYINGSYEVNELDSMMNDIDAQINYYESQIEANEELKKNKKIQENLANLATVDYDSLEFREKQLYLKSLINKIYIDGEQVTIEWL

SEQ ID NO: 3004 - protein, 452 aa, synthetic construct
MKAAIYIRVSTREQVENYSIQAQTEKLTALCRSKDWDVYDIFIDGGYSGSNMNRPALNEMLSKLHEIDAVVVYRLDRLSRSQRDTITLIEEYFLKNNVEFVSLSETLDTSSPFGRAMIGILSVFAQLERETIRDRMVMGKIKRIEAGLPLTTAKGRTFGYDVIDTKLYINEEEAKQLQLIYDIFEEEQSITFLQKRLKKLGFKVRTYNRYNNWLTNDLYCGYVSYKDKVHVKGIHEPIISEEQFYRVQEIFTRMGKNPNMNRDSASLLNNLVVCSKCGLGFVHRRKDAISRDKKYHYRYYSCKTYKHIHELEKCGNKIWRADKLEELIINRVNNYSLASRNVDKEDELDSLNEKLKIEHAKKRRLFDLYINGSYEVSELDSMMNDIDAQINYYESQIEANEELKKNKKIQENLAYLATVDFDSLEFREKQLYLKSLINKIYIDGEQVTIEWL

SEQ ID NO: 3005 - protein, 452 aa, synthetic construct
MKAAIYIRVSTREQVENYSIQAQTEKLAALCRSKDWDVYDIFIDGGYSGSNMNRPALNEMLSKLHEIDAVVVYRLDRLSRSQRDTITLIEEYFLKNNVEFVSLSETLDTSSPFGRAMIGILSVFAQLERETIRDRMVMGKIKRIEAGLPLTTAKGRTFGYDVIDTKLYINEEEAKQLQLIYDIFEEEQSITFLQKRLKKLGFKVRTYSRYNNWLTNDLYCGYVSYKDKVHVKGIHEPIISEEQFYRVQEIFTRMGKNPNMNRDSASLLNNLVVCSKCGLGFVHRRKDATSRDKKYHYRYYSCKTYKHIHELEKCGNKIWRADKLEALIIDRVNNYSLASRNADKEDELDSLNEKLGTEHAKKKRLFDLYINGSYEVSELDSMMSVIDAQINYYESQIEANEELKKNKKIQENLADLATVDFDSLEFREKQLYLKSLINKIYIDGEQVTIEWL

SEQ ID NO: 3006 - protein, 452 aa, synthetic construct
MKAAIYIRVSTREQVENYSIQAQTEKLTALCRSKGWDVYDIFIDGGYSGSNMNRPALNEMLSKLHEIDAVVVYRLDRLSRSQRDTITLIEEYFLKNNVEFVSLSETLDTSSPFGRAMIGILSVFAQLERETIRDRMVMGKIKRIEAGLPLTTAKGRTFGYDVIDTKLYINEEEAKQLRLIYDIFEEEQSITFLQKRLKKLGFKVRTYSCYNNWLTNDLYCGYVSYKDRVHVKGIHEPIISEEQFYRVQEIFTRIGKNPNMNRGSASLLNNLVVCSKCGLGFVHRRKDAMSRDKKYHYRYYSCKTYKHIHELEKCGNKIWRADKLEELIINRVNNYSLANRNVDKEDELDSLNEKLKTEHAKKKRLFDLYINGSYEVSELDSMMNDIDAQINYYESRIEANEELKKNKKTQENLAHLATVDFDSLEFREKQLYLKSLINKIYIDGEQVTIEWL

SEQ ID NO: 3007 - protein, 485 aa, synthetic construct
MTKKVAIYTRVSTTNQAEEGFSIDEQIDRLTKYAEAMGWQVSDTYTDAGFSGAKLERPAMQRLINDIENKAFDTVLVYKLDRLSRSVRDTLYLVEDVFTKNKIDFISLNESIDTSSAMGSLFLTILSAINEFERENIKERMTMGKLGRAKSGKSMMWTKTAFGYYHNRKTGILEIVPLQATIVEQIFTDYLSGISLTKLRDKLNESGHIGKDIPWSYRTLRQTLDNPVYCGYIKFKDSLFEGMHKPIIPYETYLKVQKELEERQRQTYERNNNPRPFQAKYMLSGMARCGYCGAPLKIVLGHKRKDGSRTMKYHCANRFPRKTKGVTVYNDNKKCGSGTYDLSNLENTVIDNLIGFQENSDSLLKIINGNNQPILDTSSLKEQISRIDKKIQKNSDLYLNDFITMDELKDRTDSLQAEKRLLKAKISGNKFNDSTDVFELVKTQLGSIPINELSYDNKKKIVNNLVSKVDVTADNVDIIFKFQLA

SEQ ID NO: 3008 - protein, 452 aa, synthetic construct
MKAAIYIRVSTREQVENYSIQAQTEKLTALCRSKDWDVYDIFIDGGYSGSNMNRPALNDMLSKLHEIDVVVVYRLDRLSRSQRDTITLIEEYFLKNNVEFVSLSETLDTSSPFGRAMIGILSVFAQLERETIRDRMVMGKIKRIEAGLPLTTAKGRTFGYDVIDTKLYINEEEAKQLRLIYDIFEEEQSITFLQKRLKKLGFKVRTYNRYNNWLTNDLYCGYVSYKDKVHVKGIHEPIISEEQFYRVQEIFTRMGKNPNMNRDSASLLNNLVVCSKCGLGFVHRRKDAKSRDKKYHYRYYSCKTYKHIHELEKCGNKIWRADELEELIINRVSNYSFAGRNADKEDELDSLNEKLKIEHAKKKRLFDLYVNGSYEVSELNRMMNDIDAQINYYESQIEANEELRKNKKIQENLAHLATVDFDSLEFREKQLYLKSLINKIYIDGEQVTIEWL

SEQ ID NO: 3009 - protein, 469 aa, synthetic construct
MSYTTPVRAAVYLRISEDRSGEQLGVARQREDCLKLCDQRKWVPVEYLDNDVSASTGKRRPAYERMLADITAGNIAAVVAWDLDRLHRRPIELEAFMSLADEKRLALATVAGDIDLATPQGRLVARLKGSVAAHETEHKKARQRRAARQKAERGHPNWSKAFGYLPGPNGPEPDPRTAPLVKQAYADILAGASLGDVCRRWNDAGAFTITGRPWTTTTLSKFLRKPRNAGLRAYKGARYGPVDRGAIVGKARWSPLVDEATFWAAQAVLDAPGRAPGRKSVRRHLLTGLAGCGKCGNHLAGSYRADGRVVYVCKACHGVAILADNIEPILYHIVAERLAMPDAVDLLRSEIHDGAEAETIRLELETLYDELDRLAVERAEGLLTARQVKISTDIVNAKITELQARQLDQERLRVLDGIPLGTPRVAGKIAELSPDRFRAVLDVLAEVVVQPVGKSGRIFNPERVQVNWR

SEQ ID NO: 3010 - protein, 452 aa, synthetic construct
MKAAIYIRVSTREQVENYSIQAQTEKLTALCRSKDWDVYDIFVDGGYSGSNMNRPALNEMLSKLHEIDAVVVYRLDRLSRSQRDTITLIEEYFLKNSVEFVSLSETLDTSSPFGRAMIGVLSVFAQLERETIRDRMVMGKIKRIEAGLPLTTAKGRTFGYDVIDTKLYINEEEAKQLQLIYDVFEEEQSITFLQRRLKKLGFKVRTYNCYRNWLTNDLYCGYVSYKDKVHVKGIHEPIISEEQFYRVQEIFTRMGKSPNMNRDSASLLNNLVVCGKCGLSFVHRRKDTMSRDKRYHYRYYSCKTYKHIHELEKCGNKIWRADKLEELIISRVDNYSFASRNEDKEGELDSLNEKLKIEHAKKKRLFDLYINGSYEVSELDSMMNDIDAQINYYESQIEANEGLKKNKKIQEDLADLATVDFDSLEFREKQLYLKSLINKIYIDGEQVTIEWL

SEQ ID NO: 3011 - protein, 485 aa, synthetic construct
MTKKVAIYTRVSTTSQAEEGFSIDEQIDRLTKYAEAMGWQVSDTYTDAGFSGAKLERPALQRLINDIENKAFDTVLVYKLDRLSRSVRDTLYLVKDVFTKNRIDFISLNESIDTSSAMGSLFLTILSAINEFERENIKERMTMGKLGRAKSGKSMMWTKTAFGYYHNRKTGILEIVPLQATIVEQIFTDYLSGISLTKLRDKLNESGHIGKDIPWSYRTLRQTLDNPVYCGYIKFKDSLFEGMHKPIIPYETYLKVQRELEERQQQTYERNNNPRPFQAKYMLSGMARCGYCGAPLKVVLGHKRKDGSRTMKYHCANRFPRKTKGVTVYNDKKKCDSGTYDLSNLENTVIDNLVGFQENNDSLLKIINGNNQPILDTSSLRKQISQIDKKIQKNSDQYLNDFITMEELKDRTDSLQAEKKLLKAKISENKFNDSTDVFKLVKTQLGSIPINELSYDNKKKIVNNLVSKVDVTADSVDIIFKFQLA

SEQ ID NO: 3012 - protein, 452 aa, synthetic construct
MKAAIYIRVSTREQVENYSIQAQTEKLTALCRSKDWDVYDIFIDGGYSGSNMNRPALNEMLSKLHEIDAVVVYRLDRLSRSQRDTITLIEEYFLKNNVEFVSLSETLDTSSPFGRAMIGILSVFAQLERETIRDRMVMGKIKRIEAGLPLTTAKGRTFGYDVIDTKLYINEEEAKQLRLIYDIFEEEQSITLLQKRLKKLGFKVRTYSCYNNWLTNDLYCGYVSYKDKVHVKGIHEPIISEEQFYRVQEIFTRMGKSPNMNRDSASLLNNLVVCSKCGLGFVHRRKDTTSRGKKYHYRYYSCKTYKHTHELEKCGNKIWRADKLEELIINRVNSYSLASRNVDVEDGLDSLNEKLKIEHAKRKRLFDLYINGSYEVSELDSMMNDIDAQINYYESQIEANEELKKNKKIQENLANLATVDYDSLEFREKQLYLRSLINKIYIDGEQVTIEWL

SEQ ID NO: 3013 - protein, 452 aa, synthetic construct
MKAAIYIRVSTQEQVGNYSIQAQTEKLTALCRSKDWDVYDIFIDGGYSGSNMNRPALNEMLSKLHEIDAVVVYRLDRLSRSQRDTTTLIEEYFLKNNVEFVSLSETLDTSSPFGRAMIGILSVFAQLERETIRDRMVMGKIKRIEAGLPLTTAKGRTFGYDVIDTKLYINEEEAKQLQLIYDIFEEEQSITSLQKRLKKLGFKVRTYNRYNNWLTNDLYCGYVSYKDKVHVKGIHEPIISEEQFYRVQEIFTRMGKNPNVNRDSASLLNNLVVCNKCGLGFVHRSKDTMSRGKKYHYRYYSCKTYKHAHELEKCGNKIWRADKLEELIIDRVNNYSFASRNVDKEGELDSLNEKLKIEHAKKKRLFDLYINGSYEVSELDSMMNDIDAQINYYESQIEANEELKKNKKIQENLADLATVDFDSLGFREKRLYLKSLINKIYIDGEQVTIEWL

SEQ ID NO: 3014 - protein, 469 aa, synthetic construct
MSCTTPVRAAVYLRISEDRSGEQLGVARQREDCLKLCDQRKWVPVEYLDNDVSASTGKRRPAYEQMLADITAGKIAAVVAWDLDRLHRRPIELEAFMSLADEKRLALATVAGDVDLATPQGRLVARLKGSVAAHETEHKKARQRRAARQKAERGYPNWSKAFGYQPGPNGPEPDPRTAPLVKQAYADILAGASLGDVCRQWNDAGAFTITGRPWTTTTLSKFLRKPRNAGLRAYKGARYGPVDRDAIVGKAQWSPLVDEATFWATQAVLDAPGRAPGRKSVRRHLLTGLAGCGKCGNHLAGSYRTDGRVVYVCKTCHGVTILADNIEPILYHIVAERLAMPNAVDLLRREIYDAAEAETTRLELETLYGELDCLAVERAEGLLTARQVKISTDIVNAKIAKLQARQLDQERLHVFDGIPLGTPQVAGMIAELSPDRFRAVLGVLAEVVVQPVGKSGRIFNPERVQVNWR

SEQ ID NO: 3015 - protein, 485 aa, synthetic construct
MTRKVAIYTRVSTTNQAEEGFSIDEQVDRLTKYAEAMGWQVSDTYTDAGFSGARLERPAMQRLINDIENKAFDTVLVYKLDRLSRSVRDTLHLVKDVFTKNEIDFISLSESIDTSSAMGSLFLTILSAINEFERENIKERMTMGKLGRAKSGKSMMWTKTAFGYYHNRKTGILEIVPLQAAIVEQIFTDYLSGISLTKLRDKLNESGHIGKDIPWSYRTLRQTLDNPVYCGYIKFKDSLFEGMHKPIIPYETYLKVQKELEERQQQTYERNNNPRPFQAKYMLSGMARCGYCGAPLRIVLGHKRKDGSRTMKYHCANRFPRKTKGVTVYNDNKKCDSGTYDLSNLENTVIDNLIGFQENNDSLLKIVNGNNQPTLDTSSFEKQISQIDKKIQKSSDLYLNDFITMDELKDRTDSLQAEKKLLKAKISENRFNDSTGVFELVKTQLGSIPINELSYDDKKKIVNNLVSKVDVTADNVDIIFKFQLA

SEQ ID NO: 3016 - protein, 452 aa, synthetic construct
MKAAIYIRVSTREQVENYSIQAQTEKLTALCRSKDWDVYDIFIDGGYSGSNMNRPALNEMLSKLHEIDAVVVYRLDRLSRSQRDTITLIEEYFLKNNVEFVSLSETLDTSSPFGRAMIGILSVFAQLERETIRDRMVMGKIKRIEAGLPLTTAKGRTFGYDVIDTKLYINEEEAKQLQLIYDIFEEEQSITFLQKRLKKLGFKVRTYNCYNNWLTNDLYCGYVSYKDKVHVKGIHEPIISEEQFYRVQEIFTRTGKNPNMNRDSASLLNNLVVCGKCGLGFVHRRKDIMSRDKKYHYRYYSCKTYKHIHELEKCGNKIWRADKLEELVINRVNNYSFASRNVDKENELDSLNEKLKIEHAKKKRLFDLYINGSYEVSELDSMMNDIDAQINYYESQIEANEELKKNKKIQETLAYLATVDFDSLEFREKQLYLKSLINKIYIDGEQVTIEWL

SEQ ID NO: 3017 - protein, 485 aa, synthetic construct
MTKKVAIYTRVSTTNQAEEGFSIDEQIDRLTKYAEAMGWQVSDTYTDAGLSGAKLGRPALQRLINDIENKAFDTVLVYKLDRLSRSVRDTLYLVKDVFTENKIDFISLNESIDTSSAMGSLFLTILSAINEFERENIKERMAMGKLGRAKSGKSMMWTKTAFGYYHNRKTGILEIVPLQATIVEQIFTDYLSGISLTKLRDKLNESGHIGKDIPWSYRTLRQTLDNPVYCGYIKFKDSLFEGMHKPIIPYETYLKVQKELEERQQQTYERNNNPRPFQAKYMLSGMARCGYCGAPLRIVLGRKRKDGSRTMKYHCANRFPRKTKGVTVYNDNKKCDSGTYDLSDLENTVIDNLVGLQENNDSLLKIINGNNQPIPDTSSFKKQISQIDKKIQKNSDLYLNDLITMDELRDRTDSLQAEKKLLKAKISENKFNDSTDVFELVKTQLGSVPINELSYDNKKKIVNNLVSKVDVTADNVDIIFKFQLA

SEQ ID NO: 3018 - protein, 485 aa, synthetic construct
MTKKVAIYTRVSTTNQAEEGFSIDEQIDRLTKYAEAMGWQVSDTYTDAGLSGAKLERPAMQRLINDIENKAFDTVLVYKLDRLSRSVRDTLYLVKDVFTKNKIDFISLSESIDTSSAMGSLFLTILSAINEFERENIKERMTMGKLGRAKSGKSMMWTKTAFGYYHNRKTGILEIVPLQATIVEQIFTDYLSGISLTKLRDKLNESGHIGKDIPWSYRTLRQTLDNPVYCGYIKFKGSLFEGMHKPIIPYETYLKVQKELEERQQQTYERNNNPRPFQAKYMLSGMARCGYCGAPLKVVLGHKRKDGSRTMKYHCANRFPRKTKGVTVYNDNKKCDSGTYDLSNLENTVIGNLIGFQENNDSLLKIINGNNQPILDTSSFKEQISQIDKKIQKNSDLYLNDFITMDELKDRTDSLQAEKKLLKAKISENEFNDSTDVFELVKAQLGSIPINELSYDDKKKIVNNLVGKVDVTADNVDIIFKFQLA

SEQ ID NO: 3019 - protein, 485 aa, synthetic construct
MTKKVAIYTRVSTTNQAEEGFSIDEQIDRLTKYAEAMGWQVSDTYTDAGLSGAKLERPAMQRLINDTENKAFDTVLVYKLDRLSRSVRDTLYLVKDVFTKNKIDFISLNESIDTSSAMGSLFLTILSAINEFERENIKERMTMGKLGRAKSGKSMMWTKTAFGYYHNRKTGILEIVPLQATIVEQIFTDYLSGISLAKLRDKLNESGHIGKDIPWSYRTLRQTLDNPVYCGYIKFKDSLFEGMHKPIIPYETYLKVQKELEERQQQAYERNNNPRPFQAKYMLSGMARCGYCGAPLKIVLGHKRKDGSRTMKYHCANRFPRKTKGVTVYNDNKKCDSGTYDLSNLENTVIDSLIGFQENNDSLLKIINDNNQPTLDTSSLKKQISQIDKKIQKNSDLYLNDFITMDELKDRTDSLQAEKKLLKAKISENKFNDSTDVFELVKTQLGSIPINELSYDNKKKIVNNLVSKVDVTADNVDIIFKFQLA

SEQ ID NO: 3020 - protein, 452 aa, synthetic construct
MKAAIYIRVSTREQVENYSIQAQTEKLTALCRSKDWDVYDIFVDGGYSGSNMNRPALSEMLSKLHEIDAVVVYRLDRLSRSQRDTITLIEEHFLKNNVEFVSLSETLDTSSPFGRAMIGILSVFAQLERETIRDRMVMGKIKRIEAGLPLTTAKGRTFGYDVIDTKLYINEEEAKQLQLIYDIFEEEQSITFLQKRLKKLGFKVRTYNRYNNWLTNDLYCGYVSYKDKVHVKGIHEPIISEEQFNRVQEIFARTGKNPNMNRGSASLLNNLVVCGKCGLGFVHRRKDAMSRDKKYHYRYYSCKTYKHIHELVKCGNKIWRADELEELIINRVNNYSLASRNVDKEDGLDSLNEKLKIEHAKKKRLFDLYLSGSYEVSELDSMMNDIDAQISYYESQIEANEALIKNKKIQENLANLATVDFDSLEFREKQLYLKSLINKIYIDDEQVTIEWL

SEQ ID NO: 3021 - protein, 452 aa, synthetic construct
MKAAIYIRVSTQEQVGNYSIQAQTEKLTALCRSKDWDVYDIFVDGGYSGSNMNRPALNEMLSKLHEIDAVVVYRLDRLSRSQRDTTTLIEEYFLKNNVEFVSLSETLDTSSPFGRAMIGILSVFAQLERETIRDRMVMGKIKRIEAGLPLTTAKGRTFGYDVIDTKLYINEEEAKQLRLIYDIFEEEQSITFLQKRLKKLGLKVRTYNRYNSWLTNDLYCGYVSYKDKVHVKGIHEPIISEEQFYRVQEIFTRMGKNPNMNRDSASLLNNLVVCSKCGLGFVHRSKDTMSRGKKYHYRYYSCKTYKHTHELEKCGNKTWRADKLEELIINRVNNYSFSSRNVDREDELDGLNEKLKIEHAKKRRLFDLYINGSYEVSELDSMMNDIDAQINYYESQIEANEELKKNEKIQENLADLATVDFDSLEFREKQLYLRSLINKIYIDGEQVTIEWL

SEQ ID NO: 3022 - protein, 485 aa, synthetic construct
MTKKVAIYTRVSTTNQAEEGFSIDEQIDRLTKYAEAMGWQVSDTYTDAGFSGAKLGRPAMQRLINDIENKAFDTVLVYKLDRLSRSVRDTLYLVKDVFTKNKIDFISLNESINTSSAMGSLFLTILSAINEFERENIKERMTMGKLGRAKSGKSMMWTKTAFGYYHNRKTGILEIVPLQATIVEQIFTDYLSGISLTKLRDKLNESGHIGKDIPWSYRTLRQTLDNPVYCGYIKFKDSLFEGMHKPIIPYETYLKVQKELGERQQQTYERNNNPRPFQAKYMLSGMARCGYCGAPLKIVLGHKRKDGSRTMKYHCANRFPRKTKGITVYNDNKKCDSGTYDLSNLENTVIDNLIGLQENNDSLLKIINGNNQPILDISSFKKQISQIDKKIQKNSDLYLNDFITMDELKVRTDSLRAEKKLLKAKISENKLNDSTDVFELVKTQLGSIPINELSYGSKKKIVNNLVSKVDVTADNVDITFKFQLA

SEQ ID NO: 3023 - protein, 469 aa, synthetic construct
MSYTTPVRAAVYLRISEDRSGEQLGVARQREDCLKLCDQRKWVPVEYLDNDVSASTGKRRPAYEQMLADITTGKIAAVVAWDLDRLHRRPIELEAFMSLADERRLALATVAGDVDLATPQGRLVARLKGSVAAHETEHKKARQRRAARQKAERGLPNWSKAFGYLPGPNGPEPDPRTAPLVKQAYADILAGASLGDVCRQWNDAGAFTITGRPWTSTTLSKFLRKPRNAGLRAYKGARYGPVDRDAIVGKAQWSPLVDEATFWAAQAVLDAPGRAPGRKSVRRHLLTGLAGCGKCGNHLAGSYRTDGRVVYVCKACHGVAILADNIEPILYHIVAERLAKPDAVDLLRREIHDAAEAETIRLELETLYGELDRLAVERAEGLLTARQVKISTDIVNAKVTKLQARQQDQERLRVLDGIPLGTPQVAGMIAELSPDRFRAVLDVLAEVVVRPVGKGGRILNLERVQVYWR

SEQ ID NO: 3024 - protein, 452 aa, synthetic construct
MKAAIYIRVSTQEQVENYSIQAQTEKLTALCRSKDWDVYDIFIDGGYSGSNMNRPALNEMLSKLHEIDAVVVYRLDRLSRSQRDTITLIEEYFLKNNVEFVSLSETLDTSSPFGRAMIGILSVFAQLERETIRERMVMGKIKRIEAGLPLTTAKGRTFGYDVIDTKLYINEEEAKQLQLIYDIFEEEQSITFLQRRLKKLGFKVRTYSRYISWLTNDLYCGYVSYKDKVHVKGIHEPIISEEQFYRVQEIFTRMGKNPNMNRDSASLLNNLVVCSKCGLGFVHRRKDTMSRGKKYHYRYYSCKTYKHIHELEKCGNKIWRADRLEELIINRVNNYSFASRNVDKEDELDSLNEKLKIEHAKKKRLLDLYINGSYDVSELDSMMNDIDAQINYYESRIEANEELKKTKEIQENLANLATVDFDSLEFREKQLYLKSLINKIYIDGERVTIEWL

SEQ ID NO: 3025 - protein, 485 aa, synthetic construct
MTKKVAIYTRVSTANQAEEGFSIDEQVDRLTKYAEAIGWQVSDTYTDAGFSGAKLERPAMQRLINDIENKAFDTVLVYKLDRLSRSVRDTLYLVKDVFTKNKIDFISLNESIDTSSAMGSLFLTILSAINEFERENIKERMTMGKLGRAKSGKSMMWTKTAFGYYHNRKTGILEIVPLQATIVEQIFADYLSGISLTKLRDKLNESGHIGKDIPWSYRTLRQTLDNPVYCGYIKFKDSLFEGMHKPIIPYETFLKVQKELEERQQQTYERNNNPRPFQAKYMLSGMARCGYCGAPLKIVLGHKRKDGSRTMKYHCANRFPRKTKGVTVYNDNKKCDSGTYDLSNLENTVIDNLIGFQESNDSLLKIINGNNQPILDTSSLKKQISQIDKKIQKNIDLYLNDFITMDELKDRTDSLQAEKKLLKAKISENKFNDSTDVFELVKTQLGSTPINELSYDNKKKIVNNLVSKVDVTADNVDIIFKFQLA

SEQ ID NO: 3026 - protein, 452 aa, synthetic construct
MKAAIYIRVSTREQVENYSIQAQTEKLTALCRSRDWDVYDIFIDGGYSGSNMNRPALNEMLSKLHEIDAVVVYRLDRLSRSQRDTITLIEEYFLKNNVEFVSLSETLDTSSPFGRAMIGILSVFAQLERETIRDRMVMGKIKRIEAGLPLTTAKGRTFGYDVIDTKLYINEEEAKQLQLIYDIFEEEQSITFLQKRLKELGFKVHTYNRYNNWLTNDLYCGYVSYKDKVHVKGIHEPIISEEQFYRVQEIFTRMGKNPNTNRDSASLLNNLVVCSKCGLGFVHRRKDAMSRDKKYHYRYYSCKTYKHIHELEKCGNKIWRADKLEELIIDRVNNYSLASRNVDKEDELGSLNEKLKIEHVKKKRLFDLYINGSYEVSELDSMMNDIDAQISYYESQIEADEELRKNKKIQEDLAYLATLDFDSLEFREKQLYLKSLINKIYIDGEQVTIEWL

SEQ ID NO: 3027 - protein, 485 aa, synthetic construct
MTKKVAIYTRVSTTNQAEEGFSIDEQIDRLTKYAEAMGWQVSDTYTDAGFSGAKLVRPAMQRLINDIENKAFDTVLVYKLDRLSRSVRDTLYLVKDVFTKNKIDFISLNECIDTSSAMGSLFLTILSAINEFERENIKERMTMGKLGRAKSGKSMMWTKTAFGYYHNRKTGILEIVPLQATIVEQIFTDYLSGISLTKLRDKLNESGHIGKDIPWSYRTLRQTLDNPVYCGYIKFKDSLFEGMHKPIIPYETYLRVQKELEERQRQTYERNNNPRPFQAKYMLSGMARCGYCGAPLRIVLGHKRKDGSRTMKYHCANRFPRKTKGVTAYNDNKKCDSGAYDLSDLENTVIDNLIGFQENNDSLLKIINGNNQPILDTSSFKRQISQIDKKIQKNSDLYLNDFITMDELKDRTDSLRAERKLLKAKISENKFNDSADVFELVKTQLGSIPINELSYDDRKKIVNNLVSKVDVTADNVDIIFKFQLA

SEQ ID NO: 3028 - protein, 452 aa, synthetic construct
MKAAIYIRVSTREQVENYSIQAQTEKLTALCRSKDWDVYDIFIDGGYSGSNMNRPALNRMLSKLHEIDAVVVYRLDRLSRSQRDTITLIEEYFLKNNVEFVSLSETLDTSSPFGRAMIGILSVFAQLERETIRDRMVMGKIKRVEAGLPLTTAKGRTFGYDVIDTKLYINEEEAKQLQLIYDIFEEEQSITFLQKRLKKLGFKVRTYNRYNNWLTNDLYCGYVSYKDKVHVKGIHEPIISEEQFYRVQEIFTRMGKNPNMNRDSASLLNGLVVCSKCGLGFVHRRKDTMSRGKRYRYRYYSCKTYKHTHELEKCGNKIWRADKLEELIINRVNNYSLASRNVGKAEELDSLNEKLKIEHAKKRRLFDLYINGSYEVSELDSMMNDIDAQINYYESQIEANVELKKNKKIQENLADLATVDYDSLEFREKQLYLKSLINKIYIDGEQVTIEWL

SEQ ID NO: 3029 - protein, 452 aa, synthetic construct
MKAAIYIRVSTQEQVENYSIQAQTEKLTALCRSKDWDVYDIFIDGGYSGSNMNRPALNEMLSKLHEIDAVVVYRLDRLSRSQRDTTTLIEEYFLKNNVEFVSLSETLDTSSPFGRAMIGILSVFAQLERETIRDRMVMGKIKRIEAGLPLTTAKGRTFGYDVIDTKLYINEEEAKQLQLIYDIFEEEQSITFLQKRLKKLGFKVRTYNRYNSWLTNDLYCGYVSYKDKVHVKGIHEPIISEEQFHRVQEIFTRMGKNPNMNRDSASLLSNLVVCSKCGLGFVHRSKDTMNRGKKYHYRYYSCKTYKHTHELEKCGNKTWRADKLEELIISRVNNYSFASRNVDKEDELDSLNEKLEIERARKKRLFDLYISGNYEVSELDSMMNDIDAQINYYESQIEANEELRKNKKIQENLADLATVDFDSLEFREKQLYLKSLINKIYIDGEQVTIEWL

SEQ ID NO: 3030 - protein, 452 aa, synthetic construct
MKAAIYIRVSTQEQVENYSIQAQTEKLTALCRSKDWDVYDIFIDGGYSGSNMNRPALNEMLSKLHEIDAVVVYRLDRLSRSQRDTITLIEEYFLKNNVEFVSLSETLDTSSPFGRAMVGILSVFAQLERETIRDRMVMGKIKRIEAGLPLTTAKGRTFGYDVIDTKLYINEEEARQLRLIYDIFEEEQSITFLQKRLKKLGFKVRTYSCYNNWLTNDLYCGYVSYKDKVHVKGIHEPIISEEQFHRVQEIFTRMGKNPNMNRDSASLLSGLVVCSKCGLGFVHRRKDTVSRGKKYHYRYYSCKTYKHTHELEKCGNKIWRADKLEELIINRVSNYNSAGRNVDKEDELDSLNEKLKIEHAKKKRLFDLYINGSYEVSELVSMMNDIDAQINYYESQIEANEELKKNKKIQEKLANLATVDYDSLEFRGKQLYLKSLINKIYIDGEQVTIVWL

SEQ ID NO: 3031 - protein, 452 aa, synthetic construct
MKAAIYIRVSTREQVENYSIQAQTEKLTALCRSKDWDVYDIFIDGGYSGSNMNRPALNEMLSRLHEIGAVVVYRLDRLSRSQRDTITLIEEYFLKNNVEFVSLSETLDTSSPFGRAMIGILSVFAQLERETIRDRMVMGKIKRIEAGLPLTTAKGRTFGYDVIDTKLYINEDEAKQLQLIYDIFEEEQSITFLQKRLKELGFKVRTYNRYNNWLTNDLYCGYVSYKDKVHVKGIHEPIISEEQFYRVQEIFTRIGKNPNMNRGSASLLNNLVVCGKCGLGFVHRRKDAMSRDKKYHYRYYSCKTYKHIHELEKCGNKIWRADKLEELIINRVNTYSLASRNVDKEDELDSLNEKLKIELAKKKRLFDLYINGSYEVSELDGMMNDIDAQISYYESQIEANEELKKNKKIQENLAHLATVDFDSLEFREKQLYLKSLINKIYIDGEQVTIEWL

SEQ ID NO: 3032 - protein, 484 aa, synthetic construct
MTKKVAIYTRVSTTNQAEEGFSIDEIDRLTKYAEAMGWQVSDTYTDAGFSGAKLERPAMQRLINDIENKAFDTVLVYKLDRLSRSVRDTLYLVKEVFTKNKIDFISLNESIDTSSAMGSLFLTILSAINEFERENIKERMTMGKLGRAKSGKSMMWTKTAFGYYHNRKTGILEIVSPQATIVEQIFTDYLSGISLTKLRDKLNESGHIGKDIPWSYRTLRQTLDNPVYCGYIKFKDSLFEGMHKPIIPYETYLKVQKELEERQQQTYERNNNPRPFQAKYMLSGMARCGYCGAPLRIVLGRKRKDGSRTMKYHCANRFPRKTKGVTVYNDNKKCNSGTYDLSNLENTVIDNLIGFQENNDSLLKIINGNNQPILDTSSFKKQISQIDKKIQKNSDLYLNDFITMDELKVRTDSLQAEKKLLKAKISENKFNDSTDVFELVKTQLGSIPINELSYDNKKKIVNNLVSRVDVTADNVDIIFKFQLA

SEQ ID NO: 3033 - protein, 469 aa, synthetic construct
MCYTTPVRAAVYLRISEDRSGEQLGVARQREDCLKLCGQRKWVPVEYLDNDVSASTGKRRPAYEQMLADITAGKITAVVAWDLDRLHRRPIELEAFMSLADEKRLALATVAGDVDLATPQGRLVARLKGSVAAHETEHKKARQRRAARQKAERGYPNWSRAFGYLPGPNGPEPDPRTAPLVKQAYADILAGASLGDVCRRWNDAGAFTITGRPWTTTTLSKFLRKPRNAGLRAYKGARYGPVDRDAIVGKARWSPLVDEATFWAAQAVLDAPGRAPGRKSVRRHLLTGLAGCGKCGNHLAGSYRTDGQVVYVCKACHGVAILADNIEPILYHIVAERLAMPDAVDLLRREIHDAAEAETIRLELETLYSELDRLAVERAEGLLTARQVKISTDIVNAKITKLQARQLDQERLRVLGGIPLGTPQVTGMIAELSPDRFRAVLDVLAEVVVQPVGKGGRIFNPGRVQVNWR

SEQ ID NO: 3034 - protein, 452 aa, synthetic construct
MRAAIYIRVSTREQVDNYSIQAQTEKLTALCRSKDWDVYDIFIDGGYSGSNMNRPALNEMLSKLHEIDAVVVYRLDRLSRSQRDTITLIEEYFLKNNVEFVSLSETLDTSSPFGRAMIGILSVFAQLERETIRDRMAMGKIKRIEAGLPLTTAKGRTFGYDVVDTKLYINEEEAKQLQLIYDIFEEEQSITFLQKRLKKLGFKVRTYNRYNNWLTNDLYCGYVSYKDKVRVKGIHEPIISEEQFYRVQEIFARMGKNPNMNRDSASLLNNLVVCSKCGLGFVHRRKDIMSRGKKYHYRYYSCKTYKHIHELEKCGNKIWRADKLEELIVDRVNNYSLASRDADKEDELGSLNEKLKIEHAKKKRLFELYISGSYEVSELDSMMSDIDAQISYYESQIKANEELKKNKKIQENLADLATVDFDSLEFREKQLYLKSLINKIYIDGEQVTIEWL

SEQ ID NO: 3035 - protein, 485 aa, synthetic construct
MTKKVAIYTRVSTTNQAEEGFSIDEQIDRLTKYAEAMGWQVSDTYTDAGFSGAKLERPAMQRLINDIENKAFDTVLVYKLDRLSRSVRDTLHLVKEVFTKNKIDFISLNESIDTSSAMGSLFLTILSAINEFERENIKERMTMGKLGRAKSGKSMMWTKTAFGYYHNRKTGILEIVPLQATIVVQIFTDYLGGISLTKLRDKLNEGGHIGKDIPWSYRTLRQTLDNPVYCGYIKFKDSLFKGMHRPIIPYETYLKVQKELEERQQQAYERNNNPRPFQAKYMLSGVARCGYCGAPLKIVLGHKRKDGSRTMKYHCANRFPRKTKGVTVYNDNKKCDSGTYDLSNLENTVIDNLFGFQEDNDSLLKIINGNNQPILDTSSFKEQISQIDKKIQKNSDLYLNDFITMDELKDRTDSLRAEKKLLEAKISENKFSDSTNVFELVKTQLGSIPINELSYDDKKKIVNNLVSKVDVTADNVDIIFKFQLA

SEQ ID NO: 3036 - protein, 452 aa, synthetic construct
MKAAIYIRVSTREQVENYSIQAQTEKLTALCRSKDWDVYDIFIDGGYSGSNMNRPALNEMLSKLHEIDAVVVYRLDRLSRSQRDTITLIEEYFLKNNVEFVSLSETLDTSSPFGRAMIGILSVFAQLERETIRDRMVMGKIKRIEAGLPLTTAKGRTFGYDVIDTRLYINEEEAKQLQLIYDIFEEEQSITFLQKRLKKLGLKVRTYNCYNSWLTNDLYCGYVSYKDKVHVKGIHDPIISEEQFYRVQEIFTRMGKNPNMNRGSASLLNNLVVCGKCGLGFVHRRKDAMSRDKKYHYRYYSCKTYKHIHELEKCGNKIWRADELEELIINRVNNYSLASRNVDKEDGLDSLNEKLKIEHAKKKRLFDLYLNGSYEVSELDSMMDDIDAQISYYESQIEANEALIKNKKIQENLANLATVDFNGLEFREKQLYLKSLINKIYIDGEQVTIEWL

SEQ ID NO: 3037 - protein, 452 aa, synthetic construct
MKAAIYIRVSTREQVENYSIQAQTEKLTALCRSKDWDVYDIFVDGGYSGSNMNRPALNEMLSKLHEIDAVVVYRLDRLSRSQRDTITLIEEYFLKNNVEFVSLSETLDTSSPFGRAMIGILSVFAQLERETIRDRMVMGKIKRIEAGLPLTTAKGRTFGYDVIDTKLYINEEEAKQLQLIYDIFEEEQSITSLQKRLKKLGFKVHTYNRYNNWLTNDLYCGYVSYKDKVHVKGIHEPIISEEQFYRVQEIFTRMGKNPNMNRDSASLLNNLVVCSKCGLGFVHRRKDAMSRDKKYHYRYYSCKTYKHIHELEKCGNKIWRADELEELVINRVNSYSVASRNVDKEDELGSLNEKLKIEHAKKKRLFDLYINGSYEVSELDSMMNDIDAQINYYESQIEANEELKKNKKIQETLADLATVDYDSLEFREKQLYLKSLINKIYIDGEQVTIEWL

SEQ ID NO: 3038 - protein, 469 aa, synthetic construct
MHYTTPVRAAVYLRISEDRSGEQLGAARQREDCLKLCGQRKWVPVEYLDNDVSASTGKRRPAYEQMLADITAGKIAAVVAWDLDRLHRRPIELEAFMSLADEKRLALATVAGDVDLATPQGRLVARLKGCVAAHETEHKKARQRRAARQKAERGLPNWSKAFGYLPGPNGPEPDPRTAPLVKQAYADILAGASLGDVCRQWNDAGAFTITGRPWTTATLSKFLRKPRNAGLRAYKGARYGPVDRDAIVGKAQWSPLVDEATFWAAQAVLDAPGRTPGRKSVRRHLLTGLAGCGKCGNHLAGSYRTDGQIVYVCKACHGVSILAVNIEPILYHIVAERLAMPDAVDLLRREIPDAAEAETIRLELETLHGELDRLAVERAEGLLTARQVKISTDIVNAKMTKLQARQLDQERLRVFDGIPLGTPQVAGMIAELSPDRFRAVLDVLAEVVVQPVGKSSRIFNPERVQVNWR

SEQ ID NO: 3039 - protein, 452 aa, synthetic construct; identical to SEQ ID NO: 2108

SEQ ID NO: 3040 - protein, 485 aa, synthetic construct; identical to SEQ ID NO: 2109

SEQ ID NO: 3041 - protein, 485 aa, synthetic construct; identical to SEQ ID NO: 2110

SEQ ID NO: 3042 - protein, 485 aa, synthetic construct; identical to SEQ ID NO: 2111

SEQ ID NO: 3043 - protein, 469 aa, synthetic construct; identical to SEQ ID NO: 2112

SEQ ID NO: 3044 - protein, 469 aa, synthetic construct; identical to SEQ ID NO: 2113

SEQ ID NO: 3045 - protein, 485 aa, synthetic construct; identical to SEQ ID NO: 2114

SEQ ID NO: 3046 - protein, 452 aa, synthetic construct; identical to SEQ ID NO: 2115

SEQ ID NO: 3047 - protein, 485 aa, synthetic construct; identical to SEQ ID NO: 2116

SEQ ID NO: 3048 - protein, 452 aa, synthetic construct; identical to SEQ ID NO: 2117

SEQ ID NO: 3049 - protein, 469 aa, synthetic construct; identical to SEQ ID NO: 2118

SEQ ID NO: 3050 - protein, 485 aa, synthetic construct; identical to SEQ ID NO: 2119

SEQ ID NO: 3051 - protein, 469 aa, synthetic construct; identical to SEQ ID NO: 2120

SEQ ID NO: 3052 - protein, 485 aa, synthetic construct; identical to SEQ ID NO: 2121

SEQ ID NO: 3053 - protein, 469 aa, synthetic construct; identical to SEQ ID NO: 2122

SEQ ID NO: 3054 - protein, 452 aa, synthetic construct; identical to SEQ ID NO: 2123

SEQ ID NO: 3055 - protein, 469 aa, synthetic construct; identical to SEQ ID NO: 2124

SEQ ID NO: 3056 - protein, 469 aa, synthetic construct; identical to SEQ ID NO: 2125

SEQ ID NO: 3057 - protein, 485 aa, synthetic construct; identical to SEQ ID NO: 2126

SEQ ID NO: 3058 - protein, 452 aa, synthetic construct; identical to SEQ ID NO: 2127

SEQ ID NO: 3059 - protein, 452 aa, synthetic construct; identical to SEQ ID NO: 2128

SEQ ID NO: 3060 - protein, 452 aa, synthetic construct; identical to SEQ ID NO: 2129

SEQ ID NO: 3061 - protein, 485 aa, synthetic construct; identical to SEQ ID NO: 2130

SEQ ID NO: 3062 - protein, 485 aa, synthetic construct; identical to SEQ ID NO: 2131

SEQ ID NO: 3063 - protein, 469 aa, synthetic construct; identical to SEQ ID NO: 2132

SEQ ID NO: 3064 - protein, 485 aa, synthetic construct; identical to SEQ ID NO: 2133

SEQ ID NO: 3065 - protein, 485 aa, synthetic construct; identical to SEQ ID NO: 2134

SEQ ID NO: 3066 - protein, 485 aa, synthetic construct; identical to SEQ ID NO: 2135

SEQ ID NO: 3067 - protein, 469 aa, synthetic construct; identical to SEQ ID NO: 2136

SEQ ID NO: 3068 - protein, 452 aa, synthetic construct; identical to SEQ ID NO: 2137

SEQ ID NO: 3069 - protein, 486 aa, synthetic construct; identical to SEQ ID NO: 2138

SEQ ID NO: 3070 - protein, 469 aa, synthetic construct; identical to SEQ ID NO: 2139

SEQ ID NO: 3071 - protein, 484 aa, synthetic construct; identical to SEQ ID NO: 2140

SEQ ID NO: 3072 - protein, 485 aa, synthetic construct; identical to SEQ ID NO: 2141

SEQ ID NO: 3073 - protein, 452 aa, synthetic construct; identical to SEQ ID NO: 2142

SEQ ID NO: 3074 - protein, 452 aa, synthetic construct; identical to SEQ ID NO: 2143

SEQ ID NO: 3075 - protein, 452 aa, synthetic construct; identical to SEQ ID NO: 2144

SEQ ID NO: 3076 - protein, 452 aa, synthetic construct; identical to SEQ ID NO: 2145

SEQ ID NO: 3077 - protein, 469 aa, synthetic construct; identical to SEQ ID NO: 2146

SEQ ID NO: 3078 - protein, 485 aa, synthetic construct; identical to SEQ ID NO: 2147

SEQ ID NO: 3079 - protein, 452 aa, synthetic construct; identical to SEQ ID NO: 2148

SEQ ID NO: 3080 - protein, 485 aa, synthetic construct; identical to SEQ ID NO: 2149

SEQ ID NO: 3081 - protein, 469 aa, synthetic construct; identical to SEQ ID NO: 2150

SEQ ID NO: 3082 - protein, 485 aa, synthetic construct; identical to SEQ ID NO: 2151

SEQ ID NO: 3083 - protein, 485 aa, synthetic construct; identical to SEQ ID NO: 2152

SEQ ID NO: 3084 - protein, 485 aa, synthetic construct; identical to SEQ ID NO: 2153

SEQ ID NO: 3085 - protein, 485 aa, synthetic construct; identical to SEQ ID NO: 2154

SEQ ID NO: 3086 - protein, 485 aa, synthetic construct
MTKKVAIYTRVSTTNQAEEGFSIDEQIDRLTKYAEAMGWQVCDTYTDAGLSGAKLERPAMQRLINDIENKAFDTVLVYKLDRLSRSVRDTLYLVKEVFTKNKIDFVSLNESIDTSSAMGSLFLTILSAINEFERENIKERMTMGKLGRAKSGKSMMWTKTAFGYYHDRKTGILEIVPLQATIVEQIFTDYLSGISLTKLRDKLNESGHIGKDIPWSYRTLRQTLDNPVYCGYIKFKDSLFEGMHKPIIPYETYLKVQKELEERQQQTYERNNNPRPFQAKYMLSGMARCGYCGAPLKIVLGHKRKDGSRTMKYHCANRFPRKTKGVTVYNDNKKCDSGAYDLSNLENTVIDNLIGFQENNDSLLKIINGNNQPVLDTSSFKKQISQIDKKIRKNSDLYLNDFITMDELKDRTDSLQAEKKLLKAKISENKFNDSTDVFELVKTQLGNIPINELSYDNKKKIVNNLVSKVDVTADNVDIIFKFQLA

SEQ ID NO: 3087 - protein, 485 aa, synthetic construct
MTRKVAIYTRVSTTNQAEEGFSIDEQIDRLTKYAEAMGWQVSDTYTDAGLSGAKLERPAMQRLINDIENKAFDTVLVYKLDRLSRSVRDTLYLVKDVFTRNKIDFISLNESIDTSSAMGSLFLTILSAINEFERENIKERMTMGKLGRAKSGKSMMWTKTAFGYYHNRKTGILEIVPLQATIVEQIFTDYLSGISLTKLRDKLNESGHIGKDIPWSYRTLRQTLDNPVYCGYIKFKDSLFEGMHKPIIPYETYLKVQKELEERQQQTCERNNNPRPFQAKYMLSGMARCGYCGAPLRIVLGHKRKDGSRTMKYHCTNRFPRKTKGITVYNDNKKCDSGTYDLSNLENTVIDILIGFQENNDSLLKIINGNNQPILETSSFKKRISQIDKKIQKNSDLYLNDFITMDELKGRTDSLQAEKKLLKAKISENKFNDSTDVFELVKTQLGSIPINELSYDNKKRIVNDLVSKVDVTADNVDVIFKFQLA

SEQ ID NO: 3088 - protein, 452 aa, synthetic construct
MKAAIYIRVSTQEQVGNYSIQAQTEKLTALCRSKDWDVYDIFIDGGYSGSNMDRPALNEMLSKLHEIDAVVVYRLDRLSRSQRDTTTLIEEYFLKNNVEFVSLSETLDTSSPFGRAMIGILSVFAQLERETIRDRMVMGKIKRIEAGLPLTTAKGRTFGYDVIDTKLYINEEEAKQLQLIYDIFEEEQSITSLQKRLKKLGLKVRTYNRYNNWLTNDLYCGYVSYKDKVHVKGIHEPIISEEQFYRVQEIFTRMGKNPNMNRDSASLLNNLVVCGKCGLGFVHRSKDTMCRGKKYHYRYYSCKTYKHTHELEKCGNKTWRADKLEELIINRVNNYSFASRNADKEDELDSLNEKLKIEHARKKRLFDLYINGSYEVSELDSMMNDIDAQINYYESQIEASEELKKNKKIQENLADLATVDFDRLEFREKQLYLKSLINKIYIDGEQVTIDWL

SEQ ID NO: 3089 - protein, 485 aa, synthetic construct
MTKKVAIYTRVSTTNQAEEGFSIDEQIDRLTKYAEAMGWQVGDTYTDAGFSGAKLERPAMQRLINDIENKAFDTVLVYKLDRLSRSVRDTLYLVKDVFTKNKIDFISLSESIDTSSAMGSLFLTILSAINEFERENIKERMTMGKLGRAKSGKSMMWTKTAFGYYHNRRTGILEIVPLQATIVEQIFTDYLSGISLTKLRDKLNESGHIGKDIPWSYRTLRQTLDNPVYCGYIKFKDSLFEGMHKPIIPYETYLKVQKELEERQQQAYERNNNPRPFQAKYMLSGMARCGYCGAPLRIVLGHKRKDGSRTMKYHCANRFPRKTKGITVYNDNKKCDSGTYDLSNLENTVIDNLIGLQENNDSLLKAINGNNQPILDTSSFKKQISQIDKKIQKNSDLYLNDFITMDELKDRTDDLQAEKKLLKAKISGNKFNDSTDVFELVKTQLGSVPINELSYDDKKKIVNNLVSKVDVTADSVDIIFKFQLA

SEQ ID NO: 3090 - protein, 469 aa, synthetic construct
MSYTTPVRAAVYLRVSEDRSGEQLGVARQREDCLKLCGQRKWEPVEYLDNDVSASTGKRRPAYEQMLADITAGKIAAVVAWDLDRLHRRPIELEAFMSLADEKRLALATVAGDVDLATPQGRLVARLKGSVAAHETEHKKARQRRAARQKAERGHPNWSKAFGYLPGPNGPEPDPRTAPLVKQAYTDILAGASLGDVCRRWNDAGAFTITGRPWTTTTLSKFLRKPRNAGLRAYKGARYGPVDRDAIVGKAQWSPLVDEATFWAAQAVLDAPGRAPGRKSVRRHLLTGLAGCGKCGNRLAGSYRTDGRVVYVCKACYGVAILADNIEPILYHIVAERLAKPDAVDLLRREIHDAAEAETIRLELETLYGELDRLAVERAEGLLTARQVKISTDIVNAKITKLQARQLDQERLRVFDGIPLGTPQVVGTIAELSPDRFRAVLDVLAEVVVQPVGKSGRIFNPERVQVNWR

SEQ ID NO: 3091 - protein, 452 aa, synthetic construct
MKAAIYIRVSTREQVENYSIQAQTEKLTALCRSKDWDVYDIFIDGGYSGSNMNRPALNEMLSKLHEIDAVVVYRLDRLSRSQRDTITLIEEYFLKNNVEFVSLSETLDTSSPFGRAMIGILSVFAQLERETIRDRMVMGKIKRIEAGLPLTTAKGRTFGYDVIDTKLYINEEEAKQLQLIYDIFEEEQSITFLQKRLKKLGFKVRTYNCYNNWLTNDLYCGYVRYKDKVRVRGIHEPIISEEQFYRVQKIFTRMGKNPNMNRDSASLLNNLVVCSKCGLGFVHRRKDAMSRDKKYHYRYYSCKTYKHIHELEKCGNKIWRADKLEELIISRVNNYSLASRNVDKEDELDSLNEKLKIEHAKKKRLFELYINGSYEVSELDSMMNDIDAQINYYESQIEANKELKKNKKIQENLAHLATVDFDSLEFREKQLYLKSLINKIYIDGEQVTIEWL

SEQ ID NO: 3092 - protein, 485 aa, synthetic construct
MTKKVAIYTRVSTTNQAEEGFSIDEQIDRLTKYAEAMGWQVSDTYTDAGLSGAKLERPAMQRLINDIENKAFDTVLVYKLDRLSRSVRDTLYLVKDVFTKNKIDFISLSESIDTSSAMGSLFLTILSAINEFERENIKERMSMGKLGRAKSGKSMMWTKTAFGYYHNRETGILEIVPLQATIVEQIFTDYLSGISLTKLRDKLNEGGHIGKDIPWSYRTLRQTLDNPVYCGYIKFKDSLFEGMHKPIIPYETYLEVQKELEVRQQQTYERNNNPRPFQAKYMLSGMARCGYCGAPLRIVLGHKRKDGSRTMKYHCANRFPRRTKGVTVYNDNKKCDSGTYDLSNLENTVIDNLIGFQENNDSLLKIINGNNQPILDTSSFKEQISQIDKKIQKNSDLYLNDFITMDELKDRTDSLQAERKLLEAKIRGNKFNDSTDVFELVRTQLGSIPINELSYDNKKKIVNNLVSKVDVTADNVDIIFKFQLA

SEQ ID NO: 3093 - protein, 452 aa, synthetic construct
MKAAIYIRVSTQEQVGNYSIQAQTEKLTALCRSKDWDVYDIFIDGGYSGSNMNRPALNEMLSKLHEIDAVVVYRLDRLSRSQRDTTTLIEEYFLKNNVEFVSLSETLDTSSPFGRAMIGILSVFAQLERETIRDRMVMGKIKRIEAGLPLTTAKGRTFGYDVIDTKLYINEEEAKQLRLIYDIFEEEQSITSLQKRLKKLGFKVRTYNRYNNWLTNDLYCGYVSYKDKVHVKGIHEPIISEEQFYRVQEIFTRMGKNPNMNRDSASLLSNLVVCSKCGLGFVHRSKDTMSRGRKYHYRYYSCKTYKHTHELEKCGNKTWRADKLEELIINRVNNYSFASRNADKEDELDSLNGKLKIEHARKKRLFDLYINGSYEVSELDSMMNDIDAQINYYEGQIEANEELRRNKKIQENLADLATVDFDSLEFREKQLYLKSLINKIYIDGEQVTIEWL

SEQ ID NO: 3094 - protein, 469 aa, synthetic construct
MCNTTPVRAAVYLRISEDRSGEQLGVARQREDCLKLCDQRKWVPVEYLDNDVSASTGKRRPAYEQMLADITAGKIAAVVAWDLDRLHRRPIELEAFMSLADEKRLALATVAGDVDLATPQGRLVARLKGSVAAHETEHKKARQRRAARQKAERGHPNWSKAFGYLPGPNGPEPDPRTAPLVKRAYADILAGASLGDVCRQWNGAGAFTITGRSWTPTTLSKFLRKPRNAGLRAYKGARYGPVDRDAIVGKAQWSPLVDEATFWAAQAVLDAPGRAPGRKSVRRHLLTGLAGCGKCGNHLAGSYRTDGRVVYVCKACHGVAILAENIEPILYHTVAERLTMPDAVDLLRREVHDVAEAETIRLELETLHGELDRLAVERAEGLLTARQVKICTDIVSAKITKLQARQQDQERLRVFDGIPLGTPQVAGMIAELSPDRFRAVLDVLAEVVVQPVGKSGRVSNPERVQVNWR

SEQ ID NO: 3095 - protein, 485 aa, synthetic construct
MTKKVAIYTRVSTTNQAEEGFSIDEQIDRLTKYAEAMGWQVSDTYTDAGLSGAKLERPAMQRLINDIENKAFDTVLVYKLDRLSRSVRDTLYLVKDVFTKNKIDFISLNESIDTSSAMGSLFLTILSAINEFERENIKERMTMGKLGRAKSGKSMMWTKTAFGYYHNRKTGILEIVPLQATIVEQIFTDYLSGISLTKLRDKLNESGHIGKDIPWSYRTLRQTLDNPVYCGYIKFKDSLFEGMHKPIIPYETYLKAQRELEERQQQTYERNNNPRPFQAKYMLSGMARCGYCGAPLRIVLGRKRKDGSRTMKYHCANRFPRKTKGVTVYNDNKKCDSGTYDLSNLENTVIDILIGFQENNDSLLKIINGNNQPFLDTSSLKKQISQIDKKIQKNSDLYLNGFITMDELKDRTDSLQAEKKLLQARISENKFNDSTDVFELVKTQLGSIPINELSYDDKKKIVNNLVSKVDVTADNVDIIFKFQLA

SEQ ID NO: 3096 - protein, 452 aa, synthetic construct; identical to SEQ ID NO: 1110

SEQ ID NO: 3097 - protein, 452 aa, synthetic construct
MKAAIYIRVSTREQVENYSIQAQTEKLTALCRSKGWDVYDIFIDGGYSGSNMNRPALNEMLSKLHEIDAVVVYRLDRLSRSQRDTITLIEEYFLKNNVEFVSLSETLDTSSPFGRAMIGILSVFAQLERETIRDRMVMGKIKRIEAGLPLTTAKGRTFGYDVIDAKLYINEEEAKQLRLIYDIFEEERSITSLQKRLKKLGFKVRTYNCYNNWLTNDLYCGYVSYKDRVHVKGIHEPIISEEQFYRVQEIFTRMGKNPNMNRDSASLLNNLVVCSKCGLGFVHRRKDAMSRDKKYHYRYYSCKTYKHIHELEKCGNKIWRADKLEELVINRVNNYSLASRNVDKEDELGSLNEKLKAEHAKKKRLFDLYINGRYEVSELDSMMNDIDAQINYYESQIEANEELKKNKRIQENLAYLATVDFDSLEFREKQLYLKSLINKIYIDGEQVTIEWL

SEQ ID NO: 3098 - protein, 452 aa, synthetic construct
MKAAIYIRVSTQEQVENYSIQAQTEKLTALCRSKDWDVYDIFIDGGYSGSNMNRPALNEMLSKLHEIDAVVVYRLDRLSRSQRDTTTLIEEYFLKNNVEFVSLSETLDTSSPFGRAMIGILSVFAQLERETIRDRMVMGKIKRIEAGLPLTTAKGRTFGYDVIDTKLYINEEEAKQLQLIYDIFEEEQSITSLQKRLKKLGFKVRTYNRYNNWLTNDLYCGYVSYKDKVHVKGIHEPIISEEQFYRVQEIFARMGKNSNMNRDSASLLNNLVVCSKCGLGFVHRSKDTMSRGKKYHYRYYSCKTYKHTHELEKCGNKTWRADKLEELIINRVNNYSIVSRNVDKEDELDNLNEKLKIEHAKKKRLFDLYINGSYEVSELDSMMNDIDAQINYYESQIEANEELRKNRKIQENLADLATVDFDGLEFRDKQLYLKSLINKIYIDGEQVTIEWL

SEQ ID NO: 3099 - protein, 452 aa, synthetic construct
MKAAIYIRVSTREQVENYSIRAQTEKLTALCRSKDWDVYDIFVDGGYSGSNMNRPALNEMLSKLHEVDAVVVYRLDRLSRSQRDTITLIEEYFLKNNVEFVSLSETLDTSSPFGRAMIGILSVFAQLERETIRDRMVMGKIKRIEAGLPLTTAKGRTFGYDVIDTKLYINEEEAKQLQLIYDIFEEEQSITFLQKRLKKLGFKVRTYSCYNNWLTNDLYCGYVSYKDKVHVKGIHEPIISEEQFYRVQEIFTRMGKNPNMNRDSASLLNNLVVCSKCGLGFVHRRKDTMSRGKKYHYRYYSCKTYKHTHELEKCGNKIWRADKLEELIINRVNNYSFASRNVDKEDELDSLNEKLKIEHAKKKRLFDLYINGSYEVSELDCMMNNIDAQINYYESQIEANEKLKKDKKIQESLANLATVDYDSLEFREKQLYLKSLINKIYIDGEQVAIEWL

SEQ ID NO: 3100 - protein, 469 aa, synthetic construct
MSYTTPVRAAVYLRISEDRSGEQLGVARQREDCLKLCDQRKWVPVEYLDNDVSASTGKRRPAYEQMLADITAGKIAAVVAWDLDRLHRRPLELEAFMSLADEKRLALATVAGDVDLATPQGRLVARLKGSVAAHETEHKKARQRRAARQKAERGHPNWSKAFGYLPGASGPEPDPRTAPLVKQAYADILAGASLGDVCRQWNDAGAFTITGRPWTTTTLSKFLRKPRNAGLRAYKGARYGPVDRDAIVGKAQWSPLVDEATFWAAQAVLDAPGRAPGRKSVRRHLLTGLAGCGKCGNHLSGSYRTDGRVVYVCKACHGVAILADNIEPILYHIVAERLAMPDAVDLLRREIHDAAEAGTIRLELETLYGELDRLAVERAEGLLTARQVKISTDIVNAKIAKLQARQLDQERLRVLDGIPLGTPQVAGMIAELSPDRFRAVLDVLAEVVVQPVGKSGRIFNPERVQVNWR

SEQ ID NO: 3101 - protein, 469 aa, synthetic construct
MSYTTPVRAAVYLRISEDRSGEQLGVARQREDCLKLCDQRKWVPVEYLDNDVSASTGKRRPAYEQMLADITAGTIAAVVAWDLDRLHRRPIELEAFMSLADEKRLALATVAGDVDLATPQGRLVARLKGSVAAHETEHKKARQRRAARQKAERGHPNWSKAFGYLPGPNGPEPDPRTAPLVKQAYADILAGASLGDVCRQWNDAGAFTITGRPWTTTTLSKFLRKPRNAGLRAYKGARYGPVDRDAIVGKAQWSPLVDEATFWAAQAVLDAPGRAPGRKSVRRHLLTGLAGCGKCGNHLAGSYRTDGQVVYVCKVCHGVSILAVNIVPILYHIVAERLAMPDAVDLLRREIHDAAEAEAIRLELETLYGELDRLAVERAEGLLTARQVKIGTDIVNAKITKLQARQLDQDRLRVLGGIPLGTPQVAGMIAELSPDRFRAVLDVLAEVVVQPVGKGGRIFNPERVQVNWR

SEQ ID NO: 3102 - protein, 452 aa, synthetic construct
MKAAIYIRVSTREQVENYSIQAQTEKLTALCHSKDWDVYDIFIDGGYSGSNMNRPALNEMLSKLHEIDAVVVYRLDRLSRSQRDTITLIEEYFLKNNVEFVSLSETLDTSSPFGRAMIGILSVFAQLERETIRDRMVMGKIKRIEAGLPLTTAKGRTFGYDVIDTKLYINEEEAKQLQLIYDIFEEERSITFLQKRLKKLGFKVRTYNCYNNWLTNDLYCGYVSYKDKVHVKGIHEPIISEEQFYRVQEIFARMGRSPNINRDSASLLNNLVVCSKCGLGFVHRRKDASSRDKKYHYRYYSCKTYKHIHELEKCGNKIWRADKLEELIINRVNNYSLASRNVDKEDELDSLNEKLKTEHAKKRRLFDLYINGSYEVSELDSMMNDIDAQISYYESQIEANEELKKNKKIQENLADLATVDFDSLEFREKQLYLKSLINKIYIDGEQVTIEWL

SEQ ID NO: 3103 - protein, 452 aa, synthetic construct
MKAAIYIRVSTREQVENYSIQAQTEKLTALCRSKDWDVYDIFIDGGYSGSNMNRPALNEMLSKLHEIDAVVVYRLDRLSRSQRDTITLIEEYFLKNNVEFVSLSETLDTSSPFGRAMIGILSVFAQLERETIRDRMVMGKIKRIEAGLPLTTAKGRTFGYDVIDTKLYINEEEAKQLQLIYDIFEEEQSITFLQKRLKKLGFKVHTYNRYNNWLTNDLYCGYVSYKDKVRVKGIHEPIISEEQFYRVQEIFTRMGKNPNMNRDSASLLNNLVVCGKCGLGFVHRRKDIMSRDKKYHYRYYSCKTYKHIHELEKCGNKIWRADKLEELIINRVNNYSFASRNAGKEDELDSLNEKLKIEHAKKGRLFELYINGRYEVSELDSMMNDIDAQINYYESQIEANEELKKNKQIQENLANLATVDFDSLEFREKQRYLKSLINKIYIDGEQVTIEWL

SEQ ID NO: 3104 - protein, 452 aa, synthetic construct
MKAAIYIRVSTREQVENYSIQAQTEKLTALCRSKDWDVYDIFIDGGYSGSNMNRPALNEMLSKLHEIDAVVVYRLDRLSRSQRDTITLIEEYFLKNNVEFVSLSETLDTSSPFGRAMIGILSVFAQLERETIRDRMVMGKIKRIEAGLPLTTAKGRTFGYDVIDTKLYINEEEAKQLQLIYDIFEEEQSITYLQKRLKRLGFKVRTYSRYNSWLTNDLYCGYVSYKDKVHVKGIHEPIISEEQFYRVQEIFTRMGKNPNMNRDSASLLNNLVVCSKCGLSFVHRRKDTMSRGKKYHYRYYSCKTYKYTHELEKCGNKIWRADKLEELIINRVNSYSSASRNVDKEDELDSLNEKLKTEHAKKKRLFDLYINGSYEVSELDSMMNDIDAQINYYESQIEANEELKKNKKIQENLANLATVDFDGLEFREKQLYLKSLINKIYIDGEQVIIEWL

SEQ ID NO: 3105 - protein, 469 aa, synthetic construct
MSYTTPVRAAVYLRISEDRSGEQLGVARQREDCLKLCGQRKWVPVEYLDNDVSASTGKRRPAYEQMLADITAGKIAAVVAWDLDRLHRRPIELEAFMSLADEKRLALATVAGDVDLATPQGRLVARLKGCVAAHETEHKKARQRRAARQKAERGHPNWNKAFGYLPGPNGPEPDPRTAPLVKQAYADILAGASLGDVCRQWNDAGAFTITGRPWTTTTLSKFLRKPRNAGLRAYKGARYGPVDRDAIVGKAQWGPLVDEATFWAAQAVLDAPGRAPGRKSVRRHLLTGLAGCGKCGSHLAGSYRTDGRVVYVCKACYGVAILADNIEPILYHIVAEHLATPDAVGLLRCEIHDAAEAETIRLELETLYGELDRLAVERAEGLLTARQVKISTDIVNAKITKLQARQLDQERLRVFDGIPLGTPQVAGMIAELSPDRFRAVLDVLAEVVVQPVGKRGRIFNPERVQVNWR

SEQ ID NO: 3106 - protein, 469 aa, synthetic construct
MSYTTPVRAAVYLRISEDRSGEQLGVARQREDCLELCGQRKWVPVEYLDNDVSASTGKRRPAYEQMLADITAGKIAAVVAWDLDRLHRRPIELEAFMSLADEKRLALATVAGDVDLATPQGRLVARLKGSVAAHETEHKKARQRRAARQKAERGYPNWSKAFGYLQGPNGPEPDPRTAPLVKQAYADILAGASLGDVCRQWNDAGAFTITGRPWTTTTLSKFLRKPRNAGLRAYKGARYGPIDRDAIVGKAQWSPLVDEATFWAAQAVLDAPGRAPGRKSVRRHLLTGLAGCGKCGNHLAGSYRTDGRVVYVCKACHGVAILADNIEPILYHVVAERLAMPDAVDLLRREIPDAAEARTIRLELETLYGELDRLAVERAEGLLTARQVKISTDIVNAKITKLQARQLDQERLRVFDGIPLGTPQVADMIAELSPDRFRAVLDVLAEVVVQPVGKGGRIFNPERVQVNWR

SEQ ID NO: 3107 - protein, 452 aa, synthetic construct
MKAAIYIRVSTREQVENYSIQAQTEKLTALCRSKDWDVYDIFIDGGYSGSNTNRPALNEMLSKLHEIDAVVVYRLDRLSRSQRDTITLIEEYFLKNNVEFVSLSETLDTSSPFGRAMIGILSVFAQLERETIRDRMVMGKIKRIEAGLPLTTAKGRTFGYDVIDTKLYINEEEAKQLQLIYDIFEEEQSITSLQKRLKKLGFKVHTYNRYNSWLTNDLYCGYVSYKDKVHVKGIHEPIISEEQFHRVQEIFTRMGKNPNMNRDSASLLNNLVVCSKCGLGFVHRRKDTMSRGKKYHYRYYSCKTYKHTHELEKCGNKIWRADKLEELIINRVNNYGFASRNVDKEDELDSLNEKLKIEHAKRKRLFDLYINGSYEVSELDSMMNDIDAQINYYESQIEANEGLKKDKKIQENLANLATMDYDSLEFREKQLYLKSLINKIYIDGEQVTIEWL

SEQ ID NO: 3108 - protein, 485 aa, synthetic construct
MTKKVAIYTRVSTTNQAEEGFSIDEQIDRLTKYAEAMGWQVSNTYTDAGFSGAKLERPAMQRLINDIENKAFDTVLVYKLDRLSRSVRDTLHLVKDVFTKNKIDFISLNESIDTSSAMGSLFLTILSAINEFERENIKERMTMGKLGRAKSGKSMMWTKTAFGYYHDRKTGILEIVPLQATIVEQIFTDYLSGISLTKLRDKLNESGHIGKDIPWSYRTLRQTLDNPVYCGYIKFKDSLFEGMHKPIIPYETYLKVQKELEERQQWAYKRNNNPRPFQAKYMLSGMARCGYCGAPLKIVLGHKRKDGSRTMKYHCANRFPRKTKGVTVYNDNKRCDSGTYDLSSLESTVVDNLIGFQENNDSLLKIINGNNQPILDTSSFEKQISLIDKKIQKNSDLYLNDFITMDELKDRTDSLQAEKKLLKAKISENKFNDSTDVFELVKTQLGSIPINELSYDNKKKIVNNLVSKVDVTADNVDIIFKFQLA

SEQ ID NO: 3109 - protein, 469 aa, synthetic construct
MSYTTPVRAAVYLRISEDRSGEQLGVARQREDCLKLCGQRKWVPVEYLDNDVSASTGKRRPAYEQMLADITAGKIAAVVAWDLDRLHRRPIELEAFMSLADEKRLALATVAGDVDLATPQGRLVARLKGCVAAHETEHKKARQRRAARQKAERGLPNWSKAFGYLPGPNGPEPDPQTAPLVKQAYADILAGASLGDVCRQWNDAGACTITGRPWTTTALSKFLRKPRNAGLRAYKGARYGPVDRDAIVGRARWSPLVDEATFWAAQAVLDAPGRAPGRKSVRRHLLTGLAGCGKCGNHLAGSYRSDGQVVYVCKACHGVSILAVNIEPILYHIVAERLAMPDAVDLLRREVHDAAEAETIRLELETLYGELDRLAVERAEGLLTARQVKISTDIVNAKITKLQARQLDQERLRVFDGIPLGTPQVAGMIAELSPDRFRAVLDVLAEVVVQPVGKSGRIFNPERVQVNWR

SEQ ID NO: 3110 - protein, 469 aa, synthetic construct
MSYTTPVRAAVYLRISEDRSGEQLGVARQREDCLKLCGQRKWVPVEYLDNDVSASTGKRRPAYEQMLADITAGKIAAVVAWDLDRLHRRPIELEAFMSLADEKRLALATVAGDVDLATPQGRLVARLKGSVAAHETEHKKARQRRAARQKAERGLPNWSKAFGYLPGPNGPEPDPRTAPLVKQAYADILAGTSLGDVCRQWNGAGAFTVTGRLWTTTALSKFLRKPRNAGLRAYKGARYGPVDRDAIVGKAQWSPLVDEATFWAAQAVLDAPGRAPGRKSVRRHLLTGLAGCGKCGNHLAGSYRTDGRVVYVCKACHGVAILADNIEPILYHIVAERLAMPGAVDLLRREIYDAAEAETIRLELETLHGELDRLAVERAEGLLTARQVKISTDIVDAKITKLQARQLDQERLRVFDGIPLGTPQAAGMIAELSPDRFRAVLDVLAEVVVQPVGKCGRISNPERVQVNWR

SEQ ID NO: 3111 - protein, 452 aa, synthetic construct
MKAAIYIRVSTREQVENYSIQAQTEKLTALCRSKDWDVYDIFIDGGYSGSNMNRPALNEMLSKLHEIDAVVVYRLDRLSRSQRDTITLIEEYFLKNNVEFVSLSETLDTSSPFGRAMIGILSVFAQLERETIRDRMVMGKIKRIEAGLPLTTAKGRTFGYDVIDTKLYINEEEAKQLQLIYDIFEEEQSITFLQKRLKKLGFKVRTYNCYNNWLTNDLYCGYVSYKDKVHVKGIHEPIISEEQFYRVQEIFARMGKNPNMNRDSASLLNNLVVCSRCGLGFVHRRKDTMSRGKRYHYRYYSCKTYKHTHELEKCGNKIWRADKLEELIINRVNNYSFASRNVDKEDELDSLNEKLKIEHAKKKRLFDLYINGSYEVGELDSMMNDIDAQINYYESQIEANEELKKNKKIQENLADLATVDFDSLEFREKQLYLKSLINKIYIDGEQVTIEWL

SEQ ID NO: 3112 - protein, 485 aa, synthetic construct
MTKKVAIYTRVSTTNQAEEGFSIDEQIDRLTKYAEAMGWQVSDTYTDAGFSGAKLGRPAMQRLINDIENKAFDIVLVYKLDRLSRSVRDTLYLVKDVFTKNKIDFISLNESIDTSSAMGSLFLTILSAINEFERENIKERMTMGKLGRAKSGKSMMWTKTAFGYYHNRKTGILEIVPLQATIVEQIFTDYLSGISLTKLRDKLNESGHIGKDIPWSYRTLRQTLDNPVYCGYIKFKDRLFEGMHKPIIPYETYLKVQKELEERQQQTYERNNNPRPFQAKYMLSGMARCGYCGAPLKVVLGHKRKDGSRTMKYHCANRFPRKIKGVTVYNDNKKCDSGTYDLSDLENTVIDNLIGSQENNDSLLKILNGNNQPILDTSSFKKQISQIDKKIQKNSDLYLNDFITMDELKDRTDSLQAEKKLLKAKISENKFNDSTDVFELVKTQLGSIPINELSYDNKKKIVNNLVSKVDVTADNVDIIFKFQLA

SEQ ID NO: 3113 - protein, 485 aa, synthetic construct
MTKKVAIYTRVSTTNQAEEGFSIDEQIDRLTKYAEAMGWQVSDTYTDAGISGAKLERPAMQRLINDIENKAFDTVLVYKLDRLSRSVRDTLYLVKDVFTKNKIDFISLNESIDTSSAMGSLFLTILSAINEFERENIKERMTMGKLGRAKSGKSMMWTKTAFGYYHNRRTGILEIVPLQAAIVEQIFTDYLSGISLTKLRDKLNESGHIGKDIPWSYRTLRQTLDNPVYCGYIKFKDSLFEGMHKPIIPYETYLKVQKELEERQQQAYERNNNPRPFQAKYMLSGMARCGYCGAPLRIVLGHKRKDGSRTMKYHCANRFPRKTKGVTVYNDNKKCDSGTYDLSDLENTVIDNLIGLQENNDSLLKIINGNNRPILDTSSFKKQISQIDKRIQKNSDLYLNDFITMDELKNRTDSLQAEKKLLRAKISESISNDSIDVFELVKTQLGSIPINELSYDNKKKIVNNLVSKVDVTADNVDIIFKFQLA

SEQ ID NO: 3114 - protein, 452 aa, synthetic construct
MKAAIYIRVSTREQVENYSIQAQTEKLTALCRSKDWDVYDIFIDGGYSGSNMNRPALNEMLSRLHEIDAVVVYRLDRLSRSQRDTITLIEEYFLKNNVEFVSLSETLDTSSPFGRAMIGILSVFAQLERETIRDRMVMGKIKRIEAGLPLTTAKGRTFGYDVIDTKLYINEEEAKQLRLIYDIFEEEQSITFLQKRLKKLGFKVRTYSRYNNWLTNDLYCGYVSYKDKVHVKGIHEPIISEEQFYRVQEIFTRMGKNPNMNRDSASLLNNLVVCGKCGLGFVHRRKDTMSRGKKYHYRYYSCKTYKHTHELEKCGNKIWRADKLEELIINRVNNYSFASRNMDKEDELDSLNEKLKIEHAKKKRLFDLYINGSCEVSELDGMMSDIDAQINHYESQIEANEELKKDKKIQESLANLATVDYDSLEFREKQLYLKSLINKIYIDGEQVTIEWL

SEQ ID NO: 3115 - protein, 485 aa, synthetic construct
MTKKVAIYTRVSTTSQAEEGFSIDEQIDRLTKYAEAMGWQVSDTYTDAGVSGAKLERPAMQRLISDIENKAFDTVLVYKLDRLSRSVRDTLYLVKDVFTKNKIDFISLNESIDTSSAMGSLFLTFLSAINEFERESIKERMTMGKLGRAKSGKSMMWTKTAFGYYHNRKTGILEIVPQQATIVEQIFTDYLSGISLTKLRDKLNESGHIGKDIPWSYRTLRQTLDNPVYCGYIKFKDSLFEGMHKPIIPYETYLKVQKELEERQQQTYERNNNPRPFQAKYMLSGMARCGYCGAPLRIVLGHKRKDGSRTMKYHCANRFPRKTKGVTVYNDNKKCDSGIYDLSNLENTVIDNLIGFQENNDSLLKIINGNNQPILDTSSFREQISQIDKKIQKNSDLYLNDFITMDELKVRTDSLQAEKRLLKAKISENKFNNSTDVFELVKTQLGSIPINELSYDNKKKIVNSLVSKVDVTADNVDIIFKFQLA

SEQ ID NO: 3116 - protein, 452 aa, synthetic construct
MKAAIYIRVSTREQVENYSIQAQTEKLTALCRSKDWDVYDIFIDGGYSGSNMNRPALNEMLSKLHEIDAVVVYRLDRLSRSQRDTITLIEEYFLKNNVEFVSLSETLDTSSPFGRAMIGILSVFAQLERETIRDRMVMGKIKRIEAGLPLTTAKGRTFGYDVIDTKLYINEEEAKQLRLIYDIFEEEQSITFLQRRLKKLGLKVRTYNRYNNWLTNDLYCGYVSYKDKVHVKGIHEPIISEEQFYRVQEIFTRMGKNPNMNRDSASLLNNLVVCGKCGLGFVHRRKDAMSRDKKYHYRYYSCKTYKHIHELEKCGNKIWRADKLEELVINRVNSYSLASRNVDKEDELDSLNEKLRTEHAKKKRLFDLYINGSYEVSELDSMMNDIDAQINYYESQIEANEELKKNKKIQETLADLATVDFDSLEFREKQLYLKSLINKIYIDGEQVTIEWL

SEQ ID NO: 3117 - protein, 452 aa, synthetic construct
MKAAIYIRVSTQEQVGNYSIQAQTEKLTALCRSKGWDVYDIFIDGGYSGSNMNRPALNEMLSKLHEIDAVVVYRLDRLSRSQRDTTTLIEEYFLKNNVEFVSLSETLDTSSPFGRAMIGILSVFAQLERETIRDRMVMGKIKRIEAGLPLTTAKGRTFGYDVIDTKLYVNEEEAKQLRLIYDIFEEEQSITFLQKRLKKLGFKVRTYNRYSNWLTNDLYCGYVSYKDKVHVKGIHEPIISEEQFYRVQEIFTRMGKNPNMNRDSASLLNNLVVCSKCGLGFVHRRKDTMSGGKKYHYRYYSCKTYKHTHELEKCGNKTWRADKLEELIINRVNNYSLASRDVDKEDELDSLNEKLKVEHAKKKRLFDLYINGSYEVSELDSMMNDIDAQINYYEGRIEANEELKRNKKIQENLAGPATVDFDSLEFREKRLYLKSLINKIYIDGEQVTIEWL

SEQ ID NO: 3118 - protein, 452 aa, synthetic construct
MKAAIYIRVSTREQVENYSTQAQTEKLTALCRSKDWDVYDIFIDGGYSGSNMNRPALNKMLSKLHEIDAVVVYRLDRLSRSQRDTVTLIEEYFLKNNVEFVSLSETLDTSSPFGRAMIGILSVFAQLERETIRDRMVMGKIKRIEAGLPLTTAKGRTFGYDVIDTKLYINEEEAKQLQLIYDIFEEEQSITFLQKRLKKLGFKVRTYSCYNNWLTNDLYCGYVSYKDKVHVKGIHEPIISEEQFCRVQEIFARMGKNPNMNRDSASLLNSLVVCSRCGLGFVHRRKDTMSRGKKYHYRYYSCKTYKHIHELEKCGNKIWRADKLEELIINRVNNYSLASRVADKEDELDSLNEKLKIEHAKKKRLFELYINGSYEVSELDSMMNDIDAQINYYESQIEANEELKKNKKIQENLADLATVDFDSLEFREKQLYLKSLINKIYIDGEQVTIEWL

SEQ ID NO: 3119 - protein, 452 aa, synthetic construct
MKAAIYIRVSTQEQVENYSIQAQTEKLTALCRSKDWDVYDIFIDGGYSGSNMNRPALNEMLSKLHEIDAVVVYRLDRLSRSQRDTTTLIEEYFLKNNVEFVSLSETLDTSSPFGRAMIGILSAFAQLERETIRDRMVMGKIKRIEAGLPLTTAKGRTFGYDVIDTKLYINEEEAKQLQLIYDIFEEEQSITSLQKRLKKLGFKVRTYSRYNSWLTNDLYCGYVSYKDKVHVKGIHEPIISEEQFYRVQEIFTRMGKNPNMNRDSASLLNNLVVCSKCGLGFVHRSKDTMSRGKKYHYRYYSCKTYKHTHELEKCGNKTWRADKLEELIINRASNYSFASRNVDKEDELDGLNEKLKIERAKKKRLFDLYINGSYEVSELDSMMNDIDAQINYYESQIEANEELKKNKKIQENLADLATVDFDSLEFREKQLYLKSLINKIYIDGEQVTIEWL

SEQ ID NO: 3120 - protein, 485 aa, synthetic construct
MTKKVAIYTRVSTTNQAEEGFSIDEQIDRLTKYAEAMGWQVSDTYTDAGFSGAKLERPAMQRLINDIENKAFDTVLVYKLDRLSRSVRDTLYLVKDVFTKNKIDFISLSESIDTSSAMGSLFLTILSAINEFERENIKERMTMGKLGRAKSGKSMMWTKTAFGYYHNRKTGILEIVPLQATIVEQIFTDYLGGTSLTKLRDKLNESGHIGKDIPWSYRTLRQTLDNPVYCGYIKFKGSLFEGMHKPIIPYETYLKVQKELEERQQQTYERNNNPRPFQAKYMLSGTARCGYCGAPLKIVLGHKRKDGSRTMKYHCANRFPRKTKGVTVYNDNKKCDSGTYDLSSLESTVIDYLIGFQENNDCLLKIINGNNQPILDASSFEKQISQIDKKIQKNSDLYLNDFITMDELKERTDSLQAEKKLLKAKISENKFNDSTDAFELVKTQLGSIPINELSYDNKKKIVNNLVSKVDVTADSVDIIFKFQLA

SEQ ID NO: 3121 - protein, 485 aa, synthetic construct
MTKKVAIYTRVSTTNQAEEGFSIDEQIDRLTKYAEAMSWQVSDTYTDAGFSGAKLERPAMQRLINDIENKAFDTVLVYKLDRLSRSVRDTLYLVRDVFTKNKIDFISLNESIDTSSAMGSLFLTILSAINEFERENIKERMTMGKLGRAKSGKSMMWTKTAFGYYHNRKTGILEIVPLQATIVEQIFTDYLSGISLTKLRDKLNESGHIGKDIPWSYRTLRQTLDNPVYCGYIKFKDSLFEGMHKPIIPYETYLKVQKELEERQQQTYERNNNPRPFQAKYMLSGMARCGYCGAPLRIVLGHRRKDGSRTMKYHCANRFPRKTKGVTVYNDNKKCDSGTYDLNNLENTVIDNLIGLQENNDSLLKIINGNNQPILDTSSFEKQISQIDKKIQKNSDLYLNDFITMDELKDRTDSLQAEKKLLKAKISENKFNDSTDVFELVKTQLGSIPINELSYDNKKKIVNNLVSRVDVTADNVDIIFKFQLA

SEQ ID NO: 3122 - protein, 469 aa, synthetic construct
MSYTTPVRAAVYLRISEDRSGEQLGVARQREDCLKLCGQRKWVPVEYLDNDVSASTGKRRPAYEQMLADITAGKIAAVVAWDLDRLHRRPVELEAFMSLADEKRLALATVAGDVDLATPQGRLVARLKGCVAAHETEHKKARQRRAARQKAERGHPNWSKAFGYLPSPNGPEPDPRTAPLVKQAYADILAGASLGDVCRQWNDAGAFTITGRPWTTTTLSKFLRKPRNAGLRAYKGARYGPVDRDAIVGKAQWSPLVDEATFWAAQAVLDAPGRAPGRKSVRRHLLTGLAGCGKCGNHLAGSYRTDGQIVYVCKACHGVSILAVNIEPILYRIVAERLAMPDAVDLLRREIHDAAEAKTIRLELETLYGELDRLAVERAEGLLTARQVKISTDIVNAKITKLQARQLDQERLRVFDGIPLGTPQVAGVIAELSPDRFRAVLDVLAEVVVQPVGKSGRIFNPERVQVNWR

SEQ ID NO: 3123 - protein, 485 aa, synthetic construct
MTKKVAIYTRVSTTNQAEEGFSIDEQIDRLTKYAEAMGWQVSDTYTDAGLSGAKLERPAMQRLINDIENKAFDTVLVYKLDRLSRSVRDTLYLVKDVFTKNNIDFISLSESIDTSSAMGSLFLTILSAINEFERENIKERMTMGKLGRAKSGKSMMWTKTAFGYYHNRKTGILEIVPLQATVVEQIFTDYLSGISLTKLRDKLNESGHIGKDIPWSYRTLRQTLDNPVYCGYIKFRDSLFEGMHKPIIPYETYLKVQKELEERQQQTYERNNNPRPFQAKYMLSGMARCGYCGAPLRIVLGHKRKDGSRTMKYHCANRFPRKTKGVTVYNDNKKCDSGTYDLSSLEDTVIDNLIGFQENNDSLLKIINGNNQPILGTSSFEKQISQIDKKIQKNSDLYLNDFITMDELKDRTDSLQAEKKLLKAKISENKFNDSTDVFELVKTQLGSIPINELSYDDKKRIVNNLVSKVDVTADNVGIIFKFQLA

SEQ ID NO: 3124 - protein, 469 aa, synthetic construct
MSYTTPVRAAVYLRISEDRSGEQLGVARQREDCLKLCDQRKWVPVEYLDNDVSASTGKRRPAYEQMLADITAGKIAAVVAWDLDRLHRRPVELEAFMSLADEKRLALATVAGDVDLATPQGRLVARLKGCVAAHETEHKKARQRRAARQKAERGLPNWSKAFGYLPGPNGPEPDPRTAPLVKQAYADILAGASLGDVCRQWNGAGAFTVTGRLWTTTALSKFLRKPRNAGLRAYKGARYGPVDRDAIVGKAQWSPLVDEATFWAAQAVLDAPGRAPGRKSVRRHLLTGLAGCGKCGNHLAGSYRTDGRVVYVCKACHGVAILADNIEPILYHIVAERLAMPDAVDLLRREIHDAAEAEAIRLELETLYGELDCLAIERAEGLLTARQVKISTDIVDAKIAKLQARQLDQERLRVFDGIPLGTPQVADTIAELSPDRFRAVLDALAEVVVQPVGRGGRIFNPERVQVNWR

SEQ ID NO: 3125 - protein, 485 aa, synthetic construct
MTKKVAIYTRVSTTNQAEEGFSIDEQIDRLTKYAEAMGWQVSGTYTDAGFSGAKLERPAMQRLINDIENKAFDTVLVYKLDRLSRSVRDTLYLVKDVFTKNKIDFISLNESIDTSSAMGSLFLTILSAINEFERENIKERMTMGKLGRAKSGKSMMWTKTAFGYYHNRKTGILEIVPLQATIVEQIFTDYLSGISLTKLRDKLNESGHIGKDIPWSYRTLRQTLDNPVYCGYIKFKGGLFEGMHKPIIPYETYLKVQKELEKRQQQAYERNNNPRPFQAKYMLSGMARCGYCGAPLRIVLGHRRKDGSRTMKYHCANRFPRKTKGVTVYNDNKKCDSGTYDLSNLENTVIDNLIGFQENNDSLLKIINGNIQPILDTSSLKKQISQIDKKIQKNSDLYLNDFITMDELKDRTDSLQAEKKLLKAKISENKFNDSTDVFELVKTQLGSIPINELSYENKKKIVNNLVSKVDVTADNVDIIFKFQLA

SEQ ID NO: 3126 - protein, 485 aa, synthetic construct
MTKKVAIYTRVSTTNQAEEGFSIDEQIDRLTKYAEAMGWQVSDTYTDAGYSGAKLERPAMQRLINDIENKAFDTVLVYKLDRLSRSVRDTLYLVKDVFTKNKTDLISLNESIDTSSAMGSLFLTILSAINEFERENIKERMAMGKLGRAKSGKSMMWTKTAFGYYHNRKTGILEIVPLQATIVEQIFTDYLSGISLTKLRDKLNESGHIGKDIPWSYRTLRQTLDNPVYCGYIKFKGTLFEGMHKPIIPYETYLKVQRELEERQQQTYERNNNPRPFQAKYMLSGMARCGYCGAPLRIVLGHKRKDGSRTMKYRCANRFPRKTKGVTVYNDNKKCDSGTYDLSNLENTVIDNLIGFQEDNDSLLKIINGNNQPVLDTSGFEKQISQIDKKIQKNSDLYLNDFITMDELKDRADSLQAEKKLLKAKISENKFNDSTDVFELVRTQLGSIPINELSYDDKKKIVNTLVSKVDVTADNVDIIFKFQLA

SEQ ID NO: 3127 - protein, 469 aa, synthetic construct
MSYTTPVRAAVYLRISEDRSGEQLGVARQREDCLKLCDQRKWVPVEYLDNDVSASTGKRRPAYEQMLADITAGKIAAVVAWDLDRLHRRPIELEAFMSLADEKRLALATVAGDVDLATPQGRLVARLKGSVAAHETEHKKARQRRAARQKAERGHPNWSKAFGYLPGPNGPEPDPRTAPLVKQAYADILAGASLGDVCRQWNGAGAFTITGRPWTTTTLSKFLRKPRNAGLRAYKGARYGPVDRDAIVGKAQWSPLVDEATFWAAQAVLDAPGRAPGRKSVRRHLLTGLAGCGKCGNRLAASYRTDGKVVYVCKACHGVAILADNIEPILYHIVAERLAMPDAVDLLRREIHDAAEAETIRLELETLYGELDRLAVERAEGLLTARQVKISTDIVNAKITKLQAHQLDQERLRVFDGIPLGTPQVAGMIAELSPDRFRAVLDVLAGVVVQPVGKSGRIFNPERVQVNWR

SEQ ID NO: 3128 - protein, 452 aa, synthetic construct
MKAAIYIRVSTQEQVENYSIQAQTEKLTALCRSKDWDVYDIFIDGGYSGSNMNRPALNEMLSKLHEIDAVVVYRLDRLSRSQRDTTTLIEEYFLKNNVEFVSLSETLDTSSPFGRAMIGILSVFAQLERETIRDRMVMGKIKRIEAGLPLTTAKGRTFGYDVIDTKLYINEGEAKQLQLIYDIFEEEQSITSLQKRLKKLGFKVRTYNRYSNWLTNDLYCGYVSYKDKVHVKGIHEPIISEEQFYRVQEIFTRMGKSPNMNRDSASLLSNLVVCSKCGLGFVHRSKDTMSRGKKYHYRYYSCKTYKHTHELEKCGNKTWRADKLEELIINRVNNYSFAGRNADKEDELDSLNEKLKIEHARKKRLFDLYINGSYEASELDSMMNDIDAQINYYESRIEANEELKKNKKIQENLADLATVDFDSLEFREKQLYLKSLINKIYIDGEQVTIEWL

SEQ ID NO: 3129 - protein, 452 aa, synthetic construct
MKAAIYIRVSTREQVENYSIQAQTEKLTALCRSKDWDVYDIFIDGGYSGSNMNRPALNEMLSKLHEIDAVVVYRLDRLSRSQRDTITLIEEYFLKNNVEFVSLSETLDTSSPFGRAMIGILSVFAQLERETIRDRMVMGKIKRIEAGLPLTTAKGRTFGYDVVDTKLYINEEEAKQLRLIYDIFEEEQSITFLQKRLKKLGFKVRTYSRYNNWLTNDLYCGYVSYKDKVHVKGIHKPIISEEQFYRVQEIFTRMGKNPNINRDSASLLNNLVVCGKCGLGFVHRRKDTTSRGKKYHYRYYSCKTYKHTHELEKCGNKIWRADKLEELITNRVNNYSFASRNADKEDELDSLNEKLKIEHAKRKRLFDLYINGSYEVSELDSMMGDIDAQISYYESQIEANEELKKDKKIQENLANLATVDFDSLEFREKQLYLKSLINKIYIDGEQVTIEWL

SEQ ID NO: 3130 - protein, 452 aa, synthetic construct
MKAAIYIRVSTQEQVGNYSIQAQTEKLTALCRSKDWDVYDIFVDGGYSGSNMNRPALNEMLSKLHEIDAVVVYRLDRLSRSQRDTTTLIEEYFLKNNVEFVSLSETLDTSSPFGRAMIGILSVFAQLERETIRDRMVMGKIKRIEAGLPLTTAKGRTFGYDVIDTKLYINEEEAKQLQLIYDIFEEEQSITSLQKRLKKLGFKVRAYNRYNNWLTNDLYCGYVSYKDKVHVKGIHEPIISEEQFYRVQEIFTRMGKNPNMNRDSASLLNSLVVCSKCGLGFVHRSKDTMGRGKKYHYRYYSCKTYKHTHELEKCGNKTWRADKLEELIINRVNNYSFAGRNADKEDELDSLNEKLKIEHARKKRLFDLYINGGYEVSELDSMMNDIDAQINYYESRIEANEELKKNKKIQENLADLATADFDNLEFREKQLYLKSLINKIYIDGEQVTIEWL

SEQ ID NO: 3131 - protein, 485 aa, synthetic construct
MTKKVAIYTRVSTINQAEEGFSIDEQIDRLTKYAEAMGWQVSDTYTDAGFSGAKLGRPAMQRLINDVENKAFDTVLVYKLDRLSRSVRDTLYLVKDVFTKNKIDFISLNESIDTSSAMGSLFLTILSAINEFERENIKERMTMGKLGRAKSGKSMMWTKTAFGYYHNRKTGILEIVPLQATIVEQIFTDYLSGISLTKLRDKLNESGHIGKDIPWSYRTLRQTLDNPVYCGYIKFKGSLFKGMHKPIIPYEIYLKVQKELEERQQQTYERNNNPRPFQAKYMLSGMARCGYCGAPLRIVLGHKRTDGSRTMKYHCANRFPRKTKGATVYNDNKKCDSGTYDLSNLENAVIDNLIGFQENNDSLLKIINGNNQPILDTSSLKKQISQIDKKIQKNSDLYLSDFITMDELKDRTDSLRAEKKLLKAKISENKFDDSTDVFELVKTQLGSIPINELSYDNKKKIVNNLVSKVDVTADNVDIIFKFQLA

SEQ ID NO: 3132 - protein, 452 aa, synthetic construct
MKAAIYIRVSTREQVENYSIQAQTEKLTALCRSKDWDVYDIFIDGGYSGSNMNRPALNEMLSKLHEIDAVVVYRLDRLSRSQRDTITLIEEHFLKNNVEFVSLSETLDTSSPFGRAMIGILSVFAQLERETIRDRMVMGKIKRIEAGLPLTTAKGRTFGYDVIDTKLYINEEEAKQLQLIYDIFEEEQSITFLQKRLKKLGFKVRTYSCYNNWLTNDLYCGYVSYKDKVHVKGIHEPIISEEQFYRVQEIFTRMGKNPNMNRDSASLLNSLVVCSKCGLGFVHRRKDTVSRGKKYHYRYYSCKTYKHTHELEKCGNKIWRADKLEELIINCVNSYSLASRNVDKEDELDSLNEKLKIEHAKKKRLFDLYVNGSCEVSELDSMMSDIDAQINYYESQIEAIEELKKNKEIQENLANLATVDYDSLEFREKQLYLKSLINKIYIDGELVTIEWL

SEQ ID NO: 3133 - protein, 485 aa, synthetic construct
MTKKVAIYTRVSTTNQAEEGFSIDEQVDRLTKYAEAMGWQVSDTYTDAGFSGAKLERPAMQRLINDIENKAFDTVLVYKLDRLSRSVRDTLHLVKDVFTKSRIDFISLNESIDTSSAMGSLFLTILSAINEFERENIKERMTMGKLGRAKSGKSMMWTKTAFGYYHNRKTGILEIVPLQATIVEQIFTDYLSGISLTELRDRLNESGHIGKDTPWSYRTLRQTLDNPVYCGYIKFKGSLFEGMHKPIIPYETYLKVQKELEVRQQQTYERNNNPRPFQAKYMLSGMARCGYCGAPLRIVLGHRRKDGSRTMKYHCANRFPRKTKGVTVYNDNKKCDSGTYDLSNLENTVIDNLIGFQENNDSLLKIINGNNQPMLDTSSFKEQISQIDIKIQKNSDLYLNGFITMDELKDRTDSLQAEKKLLKAKIDENKFNDSTDVFELVKTQLGSIPINELSYDNKKKIVNNLVSRVDVTADNVDIIFKFQLA

SEQ ID NO: 3134 - protein, 469 aa, synthetic construct
MSYTTPVRAAVYLRISEDRSGEQLGVARQREDCLKLCGQRKWVPVEYLDNDVSASTGKRRPAYEQMLADITAGKIAAVVAWDLDRLHRRPVELEAFMSLADEKRLALATVAGDVDLATPQGRLVARLKGCVAAHETEHKKARQRRAARQKAERGLPNWSKAFGYLPGPNGPEPDPRTAPLVKQAYADILAGASLGDVCRQWNDAGAFTITGRPWTTTTLSKFLRKPRNAGLRAYKGARYGPVDRDAIVGKAQWSPLVDEATFWAAQAVLDAPGRAPGRKSVRRHLLTGLAGCGKCGNHLAGSYRTDGRTVYVCKACHGVSILADNIEPILYHIVAERLAMPDAVDLLRREIHDAAEAETIRLELETLYGELDRLAVERAEGLLTARQVKISTDIVNAKITKLQARQLDQERLRVFDGIPLGTPQVAGMIAELSPDRFRAVLDVLAEVVVQPVGKSGRIFNPERVQVNWR

SEQ ID NO: 3135 - protein, 469 aa, synthetic construct
MSYTTPVRAAVYLRISEDRSGEQLGVARQREDCLKLCDQRNWVPVEYLDNDVSASTGKRRPAYEQMLADITAGKVAAVVAWDLDRLHRRPIELEAFMSLADEKRLALATVAGDVDLATPQGRLVARLKGSVAAHETEHKRARQRRAARQKAERGHPNWSKAFGYLPGPSGPEPDPRTAPLVKQAYADILAGASLGDVCRQWNDAGAFTITGRPWTTTALSKFLRKPRNAGLRAYKGARYGPVDRDAIVGKAQWSPLVDEATFWAAQAVLDAPGRAPGRKSVRRHLLTGLAGCGKCGNHLAGSYRTDGRVVYVCKACHGVAILADNIEPILYRIVAERLAMPDAVDLLRREIHDAAEAEAIRLELETLYGELDRLAVERAEGLLTARQVKISTDIVSAKITKLQARQLDQERLRVFDGIPLGTPQVAGMIAELSPSRFRAVLDVLAEVVVQPVGKSGRIFNPERVQVNWR

SEQ ID NO: 3136 - protein, 469 aa, synthetic construct
MSYTTPVRAAVYLRISEDRSGEQLGVARQREDCLKLCDQRKWVPVEYLDNDVSASTGKRRPAYEQMLADITAGKIAAVVAWDLDRLHRRPIELEAFMSLADEKRLALATVAGDVDLATPQGRLVARLKGSVAAHETEHKKARQRRAARQKAERGHPNWSKAFGYLPGPNGPEPDPRTAPLVKQAYADILAGASLGDVCRQWNDASAFTITGRPWTTTTLSKFLRKPRNAGLRAYKGARYGPVDRDAIVGKAQWSPLVDEATFWAAQAVLDAPGRAPGRKSVRRHLLTGLAGCGKCGNHLAGSYRTDGRVVYVCKACHGVAILADIIEPILYHIVAERLAMPNAVDLLRREIHDAAEAETIRLELETLYGELDRLAVERAEGLLTARQVKISTDIVNAKITKLQARQLDQERLRVFDGIPLGTPQVAGVIAELSPNRFRAVLDVLAEVVVQPVGKGGGIFNPERVQVNWR

SEQ ID NO: 3137 - protein, 485 aa, synthetic construct
MTKKVAIYTRVSTTNQAEEGFSIDEQIDRLTKYAEAMGWQVSDTYTDAGFSGAKLERPAMQRLINDIENKAFDSVLVYKLDRLSRSVRDTLYLVKEVFTKNKIDFISLNESIDTSSAMGSLFLTILSAINEFERENIKERMTMGKLGRAKSGKSMMWTKTAFGYYHNRKTGILEIVPLQATIVEQIFTDYLSGISLTKLRDKLNESGHIGKDIPWSYRTLRQTLGNPVYCGYIKFKDSLFKGMHKPIIPYETYLKVQKELEERQQQTYERNNNPRPFQAKYMLSGMARCGYCGAPLRIVLGHKRKDGSRTMKYHCANRFPRKTKGITVYNDNKKCDSGTYDLSNLEDTVIDNLIGFQENNDSLLKIINGNNQPILDTSSFKEQISQIDKKIQKNSDLYLNDFITMDELKDRTDSLQAEKKLLKAKISENKFNNSTDVFELVKTQLGSIPINELSYDNKKKIVNNLVSKVDVTADNVDIIFKFQLA

SEQ ID NO: 3138 - protein, 469 aa, synthetic construct
MSYTTPVRAAVYLRISEDRSGEQLGVARQREDCLKLCGQRKWVPVEYLDNDVSASTGKRRPAYEQMLADITAGKIAAVVAWDLDRLHRRPIELEAFMSLADGKRLALATVAGDVDLATPQGRLVARLKGSVAAHETEHKKARQRRAARQKAERGYPNWSKAFGYLPGPNGPEPDPRTAPLVKQAYADILAGASLGDVCRQWNDAGAFTITGRPWTTTALSKFLRKPRNAGLRAYKGARYGPVDRGAIVGKAQWSPLVDEATFWAAQAVLDAPGRAPGRKSVRRHLLTGLAGCGKCGNHLAGSYRTDGRVVYVCKACHGVAILADNIEPILYHIVAERLAMPDAVDLLRREIHDAAEAETIRLELETLYGELDRLAVERAEGLLTARQVKISTDIVNAKITKLQARQLDQERLRVLDGIPLGTPQVAGVIAELSPDRFRAVLDVLAEVVVQPVGKSGRIFNPERVQVNWR

SEQ ID NO: 3139 - protein, 485 aa, synthetic construct
MTKKVAIYTRVSTTNQAEEGFSIDEQIDRLTKYAEAMGWQVSDTYTDAGFSGAKLERPAMQRLINDIENKAFDTVLVYKLDRLSRSVRDTLYLVKDVFTKNKIDFISLNESINTSSAIGSLFLTILSAINEFERENIKERMTMGKLGRAKSGKSMMWTKTAFGYYHNRKTGILEIVPLQATVVEQIFTDYLSGISLTKLRDKLNESGHIGKDIPWSYRTLRQTLDNPVYCGYIKFRGSLFEGMHKPIIPYETYLKVQKELEERQQQTYERNNNPRPFQAKYMLSGMARCGYCGAPLRVVLGHKRKDGSRTMKYHCANRFPRKTKGVTVYNDNKKCDSGTYDLRNLENTVIDNLIGFQENSDSLLKIINGTNQPILDTSSFKRQISQIDKKIQKNGDLYLNDFITMDELKDRTDSLQAEKKLLKAKISENKFNDSTDVFELVKTQLGSIPINELSYDNKKKIVNNLVSKVDVTADNVDIIFKFQLA

SEQ ID NO: 3140 - protein, 452 aa, synthetic construct
MKAAIYIRVSTREQVENYSIQAQTEKLTALCRSKDWDVYDIFIDGGYSGSNMNRPALNEMLSKLHEIDAVVVYRLDRLSRSQRDTITLIEEYFLKNNVEFVSLSEALDTSSPFGRAMIGILSVFAQLERETIRDRMVMGKIKRIEAGLPLTTAKGRTFGYDVIDTKLYINEEEAKQLQLIYDIFEEEQSITFLQKRLKKLGFKVRTYSCYNNWLTNDLYCGYVSYKDKVHVKGIHEPIISEEQFYRVQEIFTRMGKNPNMNRDSASLLNNLVVCSKCGLGFVHRRKGTVSRGKKYQYRYYSCKTYKHIHELEKCGNKIWRADKLEELIINRVNNYSLASRNVDKGDELDSLNERLKIEHAKKKRLFDLYINGSYEVSELGSMMSVIDAQINYYESQIEANEELKKNKKIQENLAGLATVDFDSLEFREKQLYLRSLINKIYIDGEQVTIEWL

SEQ ID NO: 3141 - protein, 452 aa, synthetic construct
MKAAIYIRVSTQEQVGNYSIQAQTEKLTALCRSKGWDVYDIFVDGGYSGSNMNRPALNEMLSKLHEIDAVVVYRLDRLSRSQRDTTTLIEEYFLKNNVEFVSLSETLDTSSPFGRAMIGILSVFAQLERETIRDRMVMGKIKRIEAGLPLTTAKGRTFGYDVIDTKLYINEEEAKQLQLIYDIFEEEQSITFLQKRLKKLGFKVRTYNRYNSWLTNDLYCGYVSYKDKVHVRGIHEPIISEEQFYRVQEIFTRMGKNPNMNRDSASLLSNLVVCSKCGLGFVHRSKDTMSRGKKYHYRYYSCKTYKHTHELEKCGNKIWRADKLEELIINRVNNYSFVSRNVDKEDELDSLNEKLKIEHAKKKRLFDLYINGSYEVSELDCMMNDIDAQINYYESQIKANEELKKNKGIQENLADLATVDFDSLEFREKQLYLKSLINKIYIDGEQVTIEWL

SEQ ID NO: 3142 - protein, 469 aa, synthetic construct
MSYTTPVRAAVYLRISEDRSGEQLGVARQREDCLKLCGQRKWVPVEYLDNDVSASTGKRRPAYEQMLADITAGKIAAVVAWDLDRLHRRPVELEAFMSLADEKRLALATVAGDVDLATPQGRLVARLKGCVAAHETEHKKARQRRAARQKAERGYPNWSKAFGYLPGPNGPEPDPRTAPLVKQAYADILAGASLGDVCRQWNDAGAFTITGRPWTTTTLSKFLRKPRNAGLRAYKGARYGPVDRGAIVGKAQWSPLVDEATFWAAQAVLDAPGRAPGRKSVRRHLLTGLAGCGKCGNHLAGSYRTDGQVVYVCKACHGVSILAVNIEPILYHIVAERLAMPDAVDLLRREFHDATEAETIRLELETLYGELDRLAVERAEGLLTARQVKICTDIVNAKITKLQARQLDQERLRVFDGIPLGTPQVAGVIAGLSPDRFRAVLDVLAEVVVRPVGKSGRIFNPERVQVNWR

SEQ ID NO: 3143 - protein, 452 aa, synthetic construct
MKAAIYIRVSTREQVENYSIQAQTEKLTALCRSKDWDVYDIFIDGGYSGSNMNRPALNEMLSKLHEIDAVVVYRLDRLSRSQRDTITLIEEYFLKNNVEFMSLSETLDTSSPFGRAMIGILSVFAQLERETIRDRMVMGKIKRVEAGLPLTTAKGRTFGYDVIDTKLHINEEEAKQLQLIYDIFEEEQSITFLQKRLKKLGFKVHTYNRYNNWLTNDLYCGYVSYKDKVHVKGIHEPIISEEQFYRVQGIFTRTGKNPNMNRDSASLLNNLVVCSKCGLGFVHRRKDTMSRGKKYHYRYYSCKTFKHTHELEKCGNKIWRADKLEELIINRVNNYSFASRYADKEDELDSLSEKLKIEHAKKKRLFDLYINGSYGVSELDSLMNDIDAQINYYESQIEANEELRKNKKIQKNLADLATVDYDSLEFREKQLYLKSLINKIYIDGEQVTIEWL

SEQ ID NO: 3144 - protein, 485 aa, synthetic construct
MTKKVAIYTRVSTTNQAEEGFSIDEQIDRLTKYAEAMGWQVGDTYTDAGFSGAKLERPAMQRLINDIENKAFDTVLVYKLDRLSRSVRDTLYLVKDVFTKNKIDFISLNESINTSSAMGSLFLTILSAINEFERENIKERMTMGKLGRAKSGKSMMWTKTAFGYYHNRKTGILEIVPLQATIVEQIFTDYLSGISLTKLRDKLNEGGHIGKDIPWSYRTLRQTLDNPVYCGYIKFKGSLFEGMHKPIIPYETYLKVQKELEERQQQTYERNNNPRPFQAKYMLSGKARCGYCGAPLRIVLGHKRKDGSRTMKYHCANRFPRKTKGVTVYNDNKKCDSGTYDLSSLENTVIDNLIGFQENNDSLLKIVNGINQPTLDTNSFEKQISQIDKKIQKNSDLYLNDFITMDELKDRTDSLQAEKKLLKAKISENKFNDGTDVFELVKTQLGSIPINELSYDNKKKIVNNLVSKVDVTADNVDIIFKFQLA

SEQ ID NO: 3145 - protein, 469 aa, synthetic construct
MSYTTPVRAAVYLRISEDRSGEQLGVARQREDCLKLCGQRKWVPVEYLDNDVSASTGKRRPAYEQMLADITAGKIAAVVAWDLDRLHRRPVELEAFMSLADEKRLALATVAGDVDLATPQGRLVARLKGCVAAHETEHKKARQRRAARQKAERGHPNWSKAFGYLPGPNGPEPDPRTAPLVRQAYADILAGASLGDVCRQWNDAGAFTITGRPWTTTTLSKFLRKPRNAGLRAYKGARYGPVDRDAIVGKAQWGPLVDEATFWAAQAVLDAPGRAPGRKSVRRHLLTGLAGCGKCGNHLAGSYRTDGRVVYVCKACHGVAILADNIEPVLYHIVAERLAMPDAVGLLRREVRDAAEAETIRLELETLYGELDCLAVERAEGLLTARQVKISTDIVNAKITELQARQLDQERLRVFDGIPLGTPQVTGTIAELSPNRFRAVLDVLAEVVVQPVGKSGRIFNPERVQVNWR

SEQ ID NO: 3146 - protein, 485 aa, synthetic construct
MTKKVAIYTRVSTTIQAEEGFSIDEQIDRLTKYAEAMGWQVSDTYTDAGFSGAKLERPAMQRLINDIENKAFDTVLVHKLDRLSRSVRDTLYLVKEVFTKNKIDFISLNESIDTSSAMGSLFLTVLSAINEFERENIKERMTMGKLGRAKSGKSMMWTKTAFGYYHNRKTGILEIVPLQATIVEQIFTDYLSGISLTKLRDKLNESGHIGKDIPWSYRTLRQTLDNPVYCGYIKFKDSLFEGMHKPIIPHETYLKVQKELEERQQQTYKRNNNPRPFQAKYMLSGMARCGYCGAPLRIVLGHKRKDGSRTMKYHCANRFPRKTKGVTVYNDNKKCDSGTYDLSNLENTVIDNLIGFQEDNDSLLKIINGNNQPTLDTSSFKKQISLIDKKIQKNSDLYLNDFITMDELKDRTDGLRAEKELLKAKISENKFNDSTDVFELVKTQLGSIPINELSYDNKKKIVNNLVSKVDVTADNVDIIFKFQLA

SEQ ID NO: 3147 - protein, 469 aa, synthetic construct
MSYTTPVRAAVYLRISEDRSGEQLGVARQREDCLKLCGQRKWVPVEYLDNDVSASTGKRRPAYEQMLADITAGKIAAVVAWDLDRLHRRPIELEAFMSLADEKRLALATVAGDVDLATPQGRLVARLKGSVAAHETEHKKARQRRAARQKAERGYPNWSKAFGYLPGPNGPEPDPRTAPLVKQAYADILAGASLGDVCRQWNDAGAFTITGRPWTTTTLSKFLRKPRNAGLRAYKGARYGPVDRDAIVGKAQWSPLVDEATFWAVQAVLDAPGRAPGRKSVRRHLLTGLAGCGKCGNHLAGSYRTDGQVVYVCKVCHGVSILAVNIVPILYHIVAERLAMPDAVDLLCREIHDAAGAETIRLELEALYGELDRLAVERAEGLLTARQVKISTDIVNAKITKLQARRLDQERLRVFDGIPLGTPQVAGMIAGLSPDRFRAVLDVLAEVVVQPVGKGSRIFNPERVQVNWR

SEQ ID NO: 3148 - protein, 485 aa, synthetic construct
MTKKVAIYTRVSTTNQAEEGFSIDEQTDRLTKYAEAMGWRVSDTYTDAGFSGAKLERPAIQRLINDIETKAFDTVLVYKLDRLSRSVRDTLHLVKDVFTKNKIDFISLNESIDTSSAMGSLFLTILSAINEFERENIKERMTMGKLGRAKSGKSMMWTKTAFGYYHNRKTGILEIVPLQATIVEQIFTDYLSGISLTKLRDKLNESGHIGRDIPWSYRTLRQTLDNPVYCGYIKFKDSLFEGMHKPIIPYETYLKVQKELEERQQQTYERNNNPRPFQAKYMLSGMARCGYCGAPLRIVLGRKRKDGSRTKKYHCANRFPRKTKGVTVYNDNKRCDSGTYDLSNLENTVIDNLIGFQKNNDSLLKIINGNNQPILDTSSLKEQISQIDKKIQKNSDLYLNDFITMDELKDRTDSLQAEKRLLKAKISENKFNDSTDVFELVKTQLGSIPINELSYDNKKKIVNNLVSKVDVTADNVDIIFKFQLA

SEQ ID NO: 3149 - protein, 485 aa, synthetic construct
MTKKVAIYTRVSTTNQAEEGFSIDEQIDRLTKYAEAMGWQVSDTYTDAGFSGAKLERPAMQRLINDIENKAFDTVLVYKLDRLSRSVRDTLYLVKEVFTKNKIDFISLNESIDTSSAMGSLFLTILSAINEFERENIKERMTMGKLGRARSGKSMMWTKTAFGYYHNRKTGILEIVPLQATIVEQIFTDYLSGISLTKLRDKLNESGHIGKDIPWSYRTLRQTLDNPVYCGYIRFKDSLFEGMHKPIIPYETYLKVQKELEGRQQQTYERNNNPRPFQAKYMLSGMARCGYCGAPLRIVLGHKRKDGSRTMKYHCANRFPRKTKGVTVYNDNKKCDSGTYDLRNLENTVIDNLTGFQENNDSLLKIINGNNQPILDTSSLKKQISQIDKKIQKNSDLYLNDFITMDELKDRTDSLQAEKKLLKAKISENKFNDSTDVFELVKTQLGSIPINELSYDNKKKIVNNLVSKVDVTADNVDIIFKFQLA

SEQ ID NO: 3150 - protein, 452 aa, synthetic construct
MKAAIYIRVSTREQVENYSIQAQTEKLTALCSSKDWDVYDIFVDGGYSGSNMSRPALNEMLSRLHEIDAVVVYRLDRLSRSQRDTITLIEEYFLKNNVEFVSLSETLDTSSPFGRAMIGILSVFAQLERETIRDRMVMGKIKRIEAGLPLTTAKGRTFGYDVIDTKLYINEEEAKQLRLIYDIFEEEQSITFLQKRLKKLGFKVRTYNRYNNWLTNDLYCGYVSYKDKVHVKGIHEPIISEEQFYRVQEIFTRMGKNPNMNRGSASLLNNLVVCSKCGLGFVHRRKDIMSRGKKYHYRYYSCKTYKHIHELEKCGNKIWRADKLEELIINRVNSYSLVSRNVDKEDELDSLNEKLKIEHAKKKRLFDLYINGSYEVSELDSMMSDIDAQINYYESQIEANEELKKNKKIQENLAHLATVDFDSLEFREKQLYLKSLINKIYIDGEQVTIEWL

SEQ ID NO: 3151 - protein, 452 aa, synthetic construct
MKAAIYIRVSTREQVENYSIQAQTEKLTALCRSKDWDVYDIFVDGGYSGSNMNRPALNEMLSKLHEVDAVVVYRLDRLSRSQRDTITLIEEHFLKNNVEFVSLSETLDTSSPFGRAMIGILSVFAQLERETIRDRMVMGKIKRIEAGLPLTTAKGRTFGYDVIDTKLYINEEEAKQLRLIYDIFEEEQSITSLQKRLKKLGFKVRTYSRYNNWLTNDLYCGYVSYKDRVHVKGIHEPIISEEQFYRVQEIFTRMGKNPNMNRDSASLLNNLVVCSKCGLGFVHRRKDAMSRDKKYHYRYYSCKTYKHIHELEKCGNKIWRADKLEELIINRVNNYSLASRNVDKEDELDSLNVKLKIEHAKKRRLFDLYINGNYEVSELDSVMNDIDAQINYYESQIETIKELKKNRKIQENLAHLATVDFDSLEFREKQLYLKSLINKIYIDGEQVTIEWL

SEQ ID NO: 3152 - protein, 452 aa, synthetic construct
MKAAIYIRVSTQEQVGNYSIQAQTEKLTALCRSKDWDVYDIFIDGGYSGSNMNRPALNEMLSKLHEIDAVVVYRLDRLSRSQRDTTTLIEEYFLKNNVEFVSLSETLDTSSPFGRAMIGILSVFAQLERETIRDRMVMGKIKRIEAGLPLTTAKGRTFGYDVIDTKLYINEEEAKQLRLIYDIFEEEQSITSLQKRLKKLGFKVRTYNRYNNWLTNDLYCGYVSYKDKVHVKGIHEPIISEEQFYRVQEIFTRMGKNPNMNRDSASLLNNLVVCSKCGLGFVHRRKDTMSGGKKYHYRYYSCKTYKHTHELEKCGNKTWRADKLEELIINRVNNYSFASRNVDKEDELNSLNEKLKIEHAKKKRLFDLYINGSYEVSELDSMMNDIDAQISYYESQIEASEELKRNKKVRENLADLATADFDSLGFREKQLYLKSLINKIYIDGEQVTIEWL

SEQ ID NO: 3153 - protein, 452 aa, synthetic construct
MKAAIYIRVSTQEQVENYSIQAQTEKLTALCRSKDWDVYDIFVDGGYSGSNMNRPALNEMLSKLHEIDAVVVYRLDRLSRSQRDTTTLIEEYFLKNNVEFVSLSETLDTSSPFGRAMIGILSVFAQLERETIRDRMVMGKIKRIEAGLPLTTAKGRTFGYDVIDTKLYINEEEAKQLRLIYDIFEEEQSITFLQKRLKELGFKVRSYNRYNNWLTNDLYCGYVSYKDKVHVKGIHEPIISEEQFYRVQEIFIRMGKNPNMNRDSASLLNNLVVCSKCGLSFVHRSKDTMSGGKKYHYRYYSCKTYKHTHELEKCGNKTWRADKLEELIINRVNNYSFASRNVDKENELDSLNEKLKIEHAKKKRLFDLYINGGYEVSELDSMMSDIDAQIDYYESRIEANEELKKNKKIQENLADLATVDFDSLEFREKQLYLKSLINKIYIDGEQVTIEWL

SEQ ID NO: 3154 - protein, 469 aa, synthetic construct
MSYTTPVRAAVYLRISEDRSGEQLGVARQREDCLKLCGQRKWVPVEYLDNDVSASTGKRRPAYEQMLADIAAGKIAAVVAWDLDRLHRRPIELEAFMSLADENRLALATVAGDVDLATPQGRLVARLKGCVAAHETEHKKARQRRAARQKAERGLPNWSKAFGYLPGPNGPEPDPRTAPLVKQAYAVILAGASLGDVCRQWNDAGALTITGRPWTTTALSKFLRKPRNAGLRAYKGTRYGPVDRDAIVGKAQWSPLVDEATFWAAQAVLDAPGRAPGRKSVRRHLLTGLAGCGKCGYHLAGSYRTDGRVVYVCKVCHGVAILADNIEPILYHIVAERLAMPDAVDLLRREVHDAAEAETIRLELETLYGELDRLAVERAEGLLTARQVKISTDIVNAKITKLQACQLDPERLRVFDGIPLGTPQVAGKIAELSPDRFRAVLDVLAEVVVQPVGKSGRIPNSERVQVNWR

SEQ ID NO: 3155 - protein, 485 aa, synthetic construct
MTKKVAIYTRVSTTNQAEEGFSIDEQIDRLTKYAEAMGWQVSDTYTDAGFSGAKLERPAVQRLINDIENKAFDTVLVYKLDRLSRSVRDTLYLVKDVFTKNKIDFISLSESIDTSSAMGSLFLTILSAINEFERENIKERMTMGKLGRAKSGKSMMWTKTAFGYYHNRETGILEIVPLQATIVEQIFTDYLSGISLTKLRDKLNESGHIGKDIPWSYRTLRQTLDNPVYCGYIKFKGSLFEGMHKPIIPYETYLKVQKELEERQQRAYERNNNPRPFQAKYMLSGMARCGYCGAPLRIVLGHKRKDGSRTMKYHCANRFPRKTKGITVYNDNKKCDSGTYDLSNLENAVIGNLIGFQENNDSLLKIINGNNQPILDTSSFKKQISQIDKKIQKNSDLYLNDFITMDELRDRTDSLQAEKKLLKAKISENKFNDSTDVFELVKTQLGSIPINELSYDDKKKIVNNLVSKVDVTADNVDIIFKFQLA

SEQ ID NO: 3156 - protein, 452 aa, synthetic construct
MKAAIYIRVSTREQVENYSIQAQTEKLTALCRSKDWDVYDIFIDGGYSGSNMNRPALNEMLSKLHEIDAVVVYRLDRLSRSQRDTITLIEEYFLKNNVEFVSLSETLDTSSPFGRAMIGILSVFAQLERETIRDRMVMGKIKRIEAGLPLTTAKGRTFGYDVIDTRLYINEEEAKQLRLIYDIFEEEQSITFLQKRLKKLGFKVRTYNRYNNWLTNDLYCGYVSYKDKVHVKGIHEPIISEEQFYRVQEIFARMGKNPNMNRDSASLLNNLVVCSKCGLGFVHRRKDAMSRDKKYHYRYYSCKTYKHIHELEKCGNKIWRADKLEELIINRVNNYSFASRNVDKEDELDGLIEKLKIEHAKKRRLFELYINGSYEMSELDSMMSDIDAQINYYESQIEANEELKKNKKIQENLAHLATVDFDSLEFREKQLYLKSLINKIYIDGEQVTIEWL

SEQ ID NO: 3157 - protein, 452 aa, synthetic construct
MKAAIYIRVSTREQVENYSIQAQTEKLTALCRSRDWDVYDIFVDGGYSGSNMNRPALNEMLSKLHEIDAVVVYRLDRLSRSQRDTITLIEEYFLKNNVEFVSLSETLDTSSPFGRAMIGILSVFAQLERETIRDRMVMGKIKRIEAGLPLTTAKGRTFGYDVVDTKLYINEEEAKQLQLIYDIFEEEQSVTSLQKRLKKLGFKVHTYNRYNNWLTNDLYCGYVSYKDKVHVKGIHEPIISEEQFYRVQEIFTRMGKNPNMNRDSASLLNNLVVCSKCGLGFVHRRKDAMSRDKKYHYRYYSCKTYKHIHELEKCGNKIWRADELEELIINRVNSYSLVSRNVDKEDELDSLNEKLKIEHAKKKRLFDLYINGSYEVSELDSMMSDIDAQINYYESRIEANEELRKNKKIQENLADLATVDFDSLEFREKQLYLKSLINKIYIDGEQVIIEWL

SEQ ID NO: 3158 - protein, 485 aa, synthetic construct
MTKKVAIYTRVSTTNQAEEGFSIDEQVDRLTKYAEAMGWQVGDIYTDAGLSGAKLERPAMRRLINDIENKAFDTVLVYKLDRLSRSVRDTLYLVKDVFTKNKIDFISLNESIDTSSAMGSLFLTILSAINEFERENIKERMTMGKLGRAKSGKSMMWTKTAFGYYHNRKTGILEIVPLQATIVEQIFTDYLSGISLTKLRDKLNESGHIGKDIPWSYRTLRQILDNPVYCGYIKFKDSLFEGMHKPIIPYETYLKVQKELEERQQQAYERNNNPRPFQAKYMLSGMARCGYCGAPLRIVLGRKRKDGSRTMKYHCANRFPRKTKGVTVYNDNKKCDSGTYDLNNLESTVIDNLIGFQESNDSLLKIINGNNQPILDTSSFKEQICQIDKKIQKNSELYLNDFITMDELKDRTDSLQAEKKLLKAKISENKFNDSTDVFELVKTQLGSTPINELSYDDKKKIVNNLVSKVDVTADNVDIIFKFQLA

SEQ ID NO: 3159 - protein, 452 aa, synthetic construct
MKAAIYIRVSTREQVENYSIQAQTEKLTALCRSKGWDVYDIFIDGGYSGSNMNRPALNEMLSKLHVIDAVVVYRLDRLSRSQRDTITLIEEYFLKNNVEFVSLSETLDTSSPFGRAMIGILSVFAQLERETIRDRMVMGKIKRIEAGLPLTTAKGRTFGYDVIDTKLYINEEEAKQLQLIYDIFEEEQSITFLQKRLKKLGFKVRTYNRYNNWLTNDLYCGYVSYKDKVHVKGIHEPIISEEQFYRVQEIFTRMGKNPNMNRDSASLLNNLVVCSKCGLGFVHRRKDAMSRDKKYHYRYYSCKTYKHIHELEKCGNKIWRADKLEELIIDRVNSYSLASRNVDKEDELDGLNEKLKTEHAKKKRLFDLYINGSYEVSVLDSMMSDIDAQINYYESQIEANEELKKNKKIQENLADLATVDFDSLEFREKQQYLKSLINKIYIDGEQVTIEWL

SEQ ID NO: 3160 - protein, 469 aa, synthetic construct
MSYTTPVRAAVYLRISEDRSGEQLGVARQREDCLKLCDQRKWVPVEYLDNDVSASTGKRRPAYEQMLADITAGKIAAVVAWDLDRLHRRPIELEAFMSLADEKRLALATVAGDVDLATPQGRLVARLKGSVAAHETEHKKARQRRAARQKAERGYPNWSKAFGYLPGPNGPEPDPRTAPLVKQAYADILAGASLGDVCRQWNDAGAFTITGRPWTTATLSKFLRKPRNAGLRAYKGARYGPVDRDAIVGKAQWSPLVDEATFWAAQAVLDAPGRAPGRKSVRRHLLTGLAGCGKCGNHLAGSHRTDGRVVYVCKACHGVAILADNIEPILYHIVTERLAMPDAVNLLRREIHDAAEAETIRLDLEALYGELDRLAVERAEGLLTARQVKISTDIVNAKITKLQARQLDQERLRVFDGIPLGTPKVAGMIAELSPDRFRAVLDVLAEVVVQPVGKGGRIFNPERVQVNWR

SEQ ID NO: 3161 - protein, 485 aa, synthetic construct
MTKKVAIYTRVSTTNQAEEGFSIDEQIDRLTKYAEAMGWQVSDTYTDAGSSGAKLERPAMQRLINDIENKAFDTVLVYKLDRLSRSVRDTLYLVKDVFTKNKIDFISLSESIDTSSAMGSLFLTILSAINEFERENIKERMTMGKLGRAKSGKSMMWTKTAFGYYHNRKTGILEIVPLQATIVEQIFTDYLSGISLTKLRDKLNESGHIGKDIPWSYRTLRQTLDNPVYCGYIKFKGSLFEGMHKPIIPYETYLKVQKELEERQQQTYERNNNPRPFQAKYMLSGMARCGYCGASLRIVLGHKRKDGSRTMKYHCANRFPRKTKGVTVYNDNKKCDSGTYDLSNLENTVIDYLIGFQEDNGSLLKIINGNNQPILDISSFREQISQIDKKIQKISDLYLNDFITMDELRDRTDSLQAEKKLLKAKISEHKFNDSTDVFELVRTKLGSIPINELSYDDKKKIVNNLVSKVDVTADNVDIIFKFQLA

SEQ ID NO: 3162 - protein, 452 aa, synthetic construct
MKAAIYIRVSTREQVENYSIQAQTEKLTALCRSKDWDVYDIFIDGGYSGSNMNRPALNEMLSKLHEIDAVVVYRLDRLSRSQRDTITLIEEYFLKNNVEFVSLSETLDTSSPFGRAMIGILSVFAQLERETIRDRMVMGKIKRIEAGLPLTTAKGRTFGYDVIDTKLYINEEEAKQLQLIYDIFEEEQSITLLQKRLKELGFKVRTYSRYNNWLTNDLYCGYVSYKDKVHVKGIHEPIISEEQFYRVQEIFTRMGKNPNMNRDSASLLNNLVVCNKCGLGFVHRRKDAMSRDKKYHYRYYSCKTYKHIHELEKCGNKIWRADKLEELIINRVNNYSLASRSVDKEDELDSLNEKLKIEHAKKRRLFELYVNGSYEVGELDSMMSDIDAQINYYESQIEANEELKRNKKIQENLAYLATVDFDSLEFREKQLYLKSLINKIYIDGEQVTIEWL

SEQ ID NO: 3163 - protein, 452 aa, synthetic construct
MKAAIYIRVSTREQVENYSIQAQTEKLTALCRSKDWDVYDIFIDGGYSGSNMNRPALNEMLSKLHEIDAVVVYRLDRLSRSQRDTITLIEEYFLKNNVEFVSLSETLDTSSPFGRAMIGILSVFAQLERETIRDRMVMGKIKRIEAGLPLTTAKGRTFGYDVIDTKLYINEEEAKQLQLIYDIFEEEQSITFLQRRLKKLGFKVRTYNCYNNWLTNDLYCGYVSYKDKVHVKGIHEPIISEEQFYRVQEIFTRMGINPNMNRDSASLLNNLVVCSKCGLGFVHRRKDTVSRGKKYHYRYYSCKTYKHIHELERCGNKIWRADKLEELIINRVNNYSLASRVADKEDELDSLNERLKIEHAKKKRLFELYIDGSYEVSELDSVMNDIDAQINYYESQIEANEGLKKDKKIQENLANLATMDYDSLEFREKQLYLKSLINKIYIDGEQVTIEWL

SEQ ID NO: 3164 - protein, 452 aa, synthetic construct
MKAAIYIRVSTREQVENYSIQAQTEKLTALCRSKDWDVYDIFIDGGYSGSNMNRPALNEMLSKLHEIDAVVVYRLDRLSRSQRDTITLIEEYFLKNNVEFVSLSETLDTSSPFGRAMIGILSVFAQLERETIRDRMVMGKIKRIEAGLPLTTAKGRTFGYDVIDTKLYINEEEAKQLQLIYDIFEEEQSITFLQRRLKKLGFKVYTYNRYNNWLTNDLYCGYVSYKDKVHVKGIHEPIISEEQFYRVQEIFTRMGKNPNTNRDSASLLSGLVVCSKCGLGFVHRRKDAMSRDKKYHYRYYSCKTYKHIHELEKCGNKIWRADKLEELIINRVNNYSLASRNVDKEDELDSLSEKLKIEHAKKKRLFDLYINGSYEVSELDSMMSDIDAQINYYESQIEANEGLKKDKKVQEDLAELATVDFDSLGFREKQLYLKSLINKIYIDGEQVTIEWL

SEQ ID NO: 3165 - protein, 469 aa, synthetic construct
MSYTTPVRAAVYLRISEDRSGEQLGVARQREDCLKLCDQRKWVPVEYLDNDVSASTGKRRPAYEQMLADITAGKIAAVVAWDLDRLHRRPIELEAFMSLADEKRLALATVAGDVDLATPQGRLVARLKGCVAAHETEHKKARQRRAARQKAERGLPNWSKAFGYLPGPNGPEPDPRTAPLVKQAYEDILAGASLGDVCRQWNDAGAFTITGRPWTTTTLSKFLRKPRNAGLRAYKGARYGPVDRDAIVGKARWSPLVDEATFWAAQAVLDAPGRAPGRKSVRRHLLTGLAGCGKCGNHLAGSYRTDGRVVYVCKACHGVAILADNIEPILYHIVAERLAMPDAVDLLRREIHDAAEAETTRLELETLYGELDRLAVERAEGLLTARQVKISTDIVNAKITKLQARQLDQERLRVFDGIPLGTPRVAGMIAELSPNRFRAVLDVLAEVVVQPVGKSGRIFSPERVQVNWR

SEQ ID NO: 3166 - protein, 485 aa, synthetic construct
MTKKVAIYTRVSTTNQAEEGFSIDEQIDRLTKYAEAMGWQVSDTYTDAGSSGAKLERPAMQRLINDIENKAFDTVLVYKLDRLSRSVRDTLYLVKDVFTKNKIDFISLNESIDTSSAMGSLFLTILSAINEFERENIKERMTMGKLGRAKSGKSMMWTKTAFGYYHNRKTGILEIVPLQATIVEQIFTDYLSGISLTKLRDKLNESGHIGKDIPWSYRTLRQTLDNPVYCGYIKFKDSLFEGMHKPIIPYETYLKVQKELEVRQQQTYERNNNPRPFQAKYMLSGMARCGYCGAPLRIVLGHKRKDGSRTMKYHCANRFPRKTKGVTVYNDNKKCDSGTYDLSNLENTVIDNLIGFQENNDSLLKIINGNNQPILDTSSFKEQISQIDRKIQKNSDLYLSDFITMDELKDRTDSLQAEKKLLKARISENKFNDSTDVFELVKTQLGSIPINELSYDNKKKIVNDLVSKVDVTAENVEIIFKFQLA

SEQ ID NO: 3167 - protein, 452 aa, synthetic construct
MKAAIYIRVSTREQVENYSIPAQTEKLTALCRSKDWDVYDIFIDGGYSGSNMNRPALNEMLSKLHEIDAVVVYRLDRLSRSQRDTITLIEEYFLRNNVEFVSLSETLDTSSPFGRAMIGILSVFAQLERETIRDRMVMGKIKRVEAGLPLTTAKGRTFGYDVIDTKLYINEEEARQLQLIYDIFEEERSITFLQKRLKKLGFKVRTYNCYHNWLTNDLYCGYVSYKDKVHVKGIHEPIISEEQFYRVQEIFARMGKNPNMNRDSASLLNNLVVCSRCGLGFVHRRKDTVSRGKKYHYRYYSCKTYKHTHELEKCGNKIWRADKLEELILNRANNYSFASRNMDKEDELDGLNEKLRIEHAKKKRLFDLYINGSYEVSELDSMMSDIDAQINYYESQVEANEELKKNKKIQENLADLATVDFDSLEFREKQLYLKGLINKIYIDGEQVTIEWL

SEQ ID NO: 3168 - protein, 469 aa, synthetic construct
MCYTTPVRAAVYLRISEDRSGEQLGVARQREDCLKLCDQRKWEPVEYLDNDVSASAGKRRPAYEQMMADITAGKIAAVVAWDLDRLHRRPIELEAFMSLADEKRLALATVAGDVDLATPQGRLVARLKGSVAAHETEHKKARQRRAARQKAERGHPNWSKAFGYLPGPNGPEPDPRTAPLVNQAYADILAGASLGDVCRQWNDAGAFTITGRPWTATTLSKFLRKPRNAGLRAYKGARYGPVDRDAIVGKAQWSPLVDEATFWAAQAVLDAPGRAPGRKSVRRHLLTGLAGCGKCGNHLAGSYRTDGRVVYVCKACHGVAILADNIEPILYHIVAERLAMPDAVDLLRREIHDVAEAETTRLELETLYGELDRLAVERAEGLLTARQVKISTDIVNAKITKLQARQQDQERLRVLDGIPLGTPQVAGVIAELSPDRFRAVLDVLAEVVVQPVGKSGRIFNPERVQVNWR

SEQ ID NO: 3169 - protein, 452 aa, synthetic construct
MKAAIYIRVSTQEQVGNYSIQAQTEKLTALCRSKDWEVYDIFIDGGYSGSNMNRPALNEMLSKLHEIDAVVVYRLDRLSRSQRDTTTLIEEYFLKNNVEFVSLSETLDTSSPFGRAMIGILSVFAQLERETIRDRMVMGKIKRIEAGLPLTTAKGRTFGYDVIDTKLYINEEEAKQLQLIYDIFEEEQSITSLQKRLKKLGFKVRTYNRYNSWLTNDLYCGYVSYKDKVHVKGIHEPIISEEQFYRVQEIFTRVGKNPNMNRDSASLLNNLVVCSKCGLRFVHRSKDTMSRGKKYHYRYYSCKTYKHTHELEKCGNKTWRADKLEELIINRVNNYSFASRNVDKEDELDSLNEKLKIEHAKKRRLFDLYINGSYGVSELDSMMNDIDAQINYYESQIEANEELRKNKKIQENLAGLAAVDFDSLEFREKRLYLKSLINKIYIDGEQVTIEWL

SEQ ID NO: 3170 - protein, 452 aa, synthetic construct
MKAAIYIRVSTREQVENYSIQAQTEKLTALCRSRDWDVYDIFIDGGYSGSNMNRPALNEMLSKLHEIDAVVVYRLDRLSRSQRDTITLIEEYFLKNSVEFVSLSETLDTSSPFGRAMIGILSVFAQLERETIRDRMVMGKIKRIEAGLPLTTAKGRTFGYDVIDTKLYINEEEAKQLQLIYDIFEEERSITSLQKRLKKLGFKVRTYNRYNNWLTNDLYCGYVSYKDKVHVKGIHEPIISEEQFYRVQEIFSRMGKNPNMNRDSASLLNGLVVCSKCGLGFVHRRKDTMSRDKKYHYRYYSCKTYKHIHELEKCGNKIWRADKLEELIINRVNNYSFASRNVDKEDELDSLNEKLKIEHAKKRRLFDLYINGSYEVSELDSMMNDIDAQINYYESQIEANEELKKNKKVQENLAYPATVDFGSLEFREKQLYLKSLINKIYIDDEQVTIEWL

SEQ ID NO: 3171 - protein, 485 aa, synthetic construct
MTKKVAIYTRVSTTNQAEEGFSIDEQVDRLTKYAEAMGWQVSDIYTDAGLSGAKLERPAMQRLINDIENKAFDTVLVYKLDRLSRSVRDTLYLVKDVFTKNKIDFISLNESIDTSSAMGSLFLTILSAINEFERENIKERMTMGKLGRAKSGKSMMWTKTAFGYYHNRKTGILEIVPLQATIVEQIFTDYLSGISLTKLRDKLNESGHIGKDIPWSYRTLRQTLDNPVYCGYIKFKGSLFEGMHKPIIPYETYLKVQKELEERQQQTYKRNNNPRPFQAKYMLSGMARCGYCGAPLRIVLGRKRKDGSRTMKYHCANRFPRKTKGATVYNDNKKCDSGTYDLSNLENTVIDNLIGFQENNDSLLKIINGNDQPILDTSSLRKQISQIDKRIQKNSDLYLNDFITMGELRDRTNSLQAEKKLLKTKISENKFNDSTDVFELVKTQLGSIPINELSYDNKKKIVNNLVSKVDVTADNVDIIFKFQLA

SEQ ID NO: 3172 - protein, 469 aa, synthetic construct
MSYTTPVRAAVYLRISEDRSGEQLGVARQREDCLKLCGQRKWEPVEYLDNDVSASTGKRRPAYEQMLVDITAGKIAAVVAWDLDRLHRRPIELEAFMSLADEKRLALATVAGDVDLATPQGRLVARLKGSVAAHETEHKKARQRRAARQKAERGYPNWSKAFGYLPGPNGPEPDPRTAPLVKQAYADILAGASLGDVCRQWNDAGAFTITGRPWTTTALSKFLRKPRNAGLRAYKGVPYGPVDRDAIVGKALWSPLVDEATFWAAQAVLDAPGRAPGRKSVRRHLLTGLAGCGKCGNHLAGSYRTDGRVVYVCKACHGVAILADSIEPILYHIVAERLARPDAVDLLRCEIHDAAEAETIRLELETLYGELDHLAVERAEGLLTARQVKVSTDIVNAKITKLQARQLDQERLRVFDGIPLGTPQVAGVIAELSPDRFRAVLDVLAEVVVQPVGKSGRIFNPERVQVNWR

SEQ ID NO: 3173 - protein, 469 aa, synthetic construct
MSYTTPVRAAVYLRISEDRSGEQLGVARQREDCLKLCGQRNWVPVEYLDNDVSASTGKRRPAYEQMLADITAGKIAAVVAWDLDRLHRRPIELEAFMSLADEKRLALATVAGDVDLATPQGRLVARLKGSVAAHETEHKKARQRRAARQKAERGHPNWSKAFGYLPGPNGPEPDPRTAPLVKQAYTDILAGASLGDVCRQWNGAGAFTITGRPWTTTTLSKFLRKPRNAGLRAYKGARYGPVDRDAIVGKAQWSPLVDEATFWAAQAVLDAPGRAPGRKSVRRHLLTGLAGCGKCGNHLAGSYRTDGRVVYVCKACHGVAILADNIEPILYHIVAERLAMPDAVDLLRREIHDAAEAETIRLELETLYGELDRLAVERAEGLLTARQVKISTDIVNAKITKLQARRLDRERLRVFDGIPLGTPQVTGMIAELSPDRFRAVLDVLAEVVVQPVGKCGRIFNPERVQVNWR

SEQ ID NO: 3174 - protein, 452 aa, synthetic construct
MKAAIYIRVSTREQVENYSIQAQTEKLTALCRSKDWDVYDIFIDGGYSGSNMNRPALNDMLSKLHEIDAVVVYRLDRLSRSQRDTITLIEEYFLKNNVEFVSLSETLDTSSPFGRAMIGILSVFAQLERETIRDRMVMGKIKRIEAGLPLTTAKGRTFGYDVIDTKLYINEEEAKQLQLIYDIFEEEQSITSLQKRLKKLGFKVRTYNRYNSWLTNDLYCGYVGYKDKVHVKGIHEPIISEEQFYRVQEIFTRMGKNPNMNRDSASLLNNLVVCSKCGLGFVHRRKDTTSRGKKYHYRYYSCKTYKHIHELEKCGNKIWRADKLEELIINRVNNYSLASRDVDKEDELDSLNEKLKIERAKRKRLFDLYIKGSYEVSELDSMMNDIDAQINYYESQIEANEELKKNKKIQENLANLATVDYDSLEFREKQLYLKSLINKIYIDGEQVTIEWL

SEQ ID NO: 3175 - protein, 469 aa, synthetic construct
MSYTTPVRAAVYLRISEDRSGEQLGVARQREDCLKLCGQRKWVPVEYLDNDVSASTGKRRPAYEQMLADITAGKIAAVVAWDLDRLHRRPIELEAFMSLADEKRLALATVAGDVDLATPQGRLVARLKGSVAAHETEHKKARQRRAARQKAERGYPNWSKAFGYLPGPNGPEPDPRTAPLVKQAYADILAGASLGDVCRQWNGAGAFTITGRPWTTTTLSKFLRKPRNAGLRAYKGARHGPVDRDAIVGKAQWSPLVDEATFWAAQAVLDAPGRAPGRKSVRRHLLTGLAGCGKCGNHLAGSYRADGQVVYVCKACHGVAILADNIEPILYHIVAERLAMPDAVDLLRREIHDVAEAETIRLELETLYGELDRLAVERAEGLLTARQVKISTDIVNAKITKLQARQQDQDRLRVLGGIPLGTPQVAGMITELSPDRFRAVLDVLAEVVVQPVGKSGRIFNPKRVQVNWR

SEQ ID NO: 3176 - protein, 469 aa, synthetic construct
MSYTTPVRAAVYLRISEDRSGEQLGVARQREDCLKLCVQRKWVPVEYLDNDVSASTGKRRPAYEQMLADITAGKIAAVVAWDLDRLHRRPIELEAFMSLADEKRLALATVAGDVDLATPQGRLVARLKGSVAAHETEHKKARQRRAARQKAERGYPNWSKAFGYLPGSNGPVPDPRTAPLVKQAYADILAGASLGDVCRQWNDAGAFTITGRPWTTTTLSKFLRKPRNAGLRAYKGVRYGPVDRDAIVGKAQWSPLVDEATFWAAQAVLDAPGRAPGRKSVRRHLLTGLAGCGKCGNHLAGSYRTDGRVVYVCKACHGVAILADNIEPILYHIVTERLAMPDAVDLLRREIHDAAEAETIRLELETLDDELDRLAVERAEGLLTARQVKISTDIVNAKIAKLQARQLDQERLRVLDGIPLGTPQVAGKIAELSPDRFRAVLDVLAEVVVQPVGKSGRIFNPERVQVNWR

SEQ ID NO: 3177 - protein, 452 aa, synthetic construct
MKAAIYIRVSTQEQVGNYSIQAQTEKLTALCRSKDWDVYDIFIDGGYSGSNMNRPALNEMLSKLHEIDAVVVYRLDRLSRSQRDTTTLIEEYFLKNNVEFVSLSETLDTSSPFGRAMIGILSVFAQLERETIRDRMVMGKIKRIEAGLPLTTAKGRTFGYDVIDTKLYINEEEARQLQLIYDIFEEEQSITSLQKRLKKLGFKVRTYNRYNNWLTNDLYCGYVSYKDKVHAKGIHEPIISEEQFYRVQEIFTRMGKNPNMNRGSASLLNNLVVCSKCGLGFVHRSKDTMSGGKKYHYRYYSCKTYKHTHELEKCGNKTWRADRLEELIISRVNNYSFASRSVDKEDELDSLNEKLKIEHAKKKRLFDLYINGSYEVSELDSMMNDIDAQISYYESQIEANEELKKNKKIQETLADLATVDFDSLEFREKQLYLKSLISKIYIDGEQVTIEWL

SEQ ID NO: 3178 - protein, 452 aa, synthetic construct
MKAAIYIRVSTREQVENYSIQAQTERLTALCRSKDWDVYDIFIDGGYSGSNMNRPALNEMLSKLHEIDAVVVYRLDRLSRSQRDTITLIEEYFLKNNVEFVSLSETLDTSSPFGRAMIGILSVFAQLERETIRDRMVMGKIKRIEAGLPLTTAKGRTFGYDVIDTKLYINEEEAKQLQLIYDIFEEEQSITFLQKRLKKLGFKVRTYNRYNNWLTNDLYCGYVSYKDKVHVKGVHEPIISEEQFYRVQEIFTRMGKNPNVNRDSASLLNSLVVCSKCGLSFVHRRKDTMSRGKKYHYRYYSCKTYKHTHELEKCGNKIWRADKLEELIINRVNNYSLASRNVDKEDGLDSLNEKLKTEHAKKKRLFDLYINGSYEVSELDSMMNDIDAQISYYESQIEANEELKKNKKIQESLANLATVDYDSLEFRGKQLYLRSLINKIYIDGEQVTIEWL

SEQ ID NO: 3179 - protein, 452 aa, synthetic construct
MKAAIYIRVSTREQVENYSIQAQTEKLTALCRSKGWDVYDIFIDGGYSGSNMNRPALNEMLSKLHEIDAVVVYRLDRLSRSQRDTITLIEEYFLKNNVEFVSLSETLDTSSPFGRAMIGILSVFAQLERETIRDRMVMGKIKRVEAGLPLTTAKGRTFGYDVIGTKLYINEEEAKQLQLIYDIFEEEQSITLLQKRLKKLGFKVRTYSRYNNWLTNDLYCGYVSYKDKVHVKGIHEPIISEEQFYRVQEIFARMGKNPNMNRDSASLLNNLVVCSKCGLGFVHRRKDTMSRGKKYHYRYYSCKTYKHIHELEKCGNKIWRADKLEELIINRVNNYSFASRNVDKEDELDSLNEKLKIEHAKKKRLFELYINGSYEVSELDSMMSDIDAQINYYESQIEANEELKKSKKIQEDLAGLATVDFDSLEFREKQRYLKSLINKIYIDGEQVTVEWL

SEQ ID NO: 3180 - protein, 452 aa, synthetic construct
MKAAIYIRVSTREQVENYSIQAQTEKLTALCRSKDWDVYDIFIDGGYSGSNMNRPALNEMLSKLHEIDAVVVYRLDRLSRSQRDTITLIEEYFLKNNVEFVSLSETLDTSSPFGRAMIGILSVFAQLERETIRDRMVMGKIKRIEAGLPLTTAKGRTFGYDVIDTKLYINEEEAKQLQLIYDIFEEEQSITFLQKRLKKLGFKVRTYNRYISWLTNDLYCGYVSYKDKVHVKGIHEPIISEKQFYRVQEIFTRMGKNPNMNRDSASLLNNLVVCSKCGLGFVHRRKDTVSRGKKYHYRYYSCKTYKHIHELEKCGNRIWRADKLEELIINRVNNYSFASRNVDKAEELDSLNEKLEVEHAKKKRLFDLYINGSYNVSELDSMMNDIDAQINYYESQIEANEELKKNKKIQENLANLATVDYDSLEFREKQLYLKSLINKIYIDGEQVTIEWL

SEQ ID NO: 3181 - protein, 452 aa, synthetic construct
MKAAIYIRVSTQEQVENYSIQAQTEKLTALCRSKDWDVYDIFVDGGYSGSNMNRPALNEMLSKLHEIDAVVVYRLDRLSRSQRDTTTLIEEYFLKNNVEFVSLSETLDTSSPFGRAMIGILSVFAQLERETIRDRMVMGKIKRIEAGLPLTTAKGRTFGYDVIDTKLYINEEEAKQLRLIYDIFEEEQSITSLQKRLKKLGFKVRTYNRYSNWLTNDLYCGYVSYKDKVHVKGIHEPIISEEQFYRVQEIFTRMGKNPNMNRDSASLLNGLVVCSRCGLGFVHRSKDTMSRGKKYHYRYYSCKTYKHTHELEKCGNKTWRADKLEELIINRVNNYSFASRNVDKEDELDSLNEKLKTERAKKKRLFDLYINGNYEVSELDSMMNDIDAQINYYESKIEANEELRKNQKIQENLATLATVDFDSLEFREKQLYLRSLISKIYIDGEQVTIEWL

SEQ ID NO: 3182 - protein, 485 aa, synthetic construct
MTKKVAIYTRVSTTNQAEEGFSIGEQIDRLTKYAEAMGWQVSDTYTDAGFSGAKLERPAMQRLINDIENKAFDTVLVYKLDRLSRSVRDTLYLVKDVLTKNKIDFISLNESIDTSSAMGSLFLTILSAINEFERENIKERMTMGKLGRAKSGKSMMWTRTAFGYYHNRKTGILEIVPLQATIVEQIFTDYLSGISLTKLRDKLNESGHIGKDIPWSYRTLRQTLGNPVYCGYIKFKGSLFEGMHKPIIPYETYLKVQKELEERQQQTYERSNNPRPFQAKYMLSGMARCGYCGAPLRIVLGHKRKDGSRTMKYHCANRFPRRTRGVTVYNDNKKCDSGTYDLSSLENTVIDNLIGFQENNDSLLKIINGNNQPILDASSFKNQISQIDKKIQKNSDLYLNDFITMDELKDRTDSLQAEKKLLKAKISENKFNDSTDVFELVKTQLGSIPINELSYDNKKKIVNNLVSKVDVTTDNVDIIFKFQLA

SEQ ID NO: 3183 - protein, 452 aa, synthetic construct
MKAAIYIRVSTREQVENYSIQAQTEKLTALCRSKDWDVYDVFIDGGYSGSNMNRPALNEMLSKLHEIDAVVVYRLDRLSRSQRDTITLIEEYFLKNNVEFVSLSETLDTSSPFGRAMIGILSVFAQLERETIRDRMVMGKIKRIEAGLPLTTAKGRTFGYDVIDTKLYINEEEAKQLQLIYDIFEEEQSITFLQKRLKKLGFKVHTYNRYSNWLTNDLYCGYVSYKDKVRVKGIHEPIISEEQFYRVQEIFARMGKNPNMNRDSASLLNNLVVCSKCGLGFVHRRKDTMSRGKKYHYRYYSCKTYKHTHELEKCGNKIWRADKLEELIINRVNNYSFASRNVDKEDELDSLNEKLKIEHAKKRRLFDLHINGSYEMSELVGMMNDIDAQINYYESQIEANEELRKNKKIQENLADLATVDYDSLEFREKQLYLKSLISKIYIDGEQVTIEWL

SEQ ID NO: 3184 - protein, 452 aa, synthetic construct
MKAAIYIRVSTREQVENYSIQAQTEKLTALCRSKDWDVYDIFIDGGYSGSNMNRPALNEMLSKLHEIDAVVVYRLDRLSRSQRDTITLIEEYFLKNNVEFVSLSETLDTSSPFGRAMIGILSVFAQLERETIRDRMVMGKIKRVEAGLPLTTAKGRTFGYDVIDTKLYINEEEAKQLQLIYDIFEEEQSITFLQKRLKKLGLKVRTYSRYNNWLTNDLYCGYVSYKDKVHVKGIHEPIISEEQFYRVQEIFTRMGKNPNMNRDSASLLNNLVVCSKCGLSFVHRRKDTTSRGKKYHYRYYSCKTYKHTHELEKCGNKIWRADKLEELIIDRVNNYSFASRNVDKEDELDSLNERLKIEHAKKKRLFDLYINGSYEVSELDSMMNDIDAQINHYESQIEANEEPKKNKKIQENLANLATMDYDSLEFREKQLYLKSLINKIYIDGEQVTIEWL

SEQ ID NO: 3185 - protein, 452 aa, synthetic construct
MKAAIYIRVSTQEQVENYSIQAQTEKLTALCRSKDWDVYDIFIDGGYSGSNMNRPALNEMLSKLHEIDAVVVYRLDRLSRSQRDTTTLIEEYFLKNNVEFVSLSETLDTSSPFGRAMIGILSVFAQLERETIRDRMVMGKIKRVEAGLPLTTAKGRTFGYDVIDTKLYINEEEAKQLQLIYDIFEEEQSITSLQKRLKKLGFKVRTYNRYNNWLTNDLYCGYVSYKDKVHVKGIHEPIISEEQFYRVQEIFTRMGKNPNMNRDSASLLSNLVVCSKCGLGFVHRSKDTMSRGKKYHYRYYSCKTYKHTHELEKCGNKIWRADKLEELIVNRVNNYSLASRNVDKEDELDSLNEKLRIEHARKKRLFDLYINGSYEVSELDSMMNDIDAQINYYEGQIEASEELKKNKKIQENLADLVTVDYDSLEFREKQLYLKSLINKIYIDGEQVTIDWL

SEQ ID NO: 3186 - protein, 469 aa, synthetic construct
MSYTTPVRAAVYLRISEDRSGEQLGVARQREDCLKLCDQRKWVPVEYLDNDVSASTGKRRPAYEQMLADITAGKIAAVVAWDLDRLHRRPIELEAFMSLADEKRLALATVAGDVDLATPQGRLVARLKGSVAAHETEHKRARQCRAARQKAERGHPNWSKAFGYLPGPNGPEPDPRTAPLVKQAYADILAGASLGDVCRQWNDAGAFTITGRPWTTTTLSKFLRKPRNAGLRAYKGARYGPVDRDAIVGKAQWSPLVDEATFWAAQAVLDAPGRTPGRKSVRRHLLTGLAGCGKCGNHLAGSYRTDGRVVYVCKACHGVVILADNIEPILYHIVAERLAMPDAVDLLCRGIHDAAEAETIRLELETLHGELDRLAVERAEGLLTARQVKISTDIVNAKITKLQARQLDQERLRVFEGIPLGTPQVAGMIAELSPNRFRAVLDVLAEVVVQPVGKSGRILNPERVQVNWR

SEQ ID NO: 3187 - protein, 452 aa, synthetic construct
MKAAIYIRVSTREQVENYSIQAQTERLTALCRSKDWDVYDIFIDGGYSGSNMNRPALNEMLSKLHEIDAVVVYRLDRLSRSQRDTITLIEEYFLKNNVEFVSLSETLDTSSPFGRAMIGILSVFAQLERETIRDRMVMGKIKRIEAGLPLTTAKGRTFGYDVIDTKLYINKEEAKQLQLIYDIFEEEQSITFLQKRLKKLGFKVRTYSRYNSWLTNDLYCGYVSYKDKVHVKGIHEPIISEEQFYRVQEIFTRMGKNPNMNRDSASLLNNLVVCGKCGLGFVHRRKDTVSRGKKYHYRYYSCKTYKHTHELEKCGNKIWRADKLEELIINRVNNYSFASRNVDKEDELDSLNEKLKIEHAKRKRLFDLYINGSYEVSELDSMMNDIDAQINYYESQIEANEELKKNKKIQENLANLATVDYDSLEFREKQLYLKSLINKIYIDGEQVTIEWL

SEQ ID NO: 3188 - protein, 452 aa, synthetic construct
MKAAIYIRVSTREQVENYSIQAQTEKLTALCRSKDWDVYDIFIDGGYSGSNMNRPALNEMLSKLHEIDAVVVYRLDRLSRSQRDTITLIEEYFLKNNVEFVSLSETLDTSSPFGRAMISILSVFAQLERETIRDRMVMGKIKRIEAGLPLTTAKGRTFGYDVIDTKLYINEEEAKQLQLIYDIFEEERSITFLQKRLKKLGFKVHTYSRYNNWLTNDLYCGYVSYKDKVHVKGIHEPIISEEQFYRVQEIFTRMGKNPNMNRDSASLLNSLVVCSKCGLGFVHRRKDTTSRGKKYHYRYYSCKTYKHIHELEKCGNKIWRADRLEELIINRVNNYSFASRNVDKEDELGSLNEKLKIEHAKRKRLFDLYINGSYEVSELDSMMSDIDAQINYYESQIEAYEELKKNKKIQENLANLATVDYDSLEFREKQLYLKSLINKIYIDGEQVTIEWL

SEQ ID NO: 3189 - protein, 485 aa, synthetic construct
MTKKVAIYTRVSTTNQAEEGFSIDEQIDRLTKYAEAMGWQVSDTYTDAGFSGAKLKRPAMQRLINDIENRAFDTVLVYKLDRLSRSVRDTLYLVKDVFTKNKIDFISLSESIDTSSAMGSLFLTILSAINEFERENIKERMTMGKLGRAKSGKSMMWTKTAFGYYHNRKTGILEIVPLQATIVEQIFTDYLSGISLTKLRDKLNESGHIGKDIPWSYRTLRQTLDNPVYCGYIKFKDSLFEGMHKPIIPYETYLKVQKELEERQQQTYERNNNPRPFQAKYMLSGMARCGYCGAPLRIVLGHKRKDGSRTMKYHCANRFPRKTKGVTVYNDNKKCDSGTYDLSNLENIVIDNLIGFQENNDSLLKIINGNNQPTLDTSSFKKQISQIDKKIQKNSDLYLNDFITMDELKDRTDSLQAEKRLLKAKISENKFNGSTDVFELVKTQLGSIPINELSYDNKKKIVNNLVSKVDVTADNVDIIFKFQLT

SEQ ID NO: 3190 - protein, 469 aa, synthetic construct
MCYTTPVRAAVYLRISEDRSGEQLGVARQREDCLKLCGQRKWEPVEYLDNDVSASTGRRRPAYEQMLADITAGKIAAVVAWDLDRLHRRPIELEAFMSLADEKRLALATVAGDIDLATPQGRLVARLKGSVAAHETEHKKARQRRAARQKAERGYPNWSKAFGYLQGPDGPEPDPQTAPLVKQAYADILAGASLGDVCRRWNGAGAFTITGRPWTTTALSKFLRKPRNAGLRAYKGARYGPVDRDAIVGKAQWSPLVDEATFWAAQAVLDAPGRTPGRKSVRRHLLTGLAGCGKCGNHLAGSYRTDGRVVYVCKACHGVAILADNIEPILYHIVAERLAMPDAVDLLRREIHDAAEAETIRLELETLYGELDRLAVERAEGLLTARQVKISTDIVNAKITKLQARQLDQERLRVFDGIPLGTPQVAGMIAELSPDRFRAVLDVLAEVVVQPVGKSGRVFNPERVQVNWR

SEQ ID NO: 3191 - protein, 452 aa, synthetic construct
MKAAIYIRVSTQEQVENYSIQAQTEKLTALCRSKDWDVYDIFIDGGYSGSNMNRPALNEMLSRLHEIDAVVVYRLDRLSRSQRDTTTLIEEYFLKNNVEFVSLSETLDTSSPFGRAMIGILSVFAQLERETIRDRMVMGKIKRIEAGLPLTTAKGRTFGYDVIDTKLYINEEEAKQLQLIYDIFEEEQSITSLQKRLKKLGFKVRTYNRYNNWLTNDLYCGYVSYKDKVHVKGIHEPIISEEQFYRVQEIFTRTGKNPNMNRDSASLLNNLVVCGKCGLGFVHRSKDTMSRGKKYHYRYYSCKTYKHTHELEKCGNKTWRADKLEELIINRVNNHSLASRNVDKEDELDSLNEKLKVEHAKKKRLFDLYINGSYEVSELDSMMNDVDTQINYYEGQIEANEELKKNKKIQENLADLAIVDFDSLEFREKQLYLKGLINKIYIDGEQVTIEWL

SEQ ID NO: 3192 - protein, 469 aa, synthetic construct
MCYTTPVRAAVYLRISEDRSGEQLGVARQREDCLKLCDQRKWEPVEYLDNDVSASTGKRRPAYEQMLADITAGKIAAVVAWDLDRLHRRPIELEAFVCLADEKRLALATVAGDVDLATPQGRLVARLKGSVAAHETEHKKARQRRAARQKAERGHPNWSKAFGYLPGPDGPEPDPRTAPLVKQAYADILAGASLGDVCRQWNDAGVFTITGRPWTTTTLSKFLRKPRNAGLRAYKGARYGPVDRGAIVGKAQWSPLVDEATFWAAQAVLDAPGRAPGRKSVRRHLLTGLAGCGKCGNHLAGSYRTDGRVVYVCKACHGVAILADNIEPILYHIVAERLAMPDAVDLLRREIHDAAEAETIRLELETLYGELDRLAVERAEGLLTARQVKISTDIVNAKITKLQARQLDQERLRVFDGIPLGTPQVAGMVAELSPNRFRAVLDVLAEVVVQPVGKSGRIFNPERVQVNWR

SEQ ID NO: 3193 - protein, 485 aa, synthetic construct
MTKKVAIYTRVSTTDQAEEGFSIDEQTDRLTKYAEAMGWQVSDTYTDAGFSGAKLERPAMQRLINDIANKAFDTVLVYKLDRLSRSVRDTLYLVKDVFTKNKIDFISLNESIDTSSAMGSLFLTILSAINEFERENIKERMTMGKLGRAKSGKSMMWTKTAFGYYHNRKTGILEIVPLQATIVEQIFTDYLSGISLTKLRDKLNESGHIGKDIPWSYRTLRQTLDNPVYCGYIKFKGNLFEGMHKPIIPYETYLKVQEELEGRQQQTYERNNNPRPFQAKYMLSGMARCGYCGAPLKIVLGHKRKDGSRTMKYHCANRFPRKTKGVTVYNDNKKCNSGTYDLSSLENTVIDNLIGFQENNDSLLKIINGNNQPILDTSGLKKQISQIDKKIQKISDLYLNDFITMDELKDRTDSLLAEKKLLNAKISESKLNDSTDVFELVKTQLGSTPINELSYDNKKKIVNNLVSKVDVTADNVDIIFKFQLA

SEQ ID NO: 3194 - protein, 485 aa, synthetic construct
MTRKVAIYTRVSTTNQAEEGFSIDEQIDRLTKYAEAMGWQVSDTYTDAGFSGAKLGRPAMQRLINDIENRAFDTVLVYKLDRLSRSVRDTLYLVKDVFTKNKVDFISLNESIDTSSAMGSLFLTILSAINEFERENIKERMTMGKLGRAKSGKSMMWTKTAFGYYHNRKTGILEIVPLQAAIVEQIFTDYLSGISLTKLRDKLNESGHIGKDIPWSYRTLRQTLDNPVYCGYIKFKDSLFEGMHKPIIPYETYLKVQKELEERQQQTYERNNNPRPFQAKYMLSGMARCGYCGAPLRIVLGHKRKDGSRTMKYHCANRFPRKTKGVTVYNDNKKCDSGTYDLRNLENIVIDNLIGFQENNDSLLKIINGNNQPILDASSFKKQISQIDKKIQKNSDLYLNDFITMDELKERTDSLQAEKRLLKAKISENKFDGSTDVFELAKAQLGSIPINELSYDNKKKIVNNLVSKVDVTADNVDIIFKFQLA

SEQ ID NO: 3195 - protein, 469 aa, synthetic construct
MSYTTPVRAAVYLRISEDRSGEQLGVARQREDCLKLCDQRKWVPVEYLDNDVSASTGKRRPAYEQMLADITAGKVAAVVAWDLDRLHRRPIELEAFMSLADEKRLALATVAGDVDLATPQGRLVARLKGSVAAHETEHKKARQRRAARQKAERGLPNWSKAFGYLPGPNGPEPDPRTAPLVKQAYADILAGASLGDVCRQWNDAGALTITGRPWTTTTLSKFLRKPRNAGLRAYKGARYGPVDRDAIVGKAQWSPLVDEGTFWAAQAVLDAPGRAPGRKSVRRYLLTGLAGCGKCGNHLAGSCRTDGRVVYVCKACHGVSILAVNIEPILYHIVAERLAMPGAVSLLRREVHDAAEAETIRLELETLYGELDRLAVERAEGLLTARQVKISTDIVSAKITKLQARQLDQERLRVFDGIPLGTPQAAGVIAELSPDRFRAVLDVLAEVVVQPVSKSGRIFNPERVQVNWR

SEQ ID NO: 3196 - protein, 485 aa, synthetic construct
MTKKVAIYTRVSTTNQAEEGFSIDEQIDRLTKYAEAMGWQVGDTYTDAGFSGAKLERPAMQRLIDDIENRAFDTVLVYKLDRLSRSVRDTLYLVKDVFTKNKIDFISLNECIDTSSAMGSLFLTILSAINEFERENIKERMTMGKLGRAKSGKSMMWTKTAFGYYHNRITGILEIVPLQATIVEQIFTDYLSGISLTKLRDKLNESGHIGKDIPWSYRTLRQTLDNPVYCGYIKFKDSLFEGMHKPIIPYETYLRVQKELEERQQQTYERNNNPRPFQAKYMLSGMARCGYCGAPLRIVLGHKRKDGSRTMKYHCANRFPRKTKGVTVYNDNKKCDSGTYDLSDLENTVIDNLIGFQENNDSLLRIVNGNNQPTLDTSSFKKQISQIDKKIQKNSDLYLNGFITMDELKDRTDRLRAEKKLLKAKISENKFDDSTDVFELVKTQLGSIPINELSYDDKKKIVNNLVSKVDVTADNVDIIFKFQLA

SEQ ID NO: 3197 - protein, 485 aa, synthetic construct
MTKKVAIYTRVSTTNQAEEGFSIDEQIDRLTKYAEAMGWQVSDTYTDAGFSGAKLARPAMQRLINDIENKAFDTVLVYKLDRLSRSVRDTLYLVKDVFTKNKIDFISLSESIDTSSAMGSLFLTILSAINEFERENIKERMTMGKLGRAKSGKSMMWTKTAFGYCHNRKTGILEIVPLQATIVEQIFTDYLSGISLTKLRDKLNESGHIGKDIPWSYRTLRQTLDNPVYCGYIKFKGSLFEGMHKPIIPYETYLKVQKELEVRQQQTYERNNNPRPFQAKYMLSGMARCGYCGAPLRIVLGHKRKDGSRTMKYHCANRFPRKTKGVTVYNDNKKCDSGTYDLSNLENTVVDNLVGFQENNDSLLKIINGNNQPILDTSSFKKQVSQIDKKIQKNSDLYLNDFITMDELKDRTDGLQAEKKLLKAKISENKFNDSTDVFELVKTQLGSIPINELSYDDKKKIVNNLVSKVDVTADNVDIVFKFQQA

SEQ ID NO: 3198 - protein, 452 aa, synthetic construct
MKAAIYIRVSTREQVENYSIQAQTEKLTALCRSKGWDVYDIFIDGGYSGSNMNRPALNEMLSKLHEIDAVVVYRLDRLSRSQRDTITLIEEYFLKNNVEFVSLSETLDTSSPFGRAMIGILSVFAQLERETIRDRMVMGKIKRIEAGLPLTTAKGRTFGYDVIDTKLYINEEEAKQLQLIYDIFEEEQSITFLQRRLKKLGFKVRTYNRYNNWLTNDLYCGYVSYKDKVHVKGIHEPIISEEQFYRVQEIFTRMGKNPNMNRGSASLLNNLVVCSKCGLGFVHRRKDIMSRGKKYHYRYYSCKTYKHIHELEKCGNKIWRADKLEELVINRVNNYSFASRNADKEDELDSLNEKLKIEHAKKKRLFDLYINGSYEVSELDSLMSDIDAQISNYESQIEANEELKKNKKIQENLANLATVDFDSLEFREKQLYLKSLINKIYIDGEQVTIEWL

SEQ ID NO: 3199 - protein, 452 aa, synthetic construct
MKAAIYIRVSTQEQVGNYSIQAQTEKLTALCRSKDWDVYDIFVDGGYSGSNMNRPALNEMLSKLHEIDAVVVYRLDRLSRSQRDTTTLIEEYFLKNNVEFVSLSETLDTSSPFGRAMIGILSVFAQLERETIRDRMVMGKIKRIEAGLPLTTAKGRTFGYDVIDTKLYINEEEAKQLQLIYDIFEEEQSITFLQKRLKKLGFKVRTYNRYSNWLTNDLYCGYVSYKDKVHVKGIHEPIISEEQFYRVQEIFTRMGKNPNMNRDSASLLNNLVVCSKCGLGFVHRSKDTMCRGKKYHYRYYSCKTYKHAHELEKCGNKTWRADKLEELIINRVNNYSFAGRNVDKEDELDSLNEKLKIEHAKKKRLFDLYINGSYEVSELDSMMNDIDAQINHYESQIEANEELRRNKKIQENLADLATVDFDSLGFREKQLYLKSLINKIYIDGEQVTIEWL

SEQ ID NO: 3200 - protein, 452 aa, synthetic construct
MKAAIYIRVSTREQVENYSIQAQTEKLTALCRSKDWDVYDIFIDGGYSGSNMNRPALNEMLSKLHEIDAVVVYRLDRLSRSQRDTITLIEEYFLKNNVEFVSLSETLDTSSPFGRAMIGILSVFAQLERETIRDRMVMGKIKRIEAGLPLTTAKGRTFGYDVIDTKLYINEEEAKQLQLIYDIFEEEQSITSLQKRLKKLGLKVRTYNRYSNWLTNDLYCGYVSYKDKVHVKGIHEPIISEEQFYRVQEIFTRMGKNPNMNRDSASLLNNLVVCSKCGLGFVHRRKDAMSRDKKYHYRYYSCKTYKHIHELEKCGNKIWRADKLEELIINRVNSYSLASRNVDKEDELDSLNEKLKVEHAKKKRLFDLYINGSYEVSELDSMMNDIDAQINYYESQIEANEELKRNKKIQENLADLATVDFDSLEFREKQRYLRSLINKIYIDGEQVTIEWL

SEQ ID NO: 3201 - protein, 469 aa, synthetic construct
MCYTTPVRAAVYLRISEDRSGEQLGVARQREDCLKLCGQRKWVPVEYLDNDVSASTGKRRPAYEQMLADITAGKIAAVVAWDLDRLHRRPIELEAFMSLADEKRLALATVAGDVDLATPQGRLVARMKGCVAAHETEHKKARQRRAARQKAERGLPNWSKAFGYLPGPNGPEPDPRTAPLVKQAYADILAGASLGDVCRQWNDAGAFTITGRPWTTTTLSKFLRKPRNAGLRAYKGARYGPVDRDAIVGKALWSPLVDEATFWAAQAVLDAPGRAPGRKSVRRHLLTGLAGCGKCGNHLAGSYRTDGQIVYVCKACHGVSILAVNIEPILYHVVAERLAMPDAADLLRREIHDAAEAETIRLELETLYGELDRLAVERAEGLLTARQVKISTDIVNAKITKLQARQLDQERLRVLDGIPLGTPQVAGMIAELSPDRFRAVLDVLAEVVVQPVGKSGRIFSPERVQVNWR

SEQ ID NO: 3202 - protein, 469 aa, synthetic construct
MSYTTPVRAAVYLRISEDRSGEQLGVTRQREDCLKLCDQRKWVPVEYLDNDVSASTGKRRSAYEQMLADITAGKIAAVVAWDLDRLHRRPMELEAFMSLADEKRLALATVAGDVDLATPQGRLVARLKGSVAAHETEHKKARQRRAARQKAERGHPNWSKAFGYLPGPNGPEPDPRTAPLVKQAYANILAGASIGDVCRQWNDAGAFTITGRPWTTTTLSKFLRKPRNAGLRAYKGARYGPVDRDAIVGKAQWSPLVDEATFWAAQAVLDAPGRAPGRKSVRRHLLTGLAGCGKCGNHLAGSYRTNGRVVYVCKACHGVAILADNIEPILYHIVAERLAMPDAVDLLRREIHDAAEAEAIRLELETLYGELDRLAVERAEGLLTARQVKISTDIVDAKITRLQARQLDQERLRVLDGIPLGTPQVAGMIAELSPDRFRAVLDVLAEVVVQPVGKSGRIFNPERVQVNWR

SEQ ID NO: 3203 - protein, 485 aa, synthetic construct
MTKKVAIYTRVSTTNQAEEGFSIDEQIDRLTKYAEAMGWQVSDTYTDAGSSGAKLERPAMQRLINDIENKAFDTVLVYKLDRLSRSVRDTLYLVKDVFTKNKIDFISLNESIDTSSAMGSLFLTILSAINEFERENIKERMTMGRLGRAKSGKSMMWTKTAFGYYHNRKTGILEIVPLQATIVEQIFTDYLSGISLTKLRDKLNESGHIGKDIPWSYRTLRQTLDNPVYCGYIKFKGSLFEGMHKPIIPYETYLKVQRELEERQQQTYERNNNPRPFQAKYMLSGMARCGYCGAPLRIVLGHKRKDGSRTMKYHCANRFPRKTKGVTVYNDNKKCDSGTYDLSNLENAVVDNLIGFQENDDSLLKIINGNNQPILDTSSFKKQISQIDKKIQKNSDLYLNDFITMDELKDRTDSLQAERKLLKAKISENKFNDSTAVFELVKTQLGSIPINELSYDDKKKIVNNLVSKVDVTADNVYIIFKFQLA

SEQ ID NO: 3204 - protein, 485 aa, synthetic construct
MTKKVAIYTRVSTTNQAEEGFSIDEQTDRLTKYAEAMGWQVSDTYTDAGFSGAKLERPAMQRLINDIENKAFDTVLVYKLDRLSRSVRDTLYLVKDVFTKNKIDFISLSESIDTSSAMGSLFLTILSAINEFERENIKERMTMGKLGRAKSGKSMMWTKTAFGYYHNRKTGILEIVPLQATIVEQIFADYLSGISLTKLRDKLNESGHIGKDIPWSYRTLRQTLDNPVYCGYIKFKDSLFEGMHKPIIPYETYLKVQKELEERQQQTYERNNNPRPFQAKYMLSGMARCGYCGAPLRIVLGRKRKDGSRTMKYHCANRFPRKTRGVTAYNDNKKCDSGTYDLRNLENTVIDTLIGFQENNNGLLEIINGNNQPALDTSSFEKQISQIDKKIQKNSDLYLNDFITMDELKDRTDSLQAEKKLLKAKISENKFNDSTGVFELVKTQLGSIPINELSYDNKKKIVNNLVSKVDVTADNVDIIFKFQLA

SEQ ID NO: 3205 - protein, 452 aa, synthetic construct
MKAAIYIRVSTQEQVGNYSIQAQTEKLTALCRSKDWDVYDIFVDGGYSGSNMNRPALNEMLSKLHEIDAVVVYRLDRLSRSQRDTTTLIEEYFLKNNVEFVSLSETLDTSSPFGRAMIGILSVFAQLERETIRDRMVMGKIKRVEAGLPLTTAKGRTFGYDVIDTKLYINEEEAKQLQLIYDIFEEEQSITSLQKRLKKLGFKVRTYNRYNSWLTNDLYCGYVSYKDKVHVKGIHEPIISEEQFYRVQEIFARMGKNPNMNRDSASLLSNLVVCSKCGLSFVHRSKDTMSRGKKYHYRYYSCKTYKHTHELEKCGNKTWRADELEGLIIDRVNNYSFASRNVDKEDELDSLNEKLKIEHAKKKRLFDLYINGSYEVSELDSMMNDIDAQINYYEGQIEANEELKRNKKIQENLADLAAVDFDSLGFREKQLYLKSLINKIYIDGEQVTIEWL

SEQ ID NO: 3206 - protein, 452 aa, synthetic construct
MKAAIYIRVSTREQVENYSIQAQTEKLTALCRSKDWDVYDIFIDGGYSGSNMNRPALNEMLSKLHEIDAVVVYRLDRLSRSQRDTITLIEEYFLKNNVEFVSLSETLDTSSPFGRAMIGILSVFAQLERETIRDRMVMGKIKRVEAGLPLTTAKGRTFGYDVVDTRLYINEEEARQLQLIYDIFEEEQSITFLQKRLKKLGFKVRTYSCYNNWLTNDLYCGYVSYKDKVHVKGIHEPIISEEQFYRVQEIFTRMGKNPNMNRDSASLLHNLVVCSKCGLGFVHRRKDTMSRGKRYHYRYYSCKTYKHTHELEKCGNKIWRADKLEELIIDRVNNYSLASRNVDKKDELDSLNEKLKIEHAKKRRLFDLYINGSYEVSELDSMMNDIDALINYYESQIEANEELKRSKKIQENLAELATVDFGSLEFREKQLYLKSLISKIYIDGEQVTIEWL

SEQ ID NO: 3207 - protein, 485 aa, synthetic construct
MTKKVAIYTRVSTTNQAEEGFSIDEQTDRLTKYAEAMGWQVSDTYTDAGFSGAKLKRPAMQRLINDIESKAFDTVLVYKLDRLSRSVRDTLYLVKDVFTKNKIDFISLNESIDTSSAMGSLFLTILSAINEFERENIKERMTMGKLGRAKSGKSMMWTKTAFGYYHNRKTGILEIVPLQATIVEQIFTDYLNGISLTKLRDKLNESGHIGKDVPWSYRTLRQTLDNPVYCGYIKFKDSLFEGMHKPIIPYETYLRVQKELEERQRQAYERNNNPRPFQAKYMLSGMARCGYCGAPLRIVLGHKRKDGSRTMKYHCANRFPRKTKGVTVYNDNKKCDSGTYDLSNLENTVIGNLTGFQENNDSLLKTINGNNQPILDTSSFKRQISQIDKKIQKNSNLYLNDFITMDELKERTDSLQAEKKLLKAKISENKFNDSTDVFELVKTQLGSIPINELSYDNKKKIVNSLVSKVDVTADNVDIIFKFQLA

SEQ ID NO: 3208 - protein, 485 aa, synthetic construct
MTKKVAIYTRVSTTNQAEEGFSIDEQIDRLTKYAEAMGWQVSDTYTDAGFSGAKLERPAMQRLINDIENKAFDAVLVYKLDRLSRSVRDTLYLVKDVFTKNKIDFISLNESIDTSSAMGSLFLTILSAINEFERENIKERMTMGKLGRAKSGKSMMWTKTAFGYYHNRKTGILEIVPLQAAIVEQIFTDYLSGISLTKLRDKLNESGHIGKDIPWSYRTLRQTLDNPVYCGYIKFKDSLFEGMHKPIIPYETYLKVQKELEERQQQTYERNNNPRPFQAKYMLSGMARCGYCGAPLRIVLGHRRKDGSRTMKYHCANRFPRKTKGVTVYNDNKKCDSGTYDLSNLENTVIDNLIGFQENNDSLLKIINGNNQPILDTSSFEKQISQIDKKIQKNSDLYLNDFITMDELKVRTDSLQAEKNLLKAKISENKFNDSTDVFELVKTQLGSIPINELSYDDKKRIVNNLVSKVDVTADNVDIIFKFQLA

SEQ ID NO: 3209 - protein, 452 aa, synthetic construct
MKAAIYIRVSTREQVENYSIQAQTEKLTALCRSKDWDVYDIFIDGGYSGSNMNRPALNEMLSKLHEIDAVVVYRLDRLSRSQRDTITLIEEYFLKNNVEFVSLSETLDTSSPFGRAMIGILSVFAQLERETIRDRMVMGKIKRIEAGLPLTTAKGRTFGYDVIDTKLYINEEEAKQLQLIYDIFEEEQSITFLQKRLKKLGFKVRTYSRYNSWLTNDLYCGYVSYKDKVHVKGIHEPIISEEQFYRVQEIFTRMGKNPNMNRGSASLLNNLVVCSKCGLGFVHRRKDTMSRGKKYHYRYYSCKTYKHTHELEKCGNKIWRADKLEELIINRVNNYSFASRSADKEDELDSLNEKLKVEHAKKKRLFDLYINGSYEVSELDSMMNDIDARIGYYESRIEANEELKKNKKIQESLANLATVDYDSLEFREKQLYLKSLINKIYIDGEQVTIEWL

SEQ ID NO: 3210 - protein, 452 aa, synthetic construct
MKAAIYIRVSTREQVENYSIQAQTEKLTALCRSKDWDVYDVFIDGGYSGSNMNRPALNEMLSKLHEIDAVVVYRLDRLSRSQRDTITLIEEYFLKNNVEFVSLSETLDTSSPFGRAMIGILSVFAQLERETIRDRMVMGKIKRIEAGLPLTTAKGRTFGYDVIDTRLYVNEEEAKQLKLIYDIFEEEQSITFLQKRLKELGFKVRTYNRYSNWLTNDLYCGYVSYKDKVHVKGIHEPIISEEQFYRVQEVFARMGKNPNMNRDSASLLNNLVVCSKCGLSFVHRRKDIMSHGKKYHYRYYSCKTYKHIHELEKCGNKIWRADKLEELIINRVNDYSVASRNVDKEDELDSLNEKLKIEHAKKKRLFDLYINGSYEVSELDSMMNDIDAQIDYYKSQIEANEELKKDKKIQENLAYLATADFDSLEFREKQLYLKSLINKIYIDGEQVTIEWL

SEQ ID NO: 3211 - protein, 452 aa, synthetic construct
MKAAIYIRVSTREQVENYSIQAQTEKLTALCRSKDWDVYDIFIDGGYSGSNMNRPALNEMLSKLHEIDAVVVYRLDRLSRSQRDTITLIEEYFLKNNVEFVSLSETLDTSSPFGRAMIGILSVFAQLERETIRDRMVMGKIKRIEAGLPLTTAKGRTFGYDVIDTKLYINEEEAKQLQLIYDIFEEEQSITSLQKRLKKLGFKVHSYNRYNNWLTNDLYCGYVSYKDKVHVKGIHEPIISEEQFYCVQEIFARMGKNPNMNRDSASLLNSLVVCSKCGLGFVHRRKDTVSRGKKYRYRYYSCKTYKHTHELEKCGNKIWRADKLEELIINRVNNYSFASRNVDKEDELDSLNEKLRIEHAKKKRLFDLYINGSYEVSELDSMMNDIDAQINYYESQIEANEELKKNKKVQENLADLATMDYDSLEFREKRLYLKSLINKIYIDGEQVTIEWL

SEQ ID NO: 3212 - protein, 485 aa, synthetic construct
MTKKVAIYTRVSTTNQAEEGFSIDEQIDRLTKYAEAMGWQVSDTYTDAGFSGAKLERPAMQRLIDDIENKAFDTVLVYKLDRLSRSVRDTLYLVKDVFTKNKIDFISLNESINTSSAMGSLFLTILSAINEFERENIKERMTMGKLGRAKSGKSMMWTKTAFGYYHNRKTGILEIVPLQATIVEQIFTDYLSGISLTKLRDKLNESGHIGKDIPWSYRTLRQTLDNPVYCGYIKFKDSLFEGMHKPIIPYETYLKVQKELEERQQQTYERNNNPRPFQAKYMLSGMARCGYCGAPLKIVLGHKRKDGSRTMKYHCANRFPRKTKGITVYNENKKCDSGTYDLSDLENTVIDNLVGLQENNDSLLKIINGNNQPIPDISSFKKQISQIDKKIQKNSDLYLNDFITMDELKDRTDSLQAEKKLLKAKISESKLNDSTDVFELVKTQLGSIPISGLSYDSKRKIVNNLVSKVDVTADNVDIIFKFQLA

SEQ ID NO: 3213 - protein, 485 aa, synthetic construct
MTKKVAIYTRVSTANQAEEGFSIDEQIDRLTKYAEAMGWQVSDTYTDAGFSGAKLERPAMRRLINDIEVKAFDTVLVYRLDRLSRSVRDTLYLVKDVFTKNKIDFISLNESIDTSSAMGSLFLTILSAINEFERENIKERMTMGKLGRAKSGKSMMWTKTAFGYYHNRKTGILEIVPLQATIVEQIFTDYLSGISLTKLRDKLNESGHIGKDIPWSYRTLRQTLDNPVYCGYIKFKGSLFEGMHKPIIPYETYLKVQKELEERQQQTYERNNNPRPFQAKYMLSGMARCGYCGAPLKIVLGHKRKDGSRTMKYHCANRFPRKTKGVTVYNDNKKCDSGTYDLSNLEDTVIDNLIGFQENNDSLLKIINGNNQPILDTSSFEEQISQIDKKIQKNSDLYLNDFITMDELKDRTDSLQAEKKLLRAKISENKFNDSTDVFELVKTQLGSIPISGLSYDNKKKIVNNLVSKVDVTADNVDIIFKFQLA

SEQ ID NO: 3214 - protein, 485 aa, synthetic construct
MTKKVAIYTRVSTTNQAEEGFSIDEQTGRLTKYAEAMGWQVSDTYTDAGFSGAKLERPAMQRLINDIESKAFDTVLVYKLDRLSRSVRDTLYLVKDVFTKNKIDFISLSESIDTSSAMGSLFLTILSAINEFERENIKERMSMGKLGRAKSGKSMMWTKTAFGYYHNRKTGILEIVPPQATIVEQIFTDYLSGISLTKLRDKLNEGGHIGKDIPWSYRTLRQTLDNPVYCGYIKFKGSLFEGMHKPIIPYETYLKVQKELEERQQQTYERNNNPRPFQAKYMLSGMARCGYCGAPLKIVLGHKRKDGSRTMKYHCANRFPRKTKGVTVYNDNKKCDSGTYDLSNLEDTVIDNLIGFQENNDSLLKIINGNNQPILDTSSFKEQISQIDNKIQKNSDLYLNDFITMDELKDRTDSLRAEKKLLKAKISENRFNDSTDVFELVRTQLGSIPINELSYDNKKKIVNNLVSKVDVTADNVDIIFKFQLA

SEQ ID NO: 3215 - protein, 485 aa, synthetic construct
MAKKVAIYTRVSTTNQAEEGFSIDEQIDRLTKYAEAMGWQVSDTYTDAGFSGAKLERPAMQRLINDIEDKAFDTVLVYKLDRLSRSVRDTLYLVKDVFTKNKIDFISLNESINTSSAMGSLFLTILSAINEFERENIKERMTMGKLGRAKSGKSMMWTKTAFGYYHNRKTGILEIVPLQATIVEQIFTDYLSGISLTKLRDKLNESGHIGKDIPWSYRTLRQTLDNPVYCGYIKFKGSLFEGMHKPIIPYETYLKVQKELEERQQQTYERNNNPRPFQAKYMLSGMARCGYCGAPLRIVLGHRRKDGSRTMKYHCANRFPRKTKGITVYNDNKKCDSGTYDLSNLENTVIDNLIGFQENNDSLLKIINGNNQPIQDTSSLKKQISQIDKKIQKNSDLYLNDFITMDELKERTDSLQAEKKLLKAKISENKFNDSTDVFELVKTQLGSIPINELSYDNKKKIVNNLVSKVDVTADNVDIIFRFQLA

SEQ ID NO: 3216 - protein, 452 aa, synthetic construct
MKAAIYIRVSTREQVENYSIQAQTEKLTALCRSKDWDVYDIFIDGGYSGSNMNRPALNEMLSKLHEIDAVVVYRLDRLSRSQRDTITLIEEYFLKNNVEFVSLSETLDTSSPFGRAMIGILSVFAQLERETIRDRMVMGKIKRVEAGLPLTTAKGRTFGYDVIDTKLYINEEEARQLRLIYDIFEEEQSITFLQKRLKELGFKVCTYSRYNNWLTNDLYCGYVSYRDKVHVKGIHEPIISEEQFYRVQEIFTRMGKNPNMNRDSASLLNNLVVCSKCGLGFVHRRKDTMSRGKKYHYRYYSCKTYKHIHELEKCGNKIWRADKLEELIINHVNNYSFASRNVGKEDELDSLNEKLKIEHAKKRRLFDLYINGSYGVSELDSMMNDIDAQIDYYESQIEANEERKKNKKIQKNLANLATMDYDSLEFREKQLYLKSLINKIYIDGEQVTIEWL

SEQ ID NO: 3217 - protein, 452 aa, synthetic construct
MKAAIYIRVSTREQVENYSIQAQTEKLTSLCRSKDWDVYDIFIDGGYSGSNMNRPALNEMLNKLHEIDAVVVYRLDRLSRSQRDTITLIEEYFLKNNVEFVSLSETLDTSSPFGRAMIGILSVFAQLERETIRDRMVMGKIKRIEAGLPLTTAKGRTFGYDVIDTKLYINEEEAKQLQLIYDIFEEEQSITLLQKRLKKLGFKVRTYNRYNNWLTNDLYCGYVSYKDKVHVKGIHEPIISEEQFYRVQEIFTRMGKNPNMNRDSASLLNNLVVCSKCGLGFVHRRKDAMSRDKKYHYRYYSCKTYKHIHELEKCGNKIWRADRLEELIISRVNSYSFASRNADKEDELDSLSEKLKTEHAKKKRLFDLYINGSYEVGELDSMMNEIDAQINYYESRIEANEDLKRNKKIQENLANLATVDFDSLEFREKQLYLKSLINKIYIDGEQVTIEWL

SEQ ID NO: 3218 - protein, 452 aa, synthetic construct
MKAAIYIRVSTREQVENYSIQAQTEKLTALCRSKDWDVYDIFIDGGYSGSNMSRPALNEMLSKLHEIDAVVVYRLDRLSRSQRDTITLIEEYFLKNNVEFVSLSETLDTSSPFGRAMIGILSVFAQLERETIRDRMVMGKIKRIEAGLPLTTAKGRTFGYDVIDTKLYINEEESKQLRLIYDIFEEEQSITFLQKRLKKLGFKVRTYSCYNNWLTNDLYCGYVRYKDKVHVKGIHEPIISEEQFYRVQEIFTRMGKNPNMNRDSASLLSNLVVCSKCGLGFVHRRKDTTSRGKKYHYRYYSCKTYKHIHELEKCGNKIWRADELEELIINRVNNYSFASRNVVKAEELGSLNEKLKVEHAKRKRLFDLYINGSYNVSELDSMMNDIDAQINYYESQIEANEELKKNKKIRENLANLATVDFDSLEFREKQLYLKSLINKIYIDGEQVTIEWL

SEQ ID NO: 3219 - protein, 485 aa, synthetic construct
MTKKVAIYTRVSTTNQAEEGFSIDEQTDRLTKYAEAMGWQVSDTYTDAGFSGAKLERPAMQRLISDIENKAFDTVLVYKLDRLSRSVRDTLYLVKEVFTKNKIDFISLNESIDTSSAMGSLFLTILSAINEFERENIKERMTMGKLGRAKSGKSMMWTKTAFGYYHNRKTGILEIVPLQATIVEQIFTDYLSGISLTKLRDKLNESGHIGKDIPWSYRTLRQTLDNPVYCGYIKFKDSLFEGMHKPIIPYETYLKVQKELEERQQQTYERNNNPRPFQAKYMLSGMARCGYCGAPLRIVLGHKRKDGSRAMKYHCANRFPRKTKGVTVYNDNKKCDSGTYDLSNLENTVIDYLIGFQEDNDSLLKIINGNNQPILDTSSFKKQISQIDKKIQKNSDLYLNDFITMDELKDRTDSLQAEKKLPEARISENKPNDSTDVFELVKTQLGSIPINELSYDSKKKIVNNLVSKVDVTEDNVVIIFKFQLA

SEQ ID NO: 3220 - protein, 485 aa, synthetic construct
MTKKVAIYTRVSTANQAEEGFSIDEQVDRLTKYAEAMGWQVSDTYTDAGFSGAKLERPAMQRLINDIENKAFDTVLVYKLDRLSRSVRDTLYLVKDVFTKNKIDFISLNESIDTSSAMGSLFLTILSAINEFERENIKERMTMGKLGRAKSGKSMMWTKTAFGYYHNRKTGILEIAPLQATIVEQIFADYLSGISLTKLRDKLNESGHIGKDIPWSYRTLRQTLDNPVYCGYIKFKDSLFEGMHKPIIPYETYLKVQKELEERQQQTYERNNNPRPFQAKYMLSGMARCGYCGAPLKIVLGHKRKDGSRTMKYHCVNRFPRKTKGVTVYNDNKKCDSGTYDLSNLENTVIDNLIGFQENNDSLLKIINGNNQPILDTSSFKKQISQIDKKIRKNSDLYLNDFITMDELKDRTDSLQAEKKLLKAKISENKFNDSTDVFELVKTQLGSIPINELSYDNKKKIVNNLVSKVDVTVDNVDIIFKFQLA

SEQ ID NO: 3221 - protein, 469 aa, synthetic construct
MSYTTPVRAAVYLRISEDRSGEQLGVARQREDCLKLCDQRKWVPVEYLDNDVSASTGKRRPAYEQMLADITAGKIAAVVAWDLDRLHRRPIELEAFMSLADERRLALATVAGDVDLATPQGRLVARLKGSVAAHETEHKKARQRRAARQKAERGYPNWSKAFGYLPGPNGPEPDPRTAPLVKQAYADILAGASLGDVCRQWNAAGAFTITGRPWTTTTLSKFLRKPRNAGLRAYKGARYGPVDRDAIVGKAQWSPLVDEATFWAAQAVLDAPGRAPGRKSVRRHLLTGLAGCGKCGNHLAGSYRTDGRVVYVCKACHGVAILADNIEPILYHIVAERLAMPNAVDLLRREIHDTVEAETTRLELETLYGELDRLAVERAEGLLTARQVKISTDIVNAKITKLQARQLDQGRLRVFDGIPLGTPQAAGMIAELSPDRFRAVLDVLAEVVVQPVGKSGRIFNPERVQVDWR

SEQ ID NO: 3222 - protein, 452 aa, synthetic construct
MKAAIYIRVSTREQVENYSIQAQTEKLTALCRSKDWDVYDIFIDGGYSGNNMNRPALNEMLSKLHEIDAVVVYRLDRLSRSQRDTITLIEEYFLKNNVEFVSLSETLDTSSPFGRAMIGILSVFAQLERETIRDRMVMGKIKRIEAGLPLTTAKGRTFGYDVIDTKLYVNEEEAKQLQLIYDIFEEEQSITSLQKRLKKLGFKVRTYSCYNSWLTNDLYCGYVSYKDKVHVKGIHEPIISEEQFYRVQEIFTRMGKNPNMNRDSASLLNNLVVCSKCGLGFVHRRKDTMSRGKKYHYRYYSCKTYKHTHELEKCGNKIWRADKLEELIINRVNNYSFASRNVDKAEELDSLNEKLKVEHAKKKRLFDLYINGSYNVSELDSMMNDIDAQINYYESQIEANEELKKNKKIQENLAGLATVDFDSLEFREKQLYLKGLINKIYIDGEQVTIEWL

SEQ ID NO: 3223 - protein, 469 aa, synthetic construct
MSYTTPVRAAVYLRISEDRSGEQLGVARQREDCLKLCGQRKWVPVEYLDNDVSASTGKRRPAYEQMLADITAGKIAAVVAWDLDRLHRRPIELEAFMSLADEKRLALATVAGDVDLATPQGRLVARLKGCVAAHETEHKKARQRRAARQKAERGHPNWSKAFGYLPGPNGPEPDPRTAPLVKQAYADILAGASLGDVCRQWNDAGAFTITGRPWTTTTLSKFLRKPRNAGLRAYKGARYGPVDRDAIVSKAQWSPLVDEATFWAAQAVLGTPGRAPGRKSVRRHLLTGLAGCGKCGNHLAGSCRTDGRVVYVCKACHGVSILAVNIEPILYHIVAERLAMPDAVDLLRREIHDAAEAETIRLELEILYDELDRLAVERAEGLLTARQVKISTDIVNAKITKLRARQLDQERLRVFDGIPLGTPQAAGMIAELSPDRFRAVLNVLAEVVVQPVGKRGRIFSPERVQVNWR

SEQ ID NO: 3224 - protein, 485 aa, synthetic construct
MTKKVAIYTRVSTANQAEEGFSIDEQIDRLTKYAEAMGWQVSDTYTDAGISGAKLERPAMQRLINDIESKAFDTVLVYKLDRLSRSVRDTLYLVKDVFTKNKIDFISLNESIDTSSAMGSLFLTILSAINEFERENIKERMTMGKLGRAKSGKSMMWTKTAFGYYHNRKTGILEIVPLQATIVEQIFTDYLSGISLTKLRDKLNESGHIGKDIPWSYRTLRQTLDNPVYCGYIKFKDSLFEGMHKPIIPYETYLKVQKELEERQQQTYERNNNPRPFQAKYMLSGMARCGYCGAPLRIVLGHKRKDGSRTVKYHCANRFPRKTKGVTVYNDNKKCDSGTYDLSNLENTVIDNLIGFQENNDSLLKIINGNNQPILDTSSFKKQISQIDKKIQKYSDLYLNDFITMDELKGRTDSLQAEKKLLRAKISENKLNDSADVFELVKTQLGSIPINELSYDNKKKIVNNLVSKVDVTADNVDIIFKFQLA

SEQ ID NO: 3225 - protein, 452 aa, synthetic construct
MKAAIYIRVSTQEQVENYSIQAQTEKLTALCRSKGWDVYDIFIDGGYSGSNMDRPALNEMLSKLHEIDAVVVYRLDRLSRSQRDTITLIEEYFLKNNVEFVSLSETLDTSSPFGRAMIGILSVFAQLERETIRDRMVMGKIKRIEAGLPLTTAKGRTFGYDVIDTKLYINEEEAKQLRLIYDIFEEEQSITFLQKRLKKLGFKVRTYNRYNNWLTNDLYCGYVSYKDKVHVKGIHEPIISEEQFYRVQEIFTRMGRNPNMNRDSASLLNNLVVCSKCGLGFVHRRKDAMSRDKKYHYRYYSCKTYKHIHELEKCGNKIWRADKLEELIINRVNNYSLASRNAGKEDELDSLNEKLKTEHAKKRRLFDLYINGSFEVSELDSMMNDIDAQINNYESQIEANEELRKNKKIQENLANLATVDFESLEFREKQLYLKSLINKIYIDGEQVTIEWL

SEQ ID NO: 3226 - protein, 485 aa, synthetic construct
MTKKVAIYTRVSTTNQAEEGFSIDEQIDRLTKYAEAMGWQVSDTYTDAGLSGAKLERPAMQRLINDIENKAFDTVLVYKLDRLSRSVRDTLYLVRDVFTKNKIDFISLNESIDTSSAMGSLFLTILSAINEFERENIKERMTMGKLGRAKSGKSMMWTKTAFGYYHNRKTGILEIVPLQAAIVEQIFTDYLSGISLTKLRDKLNESGHIGKDIPWSYRTLRQTLDNPVYCGYIKFKDSLFEGMHKPIIPYETYLKVQKELEERQQQTYERNNNPRPFQAKYMLSGMARCGYCGAPLKIVLGHKRKDGSRTMKYHCANRFPRKTKGVTVYNDNKKCDSGTYDLSSLENTVIDTLIGFQESNDSLLKIINGNNQPILDTSSLKKQISQIDKKIQKNSDLYLNDFITMDELKDRTDSLQAEKKLLTAKISENKFNDSTDVFELVKTQLGSIPINELSYDNKKKIVNNLVSKVDVTADNVDIIFKFQLA

SEQ ID NO: 3227 - protein, 485 aa, synthetic construct
MTKKVAIYTRVSTTNQAEEGFSIDEQTDRLTKYAEAMGWQVSDTYTDAGFSGAKLERPAMQRLINDIENKAFDAVLVYKLDRLSRSARDTLYLVKDVFTKNKIDFISLSESIDTSSAMGSLFLTILSAINEFERENIKERMTMGKLGRAKSGKSMMWAKTAFGYYHNRKTGILEIVPLQATIVEQIFTDYLSGISLTKLRDKLNESGHIGKDIPWSYRTLRQTLGNPVYCGYIKFKDGLFEGMHKPIIPYETYLKVQKELEERQRQTYERNNNPRPFQAKYMLSGMARCGYCGAPLRIVLGHKRKDGSRTMKYHCANRFPRKTKGITVYNDNKKCDSGTYDLNNLENTVIDYLIGFQENNDSLLKIINGNNQPILDTSSLKEQISQIDKKIQKNSDLYLNDFITMDELRDRTDSLWAEKKLLKAKISENKFNDSTDVFELVKTQLGSIPINELSYDNKKKIVNNLVSKVDVTADNVDIIFKFQLA

SEQ ID NO: 3228 - protein, 485 aa, synthetic construct
MTKKVAIYTRVSTTNQAEEGFSIDEQTDRLTKYAEAMGWQVSDTYTDAGLSGAKLERPAMQRLINDIESKAFDTVLVYKLDRLSRSVRDTLYLVKDVFTKNKIDFISLNESIDTSSAMGSLFLTILSAINEFERENIKERMTMGKLGRAKSGKSMMWTKTAFGYYHNRKTGILEIVPLQATIVEQIFTDYLSGISLTKLRDKLNESGHIGKDIPWSYRTLRQTLDNPVYCGYIKFKGSLFEGMHKPIIPYETYLKVQKELGERQQQTYERNNNPRPFQAKYMLSGVARCGYCGAPLRIVLGHKRKDGSRTMKYHCANRFPRKTKGVTVYNDNKKCDSGTYDLSNLENTVIDNLIGFQENDDSLLKIINGNNQPILDTSSFKKQISQIDEKIQKNSDLYLNDFITMDELKGRTDSLQAEKRLLKAKISESKLNDSTDVFELVKTQLGSIPINELSYDNKKKIVNNLVSKVDVTADNVDIIFKFQLA

SEQ ID NO: 3229 - protein, 485 aa, synthetic construct
MTKKVAIYTRVSTTNQAEEGFSIDEQIDRLTKYAEAMGWQVSDTYTDAGSSGAKLERPAMQRLISDIENKAFDTVLVYKLDRLSRSVRDTLYLVKDVFTKNKIDFISLNESIDTSCAMGSLFLTILSAINEFERENIKERMTMGKLGRARSGKSMMWTKTAFGYYHNRKTGILEIVPLQATVVEQIFTDYLSGISLTKLRDKLNESGHIGKDIPWSYRTLRQTLDNPVYCGYIKFKDSLFEGMHKPIIPYETYLKVQKELEERQQQTYERNNNPRPFQAKYMLSGMARCGYCGAPLRIVLGHKRKDGSRTMKYHCANRFPRKTKGVTVYNDNKKCDSGTYDLSNLENTVINNLIGFQENNDSLLKIINGNNQPVLDTSSFRKQISQIDKKIQKNSDLYLNDFITMDELKDRTDSLQAEKKLLKAKISENKFNDSTDVFELVKTQLGSIPINELSYDNKKKIVNNLVSKVDVTADNVDIIFKFQLA

SEQ ID NO: 3230 - protein, 485 aa, synthetic construct
MTKKVAIYTRVSTTNQAEEGFSIDEQVDRLTKYAEAMGWQVSDTYTDAGFSGAKLERPAMQRLINDIENKAFDTVLVYKLDRLSRSVRDTLHLVKDVFTKNKIDFISLNESIDTSSAMGSLFLTILSAINEFERENIKERMTMGKLGRAKSGKSMMWTKTAFGYHHNRKTGILEIVPLQATIVEQIFTDYLSGISLTKLRDKLNESGHIGKDIPWSYRTLRQTLDNPVYCGYIKFKDSLFEGMHKPIIPYETYLKVQKELEERQQQTYERNNNPRPFQAKYMLSGMARCGYCGAPLRIVLGRKRKDGSRTMKYHCANRFPRKTKGVTVYNDNKKCDGGTYDLSNLENTVIDNLIGFQENNDSLLKIINGNNQPILDTSSFEKQISQIDKKIQKNSDLYLNDLITMDELKDRTDSLQAEKKLLKAKISENKFNDSTDVFELVKTQLGSIPINELSYDNKKKIVNNLVSKVDVTADNVDIIFKFQLA

SEQ ID NO: 3231 - protein, 485 aa, synthetic construct
MTKKVAIYTRVSTTNQAEEGFSIDEQIDRLTKYAEAMGWQVSDTYTDAGFSGAKLERPAMQRLINDIENKAFDTVLVYKLDRLSRSVRDTLYLVKDVFTKNNIDFISLNECIDTSSAMGSLFLTILSAINEFERENIKERMTMGKLGRAKSGKSMMWTKTAFGYYHNRKTGILEIVPLQATIVEQIFTDYLSGISLTKLRDKLNESGHIGKDIPWSYRTLRQTLDNPVYCGYIKFKDSLFEGMHKPIIPYETYLKVQKELEERQQQTYARNNNPRPFQAKYMLSGMARCGYCGAPLRIVLGHKRKDGSRTMKYHCANRFPRKTKGATVYNDNKKCDSGTYDLSNLENTVIDNLIDFQENNDSLLKIINGDNQPILDTSSFKNQISQIDKKIQKNSDLYLNDFITMDELKDRTDSLQAEKKLLEAKISENKFNDSTDVFELVKTQLGSIPINDLSYDNKKKIVNNLVSKVDVTADNVDIIFKFQLA

SEQ ID NO: 3232 - protein, 485 aa, synthetic construct
MTKKVAIYTRVSTTNQAEEGFSIDEQIDRLTKYAEAMGWHVSDTYTDAGSSGAKLERPAMQRLINDIENKAFDTVLVYKLDRLSRSVRDTLYLVKEVFTENKIDFISLNESIDTSSAMGSLFLTILSAINEFERENIKERMTMGKLGRAKSGKSMMWTKTAFGYYHNRKTGILEIVPLQAAIVEQIFTDYLSGISLTKLRDKLNESGHIGKDIPWSYRTLRQTLDNPVYCGYIKFKDSLFEGMHKPIIPYETYLRVQKELEERQQQTYERNNNPRPFQAKYMLSGMARCGYCGAPLRIVLGHKRKDGSRTMKYHCANRFPRKTKGVTVYNDSKKCDSGTYDLSNLENTVIDNLIGFQENNDSLLKIINGNSQPILDTSSFKKQISQIDKKIQKNSDLYLNDFITMDELKDRTDSLQAEKKLLKAKISENKFNDSTEVFEQVKTQLGSIPINELSYDNKRKIVNNLVSKVDVTADSVDIIFKFQLA

SEQ ID NO: 3233 - protein, 485 aa, synthetic construct
MTKKVAIYTRVSTTNQAEEGFSIDEQIDRLTKYAEAMGWQVSDTYTDAGFSGAKLERPAMQRLINGIENKAFDTVLVYKLDRLSRSVRDTLYLVKDVFTKNKIDFISLNESIDTSSAMGSLFLTVLSAINEFERENIKERMTMGKLGRAKSGKSMMWTKTAFGYNHNRKTGILEIVPLQATIVEQIFTDYLSGISLTKLRDKLNESGHIGKDIPWSYRTLRQTLDNPVYCGYIKFKGSLFEGMHKPIIPYETYLKVQKELEERQQQTYERNNNPRPFQAKYMLSGMARCGYCGAPLRIVLGHKRKDGSRTTKYHCANRFPRKTKGVTVYNDNKKCDSGTYDLSNLENTVIDNLTGLQENNDSLLKIINGNNQPILDTSSFKKQISQIDKKIRKNSDLYLYDFITMDELKDRTDSLQAEKRLLKAKISENKFNDSTDVFELVKTQLGSIPINELSYDGKKKIVNNLVSKVDVTADNVDIIFKFQLA

SEQ ID NO: 3234 - protein, 452 aa, synthetic construct
MKAAIYIRVSTREQVENYSIQAQTEKLTALCRSKGWDVYDIFIDGGYSGSNMNRPALNEMLSKLHEIDAVVVYRLDRLSRSQRDTITLIEEYFLKNNVEFVSLSETLDTSSPFGRAMIGILSVFAQLERETIRDRMVMGKIKRIEAGLPLTTAKGRTFGYDVIDTKLYINEEEAKQLQLIYDIFEEEQSITFLQKRLKKLGFKVRTYNRYNNWLTNDLYCGYVSYKDKVHVKGIHEPIISEEQFYRVQEIFARMGKNPNMNRDSASLLNNLVVCSKCGLGFVHRRKDAMSRNKKYHYRYYSCKTYKHIHELEKCGNKIWRADKLEELIINRVNNYSLASRNVDKEDELVSLNEKLKIEHAKKKRLFDLYLNGSYEVSELDSMMNDIDAQISYYESQIEANEELKKNEKIQENLAYLATVDFDSLEFREKQLYLKSLINKIYIDGEQVTIEWL

SEQ ID NO: 3235 - protein, 452 aa, synthetic construct
MKAAIYIRVSTREQVENYSIQAQTEKLTALCRSKDWDVYDIFIDGGYSGSNMNRPALNEMLSRLHEIDAVVVYRLDRLSRSQRDTITLIEEYFLKNNVEFVSLSETLDTSSPFGRAMIGILSVFAQLERETIRDRMVMGKIKRIEAGLPLTTAKGRTFGYDVIDTKLYINEEEAKQLQLIYDIFEEEQSITFLQKRLKKLGYKVRTYNCYSNWLTNDLYCGYVSYKDKVHVKGVHEPIISEEQFYRVQEIFARMGKNPNVNRDSASLLNNLVVCSKCGLGFVHRRKDAMSRDKKYHYRYYSCKTYKHIHELEKCGNKIWRADKLEELIINRVNNYSLASRNVDKEDELDSLNEKLKVEHAKKKRLFDLYINGRYEVSELDSMMNDIDAQINYYESQIEANEELKKNRQIQENLANLATVDFDSLEFREKQRYLKSLINKIYIDGEQVTIEWL

SEQ ID NO: 3236 - protein, 485 aa, synthetic construct
MTKKVAIYTRVSTTNQAEEGFSIDEQIDRLTKYAEAMGWQVSDTYTDAGSSGAKLERPAMQRLINDIENKAFDTVLVYKLDRLSRSVRDTLYLVKDVFTKNKIDFISLNESIDTSSAMGSLFLTILSAINEFERENIKERMTMGKLGRARSGKSMMWAKTAFGYYHNPKTGILEIVPLQATIVEQIFTDYLSGISLTKLRDKLNESGHIGKDIPWSYRTLRQTLDNPVYCGYIKFKDSLFEGMHKPIIPYETYLKVQKELEERQQQTYERNNNPRPFQAKYMLSGMARCGYCGAPLRIVLGHKRKDGSRTVKYHCANRFPRKTKGITVYNDNKKCDSGTYDLSNLENTVIDILIGFQENNDSLLKIINGNNQPILDTSSFKGQISQIDKKIQKSSDLYLNDFITMEELKDRTDSLQAEKGLLKAKISENKFNDSTDVFELVKTQLGSIPINELSYDNKKKIVNNLVSKVDVTADNVDIIFKFQLA

SEQ ID NO: 3237 - protein, 452 aa, synthetic construct
MKAAIYIRVSTREQVENYSIQAQTEKLTALCRSKDWDVYDIFIDGGYSGSNMNRPALNKMLSRLQEIDAVVVYRLDRLSRSQRDTITLIEEYFLKNNVEFVSLSETLDTSSPFGRAMIGILSVFAQLERETIRDRMVMGKIKRIEAGLPLTTAKGRTFGYDVIDTKLYINEEEAKQLQLIYDIFEEEQSITSLQKRLKKLGFKVRTYNRYNNWLTNDLYCGYVSYKDKVHVKGIHEPIISEEQFYRVQEIFTRMGKNPNMNRDSASLLNNLVVCGKCGLGFVHRRKDAMSRDKKYHYRYYSCKTYKHIHELEKCGNKIWRADKLEELIINRVSNYSIASRNADKEDELDSLNEKLKAEHAKKKRLFDLYINGSYEVSELDSMMNDIDAQINYYESQIEANEELKKNKKIQENLADLATVDFDSLEFREKQLYLKSLINKIYIDGEQVTIEWL

SEQ ID NO: 3238 - protein, 485 aa, synthetic construct
MTKKVAIYTRVSTTNQAEEGFSIDEQIDRLTKYAEAMGWQVSDTYTDAGFSGAKLERPAMQRLINDIENKAFDTVLVYKLDRLSRSVRDTLHLVKDVFTKNKIDFISLNESIDTSSVMGSLFLTILSAINEFERENIKERMTMGKLGRAKSGKSMMWAKTAFGYCHNRKTGILEIVPLQATIVEQIFTDYLSGISLTKLRDKLNESGHIGKDIPWSYRTLRQTLDNPVYCGYIKFKDSLFEGMHKPIIPYETYLKVQKELEERQQQAYERNNNPRPFQAKYMLSGMARCGYCGAPLKIVLGHKRKDGSRTMKYHCANRFPRKTKGVTVYNDNKKCDSGTYDLNSLENTVIDNLIGFQENNDSLLKIINGNNQPILDTSSFKEQISQIDKKIQKNSDLYLNDFITMDELKDRTDSLQAEKKLLKAKISENKFNDSTDVFELVKTQLGSIPINELNYDNKKKIVNNLVSKVDVTADNVDIIFKFQLA

SEQ ID NO: 3239 - protein, 452 aa, synthetic construct
MKAAIYIRVSTREQVENYSIQAQTEKLTALCRSKDWDVYDIFIDGGYSGSNMNRPALNEMLRKLHEIDAVVVYRLDRLSRSQRDTITLIEEYFLRNNVEFVSLSETLDTSSPFGRAMIGILSVFAQLERETIRDRMVMGKIKRVEAGLPLTTAKGRTFGYDVIDTKLYINEEEAKQLQLIYDIFEEEQSITFLQKRLKELGFKVRTYNCYNNWLTNDLYCGYVSYKDKVRVKGIHEPIISEEQFYRVQEIFTRMGKNPNMNRDSASLLNNLVVCSKCGLGFVHRRKDAMSRDKKYHYRYYSCKTYKHIHELEKCGNKIWRADKLEELIINRVNNYSLVSRNADKEDELDSLNEKLKIEHAKKKRLFDLYINGSYEASELDSMMNDIDARINYYESQIEANEELKRNKKIQENLANLATVDFDSLEFREKQRYLKGLINRIYIDGEQVTIEWL

SEQ ID NO: 3240 - protein, 485 aa, synthetic construct
MSKKVAIYTRVSTTNQAEEGFSIDEQVDRLTKYAEAMGWQVSDTYTDAGISGAKLGRPAMQRLINDIENKAFDTVLVYKLDRLSRSVRDTLYLVKDVFTKNKIDFISLNESIDTSSAMGSLFLTILSAINEFERENIKERMTMGKLGRAKSGKSMMWTKTAFGYYHNRKTGILEIVPLQAAIVEQIFTDYLSGISLTKLRDKLNESGHIGKDIPWSYRTLRQTLDNPVYCGYIKFRDSLFEGMHKPIIPYETYLKVQKELEERQQQTYERNNNPRPFQAKYMLSGMARCGYCGAPLKIVLGHKRKDGSRTMKYHCANRFPRKTKGVTVYNDNKKCDSGTYDLSNLENTVIDNLIGFQENSDSLLKIINGNNQPILDTSSFKEQISQIDKKIQKNSDLYLNDFITMDELKARTDSLQAEKKLLKAKISENKFNDSTNVFELVKTQLGSIPINELSYDNKKKIVNDLVSKVDVTADNVDIIFKFQPA

SEQ ID NO: 3241 - protein, 485 aa, synthetic construct
MTKKVAIYTRVSTTNQAEEGFSIDEQIDRLTKYAEAMGWQVSDIYTDAGFSGAKLERPAMQRLINDIENKAFDTVLVYKLDRLSRSVRDTLYLVKDVFTRNKIDFISLNESINTSSAMGSLFLAILSAINEFERENIKERMTMGKLGRAKSGKSMMWTKTAFGYYHNRKTGILEIVPLQATIVEQIFTDYLSGISLTKLRDKLNESGHIGKDIPWSYRTLRQTLDNPVYCGYIKFKDSLFEGMHKPIIPYETYLKVQKELEERQQQTYERNNNPRPFQAKYMLSGMARCGYCGAPLRIVLGHKRKDGSRTMKYHCANRFPRKTKGVTVYNDNKKCDSGTYDLSSLENTVIDNLTGFQENNDSLLKIINGNNQPILDTSSLKKQISQIDKKIQKNSDLYLNDLITMDELKDRTDSLQAEKKRLKAKISENKFNDSTDVFELVKTQLGSIPINELSYDNKKKIVNNLVSKVDVTADNVDIIFKFQLA

SEQ ID NO: 3242 - protein, 452 aa, synthetic construct
MKAAIYIRVSTREQVENYSIQAQTEKLTALCRSKDWDVYDIFIDGGYSGSNMNRPALNEMLSKLHEIDAVVVYRLDRLSRSQRDTITLIEEYFLKNNVEFVSLSETLDTSSPFGRAMIGILSVFAQLERETIRDRMVMGKIKRVEAGLPLTTAKGRTFGYDVIDTKLYINEEEAKQLQQIYDIFEEEQSITSLQKRLKKLGLKVRTYNRYNNWLTNDLYCGYVSYKDKVHVRGIHEPIISEEQFYRVQEIFTRMGKNPNMNRDSASLLNSLVVCSKCGLGFVHRRKDTMSHGKKYHYRYYSCKTYKHIHELEKCGNKIWRADELEELVINRVNSYSVASRNVDKEDELDSLNEKLKTEHAKKKRLFDLHINGSYEVSELDSMMNDIDAQINYYESQIEANEELKKNKKIQENLAHLATVDFDSLEFREKQLYLKSLIHKIYIDGEQVTIEWL

SEQ ID NO: 3243 - protein, 452 aa, synthetic construct
MKAAIYIRVSTREQVENYSIQAQTEKLTALCRSKDWDVYDIFIDGGYSGSNMNRPALNEMLSKLHEIDAVVVYRLDRLSRSQRDTITLIEEYFLKNDVEFVSLSETLDTSSPFGRAMIGILSVFAQLERETIRDRMVMGKIKRIEAGLPLTTAKGRTFGYDVVDTKLYINEEEAKQLQLIYDIFEEEQSITFLQKRLKKLGFKVRTYSRYNNWLTNDLYCGYVSYKDKVHVKGIHEPIISEEQFYRVQEIFTRMGKNPNMNRDSASLLNNLVVCSKCGLGFVHRRKDTTSRGKKYHYRYYSCKTYKHTHELEKCGNKIWRADKLEELIINRVNNYSFASRNADKEDELDSLNEKLKVEHAKKKRLFDLYINGSYEVSELDSMMNDIDAQINYYKSQIEANEELKKNKKIQENLADLATVDLDSLEFREKQLYLKSLINKIYIDGEQVTIEWL

SEQ ID NO: 3244 - protein, 452 aa, synthetic construct
MKAAIYIRVSTREQVENYSIQAQTEKLTALCRSKDWDVYDIFIDGGYSGSNMNRPALNEMLSKLHEIDAVVVYRLDRLSRSQRDTITLIEEYFLKNNVEFVSLSETLDTSSPFGRAMIGILSVFAQLERETIGDRMVMGKIKRIEAGLPLTTAKGRTFGYDVIDTKLYINEEEAKQLQLIYDIFEEERSITFLQKRLKELGFKVRTYNRYNNWLTNDLYCGYVSYKDKVHVKGIHEPIISEEQFYRVQEIFTRMGKNPNVNRDSASLLNNLVVCGKCGLGFVHRRKDTMSRGKKYHYRYYSCKTYKHSHELEKCGNKIWRADKLEELIIDRVNNYSFASRNVDKEDELDSLNEKLKIEHAKKKRLFDLYINGSYGVSELDSMMTDIDAQISYYESQIEANEELRKSKKIQENLADLATVDFGSLEFREKQRYLKSLINKIYIDGEQVTIEWL

SEQ ID NO: 3245 - protein, 452 aa, synthetic construct
MKAAIYIRVSTREQVENYSIQAQTEKLTALCRSKDWDVYDIFIDGGYSGSNMNRPALNEMLSRLHEIDAVVVYRLDRLSRSQRDTITLIEEYFLKNNVEFVSLSETLDTSSPFGRAMIGILSVFAQLERETIRDRMVMGKIKRIEAGLPLTTAKGRTFGYDVIDTKLYINEEEAKQLRLIYDIFEEEQSITFLQKRLKKLGFKVRTYSRYNNWLTNDLYCGYVSYKDKVHVKGIHEPIISEEQFYRVQEIFTRMGKNPNMNRDSASLLNNLVVCSKCGLGFVHRRKDTKSRGKKYHYRYYSCKTYKHTHELEKCGNKIWRADKLEELIINRVNNYSFASRNVDKEDELDSLNEKLKIEHAKRKRLFDLYINGSYEVSELDGMMNDIDAQINYYVSQIEANVELKKNKKIQENLANLATVDFDSLEFREKQLYLKSLINKIYIDGEQVTIEWL

SEQ ID NO: 3246 - protein, 485 aa, synthetic construct
MTKKVAIYTRVSTTNQAEEGFSIDEQIDRLTKYAEAMGWQVSDTYTDAGLSGAKLERPAMQRLINDIENKAFDTVLVYKLDRLSRSVRDTLYLVKDVFTKNKIDFISLNESIDTSSAMGSLFLTILSAINEFERENIKERMTMGKLGRAKSGKSMMWTKTAFGYYHNRKTGILEIVPLQATIVEQIFTDYLSGISLTKLRDKLNESGHIGKDIPWSYRTLRQTLDNPVYCGYIKFKESLFEGMHKPIIPYETYLRVQKELEERQQQTYERNNNPRPFQAKYMLSGMARCGYCGAPLKIVLGHKRKDGSRTVKYHCANRFPRKTKGVTVYNDNKKCDSGTYDLRNLENTVIDNLIGFQENSDSLLKIINGNNQPALDTSSFKKQISQIDKKIQKNSDLYLNDFITMDELKDRTDSLQAEKKLLKAKISENKLNVSADAFELVKTQLGSIPINELSYDDKKKIVNNLVSKVDVTADNVGIIFKFQLT

SEQ ID NO: 3247 - protein, 469 aa, synthetic construct
MSYTTLVRAAVYLRISEDRSGEQLGVARQREDCLKLCDQRKWVPVEYLDNDVSASTGKRRPAYEQMLADITAGKIAAVVAWDLDRLHRRPVELEAFMSLADEKRLALATVAGDVDLATPQGRLVARLKGCVAAHETEHKKARQRRAARQKAERGLPNWSKAFGYLPAPNGPEPDPRTAPLVKQAYADILAGASLGDVCRRWNDAGAFTITGRPWTTTTLSKFLRKPRNAGLRAYKGARYGPVDRDAIVGKAQWSPLVDEATFWAAQAVLDAPGRAPGRKSVRRHLLTGLAGCGKCGNHLAGSYRTDGQVVYVCKACHGVSILAVNIEPVLYHVVAERLAMPDAVDLLRREIHDAAEAETVRLELETLYGELDRLAVERAEGLLTARQVKISTDIVNAKIAKLQARQQDQERLRAFDGIPLGTPQVAGVIAELSPDRFRAVLDVLAKVVVQPVGKSGRILNPERVQVNWR

SEQ ID NO: 3248 - protein, 452 aa, synthetic construct
MKAAIYIRVSTREQVENYSIQAQTEKLTALCRSKDWDVYDIFIDGGYSGSNMNRPALNEMLSKLHEIDAVVVYRLDRLSRSQRDTITLIEEYFLKNNVEFVSLSETLDTSSPFGRAMIGILSVFAQLERETIRDRMVMGKIKRIEAGLPLTTAKGRTFGYDVIDTKLYINEEEAKQLQLIYDIFEEEQSITFLQKRLKKLGFKVRTYNRYNNWLTNDLYCGYVSYKDKVHVKGIHEPIISEEQFYRVQEIFTRMGKNPNMNRDSASLLSNLVVCSKCGLGFVHRRKDTTSRGKKYHYRYYSCRTYKHTHELEKCGNKIWRADKLEELIINRVNNYSLASRNVDKEDELDSLNEKLKIEHAKKKRLFDLYINGSYEVSELDSMMSDIDAQINYCESQIEANEELKKNKKIQENLANLATVDFDSLEFREKQLYLKSLINKIYIDGEQVTIEWL

SEQ ID NO: 3249 - protein, 469 aa, synthetic construct
MSYTTPVRAAVYLRISEDRSGEQLGVARQREDCLKLCDQRKWVPVEYLDNDVSASTGKRRPAYEQMLADITAGKIAAVVAWDLDRLHRRPIELEAFMGLADEKRLALATVAGDVDLATPQGRLVARLKGCVAAHETEHKKARQRRAARQKAERGHPNWSKAFGYLPGPNGPEPDPRTAPLVRQAYADILAGASLGDVCRRWNDAGAFTITGRPWTTTTLSKFLRKPRNAGLRAYKGARYGPVDRDAIVGKAQWSPLVDEATFWAAQAVLDAPGRAPGRKSVRRHLLTGLAGCGKCGNHLAGSYRTDGRIVYVCKACHGIAILADNIEPILYHIVAERLAMPDAVDLLHREIHDAAEAETIRLELGTLYGELDRLAVERAEGLLTARQVKISTDIVNAKIAKLQARQLDQGRLRVLDGIPLGTPQVAGVIAELSPDRFRAVLDVLAEVVVQPVGKSGRTFNPERVQVNWR

SEQ ID NO: 3250 - protein, 469 aa, synthetic construct
MSYTTPVRAAVYLRISEDRSGEQLGVARQREDCLKLCGQRKWVPVEYLDNDVSASTGKRRPAYEQMLADITAGKIAAVVAWDLDRLHRRPIELEAFMSLADEKRLALATVAGDVDLATPQGRLVARLKGCVAAHETEHKKARQRRAARQKAERGLPNWSKAFGYLPGPNGPEPDPRTAPLVKQAYADILAGASLGDVCRQWNDAGAFTITGRPWTTTALSKFLRKPRNAGLRAYKGARYGPVDRDAIVGKAQWSPLVDEATFWAAQTVLDAPGRAPGRKSVRRHLLTGLAGCGKCGNHLAGSYRTDGRVVYVCKACHGVAILADNIEPILYHIVAERLAMPDAVSLLRREFHDAAEAETIRLELETLYGELDRLAVERAEGLLTARQVKISTDIVNAKISKLRARQLDQERLRVLDGIPLGTPQVAGMIAELSPDRFRAVLDVLAEVVVQPVGKRGGISDPERVQVNWR

SEQ ID NO: 3251 - protein, 452 aa, synthetic construct
MKAAIYIRVSTREQVENYSIQAQTEKLTALCRSKDWDVYDIFIDGGYSGSNMNRPALNEMLSKLHEIDAVVVYRLDRLSRSQRDTITLIEEYFLKNNVEFVSLSETLDTSSPFGRAMIGILSVFAQLERETIRDRMVMGKIKRIEAGLPLTTAKGRTFGYDVIDTKLYINEEEAKQLQLIYDIFEEEQSITFLQKRLKKLGFKVRTYSRYSNWLTNDLYCGYVSYKDKVHAKGIHEPIISEEQFYRVQEIFTRMGKNPNVNRDSASLLNNLVVCSKCGLGFVHRRKDTMSRGKKYHYRYYSCKTYKHTHELEKCGNKIWRADKLEELIINRVSDYSLASRNVDKEDELDSLNEKLKVEHAKRKRLFDLYINGSYNVSELDSMMNDIDAQINYYESQIEMNEELKRNKKIQENLAELATVDFDGLEFREKQLYLKSLINKIYIDGEQVTIEWL

SEQ ID NO: 3252 - protein, 469 aa, synthetic construct
MCYTTPARAAVYLRISEDRSGEQLGVARQREDCRKLCDQRNWVPVEYLDNDVSASTGKRRPAYEQMLADITAGKIAAVVAWDLDRLHRRPIELEAFMSLADEKRLALATVAGDVDLATPQGRLVARLKGSVAAHETEHKKARQRRAARQKAERGYPNWSKAFGYLPGPSGPEPDPRTAPLVKQAYADILAGASLGDVCRQWNAAGAFTITGRPWTTTALSKFLRKPRNAGLRAYKGARYGPVDRDAIVGKAQWSPLVDEATFWAAQAVLDAPGRAPGRKSVRRHLLTGLAGCGKCGNHLAGSYRTDGRVVYVCKACHGVAILADNIEPILYHIVAERLATPDAVDLLRREIRDAAEAETTRLELETLYGELDRLAVERAEGLLTARQVKISTDIVNAKITKLQARQLDQERLRVFDGIPLGTPQVAGMIAELSPDRFRAVLDVLAEVVVQPVGKGGRVFNPERVQVNWR

SEQ ID NO: 3253 - protein, 485 aa, synthetic construct
MTKKVAIYTRVSTTNQAEEGFSIDEQIDRLTKYAEAMGWQVSDTYTDAGSSGAKLERPAMRRLINDIENKAFDTVLVYKLDRLSRSVRDTLYLVKDVFTKNKIDFISLNESIDTSSAMGSLFLTILSAINEFERENIKERMTMGKLGRAKSGKSMMWTKTAFGYYHNRKTGILEIVPLQATIVEQIFTDYLSGISLTKLRDKLNESGHIGKDIPWSYRTLRQTLDNPVYCGYIKFKGSLFEGMHKPIVPYETYLKVQKELEERQQQAYERNNNPRPFQAKYMLSGMARCGYCGAPLKIVLGHKRKDGSRTMKYHCTNRFPRRTKGVTVYNDNKKCDSGTYDLSYLENTVIGNLIGFQENDDSLLKIINGNNQPILDTSSFKKQISQIDKKIQRNSDLYLNGFITMDELKDRTNSLRAEKKLLKAKISENKFSDSTDVFELVKTQLGSIPINELSYDSKKKIVNDLVSKVDVTADNVDIIFKFQLA

SEQ ID NO: 3254 - protein, 452 aa, synthetic construct
MKAAIYIRVSTREQVENYSIQAQTEKLTALCRSKDWDVYDIFIDGGYSGSNMNRPALNEMLSKLHEIDAVVVYRLDRLSRSQRDTITLIEEYFLKNSVEFVSLSETLDTSSPFGRAMTGILSVFAQLERETIRDRMVMGKIKRIEAGLPLTTAKGRTFGYDVIDTKLYINEEEAKQLQLIYDIFEEEQSITFLQKRLKKLGFKVRTYSRYNSWLTNDLYCGYVSYKDKVHVKGIHEPIISEEQFYRVQEIFTRMGKNPNMNRDSASLLSNLVVCSKCGLGFVHRRKDTMSRGKKYHYRYYSCKTYKHTHELEKCGNKIWRADKLEELIINRVNNYSFASRNVDKEDELDSLNEKLKIEHAKKKRLFDLYINGSYEVSELDCMMNDIDAQINYYESQIEANEELKKNKKIQENLADLATVDFDSLEFREKQLYLKSLINKIYIDGEQVTIEWQ

SEQ ID NO: 3255 - protein, 452 aa, synthetic construct
MKAAIYIRVSTREQVENYSIQAQTEKLTALCRSKDWDVYDIFIDGGYSGSNMNRPALNEMLSKLHEIDAVVVYRLDRLSRSQRDTITLIEEYFLKNNVEFVSLSETLDTSSPFGRAMIGILSVFAQLERETIRDRMVMGKIKRIEAGLPLTTAKGRTFGYDVIDTKLYINEEEARQLRLIYDIFEEEQSITSLQKRLKKLGFKVRTYSCYNNWLTNDLYCGYVSYKDKVHVKGIHEPIISEEQFYRVQEIFTRMGINPNMNRDSASLLNNLVVCSKCGLGFVHRRKDAMSRDKKYHYRYYSCKTYKHIHELEKCGNKIWRADKLEELVINRVNDYSFASRNADKEDELDSLNEKLKIEHAKKKRLFDLYINGSYEVSELDSMMSDIDAQINYYESQIEANEELKKNKKIQENLANLATVDFDSLEFREKQLYLKSLISKVYIDGEQVTIEWL

SEQ ID NO: 3256 - protein, 485 aa, synthetic construct
MTKEVAIYTRVSTTNQAEEGFSIDEQIDRLTKYAEAMGWQVSDTYTDAGFSGAKLERPAMQRLINDIENKAFDTVLVYKLDRLSRSVRDTLHLVKDVFTKNKIDFISLNESIDTSSAMGSLFLTILSAINEFERENIKERMTMGKLGRAKSGKSMMWTKTAFGYYHNRKTGILEIVPLQATIVEQIFTDYLSGISLTKLRDKLNESGHIGKDIPWSYRTLRQTLDNPVYCGYIKFKDSLFEGMHEPIIPYETYLKVQKELEERQQQTYERNNNPRPFQAKYMLSGMARCGYCGAPLRIVLGHKRKDGSRTMKYHCANRFPRKTKGITVYNDNKKCDSGTYDLSNLENTVIDNLIGFQENNDSLLKIINGNNQPTLDTSSFKKQINQIDKKIQKNSDLYLNDFITMDELKDRTDSLQAEKKLLEAKISENKFNDSTDVFELVKAQLGSIPINELSYDNKKKIVNNLVSKVDVTADNVDITFKFQLA

SEQ ID NO: 3257 - protein, 452 aa, synthetic construct
MKAAIYIRVSTREQVENYSIQAQTEKLTALCRSKDWDVYDIFIDGGYSGSNMNRPALNEMLSKLHEIDAVVVYRLDRLSRSQRDTITLIEEYFLKNDVEFVSLSETLDTSSPFGRAMIGILSVFAQLERETIRDRMVMGKIKRIEAGLPLTTAKGRTFGYDVIDTKLYINEEEAKQLRLVYDIFEEEQSITFLQKRLKKLGFKVHTYNRYISWLTNDLYCGYVSYKDKVHVKGIHEPIISEEQFYRVQEIFTRMGKNPNMNRDSASLLNNLVVCSKCGLGFVHRRKDTVSRGKKYHYRYYSCKTYKHIHELERCGNKIWRADKLEELIINRVNNYSLASRNVDEEDELDSLSEKLKVEHAKRKRLFELYINGNYEVSELDSMMNDIDAQINYYEGQIEANEGLKKNKKIQENLADLATVNFDSLEFREKQLYLKSLINKIYIDGEQVTIEWL

SEQ ID NO: 3258 - protein, 452 aa, synthetic construct
MKAAIYIRVSTREQVDNYSIQAQTEKLTALCRSKDWDVYDIFVDGGYSGSNMNRPALNEMLGKLHEIDAVVVYRLDRLSRSQRDTITLIEEYFLKNNVEFVSLSETLDTSSPFGRAMIGILSVFAQLERETIRDRMVMGKIKRIEAGLPLTTAKGRTFGYDVIDTKLYINEEEARQLRLIYDIFEEEQSITFLQKRLKKLGFKVHTYSRYNNWLTNDLYCGYVSYKDRVHVKGIHEPIISEEQFYRVQEIFTRMGKNPNMNRDSASLLNNLVVCSKCGLGFVHRRKDITSRSKKYHYRYYSCKTYKHIHELEKCGNKIWRADKLEELIINRVNNYSFASRNADKEDELDSLNEKLKIEHAKKKRLFDLYINGSYEVSELDSMMNDIDAQISYYESQIEANEALIKNKKIQENLANLATVDFDSLEFREKQLYLKSLINKIYIDGEQVTIEWL

SEQ ID NO: 3259 - protein, 452 aa, synthetic construct
MKAAIYIRVSTQEQVENYSIQAQTEKLTALCRSKDWDVYDIFIDGGYSGSNMNRPALNEMLSKLHEIDAVVVYRLDRLSRSQRDTTTLIEEYFLKNNVEFVSLSETLDTSSPFGRAMIGILSVFAQLERETIRDRMVMGKIKRIEAGLPLTTAKGRTFGYDVIDTKLYINEEEAKQLQLIYDIFEEEQSITSLQKRLKKLGFKVRTYNRYNNWLTNDLYCGYVSYKDKVRVRGIHEPIISEEQFYRVQEIFTRMGKNPNVNRDSASLLSNLVVCCKCGLGFVHRSKDTMSRGKKYHYRYYSCKTYKHTHELEKCGNKTWRADKLEELIINRVNNYSFASRNVDKENELASLNEKLKIEHAKKKRLFDLYINGNYEVSELDSMMNDIDAQINYYESQIEANEELKRNKKIQENLADLATVDFDSLEFREKQLYLKSLINKIYIDGEQVTIEWL

SEQ ID NO: 3260 - protein, 452 aa, synthetic construct
MKAAIYIRVSTQEQVENYSIQAQTEKLTALCRSKDWDVYDIFIDGGYSGSNMNRPALNEMLSKLHEIDAVVVYRLDRLSRSQRDTTTLIEEYFLKNNVEFVSLSETLDTSSPFGRAMIGILSVFAQLERETIRDRMVMGKIKRIEAGLPLTTAKGRTFGYDVVDTKLYINEEEAKQLQLIYDIFEEEQSITSLQKRLKKLGFKVRTYNRYNNWLTNDLYCGYVSYKDKVHVKGIHEPIISEEQFYRVQEIFTRMGKNPNMNRDSASLLSNLVVCSKCGLGFVHRSKDTMCRGKKYHYRYYSCRTYKHTHELEKCGNKTWRADKLEELIINRVNNYSFASRNVDKEDELDSLNEKLKIEHAKKKRLFDLYINGSYEVSELDSMMNGIDAQINYYESQIVANEELKKNKKIQEGLANLATVDFDSLEFREKQLYLKSLINKIYIDGEQVTIEWL

SEQ ID NO: 3261 - protein, 485 aa, synthetic construct
MTKKVAIYTRVSTTNQAEEGFSIDEQVDRLTKYAEAMGWQVSDTYTDAGLSGAKLERPAMQRLINDIENKAFDTVLVYKLDRLSRSVRDTLYLVKDVFTKNRIDFISLNESIDTSSAMGSLFLTILSAINEFERENIKERMTMGKLGRAKSGKSMMWTKTAFGYYHNRKTGILEIVPPQATIVEQIFTDYLSGISLTKLRDKLNESGHIGKDIPWSYRTLRQTLDNPVYCGYIKFKGSLFEGMHEPIIPYETYLKVQKELGERQQQTYERNNNPRPFQAKYMLSGMARCGYCGAPLRIVLGHKRKDGSRTMKYHCANRFPRKTKGVTVYNDNKKCDSGTYDLSNLEDTVIDNLIGLQENNDSLLKIINGNNQPFLDTSSFKKQISQIDKKIQKNSDLYLNDFITMDELKDRTDSLRAEKKLLEAKISENKFNDSTDVFELVKTQLGSIPINELSYDSKKKIVNNLVSKVDVTADNVDIIFKFQLA

SEQ ID NO: 3262 - protein, 469 aa, synthetic construct
MSYTTPVRAAVYLRISEDRSGEQLGVARQREDCLKLCGQRKWVPVEYLDNDVSASTGKRRPAYEQMLADITAGKIAAVVAWDLDRLHRRPVELEAFMSLADEKRLALATAAGDVDLATPQGRLVARLKGCVAAHETEHKKARQRRAARQKAERGLPNWSKSFGYLPGPNGPEPDPRTAPLVKQAYADILAGASLGDVCRRWNDAGAFTITGRPWTTTTLSKFLRKPRNAGLRAYKGARYGPVDRGAIVGKAQWSPLVDEATFWAAQAVLDAPGRAPGRKSVRRHLLTGLAGCGKCGNHLAGSYRTDGRVVYVCKACHGVAILADNIEPILYHIVAERLATPNAVDLLRRETHDAAEAETIRLGLETLYGELDRLAVERAEGLLTARQVKISTDVVNAKIAKLQARQLDQERLRVFDGIPLGTPQVAGMIAGLSPDRFRAVLDVLAEVVVQPVGKSGKIFNPERVQVNWR

SEQ ID NO: 3263 - protein, 452 aa, synthetic construct
MKAAIYIRVSTREQVENYSIQAQTEKLTALCRSKDWDVYDIFIDGGYSGSNMNRPALNEMLSKLHEIDAVVVYRLDRLSRSQRDTITLIEEYFLKNNVEFVSLSETLDTSSPFGRAMIGILSVFAQLERETIRDRMVMGKIKRIEAGLPLTTAKGRTFGYDVIDTKLYINEEEAKQLQLIYDIFEEEQSITSLQKRLKKLGFKVRTYNRYNNWLTNDLYCGYVSYKDKVHVKGIHEPIISEEQFRRVQEIFTRTGKNPNMNRDSASLLNNLVVCSKCGLGFVHRRKDTMSRGKKYHYRYYSCKTYKHTHELEKCGNKIWRADKLEELIINRVNNYSFASRDVDEAEELDSLNEKLKVEHAKKKRLFDLYINGSYNVSELDSMMNDIDAQINYYESKIEANEELKKDKKIQESLANLATVDYDSLEFREKQLYLKSLINKIYIDGEQVTIEWL

SEQ ID NO: 3264 - protein, 452 aa, synthetic construct
MKAAIYIRVSTREQVENYSIQAQTEKLTALCRSKDWDVYDIFIDGGYSGSNMNRPALNEMLSRLHEIDAVVVYRLDRLSRSQRDTLTLIEEYFLKNNVEFVSLSETLDTSSPFGRAMIGILSVFAQLERETIRDRMVMGKIKRIEAGLPLTTAKGRTFGYDVIDTKLYINEEEARQLQLIYDIFEEEQSITSLQKRLKKLGFKVRTYSRYNNWLTNDLYCGYVSYKDKVHVRGIHEPIISEEQFHRVQEIFTRMGKNPNMNRDSASLLSNLVVCSKCGLGFVHRRKDTMSRGKKYHYRYYSCKTYKHTHELEKCGNKIWRADKLEELIIDRVNNYSYASRNVDKEDELDRLNEKLKIEHAKKKRLFDLYINGSYEVSELESLMDDIDAQINYYESRIEANEELKENKKIQENLANLATVDYDSLGFREKQLYLKGLINKIYIDGEQVTIEWL

SEQ ID NO: 3265 - protein, 452 aa, synthetic construct
MKAAIYIRVSTREQVENYSIQAQTEKLTALCRSKDWDVYDIFIDGGYSGSNMNRPALNEMLSKLHEIDAVVVYRLDRLSRSQRDTITLIEEYFLKNNVEFVSLSETLDTGSPFGRAMIGILSVFAQLERETIRDRMVMGKIKRIEAGLPLTTAKGRTFGYDVIDTRLYINEEEAKQLQLIYDIFEEEQSITFLQKRLKKLGFKVRTYSCYNNWLTNDLYCGYVSYKDKVHVKGIHEPIISEGQFYRVQEIFTRMGKNPNMNRDSASLLSNLVVCSKCGLGFVHRRKDTTSRGKKYHYRYYSCKTYKHTHELEKCGNKIWRADKLEELVINRVSNYSLASRNVDKEDELDSLNEKLKVEHAKKKRLFDLYINGSYNVSVLDSMMNDIDAQINYYESQIEANEELKKNKKIQENLAGLATVDFDSLEFREKQLYLKSLINKIYIDGEQVTIEWL

SEQ ID NO: 3266 - protein, 485 aa, synthetic construct
MTKKVAIYTRVSTTNQAEEGFSIDEQIDRLTKYAEAMGWQVSDTYTDAGFSGAKLERPAMQRLINDIESRAFDTVLVYKLDRLSRSVRDTLYLVKDVFTKNKIDFISLNESIDTSSAMGSLFLTILSAINEFERENIKERMTMGKLGRAKSGKSMMWTKTAFGYYHNRKTGILEIVPLQATIVEQIFTDYLSGISLTKLRDKLNESGHIGKDIPWSYRTLRQTLDNPVYCGYIKFKGSLFEGMHKPIIPYETYLKVQKELEERQQQAYKRNNNPRPFQAKYMLSGMARCGYCGAPLKIVLGHKRKDGSRTMKYHCANRFPRKTKGITVYNGNKRCDSGTYDLSNLENTVIDNLIGFQENNDSLLKIINGNNQPILDTSSFKEQISQIDKKIQKNSDLYLNDFITMDELKDRTDSLQAEKKLLKAKISENKFNDSTDVFELVKTQLGSIPINELSYDDKKKIVNNLVSKVDVTADNVDIIFKFQQA

SEQ ID NO: 3267 - protein, 485 aa, synthetic construct
MTKKVAIYTRVSTTNQAEEGFSIDEQIDRLTKYAEAMGWQVSDTYTDAGSSGAKLERPAMQRLINDIENKAFDTVLVYKLDRLSRSVRDTLYLVKDVFAKNRIDFISLNESIDTSSAMGSLFLTILSAINEFERENIKERMTMGKLGRAKSGKSMMWTKTAFGYYHNRKTGILEIAPLQATIVEQIFTDYLSGISLTKLRDKLNESGHIGKDIPWSYRTLRQTLDNPVYCGYIKFKGSLFEGMHKPIIPYETYLKVQKELEERQQQTYKRNNNPRPFQAKYMLSGMARCGYCGAPLKIVLGHKRKDGSRTMKYHCANRFPRKTKGVTVYNDNKKCDSGTYDLCNLENTVIDTLIGFQENNDSLLKIINGNNQLIPDTSSFKEQISQIDKKIQKNSDLYLNDFITMDELKDRTDSLQTEKKLLKAKISENKFNDSTDVFELVKTQLGSIPINELSYDNKKKIVNHLVSKVDVTADNVDIIFKFQLA

SEQ ID NO: 3268 - protein, 452 aa, synthetic construct
MKAAIYIRVSTQEQVGNYSIQAQTEKLTALCRSKDWDVYDIFVDGGYSGSNMNRPALNEMLSKLHEIDAVVVYRLDRLSRSQRDTTTLIEEYFLKNNVEFVSLSETLDTSSPFGRAMIGILSVFAQLERETIRDRMVMGKIKRIEAGLPLTTAKGRTFGYDVIDTKLYINEEEAKQLQLIYDIFEEEQSITFLQKRLKKLGLKVRTYNRYNSWLTNDLYCGYVSYKDKVHVKGIHEPIISEEQFYRVQEIFTRMGKNPNMNRGSASLLNNLVVCSKCGLGFVHRSKDTMCRGKKYHYRYYSCKTYKHTHELEKCGNKTWRADKLEELIINRVSNYSFASRSVDREDELDSLHEKLKIEHAKKKRLFDLYINGSYEVGELDSMMNDIDAQINYYESQIEANGELKKSKKIQENLAELATVDFDSLEFREKQLYLKSLINKIYIDGEQVTIEWL

SEQ ID NO: 3269 - protein, 469 aa, synthetic construct
MCYTTPVRAAVYLRISEDRSGEQLGVARQREDCLKLCDQRKWVPVEYLDNDVSASTGKRRPAYEQMLADITAGKIAAVVAWDLDRLHRRPVELEAFMSLADEKRLALATVAGDVDLATPQGRLVARLKGSVAAHETEHKKARQRRAARQKAERGHPNWSKAFGYLPGPNGPEPDPRTAPLVKQAYADILAGASLGDVCRQWNGAGAFTITGRPWTTTTLSKFLRKPRNAGLRAYKGARYGPVDRDAIVGKAQWSPLVDEATFWAAQAVLDAPGRAPGRKSVRRHLLTGLAGCGKCGNHLAGSYRTDGRVVYVCKACHGVAILADNIEPILYRIVAERLAMPGAVDLLRREVHDAAEAETARLELETLYGELDRLAVERAEGLLTARQVKISTDIVNAKITKLQARQLDQERLRVFGGIPLGTPQAAGTIAELSPDRFRAVLDVLAEVVVQPVGKSGRIFNPERVQVNWR

SEQ ID NO: 3270 - protein, 452 aa, synthetic construct
MKAAIYIRVSTREQVENYSIQAQTEKLTALCRSKDWDVYDIFVDGGYSGSNMNRPALNEMLSKLHEIDAVVVYRLDRLSRSQRDTITLIEEYFLKNNVEFVSLSETLDTSSPFGRAMIGILSVFAQLERETIRDRMVMGKIKRIEAGLPLTTAKGRTFGYDVIDTKLYINEEEAKQLQLIYDIFEEEQSITSLQKRLKKLGFKVRTYNRYNNWLTNDLYCGYVSYKDKVHVKGIHEPIISEEQFYRVQEIFARMGKNPNMNRDSASLLNNLVVCSKCGLGFVHRRKGIMSRGKKYHYRYYSCKTYKHIHELEKCGNKIWRADKLEELIINRVHNYSLASRNTDKEDELDSLNEKLKIEHAKKKRLFDLYINGSYEVSELDSMMSDIDAQINYYESQIEANEELKKNKKIQENLAHLATVDFDSLEFREKQLYLKSLINKIYIDGEQVTIEWL

SEQ ID NO: 3271 - protein, 452 aa, synthetic construct
MKAAIYIRVSTREQVENYSIQAQTEKLTALCRSKDWDVYDIFIDGGYSGSNMNRPALSEMLGKLHEIDAVVVYRLDRLSRSQRDTITLIEEYFLKNNVEFVSLSETLDTSSPFGRAMIGILSVFAQLERETIRDRMVMGKIKRIEAGLPLTTAKGRTFGYDVIDTKLYINEEEAKQLQLIYDIFEEEQSITFLQKRLKKLGFKVRTYNCYNNWLTNDLYCGYVSYKDKVHVKGIHEPIISEEQFYRVQEIFTRMGKNPNMNRDSASLLNNLVVCSKCGLGFVHRRKDAMSRDKKYHYRYYSCKTYKHIHELEKCGNKIWRADKLEELIINRVNNYSLASRNTDKEDELDSLNEKLKIEHAKKKRLFELYINGSYEVSELDSMMSDIDAQINYYEGQIEANEELKKNKKVQENLAYLATVDFDSLEFREKQLYLKSLINKIYIDGEQVTIEWL

SEQ ID NO: 3272 - protein, 469 aa, synthetic construct
MSYTTPVRAAVYLRISEDRSGEQLGVARQREDCLKLCGQRKWEPVEYLDNDVSASTGKRRPAYEQMLADITAGKIAAVVAWDLDRLHRRPMELEAFMSLADEKRLALATVAGDVDLATPQGRLVARLKGSVAAHETEHKKARQRRAARQKAERGYPNWSKAFGYLPGPNGPEPDPRTAPLVKQAYADILAGASLGDVRRQWNDVGAFTITGRPWTTTTLSKFLRKPRNAGLRAYKGARYGPVDRDAIVGKAQWSPLVDEATFWAAQAVLDAPGRAPGRKSVRRHLLTGLAGCGKCGNHLAGSYRTDGRVVYVCKACHGVAILADNIEPILYHIVAERLAMPDAVDLLRREIHDVAEAETIRLELETLYGELDRLAVERAEGLLTARQVKISTDIVNAKITKLQARQLDQERLRVLDGIPLGTSQVAGMIAELSPDRFRAVLDVLAEVVVQPVGKSGRIFNRERVQVNWR

SEQ ID NO: 3273 - protein, 469 aa, synthetic construct
MSYTTPVRAAVYLRISEDRSGEQLGVARQREDCLKLCDQRRWVPVEYLDNDVSASTGKRRPAYEQMLADITAGKIAAVVAWDLDRLHRRPIELEAFMSLADEKRLALATVAGDVDLATPQGRLVARLKGSVAAHETEHKKARQRRAARQKAERGLPNWSKAFGYLPGPNGPEPDPRTAPLVKQAYADILAGASLGDVCRQWNDAGAFTITGRPWTTTTLSKFLRKPRNAGLRAYKGARYGPADRGAIVGKAQWSPLVDEATFWAAQAVLDAPGRAPGRKSVRRHLLTGLAGCGKCGNHLAGNYRTDGRVVYVCKACYGVAILADNIVPILYHVVAERLAVPDAVDLLRREIHDAAEADTVRLELETLYGELDRLAVERAEGLLTARQVKISTDIVNAKITKLQARQLDQERLRVFDGIPLGTPQVAGMIAELSPDRFRAVLDVLAEVVVQPVGKSGRIFSPERVQVNWR

SEQ ID NO: 3274 - protein, 469 aa, synthetic construct
MSYTTPVRAAVYLRISEDRSGEQLGVARQREDCLKLCGQRKWAPVEYLDNDVSASTGKRRPAYEQMLADITAGKIAAVVAWDLDRLHRRPIELEAFMSLADEKRLALATVAGDVDLATPQGRLVARLKASVAAHETEHKKARQRRAARQKAERGHPNWSKAFGYLPGPNGPEPDPRTAPLVKQAYADILAGASLGDVCRQWNDAGAFTITGRPWTTTTLSKFLRKPRNAGLRAYKGARYGPVDRDAIVGKAQWSPLVDEATFWAAQAVLDAPGRAPGRKSVRRHLLTGLAGCGKCGNHLAGSYRTDGRVVYVCKACHGVAILADNIEPILYHIVAERLAMPDAVDLLRREVHDAAEAETIRLELETLYGELDLLAVERAEGLLTARQVKISTDIVNAKITKLQARRLDQERLRVFAGIPLGTPQVAGMIAELSPNRFRAVLDVLAEVVVQPVSKSGRIFNPERVQVNWR

SEQ ID NO: 3275 - protein, 452 aa, synthetic construct
MKAAIYIRVSTQEQVENYSIQAQTERLTALCRSKGWDVYDIFIDGGYSGSNMNRPALNEMLSKLHEIDAVVVYRLDRLSRSQRDTITLVEEYFLKNNVEFVSLSETLDTSSPFGRAMIGILSVFAQLERETIRDRMVMGKIKRIEAGLPLTTAKGRTFGYDVIDTKLYINEEEAKQLQLIYDIFEEEQSITFLQKRLKELGFKVRTYNRYNSWLTNDLYCGYVSYKDKVHVKGIHEPIISEEQFHRVQEIFTRMGKNPNMNRDSASLLSNLVVCSRCGLGFVHRRKDTMSRGKKYHYRYYSCKTYKHTHELEKCGNKIWRADKLEELIINRVSNYSFASRNVDKEDELDSLNEKLKIEHAKRKRLFDLYINGSYEVSELDSMMNDTDAQINYYESQIEANEELKKNKKIQENLANLATVDYNSLEFREKQLYLKSLINKIYIDGEQVTIEWL

SEQ ID NO: 3276 - protein, 485 aa, synthetic construct
MTRKVAIYTRVSTTNQAEEGFSIDEQVDRLTKYAEAMGWQVSDTYTDAGFSGAKLERPAMQRLINDIENKAFDTVLVYKLDRLSRSVRDTLYLVKDVFTKNKIDFISLNESIDTSSAMGSLFLTILSAINEFERENIKERMTMGKLGRAKSGKSMMWTKTAFGYYHNRKTGILEIVPLQAVIVEQIFTDYLSGISLTKLRDKLNESGHIGKDIPWSYRTLRQTLDNPVYCGYIKFKGSLFEGMHKPIIPYETYLKVQKELEERQQQTYERNNNPRPFQAKYMLSGMARCGYCGAPLRIVLGHKRKDGSRTMKYHCANRFPRKTKGVTVYNDNKKCDSGTYDLRNLESTVIDNLIGFQENNESLLKIINGNNQPILDTSSFKEQISQIDKKIQKNSDLYLNDFITMDELKDRTDSLQAEKKLLKAKISENKFNDSTDVLELVKTQLGGIPINELSYDNKKRIVNNLVSKVDVTADNVDIIFKFQLA

SEQ ID NO: 3277 - protein, 452 aa, synthetic construct
MKAAIYIRVSTQEQVENYSIRAQTEKLTALCRSKDWDVYDIFIDGGYSGSNMNRPALNEMLSKLHEIDAVVVYRLDRLSRSQRDTITLIEEYFLKNNVEFVSLSETLDTSSPFGRAMIGILSVFAQLERETIRDRMVMGKIKRIEAGLPLTTAKGRTFGYDVIDTKLYINEEEAKQLQLIYDIFEEEQSITFLQKRLKKLGLKVRTYSRYYSWLTNDLYCGYVSYKDKVHVKGIHKPIISEEQFYRVQEIFTRMGKNPNMNRDSASLLNNLVVCSKCGLGFVHRRKDTMSRGKKYHYRYYSCKTYKHTHELEKCGNKIWRADRLEELIINRVNNYSFASRNADKEDELDSLHEKLKIEHAKKKRLFDLYINGSYEVSELDSMMNDIDAQISYYESQIEANEELKKNKKIQESLADLATVDFDSLEFREKQLYLKSLINKIYIDGEQVTIEWL

SEQ ID NO: 3278 - protein, 485 aa, synthetic construct
MTKKVAIYTRVSTTNQAEEGFSIDEQVDRLTKYAEAMGWQVSDTYTDAGLSGAKLERPAMQRLINDIENKAFDTVLVYKLDRLSRSVRDTLYLVKDVFTKNKIDFISLNESIDTSSAMGSLFLTILSAINEFERENIKERMTMGKLGRAKSGKSMMWTKTAFGYYHNRKTGILEIVPLQATIVEQIFTDYLSGTSLTKLRDRLNESGHIGKDIPWSYRTLRQTLDNPVYCGYIKFKDSLFEGMHKPIIPYETYLKVQRELEERQQRTYERNNNPRPFQAKYMLSGMARCGYCGAPLRIVLGHKRKDGSRTMKYHCANRFPRKTKGVTVYNDSKKCDSGTYDLSSLENTVIDNLIGFQENDDSLLRIINGNNQPILDTSSFKKQISQIDKKIQKNSDLYLNDFITMDELKDRTDSLQAEKKLLKAKIGEDKFNDSTDVFELVKTQLGSIPINELSYDNKKKIVNNLVSKVDVTADNVDIIFKFQLA

SEQ ID NO: 3279 - protein, 469 aa, synthetic construct
MSYTTPVRAAVYLRISEDRSGEQLGVARQREDCLKLCDQHRWVPVEYLDNDVSASTGKRRPAYEQMLADITAGKIAAVVAWDLDRLHRRPVELEAFMSLADEKRLALATVAGDVDLATPQGRLVARLKGCVAAHETEHKKARQRRAARQKAERGHPNWSKAFGYLPGPNGPEPDPRTAPLVKQAYADILAGASLGDVCRRWNDAGAFTITGRPWTTTTLSKFLRKPRNAGLRAYKGARYGPVDRDAIVGKAQWSPLVDEATFWAAQAVLDAPGRAPGRKSVRRHLLTGLAGCGKCGNHLAGSYRTDGRVVYVCKACHGVAILADKIEPILYHVVAERLAMPDAVDLLRREIHDAAEAETIRLELETLYGELDRLAVERAEGLLTARQVKISTDIVNAKVTKLQARQLDQERLRVFDGIPLGTPQVAGMIAELSPDRFRAVLDVLAEVVVQPVGKSGRIFNPERVQVNWR

SEQ ID NO: 3280 - protein, 452 aa, synthetic construct
MKAAIYIRVSTREQVENYSIQAQTEKLTALCRSKDWDVYDIFIDGGYSGSNMNRPALNEMLSKLHEIDAVVVYRLDRLSRSQRDTITLIEEYFLKNNVEFVSLSETLDTSSPFGRAMIGILSVFAQLERETIRDRMVMGKIKRIEAGLPLTTAKGRTFGYDVIDTKLYINEEEARQLQLIYDIFEEEQSITFLQKRLKKLGFKVCTYNRYNNWLTNDLYCGYVSYKDKVHVKGIHEPIISEEQFYRVQEIFTRMGKNPNMNRNSASLLNNLVVCSKCGLGFVHRRKDAMSRDKKYHYRYYSCKTYKHIHELEKCGNKIWRADKLEELIINRVNNYSLASRNADKEDGLDSLNEKLRIEHAKKKRLFDLYINGSYEVSELDSMMNDIDAQISYYESQIEANEELKKNKKIQENLAYLATVDFDSLEFREKQLYLKSLINKIYIDGEQVTIEWL

SEQ ID NO: 3281 - protein, 452 aa, synthetic construct
MKAAIYIRVSTREQVENYSIQAQTEKLTALCRSKDWDVYDIFIDGGYSGSNMNRPALNEMLSKLHEIDAVVVYRLDRLSRSQRDTITLIEEYFLKNNVEFVSLSETLDTSSPFGRAMIGILSVFAQLERETIRDRMVMGKIKRIEAGLPLTTAKGRTFGYDVIDTKLYINEEEAKQLRLIYDIFEEEQSITSLQKRLKKLGFKVRTYNCYNNWLTNDLYCGYVSYKDKVHVKGIHEPIISEEQFYRVQEIFTRMGKNPNMNRDSASLLNNLVVCSKCGLGFVHRRKDAMSRDKKYHYRYYSCKTYKHIHELEKCGNKIWRADKLEELIISRVNNYSLASRNVDKEDELVSLNEKLKTEHAKKRRLFDLYINGSFEVSELDSVMKDIDAQINYYESQIEANEELKKNKRIQENLAYLATVDFDSLEFREKQLYLKSLINKIYIDGEQVTIEWL

SEQ ID NO: 3282 - protein, 485 aa, synthetic construct
MTKKVAIYTRVSTTSQAEEGFSIDEQIDRLTKYAEAMGWQVSDTYTDAGFSGAKLERPAMQRLINDIENEAFDTVLVYKLDRLSRSVRDTLYLVKDVFTKNKIDFISLNESIDTSSAMGSLFLTILSAINEFERENIKERMTMGKLGRAKSGKSMMWTKTAFGYYHNRKTGILEIVPLQATIVEQIFTDYLSGISLTKLRDKLNESGHIGKDIPWSYRTLRQTLDNPVYCGYIKFKDSLFEGMHKPIIPYETYLKVQKELEERQQQAYERNNNPRPFQAKYMLSGMARCGYCGAPLRIVLGHKRKDGSRTMKYHCANRFPRKTKGITVYNDNKKCDSGTYDLSNLEYTVIDNLIGFQENNDSLLKIINGNYQPILDTSSFKKQISQIDRKIQKNSDLYLNDFITMDELKVRTDSLQAEKKLLEAKISENKLNDSTDMFELVKTQLGSIPINELSYDNKKKIVNNLVSKVDVTADNVDIIFKFQLA

SEQ ID NO: 3283 - protein, 485 aa, synthetic construct
MTKKVAIYTRVSTTNQAEEGFSIDEQIDRLTKYAEAMGWQVSDTYTDAGISGAKLERPAMQRLINDIENKAFDTVLVYKLDRLSRSVRDTLYLVKDVFTKNKIDFISLNESIDTSSAMGSLFLTILSAINEFERENIKERMTMGKLGRAKSGKSMMWTKTAFGYYHNRKTGILEIVPLQATIVEQIFTDYLSGISLTKLRDKLNESGHIGKDIPWSYRTLRQTLDNPVYCGYIKFKDSLFEGMHKPIIPYETYLKVQKELEERQQQTYERNNNPRPFQAKYMLSGMARCGYCGAPLRIVLGHKRKDGSRTMKYHCTNRFPRKTKGITVYNDNKKCDSGTYDLSNLENTVIDSLMGFQENNDSLLKIINGNNQLILDTSSFKKQISQIDKKIQKNSDLYLNDFITMDELKDRTDSLQAEKKLLKAKISESKFNDSTDVLELVKTQLGSIPINELSYDNKKKIVNNLVSKVDVTADNVDIIFKFQLA

SEQ ID NO: 3284 - protein, 485 aa, synthetic construct
MTRKVAIYTRVSTTNQAEEGFSIDEQIDRLTKYAEAMGWQVSDTYTDAGFSGAKLERPAMQRLINDIENKAFDTVLVYKLDRLSRSVRDTLYLVKDVFTKNKIDFISLNESIDTSSAMGSLFLTILSAINEFERENIKERMTMGKLGRAKSGKSMMWTKTAFGYYHNRKTGILEIVPLQATIVEQIFADYLSGISLTKLRDKLNESGHIGKDIPWSYRTLRQTLDNPVYCGYIKFKDSLFEGMHKPIIPYETYLKVQKELEERQQQTYERNNNPRPFQAKYMLSGMARCGYCGAPLKIVLGHKRKDGSRTMKYHCANRFPSKTKGITVYNDNKKCDSDTYDLSNLENTVIGILIGFQEDNESLLKIINGNNQPILDTSSFKKQISQIDKKIRKNSDLYLNDFITMDELKDRTDSLQAEKKLLKAKISENKFNDSTDVFELVKTQLGSIPINELSYDNRKKIVNNLVSKVDVTADNVDIIFKFQLA

SEQ ID NO: 3285 - protein, 452 aa, synthetic construct
MKAAIYIRVSTQEQVGNYSIQAQTEKLTALCRSKDWDVYDIFVDGGYSGSNMNRPALNEMLSKLHEIDAVVVYRLDRLSRSQRDTTTLIEEYFLKNNVEFVSLSETLDTSSPFGRAMIGILSVFAQLERETIRDRMVMGKIKRIEAGLPLTTAKGRTFGYDVIDTKLYINEEEAKQLQLIYDIFEEEQSITSLQKRLKKLGFKVRTYNRYSNWLTNDLYCGYVSYKDKVHVKGIHEPIISEEQFYRVQEIFTRMGKNPNMNRGSASLLSNLVVCSKCGLGFVHRSKDTMCRGKKYHYRYYSCKTYKHTHELEKCGNKIWRADKLEELIINRVNNYSSVSRNVDKEDELDSLNEKLKIEHAKKKRLFDLYINGSYEVSELDSMMNDIDAQINYYESQIEANEELKKDKKIQENLADLATVDFDSLEFREKQLYLKSLINKIYIDGERVTIEWL

SEQ ID NO: 3286 - protein, 485 aa, synthetic construct
MTKKVAIYTRVSTTNQAEEGFSIDEQIDRLTKYAEAMGWQVSDTYTDAGCSGAKLERPAMRRLINDIENRAFDTVLVYKLDRLSRSVRDTLYLVKDMFTKNKIDFVSLNESIDTSSAMGSLFLTILSAINEFERENIKERMTMGKLGRAKSGKSMMWTKTAFGYYHNRKTGILEIVPLQATIVEQIFTDYLSGISLTKLRDKLNESGHIGKDIPWSYRTLRQTLDNPVYCGYIKFKDSLFEGMHKPIIPYETYLKVQKELEERQQQTYERNNNPRPFQAKYMLSGVARCGYCGAPLKIVLGHKRKDGSRTMKYHCANRFPRKTKGVTVYNDNKKCDSGTYDLSNLENTVIDNLIGLQENNDSLLKIINGNNQPILGTSSLKKQISQIDKKIQKNSDLYLNDFITMDELKDRTDSLQAEKKLLEAKISENKFNDSTDVFELVKTQLGSIPINELSYDNKKKIVNNLVSKVDVTADNVDIIFKFQLT

SEQ ID NO: 3287 - protein, 452 aa, synthetic construct
MKAAIYIRVSTREQVENYSIQAQTEKLTALCRSKDWDVYDIFIDGGYSGSNMNRPALNEMLSKLHEIDAVVVYRLDRLSRSQRDTITLIEEHFLKNNVEFVSLSETLDTSSPFGRAMIGILSVFAQLERETIRDRMVMGKVKRIEAGLPLTTAKGRTFGYDVIDTRLYINEEDAKQLRLIYDIFEEEQSITFLQKRLKKLGFKVHTYNRYNNWLTNDLYCGYVSYKDKVHVKGIHEPIISEEQFYRVQEIFTRMGKNPNMNRDSASLLNSLVVCSKCGLGFVHRRKDTTSRGKKYHYRYYSCKTYKHTHELEKCGNKIWRADKLEELIINRVNNYSFASRNVDKEDELDSLNEKLRVEHAKKKRLFDLYINGSYNVSELDSMMNDIDAQINYYESQIEANEGLKKNKKIQENLAGLATVDFDSLEFREKQLYLKSLINKIYIDGEQVTIEWL

SEQ ID NO: 3288 - protein, 452 aa, synthetic construct
MKAAIYIRVSTREQVENYSIQAQTEKLTALCRSKDWDVYDIFIDGGYSGSNMNRPALNEMLSKLHEIDAVVVYRLDRLSRSQRDTITLIEEYFLKNNVEFVSLSETLDTSSPFGRAMIGILSVFAQLERETIRDRMVMGKIKRIEAGLPLTTAKGRTFGYDVIDTKLYINEEEAKQLQLIYDIFEEEQSITFLQKRLKELGFKVRTYNRYNNWLTNDLYCGYVSYKDEVRVKGIHEPIISEEQFYRVQEIFARVGKNPNMNRDSASLLSNLVVCSKCGLGFVHRRKDTMSRGKKYHYRYYSCKTYKHIHELEKCGNKIWRADKLEELIINRVNNYSFASRNVDKEDELDSLNEKLKTERAKKKRLFDLYINGSYEVSELDSMMSDIDAQINYYEGQIEANEELKRNKKIQENLANLATVDYDSLEFREKQLYLKSLINKIYIDGEQVTIEWL

SEQ ID NO: 3289 - protein, 452 aa, synthetic construct
MKAAIYIRVSTREQVENYSIQAQTEKLTALCRSKDWDVYDIFIDGGYSGSNMNRPALSEMLSKLHEIDAVVVYRLDRLSRSQRDTITLIEEYFLRNSVEFVSLSETLDTSSPFGRAMIGILSVFAQLERETIRDRMVMGKIKRIEAGLPLTTAKGRTFGYDVIDTKLYVNEEEARQLQLIYDIFEEEQSITFLQKRLKELGFKVRTYNRYNNWLTNDLYCGYVSYKDKVHVKGIHEPIISEEQFYRVQEIFARMGKNPNMNRDSASLLNNLVVCSKCGLGFVHRRKDAMSRDKKYHYRYYSCKTYKHIHELEKCGNKIWRADKLEELIINRVNNYSIASRNADKEDELDSLNEKLKIEHAKKKRLFELYINGSYEVSELDSMMNDIDAQINYYESQIEANKELRENKKIQENLADLATVDFDSLEFREKQLYLKSLINKIYIDGEQVTIEWL

SEQ ID NO: 3290 - protein, 452 aa, synthetic construct
MKAAIYIRVSTQEQVGNYSIQAQTEKLTALCRSKDWDVYDIFIDGGYSGSNMNRPALNEMLSKLHEIDAVVVYRLDRLSRSQRDTTTLIEEYFLKNNVEFVSLSETLDTSSPFGRAMISILSVFAQLERETIRDRMVMGKIKRIEAGLPLTTAKGRTFGYDVIDTKLYINEEEAKQLQLIYDIFEEEQSITFLQKRLKKLGFKVRTYNRYNSWLTNDLYCGYVSYKDKVHVKGIHEPIISEEQFYRVQEIFTRMGKNPNMNRDSASLLSNLVVCSKCGLGFVHRSKDTMSRGKKYHYRYYSCKTYKHTHELEKCGNKTWRADKLEELIISRVNNYSFASRSVDKEDELDSLNEKLKIEHAKRKRLFDLYINGSYEVSELDSMMNDINAQINYYESQIEANEELKENKKIQENLAELATVDFDSLEFREKQLYLKSLINKIYIDGEQVTIEWL

SEQ ID NO: 3291 - protein, 452 aa, synthetic construct
MKAAIYIRVSTREQVENYSIQAQTEKLTALCRSKDWDVYDTFIDGGYSGSNMNRPALNEMLSKLHEIDAVVVYRLDRLSRSQRDTITLIEEYFLKNDVEFVSLSETLDTSSPFGRAMIGILSVFAQLERETIRDRMVMGKIKRIEAGLPLVTAKGRTFGYDVVDTKLYINEEEAKQLQLIYDIFEEEQSITSLQKRLKKLGFKVRTYNCYNNWLTNDLYCGYVSYKDKVHVKGIHEPIISEEQFNRVQEIFTRMGKNPNMNRDSASLLNNLVVCSKCGLSFVHRRKDAMGRDKKYHYRYYSCKTYKHIHELEKCGNKIWRADKLEELIINRVNDYSFASRNVDKEDELDSLNEKLKIEHAKKKRLFDLYINGSYEVSELDSMMNDIDAQINYYESQIEANEELKKNKKIQENLAYLATVDFDSLEFREKQLYLKSLINKIYIDGEQVTIEWL

SEQ ID NO: 3292 - protein, 485 aa, synthetic construct
MTKKVAIYTRVSTTNQAEEGFSIDEQIDRLTKYAEAMGWQVSDTYTDAGVSGAKLERPAMQRLINDIENKAFDTVLVYKLDRLSRSVRDTLYLVKDVFTKNKIDFISLNESIDTSSAMGSLFLTILSAINEFERENIKERMTMGKLGRARSGKSMMWTKTAFGYYHNRKTGILEIVPLQATIVEQIFTDYLSGISLTKLRDKLNESGHIGKDIPWSYRTLRQTLDNPVYCGYIKFKDSLFEGMHKPIIPYETYLEVQKELEERQQQTYERNNNPRPFQAKYMLSGMARCGYCGAPLRIVLGHKRKDGSRTMKYHCANRFPRKTKGVTVYNDNKRCDSGTYDLSNLENTVIDNLIGFQENNDSLLKIINGNNQPILDTSSFKKQISQIDKKIQKNSDLYLNDFITMDELKDRTESLQAEKKLLEAKISENKLNDSTDVFELVKTQLGSIPINELSYGNKKKIVNGLVSKVDVTADNVDIIFKFQLA

SEQ ID NO: 3293 - protein, 452 aa, synthetic construct
MKAAIYIRVSTREQVENYSIRAQTEKLTALCRSKDWDVYDIFIDGGYSGSNMNRPALNEMLSKLHEIDAVVVYRLDRLSRSQRDTITLIEEYFLKNNVEFVSLSETLDTSSPFGRAMIGILSVFAQLERETIRDRMVMGKIKRVEAGLPLTTAKGRTFGYDVIDTKLYINEEEAKQLQLIYDIFEEEQSITSLQKRLKKLGFKVRTYSCYNNWLTNDLYCGYVSYKDTVHVKGIHEPIISEEQFYRVQEIFTRMGKNPNMNRDSASLLNNLVVCSKCGLGFVHRRKDTVSRGKKYHYRYYSCRTYKHIHELEKCGNKIWRADKLEELIINRANNYSITSRNVDKEDELDSLNEKLKIEHAKKKRLFDLYINGSYEVSELDSMMNDIDAQINYYESQIEANEELKKNKKIQENLADLATVDFDSLEFREKQLYLKSLINKIYIDGEQVTIEWL

SEQ ID NO: 3294 - protein, 452 aa, synthetic construct
MKAAIYIRVSTREQVENYSIQAQTEKLTALCRSKDWDVYDIFIDGGYSGSNMNRPALNEMLSKLHEIDAVVVYRLDRLSRSQRDTITLIEEYFLKNNVEFVSLSETLDTSSPFGRAMIGILSVFAQLERETIRDRMVMGKIKRVEAGLPLTTAKGRTFGYDVIDTKLYINEEEAKQLQLIYDIFEEEQSITFLQKRLKKLGFKVRTYSCYNNWLTNDLYCGYVSYRDKVHVKGIHEPIISEEQFYRVQEIFTRMGKNPNMNRDSASLLNNLVVCSKCGLGFVHRRKDTMSRGKKYHYRYYSCKTYKHIHELEKCGNKIWRADKLEELIISRVNNYSFASRNVDKEDELDSLNEKLKIEHAKRKRLFELYISGSYEVSELDSMVNDIDAQINYYESQIGANEELKKNKKIQENLANLATVDYDSLEFREKQLYLKSLINKIYIDGEQVTIEWL

SEQ ID NO: 3295 - protein, 469 aa, synthetic construct
MGYTTPVRAAVYLRISEDRSGEQLGVARQREDCLKLCGQRKWVPVEYLDNDVSASTGKRRPAYEQMLADITAGKIAAVVAWDLDRLHRRPVELEAFMSLADEKRLALATVAGDVDLATPQGRLVARLKGCVAAHETEHKKARQRRAAKQKAERGLPNWSKAFGYLPGPNGPEPDPRTAPLVKQAYADILAGASLGDVCRQWNDAGAFTITGRPWTTTTLSKFLRKPRNAGLRAYKGARYGPVDRDAIVGKAQWSPLVDEATFWAAQAVLDAPGRAPGRKSVRRHLLTGLAGCGKCGNHLAGSYRTDGRVVYVCKACHGVAILADNIEPILYHIVVERLAMPDAVDLLRREIHDAAEAETVRLELETLYGELDSLAVERAEGLLTARQVKISTDIVNAKITKLQARQLDQERLRVLDGIPLGTPQVGGMIAELSPDRFRAVLDVLAEVVVQPAGKSGRVFNPERVQVNWR

SEQ ID NO: 3296 - protein, 485 aa, synthetic construct
MTKKVAIYTRVSTTNQAEEGFSIDEQIDRLTKYAEAMGWQVSDTYTDAGSSGAKLERPAMQRLINDIENKAFDTVLVYKLDRLSRSVRDTLYLVKDVFTKNKIDFISLNESIDTSSAMGSLFLTILSAINEFERENIKERMTMGKLGRAKSGKSMMWTKTAFGYYHNRKTGILEIVPPQATIVEQIFTDYLSGISLTKLRDKLNESGHIGKDTPWSYRTLRQTLDNPVYCGYIKFKDSLFEGMHKPIIPYETYQKVQKELEERQQQTYERNNNPRPFQAKYMLSGMARCGYCGAPLKIVLGHKRKDGSRTKKYHCANRFPRKTRGVTVYNDNKKCDSGAYDLSNLENTVIDNLIGFQENNDSLLKIINGNNQPIPDTSSFEKQISQIDKKIRKNSDLYLNDFITMDELKDRTDSLQAEKKLLKAKISENKFNDSTDVFELVKTQLGIVPINELSYDNKKKIVNNLVSKVDVTADNVDIIFKFQLA

SEQ ID NO: 3297 - protein, 452 aa, synthetic construct
MKAAIYIRVSTQEQVGNYSIQAQTEKLTALCRSKDWDVYDIFIDGGYSGSNMNRPALNEMLSRLHEIDAVVVYRLDRLSRSQRDTTTLIEEYFLKNSVEFVSLSETLDTSSPFGRAMIGILSVFAQLERETIRDRMVMGKIKRIEAGLPLTTAKGRTFGYDVVDTKLYINEEEAKQLRLIYDIFEEEQSITFLQKRLKKLGFKVRTYNRYSSWLTNDLYCGYVSYKDQVHVKGIHDPIISEEQFHRVQEIFTRMGKNPNMNRDSASLLNNLVVCSKCGLGFVHRSKDTMSRGKKYHYRYYSCKTYKHTHELEKCGNKIWRADKLEELIINRVNNYSFASRNVDKEDELDSLNEKLKIEHAKRKRLFDLYINGNYEVSELDSMMNDIDAQINYYESQIEASEELRKNRKIQENLADLATVDFDSLEFREKQLYLKSLINKIYIDGEQVTIDWL

SEQ ID NO: 3298 - protein, 485 aa, synthetic construct
MTKKVAIYTRVSTTNQAEEGFSIDEQIDRLTKYAEAMGWQVSDTYTDAGSSGAKLERPEMQRLINDIENKAFDTVLVYKLDRLSRSVRDTLYLVKDVFTKNKIDFISLNESIDTSSAMGSLFLTILSAINEFERENIKERMTMGKLGRAKSGKSMMWAKTAFGYYHNRKTGILEIVPLQATIVEQIFTDYLSGISLTKLRDKLNENGHIGKDIPWSYRTLRQTLDNPVYCGYIKFKDSLFEGMHKPIIPYETYLKVQKELGERQRQTYERNNNPRPFQAKYMLSGMARCGYCGAPLRIVLGHKRKDGSRTMKYHCANRFPRKTKGVTVYNDNKKCDSGTYDMSSLEDTVIDNLIGFQENNDSLLKIINGNNLPILDTSSFKKQISQIDKKIQKNGDLYLNDLITMDELKERTDSLQAEKKLLKAKLSENKFNDSTDVFEQVKTQLGSIPINELSYDNKKKIVNNLVSKVDVTADNVDIIFKFQLA

SEQ ID NO: 3299 - protein, 485 aa, synthetic construct
MTKKVAIYTRVSTTNQAEEGFSIDEQIDRLTKYAEAMGWQVSDTYTDAGLSGAKLERPAMQRLINDIENKAFDTVLVYKLDRLSRSVRDTLYLVKDVFTKNKIDFISLNESIDTSSAMGSLFLTILSAINEFERENIKERVTMGKLGRAKSGKSMMWTKTAFGYYHNRKTGILEIVPLQATIVEQIFTDYLSGISLTKLRDKLNESGHIGKDIPWSYRTLRQTLDNPVYCGYIEFKGSLFEGMHKPIIPYETYLKVQKELEERQQQTYERNNNPRPFQAKYMLSGMARCGHCGAPLRIVLGHKRKDGSRTMKYHCANRFPRKTKGVTVYNDNKKCDSGTYDLSNLENTVIDNLIGFQENNDSLLKIINGNNQPILDTSSLKKQISQIDKKIQKISDLYLNDFITMDELKGRTDSLQAEKKLLKAKISENKFNDSTDVFELVKTQLGSIPINELSYDNKKKIVNNLVSKVDVTADNVDIIFKFQLA

SEQ ID NO: 3300 - protein, 484 aa, synthetic construct
MTKKVAIYTRVSTANQAEEGFSIDEQIDRLTKYAEAMGWQVSDTYTDAGFSGAKLERPAMQRLINDIESRAFDTVLVYKLDRLSRSVRDTLYLVKDVFTKNKIDFISLSESIDTSSAMGSLFLTILSAINEFERENIKERMTMGKLGRAKSGKSMMWTKTAFGYYHNRKTGILEIVPLQATIVEQIFTDYLSGISLTKLRDKLNESGHIGKDIPWSYRTLRQTLDNPVYCGYIKFKDSLFEGMHKPIIPYETYLKVQKELEERQQQTYERNNNPRPFQAKYMLSGMARCGYCGAPLRIVLGHKRKDGSRTMKYHCANRFPRKTKGVTVYNDNKKCDSGTYDLSNLENTVIDNLIGLQENNDNLLKIINGNNQPILDTSSFKEQISQIDKKIQKNSDLYLNDFITMDELKDRTDSLQAEKKLLKAKISENKFNDSTDVFELVKTQLGSIPINELSYDNKKIVNNLVSKVDVTADNVDIIFKFQLA

SEQ ID NO: 3301 - protein, 469 aa, synthetic construct
MSYTTPVRAAVYLRISEDRSGEQLGVARQREDCLKLCGQRKWVPVEYLDNDVSASTGKRRPAYEQMLADIVAGKVAAVVAWDLDRLHRRPIELEAFMSLADEKRLALATVAGDVDLATPQGRLVARLKGCVAAHETEHKKARQRRAARQKAERGLPNWSRAFGYLPGPNGPEPDPRTAPLVKQAYADILAGASLGDVCRQWNDAGALTITGRPWTTTTLSKFLRKPRNAGLRAYKGARYGPVDRNAIVGKAQWSPLVDEATFWAAQAVLDAPGRAPGRKSVRRHLLTGLAGCGKCGNHLAGNYRTDGRVVYVCKACHGVAILAGNIEPILYHIVAERLAMPDAVDLLRREIHDAAEAETIRLELETLYGELDRLAVERAEGLLTARQVKISTDIVNAKITKLQACQLDQERLRVLDGIPLGTPQVAGTIAELSPDRFRAVLDVLAEVVVQPVGKCGRVSNPERVRVNWR

SEQ ID NO: 3302 - protein, 485 aa, synthetic construct
MTKKVAIYTRVSTTNQAEEGFSIDEQIDRLTKYAEAMGWQVSDTYTDAGFSGAKLERPAMRRLINDIGNKAFDTVLVYKLDRLSRSVRDTLHLVKDVFTKNKIDFISLNESIDTSSAMGSLFLTILSAINEFERENIKERMTMGKLGRAKSGKSMMWTKTAFGYYHNRKTGILEIVPLQAAIVEQIFTDYLSGISLTKLRDKLNESGHIGKEIPWSYRTLRQTLDNPVYCGYIKFKGSLFEGMHKPIIPYETYLKVQEELEERQQQTYERNNNPRPFQAKYMLSGMARCGYCGAPLRIVLGHKRKDGSRTMKYHCTNRFPRKTKGVTVYNDNKKCDSGTYDLSNLENTVIDILIGLQENNDSLLKIINGNDQPILDTGSFKEQISQIDRKIQKNSDLYLNDFITMDELKDRTDSLQVEKKLLEAKISENKFNDSTDVFELVTTQLGSIPINELSYDNKKKIVNNLVSKVDVTADNVDIIFKFQLA

SEQ ID NO: 3303 - protein, 485 aa, synthetic construct
MTKKVAIYTRVSTTNQAEEGFSIDEQVDRLTKYAEAMGWQVSDTYTDAGLSGAKLERPAMQRLINDIENKAFDTVLVYKLDRLSRSVRDTLYLVKDVFTKNKIDFISLSESIDTSSAMGSLFLTILSAINEFERENIKERMTMGKLGRAKSGKSMMWTKTAFGYCHNRKTGILEIVPLQATIVEQIFTDYLGGISLTKLRDKLNESGHIGKDIPWSYRTLRQTLDNPVYCGYIKFKGSLFEGVHKPIIPYETYLRVQKELEERQQQAYERNNNPRPFQAKYMLSGMARCGYCGAPLRIVLGHKRKDGSRTMKYHCANRFPRKTKGVTVYNDNKKCDSGTYDLRNLENTVIDNLIGLQENNDSLLKIINGNNQPILDTSSFKKQISQIDKKIQKNSDLYLNDFITMDELKDRTDSLQAEKKLLKAKISENKFNDSTDVFELVKTQLGSIPINELSYDNKKKIVNSLVSKVDVTADNVDIIFKFQLA

SEQ ID NO: 3304 - protein, 485 aa, synthetic construct
MTKKVAIYTRVSTTSQAEEGFSIDEQIDRLTKYAEAMGWQVSETYTDAGLSGAKLERPAMQRLINDIENKAFDTVLVYKLDRLSRSVRDTLYLVKDVFTKNKIDFISLNESIDTSSAMGSLFLTILSAINEFERENIKERMTMGKLGRAKSGKSMMWTKTAFGYHHNRKTGILEIVPLQATIVEQIFTDYLSGTSLTKLRDKLNESGHIGKDIPWSYRTLRQTLDNPVYCGYIKFKDSLFGGMHKPIIPYETYLKVQKELEERQRQAYERNNNPRPFQAKYMLSGMARCGYCGAPLRIVQGHKRKDGSRTMKYHCANRFPRKTKGVTVYNDNKRCDSGTYDLSNLENTVIDNLVGLQENNDSLLKIINGNNQPILDTSSFKKQISQIDKKIQKNSDLYLNDFITMDELKNRTDSLLAEKKLLKAKISENKFNDSTDVFELVKTQLGSIPINELSYDNKKKIVNNLVCKVDVTADNVDIVFKFQLA

SEQ ID NO: 3305 - protein, 485 aa, synthetic construct
MTKKVAIYTRVSTTNQAEEGFSIDEQIDRLTKYAEAMGWQVSDTYTDAGISGAKLERPAMQRLINDIENKAFDTVLVYKLDRLSRSVRDTLYLVKDVFAKNKIDFISLNESIDTSSAMGSLFLTMLSAINEFERENIKERMTMGKLGRAKSGKSMMWTKTAFGYYHNRKTGILEIVPLQATIVEQIFTDYLSGISLTKLRDKLNESGHIGKDIPWSYRTLRQTLDNPVYCGYIKFKDSLFEGMHKPIIPYETYLKVQKELEERQQQAYERNNNPRPFQAKYMLSGMARCGYCGAPLRIVLGHKRKDGSRTMKYHCANRFPRKTKGITVYNDNKKCDSGTYDLSNLENTVIDNLTGFQEDNDGLLKIINGNNQPILDTSSFEKQISQIDKKIQKNSDLYLNDFITMDELKDRTDSLQAEKKLLKAKISENKFNDSTDVFELVKTQLGSIPINELSYDNKKRIVNNLVSKVDVTADNVDIIFKFQLA

SEQ ID NO: 3306 - protein, 469 aa, synthetic construct
MSYTTPVRAAVYLRISEDRSGEQLGVARQREDCLKLCDQRKWVPVEYLDNDVSASTGKRRPAYEQMLADITAGKIAAVVAWDLDRLHRRPVELEAFMSLADEKRLALATVAGDVDLATPQGRLVARLKGCVAAHETEHKKARQRRAARQKAERGLPNWSKAFGYLPGPNGPEPDPRTAPLVKQAYADILAGASLGDVCRQWNDAGAFTITGRPWTTTTLSKFLRKPRNAGLRAYKGARYGPVDRDAIVGKAQWSPLVDEATFWAAQAVLDAPSRAPGRKSVRRHLLTGLAGCGKCGNHLAGSCRTDGRVVYVCKACHGVAILADNIEPILYHIVTERLAMPDAVDLLRREIHDAAEAEAIRLEVETLYGELDRLAVERAEGLLTARQVRISTDIVSAKITKLQAHQLDQERLRVLDGIPLGTPQVASVIAGLSPDRFRAVLDVLAEVVVQPVGKSGRIFNPERVQVNWR

SEQ ID NO: 3307 - protein, 452 aa, synthetic construct
MKAAIYIRVSTREQVENYSIQAQTEKLTALCRSKDWDVYDIFIDGGYSGSNMNRPALNEMLSKLHEIDAVVVYRLDRLSRSQRDTITLIEEYFLKNNVEFVSLSETLDTSSPFGRAMIGILSVFAQLERETIRDRMVMGKIKRIEAGLPLTTAKGRTFGYDVIDAKLYINEEEARQLRLIYDIFEEEQSITFLQKRLKKLGYKVRTYNRYYNWLTNDLYCGYVSYKDKVHVKGIHEPIISEEQFYRVQEIFARMGKNPNMNRDSASLLHNLVVCSKCGLGFVHRRKDTMSRGKRYHYRYYSCKTYKHTHELEKCGNKIWRADKLEELIINRVNNYSFASRNVDKEDELDSLNEKLKIEHAKKKRLFDLYLNGSYEASELDCMMNDIDAQINYYESRIEANEELKRDKKIQESLANLATVDYDSLGFREKQLYLKGLINKIYIDGEQVTVEWL

SEQ ID NO: 3308 - protein, 469 aa, synthetic construct
MSYTTPVRAAVYLRISEDRSGEQLGVARQREDCLKLCDQRKWVPVEYLDNDVSASTGKRRPAYEQMLADITAGKIAAVVAWDLDRLHRRPIELEAFMSLADEKRLALATVAGDVDLATPQGRLVARLKGSVAAHETEHKKARQRRAARQKAERGLPNWSKAFGYLPGPYGPEPDPRTAPLVEQAYADILAGASLGDVCRQWNDAGAFTITGRPWTTTTLSKFLRKPRNAGLRAYKGARYGPVDRDAIVGKAQWSPLVDEATFWAAQAVLDAPGRAPGRKSVRRHLLTGLAGCGKCGNHLAGSYRTDGQVVYVCKVCHGVSILAANIVPILYHIVAERLAMPDAVDLLCRETHDAAGAETIRLELETLYGELDRLAVERAEGLLTARQVKISTDIVNAKITKLQARQLDQERLRVFDGIPLGTPQVAGVIAKLSPDRFRAVLDVLAEVVVQPVGKSGRIFNPERVQVNWR

SEQ ID NO: 3309 - protein, 452 aa, synthetic construct
MKAAIYIRVSTREQVENYSIQAQTEKLTALCRSKDWDVYDIFIDGGYSGSNMNRPALNEMLSKLHEIDAVVVYRLDRLSRSQRDTITLIEEYFLKNNVEFVSLSETLDTSSPFGRAMIGILSVFAQLERETIRDRMVMGKIKRIEAGLPLTTAKGRTFGYDVIDTKLYINEEEAKQLRLIYDIFEEEQSITFLQKRLKKLGFKVRTYSRYNNWLTNDLYCGYVSYKDKVHVKGIHEPIISEEQFYRVQEIFARMGKNPNMNRDSASLLNNLVVCSKCGLGFVHRRKDAMSRDKKYHYRYYSCKTYKHIHELEKCGNKIWRADKLEELIINRVNDYSLVSRNADKEDELDSLNEKLKIEHAKKKRLFDLYVNGSFEVSELDSVMKDIDAQINYYESQIGANEELKKNKKIQENLANLAAVDFDSLEFREKQLYLKSLINKIYIDGEQVTIEWL

SEQ ID NO: 3310 - protein, 485 aa, synthetic construct
MTKKVAIYTRVSTTNQAEEGFSIDEQIDRLTKYAEAMGWQVSDTYTDAGSSGAKLERPAMQRLINDIENKAFDTVLVYKLDRLSRSVRDTLYLVKDVFTKNKIDFISLNESIDTSSAMGSLFLTILSAINEFERENIKERMTMGKLGRAKSGKSMMWTKTAFGYYHNRKTGILEIVPLQATIVEQIFTDYLSGISLTKLRDKLNESGHIGKDIPWSYRTLRQTLDNPVYCGYIKFKDSLFEGMHKPIIPYETYLKVQKELEERQQQTYERNNNPRPFQAKYMLSGTARCGYCGAPLKIVLGHKRKDGSRTMKYHCANRFPRKTKGVTVYNDNKKCDSGTYDLSNLENTVIDNLIGLQEDNDSLLKIINGNNQPTLDTSSLKKQISQIDEKIQKNSDLYLNDFITMDELKDRTDSLQAEKKLLKAIIRENKPNDSADVFELVKAQLGSIPINELSYDNKKKIVNNLVSKVDVTADNVDIIFKFQLA

SEQ ID NO: 3311 - protein, 469 aa, synthetic construct
MSYTTPVRAAVYLRISEDRSGEQLGVARQREDCLKLCGQRKWVPVEYLDNDVSASTGKRRPAYEQMLADITAGKIAAVVAWDLDRLHRRPVELEAFMSLADEKRLALATVAGDVDLATPQGRLVARLKGCVAAHETEHKKARQRRAARQKAERGLPNWSKAFGYLPGPNGPEPDPRTAPLVKQAYADILAGASLGDVCRQWNGAGAFTVTGRLWTTTALSKFLRKPRNAGLRAYKGARYGPVDRDAIVGKAQWSPLVDEATFWAVQAALDAPGRAPGRKSVRRHLLTGLAGCGKCGNHLAGSYRADGQVVYVCKACYGVAILADNIVPILYHVVAERLAMPDAVDLLRHEIHDAAEAGAIRLELETLYGELDRLAVERAEGLLTARQVKISTDIVNAKITKLQARQLDQERLRVFNGIPLGTPQVAGVIAELSPDRFRAVLDVLAEVVVQPVGKSGKVFNPERVQVNWR

SEQ ID NO: 3312 - protein, 485 aa, synthetic construct
MTKKVAIYTRVSTTNQAEEGFSIDEQIDRLTKYAEAMGWQVSDTYTDAGFSGAKLERPAMQRLINDIENKAFDTVLVYKLDRLSRSVRDTLHLVKEVFTRNKIDFISLNESIDTSSAMGSLFLTILSAINEFERENIKERMTMGKLGRAKSGKSMMWTKTAFGYYHNRKTGILEIAPLQATIVEQIFTDYLSGISLTKLRDKLNESGHIGKDIPWSYRTLRQTLDNPVYCGYIKFKDSLFEGMHKPIIPYETYLKVQKELEERQQQTYERNNNPRPFQAKYMLSGMARCGYCGAPLRIVLGHKRKDGGRTMKYHCANRFPRKTKGVTVYNDNKKCDSGTYDLSNLENTVIDKLIGFQENNDSLLKIINGNNRPILDTSSLKKQISQIDRKIQKNSDLYLNDFITMDELKDRTDSLQAEKKLLKAKISENKFNDGTDVFELVKAQLGSIPINGLSYDNKKKIVNNLVSKVDVTADNVDIIFKFQLA

SEQ ID NO: 3313 - protein, 452 aa, synthetic construct
MKAAIYIRVSTREQVENYSIQAQTEKLTALCRSKDWDVYDIFIDGGYSGSNMNRPALNEMLSKLHEIDAVVVYRLDRLSRSQRDTITLIEEYFLKNNVEFVSLSETLDTSSPFGRAMIGILSVFAQLERETIRDRMVMGKIKRIEAGLPLTTAKGRTFGYDVIDTKLYINEEEAKQLQLIYDIFEEEQSITFLQKRLKKLGFKVRTYNRYNNWLTNDLYCGYVSYKDKVHVKGIHEPIISEEQFYRVQEIFTRMGKNPNMNRDSASLLNNLVVCSKCGLGFVHRRKDIMSRGKKYHYRYYSCKTHKHIHELEKCGNKIWRADKLEELIINRVSNHSLASRNVDKEDELDSLNEKLKIEHAKKKRLFDLYINGSYEMSELDSMMNDIDAQINYYESQIEANEEPKKNKKIQENLADLATVDFDSLEFREKQLYLKSLINKIYIDGEQVTIEWL

SEQ ID NO: 3314 - protein, 452 aa, synthetic construct
MKAAIYIRVSTREQIENYSTQAQTEKLTALCRSKDWDVYDIFIDGGYSGSNMNRPALNEMLSKLHEIDAVVVYRLDRLSRSQRDTITLIEEHFLKNNVEFVSLSETLDTSSPFGRAMIGILSAFAQLERETIRDRMVMGKIKRIEAGLPLTTAKGRTFGYDVIDTKLYINEEEAKQLRLIYDIFEEEQSITFLQKRLKKLGFKVRAYNRYYNWLTNDLYCGYVSYKDKVHVKGIHEPIISEEQFHRVQEIFTRMGKNPNMNRDSASLLNNLVVCSKCGLGFVHRRKDTTSRGKKYHYRYYSCKTYKHIHELEKCGNKIWRADKLEELIINRVDNYSFASRNVDREDELDSLNEKLKVEHAKKKRLFDLYINGSYEVSELDSMMNDIDAQINYYESQIEANEELKKNKKIQENLADLATVDFDSLEFREKQLYLKSLINKIYIDGEQVTIEWL

SEQ ID NO: 3315 - protein, 452 aa, synthetic construct
MKAAIYIRVSTREQVENYSIQAQTEKLTALCRSKDWDVYDIFIDGGYSGSNMNRPALNEMLSKLHEIDAVVVYRLDRLSRSQRDTITLIEEYFLKNNVEFVSLSETLDTSSPFGRAMIGILSVFAQLERETIRDRMVMGKIKRIEAGLPLTTAKGRTFGYDVIDTKLYINEEEARQLRLIYDIFEEEQSITLLQKRLKKLGFKVHTYNRYNNWLTNDLYCGYVSYKDKVRVKGIHEPIISEEQFYRVQEIFTRMGKSPNMNRDSASLLNNLVVCSKCGLGFVHRRKDIMSHGKKYHYRYYSCKTYKHIHELEKCGNKIWRADKLEELIIDRVNSYSLVSRNMDKEDELDSLNEKLKIEHAKKKRLFDLYINGNYEVSELDSMMNDIDAQINYYESQIEANEELKKSKKIQENLAYLAAVDFDSLEFREKQRYLKSLINKIYIDGEQVTIEWL

SEQ ID NO: 3316 - protein, 485 aa, synthetic construct
MTKKVAIYTRVSTTNQAEEGFSIDEQIDRLTKYAEAMGWRVSDTYTDAGFSGAKLERPAMQRLINDIENKAFDTVLVYKLDRLSRSVRDTLYLVKDVFTKNKIGFISLSESIDTSSAMGSLFLTILSAINEFERENIKERMTMGKLGRAKSGKSMMWTKTAFGYYHNRKTGILEIVPLQATIVEQIFTDYLSGISLTKLRDKLNESGHIGKDIPWSYRTLRQTLDNPVYCGYIKFKGCLFEGMHKPIIPYETYLRVQKELEERQQQTYERNNNPRPFQAKYMLSGMARCGYCGAPLRIVLGHKRRDGSRTMKYHCANRFPRKTKGITAYNDNKKCDSGTYDLSDLENTVIDNLIGFQKNNDSLLKVINGNNQPILDTGSFKKQISQIDKKIQKNSDLYLNDFITMDELRDRTDSLQAEKKLLKAKISESKFNDSTDVFELVKTQLGSIPINELSYDNKKKIVNNLVSKVDVTADNVDIIFKFQLA

SEQ ID NO: 3317 - protein, 485 aa, synthetic construct
MTKKVAIYTRVSTTNQAEEGFSIGEQIDRLTKYAEAMGWQVSDTYTDAGFSGAKLERPAMQRLINDIENKAFDTVLVYKLDRLSRSVRDTLHLVKDVFTKNKIDFISLNECIDTSSAMGSLFLTILSAINEFERENIKERMTMGKLGRAKSGKSMMWTKTAFGYYHNRETGILEIVPLQAAVVEQIFTDYLSGISLTKLRDKLNESGHIGKDIPWSYRTLRQTLDNPVYCGYIKFRDSLFEGMHKPIIPYETYLKVQKELEERQQQTYERNNNPRPFQAKYMLSGMARCGYCGAPLRIVLGHRRKDGSRTMKYHCANRFPRKTKGVTVYNDNKKCDSGTYDLSNLENTVIDSLIGFQENNDSLLKIINGNNQPILDTSSLKKQISQIDKKIQKNSDLYLNDFITMDELKDRTDSLQAEKKLLKAKISENKFNDSTDVLELVKTQLGSIPINELSYDNKKKIVNNLVSKVDVTADSVDIIFKFQLA

SEQ ID NO: 3318 - protein, 485 aa, synthetic construct
MTKKVAIYTRVSSTNQAEEGFSIDEQIDRLTKYAEAMGWQVSDTYTDAGFSGAKLGRPAMQRLINDIENKAFDTVLVYKLDRLSRSVRDTLYLVKEVFTKNKIDFISLNESIDTSSAMGSLFLTILSAINEFERENIKERMTMGKLGRAKSGKSMMWTKTAFGYYHNRKTGILEIVPLQATIVEQIFTDYLSGISLTKLRDKLNESGHIGKDIPWSYRTLRQTLDNPVYCGYIKFKDSLFEGMHKPIIPYETYLRVQKELEERQQRAYERNNNPRPFQAKYMLSGMARCGYCGAPLRIVLGHKRKDGSRTMKYHCANRFPRKTKGITAYNDNKKCDSGAYDLSNLENTVIDNLIGFQENNDSLLKIINGINQPILDTSSFKEQISQIDKKIQKISDLYLNDFITMDELKDRTDSLQAEKKLLKAKISENKFNDSTDVFELVKAQLGSIPINELSYDNKKKIVNNLVSKVDVTADSVDIIFKFQLA

SEQ ID NO: 3319 - protein, 452 aa, synthetic construct
MKAAIYIRVSTREQVENYSIQAQTERLTALCRSKDWDVYDIFIDGGYSGSNMNRPALNEMLSKLHEIDAVVVYRLDRLSRSQRDTITLIEEYFLKNSVEFVSLSETLDTSSPFGRAMIGILSVFAQLERETIRDRMVMGKIKRIEAGLPLTTAKGRTFGYDVVDTKLYINEEEAKQLQLIYDIFEEEQSITFLQKRLKELGFRVHTYNRYNNWLTNDLYCGYVSYKDKVRVKGIHVPIISEEQFYRVQEIFTRTGKNPNMNRDSASLLNNLVVCSKCGLGYVHRRKDTMSRGKKYHYRYYSCKTYKHTHELEKCGNKIWRADKLEELIISRVNNYSFASRNVDKEDELDSLNERLKIEHAKKKRLFDLYINGSYEVSELDSMMNDIDAQINYYESQIETNEELKQNKKIQENLANLATVDYDSLEFREKQLYLKSLISKIYIDGEQVTIEWL

SEQ ID NO: 3320 - protein, 485 aa, synthetic construct
MTRKVAIYTRVSTTNQAEEGFSIDEQIDRLTKYAEAMGWQVSDTYTDAGISGAKLERPAMQRLINDIENKAFDTVLVYKLDRLSRSVRDTLYLVKDVFTKNKIDFISLNESIDTSSAMGSLFLTILSAINEFERENIKERMAMGKLGRAKSGKSMMWTKTAFGYYHNRKTGILEIVPLQATIVEQIFTDYLSGISLTKLRDKLNESGHIGKDIPWSYRTLRQTLDNPVYCGYIKFKDSLFEGMHKPIIPYETYLKVQKELEERQQQTYERNNNPRPFQAKYMLSGMARCGYCGAPLRIVLGHKRKDGSRTMKYHCTNRFPRKTKGVTVYNDNKKCDSGTYDLSSLENTVIGNLIGFQENSDSLLKIINGNNRPVLDTSSFKEQISQIDKKIRKNSDLYLNDFITMDELKDRTDSLQAEKKLLKAKISENKFNDSTDVFELVKTQLGSIPINELSYDNKKKIVNSLVSKVDVTADNVDIIFKFQLA

SEQ ID NO: 3321 - protein, 452 aa, synthetic construct
MKAAIYIRVSTQEQVENYSIQAQTEKLTALCRSKDWDVYDIFIDGGYSGSNMNRPALNEMLSKLHEIDAVVVYRLDRLSRSQRDTTTLIEEYFLKNNVEFVSLSETLDTSSPFGRAMIGILSVFAQLERETIRDRMVMGKIKRIEAGLPLTTAKGRTFGYDVIDTKLYINEEEAKQLQLIYDIFEEERSITLLQKRLKKLGFKVRTYNRYNNWLTNDLYCGYVSYKDKVHVKGIHEPIISEEQFYRVQEIFTRTGKNPNMNRDSASLLNNLVVCSKCGLGFVHRSKDTMSRGKKYHYRYYSCKTYKHTHELEKCGNKIWRADKLEELIINRVNNYSFASRNVDKEDELDSLNEKLKIEHAKKKRLFDLYINGSYEVSELDSMMNDIDAQINYYESQIKANKELKKNKKIQENLADLATVDFDSLEFREKQLYLRSLINKIYIDGEQVTIEWL

SEQ ID NO: 3322 - protein, 452 aa, synthetic construct
MKAAIYIRVSTQEQVGNYSIQAQTEKLTALCRSKDWDVYDIFVDGGYSGSNMNRPALNEMLSKLHEIDAVVVYRLDRLSRSQRDTTTLIEEYFLKNNVEFVSLSETLDTSSPFGRAMIGILSVFAQLERETIRDRMVMGKIKRIEAGLPLTTAKGRTFGYDVIDTKLYINEEEAKQLQLIYDIFEEERSITFLQKRLKKLGFKVRTYNRYNNWLTNDLYCGYVSYKDKVHVKGIHEPIISEEQFYRVQEIFTRMGKNPNMNRDSASLLSNLVVCSKCGLGFVHRSKDTMSRGKKYHYRYYSCKTYKHTHELEKCGNKTWRADKLEELIINRVNNYSFASRNVDKEDELDSLNEKLKIEHAKKRRLFDLYINGSYEVSELDSMMNDIDAQISYYESQIEANEELKKNKKIQENLANLATVDFDSLEFREKQLYLKSLINKIYIDGEQVTIEWL

SEQ ID NO: 3323 - protein, 469 aa, synthetic construct
MSYTTPVRAAVYLRISEDRSGEQLGVARQREDCLKLCGQRKWVPVEYLDNDVSASTGKRRPAYEQMLADITAGKIAAVVAWDLDRLHRRPVELEAFMSLADEKRLALATVAGDVDLATPQGRLVARMKGCVAAHETEHKKARQRRAARQKAERGLPNWSKAFGYLPGPNGPEPDPRAAPLVKQAYADILAGASLGDVCRQWNDAGAFTITGRPWTTTTLSKFLRKPRNAGLRAYKGARYGPVDRDAIVGKAQWSPLVDEATFWAAQAVLDAPGRAPGRKSVRRHLLTGLAGCGKCGNHLAGSYRTDGRVVYVCKACHGVAILADNIEPILYHIVAERLAMPEAVDLLRCEIHDAAEAETIRQELETLYGELDRLAVERAEGLLTARQVKISTDIVNAKITKLQARLLDQVRLRVFDGIPLGTPQVAGMIAELSPDRFRAVLDVLAEVVVQPVGKSGRIFNPERVQVNWR

SEQ ID NO: 3324 - protein, 469 aa, synthetic construct
MSYTTPVRAAVYLRISEDRSGEQLGVARQREDCLKLCDQRKWVPVEYLDNDVSASTGKRRPAYEQMLADITAGKIAAVVAWDLDRLHRRPIELEAFMSLADEKRLALATVAGDVDLATPQGRLVARLKGSVAAHETEHKRARQRRAARQKAERGYPNWSKAFGYLPGPNGPEPDPRTAPLVNQAYADILAGASLGDVCRRWNDAGAFTITGRPWTTTTLSKFLRKPRNAGLRAYKGARYGPVDRDAIVGKAQWSPLVEEATFWAAQAVLDAPGRAPGRKSVRRHLLTGLAGCGKCGNHLAGSYRTDGRVVYVCKACHGVAILADNIEPILYHVVAERLAMPDAVDLLRREIHDAAEAETVRLELETLYGELDRLAVERAEGLLTARQVKISTDIVNAKITKLQARQLDQERLRVFDGIPLGTPQVAGMIAELSPDRFRAVLDVLAEVVVQPVGKSGRVFSPERVQVNWR

SEQ ID NO: 3325 - protein, 485 aa, synthetic construct
MTKKVAIYTRVSTTNQAEEGFSIDEQIDRLTKYAEAMGWQVSDTYTDAGFSGAKLIRPAMQRLINDIENKAFDTVLVYKLDRLSRSVRDTLYLVKDVFTKNKIDFISLNESINTSSAMGSLFLTILSAINEFERENIKERMTMGKLGRAKSGKSMMWTKTAFGYCHNRKTGILEIVPLQAAIVEQIFTDYLSGISLTKLRDKLNESGHIGKDIPWSYRTLRQTLDNPVYCGYIKFKDSLFEGMHKPIIPYETYLKVQKELEERQQQTYERNNNPRPFQAKYMLSGMARCGYCGAPLKIVLGHKRKDGSRTMKYHCANRFPRKTKGITVYNDNKKCDSGTYDLGDLENIVIDNLVGFQENNDSLLKIINGNNQPILDTSSFKRQISQIDKKIQKNSDLYLNDFITMDELRDRTDCLQAEKKLLEAKISENKFNDSTDVFELVKTLLGSIPINELSYDNKKKIVNSLVSKVDVTADNVDIIFKFQLA

SEQ ID NO: 3326 - protein, 452 aa, synthetic construct
MKAAIYIRVSTQEQVGNYSIQAQTEKLTALCRSKDWDVYDIFVDGGYSGSNMNRPALNEMLSKLHEIDAVVVYRLDRLSRSQRDTTTLIEEYFLKNNVEFVSLSETLDTGSPFGRAMIGILSVFAQLERETIRDRMVMGKIKRIEAGLPLTTAKGRTFGYDVIDTKLYINEEEAKQLQLIYDIFEEEQSITSLQKRLKKLGLKVRTYNRYNNWLTNDLYCGYVSYKDKVHVKGIHEPIISEEQFYRVQEIFARMGKNPNMNRDSASLLSNLVVCSKCGLGFVHRSKDTMSRGKKYHYRYYSCKTYKHTHELEKCGNKIWRADKLEELIINRVNNYSFVSRNVDKEDELDSLSEKLKIEHAKKKRLFDLYINGSYEVSELDSMMNDIDAQINYYESQVEANEELKKNKKIQENLAGLATVDFDSLEFREKQLYLKSLINKIYIDGEQVTIEWL

SEQ ID NO: 3327 - protein, 485 aa, synthetic construct
MTKKVAIYTRVSTTNQAEEGFSIDEQIDRLTKYAEAMGWQVSDTYTDAGVSGAKLERPAMQRLINDIENKAFDTVLVYKLDRLSRSVRDTLYLVKGVFTKNKIDFISLNESIDTSSAMGSLFLTILSAINEFERENIKERMTMGKLGRARSGKSMMWTRTAFGYYHNRKTGILEIAPLQATIVEQIFTEYLSGISLTKLRDKLNESGHIGKDIPWSYRTLRQTLDNPVYCGYIKFKGSLFEGMHKPIIPYETYLKVQKELEERQQQAYERNNNPRPFQAKYMLSGMARCGYCGAPLRIVLGRKRKDGSRTMKYHCANRFPRKTKGVTVYNDNKKCDSGTYDLCNLENTVIDNLIGLQKDNDSLLKVINGNNQPILDTSSFKEQISQIDKKIQKNSDLYLNDFITMDELRARTDSLQAEKKLLKAKISENKFNDSTDVFELVKTQLGSVPINELSYDNKKKIVNDLVSKVDVTADNVDIIFKFQLA

SEQ ID NO: 3328 - protein, 485 aa, synthetic construct
MTKKVAIYTRVSTTNQAEEGFSIDEQIDRLTKYVEAMGWQVSGTYTDAGISGAKLERPAMQRLINDIENKAFDTVLVYKLDRLSRSVRDTLYLVKDVFTNNKIDFISLNESIDTSSAMGSLFLTILSAINEFERENIKERMTMGKLGRAKSGKSMMWTKTAFGYYHNRKTGILEIVPLQATIVEQIFTDYLSGISLTKLRDKLNESGHIGKDIPWSYRTLRQTLGNPVYCGYIKFKGSLFEGMHKPIIPYETYLKVQKELEERQQQTYERNNNPRPFQAKYMLSGMARCGYCGAPLRIVLGHKRKDGSRTMKYHCANRFPRKTKGVTVYNDNKKCDSGTYDLSNLENTVIDNLIGFQEDNDSLLKIINGNNQPILDTSSFKKQISQIDKKIQKNSDLYLNGFITMDELKDRTDGLQAEKKLLKAKISENKFNDSTDVLELVKTQLGSVPINELSYDNKKKIVNNLVSKVDVTADSVDIIFKFQLA

SEQ ID NO: 3329 - protein, 469 aa, synthetic construct
MSYTTPVRAAVYLRISEDRSGEQLGVARQREDCLKLCGQRKWVPVEYLDNDVSASTGKRRPAYEQMLADITAGKIAAVVAWDLDRLHRRPVELEAFMSLADEKRLALATVAGDVDLATPQGRLVARLKGCVAAHETEHKKARQRRAARQKAERGLPNWSKAFGYLPGPNGPEPDPRTAPLVKQAYADILAGASLGDVCRQWNDAGAFTITGRPWTSTTLSKFLRKPRNAGLRAYKGARYGPVDRDAIVGKAQWSPLVDEATFWAAQAVLDAPGRAPGRKSVRRHLLTGLAGCGKCGNHLAGGCRTDGRVVYVCKACHGVSILAVNIEPILYHVVAERLAMPDAADLLCREIHDAAEAETIRLELETLHGELDRLAVERAEGLLTARQVKISTDIVNAKITKLQARQLDQERLRVLDGIPLGTPQVAGMIAGLSPDRFRAVLDVLAEVVVQPVGKSGRILNPERVQVNWR

SEQ ID NO: 3330 - protein, 485 aa, synthetic construct
MTKKVAIYTRVSTTNQAEEGFSIDEQIDRLTKYAEAMGWQVSDTYTDAGFSGAKLERPAMQRLINDIENKAFDTVLVYKLDRLSRSVRDTLYLVKDVFTKNKIDFISLNESIDTSSAMGSLFLTILSAINEFERENIKERMAMGKLGRAKSGKSMMWTKTAFGYYHNRKTGILEIVPLQATIVEQIFTDYLSGISLTKLRDKLNESGHIGKDIPWSYRTLRQTLDNPVYCGYIKFKDSLFEGMHKPIIPYETYLKVQKELEERQQQTYERNNNPRPFQAKYMLSGMARCGYCGAPLRIVLGHKRKDGSRTMKYHCANRFPRKTKGITVYNDNKKCDSGTYDLSNLENTVIDSLVGLQENSDSLLKIINGNNQPILGTSSFKKQISQIDKKIQKNSDLYLNDFITMDELKDRTDSLRAEKKLLRAEISENKFNDSTGVFELVKTQLGSIPINELSYDNKKKIVNSLVSKVDVTADNVDIIFKFQLA

SEQ ID NO: 3331 - protein, 469 aa, synthetic construct
MSYTTPVRAAVYLRISEDRSGEQLGAARQREDCLKLCDQRKWVPVEYLDNDVSASTGRRRPAYEQMLADITAGKIAAVVAWDLDRLHRRPVELEAFMSLADEKRLALATVAGDVDLATPQGRLVARLKGSVAAHETEHKKARQRRAARQKAERGHPNWSKAFGYLPGPNGPEPDPRTAPLVKQAYADILAGASLGDVCRQWNDASAFTITGRPWTTTTLSKFLRKPRNAGLRAYKGARYGPVDRDAIVGKAQWSPLVDEATFWAAQAVLDAPGRAPGRKSVRRHLLTGLAGCGKCGNHLAGSYRTDGRVVYVCKACHGVAILADNIEPILYHIVAERLAMPDAVDLLRREIHDAAEAETIRLELEALYGELDSLAVERAEGLLTARQVKISTDIVNAKITKLQARQLDQERLRVFDGIPLGTPQVAGMIAELSPDRFRAVLDVLAEVVVQPVGKGGRILNPERVQVNWR

SEQ ID NO: 3332 - protein, 485 aa, synthetic construct
MTKKVAIYTRVSTTNQAEEGFSIDEQIDRLTKYAEAMGWQVSDTYTDAGFSGAKLERPAMQRLINDIENKAFDTVLVYKLDRLSRSVRDTLYLVKHVFTKNKIDFISLNESIDTSSAMGSLFLTILSAINEFERENIKERMTMGKLGRAKSGKSMMWTKTAFGYYHNRKTGILEIVPLQATIVEQIFTDYLSGISLAKLRDKLNESGHIGKDIPWSYRTLRQTLDNPVYCGYIKFKDSLFEGMHKPIIPYETYLKVQKELEERQQQTYERNNNPRPFQAKYMLSGLARCGYCGAPLRIVLGHKRKDGSRTMKYHCANRFPRKTKGVTVYNDNKKCDSGTYDLSSLENTVIDNLIGLQENNDSLLKIINGNNPPILDTSSFEEQISQIDKKIQKNSELYLNDFITMGELKERTDSLRAEKKLLKAKISGNEFNDSTDVFELVKTQLGSIPINELSYDNKKKIVNNLVSKVDVTADSVDIIFKFQLA

SEQ ID NO: 3333 - protein, 452 aa, synthetic construct
MKAAIYIRVSTREQVENYSIQAQTEKLTALCRSKDWDVYDIFVDGGYSGSNMNRPALNKMLSKLHEIDAVVVYRLDRLSRSQRDTITLIEEYFLKNNVEFVSLSETLDTSSPFGRAMIGILSVFAQLERETIRDRMVMGKIKRIEAGLPLTTAKGRTFGYDVIDTKLYINEEEAKQLQLIYDIFEEEQSITFLQKRLKKLGFKVRTYSRYNSWLTNDLYCGYVSYKDKVHVKGIHEPIISEEQFYRVQEIFTRMGKNSNVNRDSASLLNNLVVCSKCGLGFVHRRKDTMSRGKKYHYRYYSCKTYKHTHELEKCGNKIWRADKLEELIINRVNDYSFASRNADKEDELDSLNEKLKIEHAKRKRLFDLYINGSYEASELDSMMNDIDAQINYYEGQIEANEELKKNKKIQENLADLATVDFDSLEFREKQLYLKSLINKIYIDGEQVTIEWL

SEQ ID NO: 3334 - protein, 452 aa, synthetic construct
MKAAIYIRVSTREQVENYSIQAQTEKLTALCRSKDWDVYDIFIDGGYSGSNMNRPALNEMLSKLHEIDAVVVYRLDRLSRSQRDTITLIEEYFLKNNVEFVSLSETLDTSSPFGRAMIGILSVFAQLERETIRDRMVMGKIKRVEAGLPLTTARGRTFGYDVIDTKLYINEEEAKQLQLIYDIFEEEQSITYLQKRLKKLGLKVRSYNRYNNWLTNDLYCGYVSYKDKVHVKGIHEPIISEEQFYRVQEIFARMGKNPNMNRDSASLLNNLVVCSKCGLGFVHRRKDTMSRGKKYHYRYYSCKTYKHIHELEKCGNKIWRADKLEELIINRVNNYSFASRNVDKEDELDSLNEKLKIEHAKKKRLFDLYINGSYEMSELDSMMNDIDAQIDYYESRIEANEELKKNKKVQENLANLATVDYDSLEFREKQLYLKGLINKIYIDGEQVTIEWL

SEQ ID NO: 3335 - protein, 485 aa, synthetic construct
MTKKVAIYTRVSTTNQAEEGFSIDEQIDRLTKYVEAMGWQVSDTYTDAGLSGAKLERPAMQRLINDIENKAFDTVLVYKLDRLSRSVRDTLYLVKEVFTKNKIDFISLNESIDTSSAMGSLFLTILSAINEFERENIKERMTMGKLGRAKSGKSMMWTKTAFGYYHNRKTGILEIVPLQAAIVEQIFTDYLSGISLTKLRDKLNESGHIGKDIPWSYRTLRQTLDNPVYCGYIKFKGSLFEGMHKPIIPYETYLKVQKELGERQQQTYERNNNPRPFQAKYMLSGVARCGYCGAPLKIVLGHKRKDGSRTMKYHCTNRFPRKTRGITVYNDNKKCDSGTYDLSDLENTVIDNLIGFQENNDSLLRIINGNNRPILDTSSFKKQINQIDKKIQKNSDLYLNDFITMDELKDRTDSLQAEKKLLKAKISENRFNDSTDVFELVKTQLGSIPISELSYDNKKKIVNNLVSKVDVTADNVDIIFKFQLA

SEQ ID NO: 3336 - protein, 452 aa, synthetic construct
MKAAIYIRVSTQEQVGNYSIQAQTEKLTALCRSKDWDVYDIFIDGGYSGSNMNRPALNEMLSKLHEIDAVVVYRLDRLSRSQRDTTTLIEEYFLKNNVEFVSLSETLDTSSPFGRAMIGILSVFAQLERETIRDRMVMGKIKRIEAGLPLTTAKGRTFGYDVIDTKLYINEEEAKQLQLIYDIFEEEQSITFLQKRLKKLGFKVRTYNRYNNWLTNDLYCGYVSYKDKVHVKGIHEPIISEEQFYRVQEIFTRMGKNPNMNRDSASLLSNLVVCSKCGLGFVHRSKDTMSRGKKYHYRYYSCKTYKHTHELEKCGNKTWRADKLEELIISRVSNYSSASRSVDKEDELDSLNEKLKTEHAKKKRLFDLYINGSYEVSELDSMMNDIDAQINYYESQIEANEELRKNKKIQENLADLATVDFDSLEFREKRLYLKSLINKIYIDGERVTIEWL

SEQ ID NO: 3337 - protein, 452 aa, synthetic construct
MKAAIYIRVSTREQVENYSIRAQTEKLTALCRSKDWDVYDIFIDGGYSGSNMNRPALNEMLSKLHEIDAVVVYRLDRLSRSQRDTITLIEEYFLKNNVEFVSLSETLDTSSPFGRAMIGILSVFAQLERETIRDRMVMGKIKRIEAGLPLTTARGRTFGYDVIDTKLYINEEEAKQLQLIYDIFEEERSITFLQKRLKKLGFKVRTYSCYNNWLTNDLYCGYVSYKDKVRVKGIHEPIISEEQFYRVQEIFTRMGKNPNMNRDSASLLNNLVVCSKCGLGFVHRRKDATSRDKKYHYRYYSCKTYKHIHELEKCGNKIWRADKLEELIINRVSNYSSASRNADKEDELDSLNEKLKTEHAKKRRLFDLYINGSFEVSELDSLMNDIDAQINYYESQVEANEELKKNKKIQENLANLATVDFDSLEFREKQLYLKSLINKIYIDGEQVTIEWL

SEQ ID NO: 3338 - protein, 469 aa, synthetic construct
MRYTTPVRAAVYLRISEDRSGEQLGVARQREDCLELCDQRKWVPVEYLDNDVSASTGKRRPAYEQMLADIIAGKIAAVVAWDLDRLHRRPIELEAFMCLADEKRLALATVAGDVDLSTPQGRLVARLKGSVAAHETEHKKARQRRAARQKAERGHPNWSKAFGYLPGPNGPEPDPRTAPLVKQAYADILAGASLGDVCRLWNDEGAFTITGRPWTTTTLSKFLRKPRNAGLRAYKGARYGPVDRDAIVGKAQWSPLVDEATFWAAQAVLDAPGRAPGRKSVRRHLLSGLAGCGKCGHHLAGSYRTDGRVVYVCKACYGVAILADNIEPILYHIVAERLAMPNAVDLLRREIHDAAEAETIRLELEALYSELDRLAVERAEGLLTARQVKISTDIVNAKIAKLQARQQDQERLRVLDGIPLGTPQVAGAIAELSPDRFRAVLDVLAEVVVQPVGKSGRIFNPERVQVNWR

SEQ ID NO: 3339 - protein, 452 aa, synthetic construct
MKAAIYIRVSTREQVENYSIQAQTEKLTALCRSKDWDVYDIFIDGGYSGSNMSRPALNEMLSKLHEIDAVVVYRLDRLSRSQRDTITLIEEYFLKNNVEFVSLSETLDTSSPFGRAMIGILSVFAQLERETIRDRMVMGKIKRIEAGLPLTTAKGRTFGYDVIDTKLYINEEEAKQLRLIYDIFEEEQSITFLQKRLKKLGFKVRTYNRYNNWLTNDLYCGYVSYKDKVHVRGIHEPIISEEQFYRVQEIFTRMGKNPNMNRDSASLLNNLVVCSKCGLGFVHRRKDAMSRDKKYHYRYYSCKTYKHIHELEKCGNKIWRADKLEELIINRVNDYSFASRDVDKEGELDSLHEKLKIEHAKKKRLFDLYINGSYEVSELDSMMNDIDAQINYYESQIEASEELKKNKKIQENLAHLATVDFDSLEFREKQLFLKSLINKIYIDGEQVTIEWL

SEQ ID NO: 3340 - protein, 485 aa, synthetic construct
MTKKVAIYTRVSTTNQAEEGFSIDEQIDRLTKYAEAVGWQVCDTYTDAGFSGAKLERPAMQRLINDIETKAFDTVLVYKLDRLSRSVRDTLYLVKEVFTKNKIDFISLNESIDTSSAMGSLFLTILSAINEFERENIKERMTMGKLGRAKSGKSMMWTKTAFGYYHNRKTGILEIVPLQATIVEQIFTDYLSGISLTKLRDKLNESGHIGKDIPWSYRTLRQTLDNPVYCGYIKFKDSLFEGMHKPIIPYETYLKVQKELEKRQQQTYERNNNPRPFQAKYMLSGMARCGYCGAPLKIVLGHKRKDGSRTMKYHCANRFPRKTRGVTVYNDNQKCDSGTYNLSNLENTVIDSLIGFQENNDSLLKIINGSNQPILDTSSFKEQISQIDKKIQKNSDLYLNDFITMDELKDRTDSLQAEKKLLKAKISENKFNDSTDVFELVKTQLGSIPISELSYDNKKKIVNNLVSKVDVTADNVDIIFKFQLA

SEQ ID NO: 3341 - protein, 452 aa, synthetic construct
MKAAIYIRVSTQEQVGNYSIQAQTEKLTALCRSKDWDVYDIFIDGGYSGSNMNRPALNEMLSKLHEIDAVVVYRLDRLSRSQRDTTTLIEEYFLKNNVEFVSLSETLDTSSPFGRAMIGILSVFAQLERETIRDRMVMGKIKRIEAGLPLTTARGRTFGYDVIDTKLYVNEEEAKQLRLIYDIFEEEQSITFLQKRLKKLGFKVRTYNRYNNWLTNDLYCGYVSYKDKVHVKGIHEPIISEEQFYRVQKIFTRMGKNPNMNRDSASLLSNLVVCSKCGLGFVHRSKDTMSRGKKYHYRYYSCKTYKHAHELEKCGNKTWRADKLEELIINRVNSYSFASRNVDKEDELDSLNEKLKIEHAKRKRLFDLYINGSYEVSELDSMMNDIDAQISYYESQIEANEELKKNKKIQENLADLATVDFDSLEFREKQLYLKSLINKIYIDGEQVTIDWL

SEQ ID NO: 3342 - protein, 469 aa, synthetic construct
MGYTTPVRAAVYLRISEDRSGEQLGVARQREDCLKLCDQRKWVPVEYLDNDVSASTGKRRPAYEQMLADITAGKIAAVVAWDLDRLHRRPIELEAFMSLADEKRLALATVAGDVDLATPQGRLVARLKGSVAAHETEHKKARQRRAARQKAERGYPNWSKAFGYLPGPSGPEPDPRTAPLVKQAYADILAGASLGDVCRRWNDAGAFTITGRPWTSTTLSKFLRKPRNAGLRAYKGARYGPVDRDAIVGKAQWSPLVDEATFWAAQAVLDAPGRAPGRKSVRRHLLTGLAGCGKCGNHLAGSYRTDGRVVYVCKACHGVAILADNIEPMLYHIVAERLAMPDAVDLLRREVHDVAEAETIRLELETLYGELDRLAVERAEGLLTARQVKICTDIVNAEITKLRARQLDQERLRVFGGIPLGTPQVAGVIAELSPDRFRAALDVLAEVVVQPVGKSGRTFNPERVQVNWR

SEQ ID NO: 3343 - protein, 485 aa, synthetic construct
MTKKVAIYTRVSTTNQAEEGFSIDEQIDRLTKYAEAMGWQVSGTYTDAGFSGAKLERPAMQRLINDIENKVFDTVLVYKLDRLSRSARDTLYLVKDVFTKNKINFISLNESIDTSNAMGSLFLTILSAINEFERENIKERMTMGKLGRAKSGKSMMWTKTAFGYYHNRKTGILEIVPLQATIVEQIFTDYLSGISLTKLRDKLNESGHIGKDIPWSYRTLRQTLDNPVYCGYIKFKGSLFEGMHKPIIPYETYLKVQKELEERQQQTYERNNNPRPFQAKYMLSGMARCGYCGAPLKIVLGHKRKDGSRTMRYHCANRFPRKTKGVTVYNDNKKCDSGAYDLSNLENTVIDNLIGFQENNDSLLKIINGNNQPIPDTSSFKKQISQIDKKIQKNSDLYLNDFITMDELKVRTDSLQAERKLLEAKISENKSNDSTEVFELVKTQLGSIPINELSYDNKKKIVNNLVSKVDVTADNVDIIFKFQLV

SEQ ID NO: 3344 - protein, 452 aa, synthetic construct
MKAAIYIRVSTQEQVENYSIQAQTEKLTALCRSKDWDVYDIFIDGGYSGSNMNRPALNEMLSKLHEIDAVVVYRLDRLSRSQRDTTTLIEEYFLKNNVEFVSLSETLDTSSPFGRAMIGILSVFAQLERETIRDRTVMGKIKRIEAGLPLTTAKGRTFGYDVIDTKLYINEEEAKQLQLIYDIFEEEQSITSLQKRLKRLGFKVRTYNRYNNWLTNDLYCGYVSYKDKVHVKGIHEPIISEEQFYRVQEIFTRMGKSPNMNRDSASLLNNLVVCSKCGLSFVHRRKDTMSRGKKYHYRYYSCKTYKHAHELEKCGNKTWRADKLEELIVNRVNDYSLASRNVDKGDELDSLNEKLKIEHAKKKRLFDLYINGSYEASELDSMMNDIDAQINYYESQIEANEELKKNKKIQENLADLATVDFDSLEFREKQLYLKSLINKIYIDGEQVTIEWR

SEQ ID NO: 3345 - protein, 485 aa, synthetic construct
MTKKVAIYTRVSTTNQAEEGFSIDEQIDRLTKYAEAMGWRVSDTYTDAGFSGAKLERPAMQRLINDIENKAFDTVLVYKLDRLSRSVRDTLYLVKDVFTKNKIDFISLNESIDTSSAMGGLFLTILSAINEFERENIKERMTMGKLGRAKSGKSMMWTKTAFGYYHNRKTGILEIVPLQATIVEQIFTDYLSGVSLTKLRDKLNESGHIGKDIPWSYRTLRQTLGNPVYCGYIKFKDSLFEGMHKPIIPYETYLKVQKELEVRQQQTYERNNNPRPFQAKYMLSGMARCGYCGAPLKIVLGHKRKDGSRTMKYHCANRFPRKTKGVTVYNDNKKCDSGTYDLSKLEDTVIDTLIGFQENNDSLLRIINGNNQPILDTSGFKEQISQIDEKIQKNSDLYLNDFITMDELKDRTDSLLAEKKLLKAKISENKFNDSTDVFELVKTQLGSVPINELSYDSKKKIVNSLVSKVDVTADNVDIIFKFQLA

SEQ ID NO: 3346 - protein, 452 aa, synthetic construct
MKAAIYIRVSTREQVENYSIQAQAEKLTALCRSKDWDVYDIFIDGGYSGSNMNRPALNEMLSRLHEIDAVVVYRLDRLSRSQRDTITLIEEYFLKNNVEFVSLSETLDTSSPFGRAMIGILSVFAQLERETIRDRMVMGKIKRIEAGLPLTTAKGRTFGYDVIDTKLYINDEEAKQLQLIYDIFEEEQSITSLQKRLKKLGFKVHTYNRYNNWLTNDLYCGYVSYKDKVHVKGIHEPIISEEQFYRVQEIFTRMGKYPNMNRDSASLLNNLVVCSKCGLGFVHRRKDIMSRGKKYHYRYYSCKTYKHIHELEKCGNKIWRADKLEELIISRVNDYSLASRNVDKEDELDSLSEKLKIEHAKKKRLFNLYINGSYEVSELDSMMNDIDAQINYYESQIEANEELKKNKKIQENLANLATVDFDSLEFREKQLYLKSLINKIYIDGEQVTIEWL

SEQ ID NO: 3347 - protein, 469 aa, synthetic construct
MSYTTPVRAAVYLRISEDRSGEQLGVARQREDCLKLCDQRKWVPVEYLDNDVSASTGRRRPAYEQMLADITAGKIAAVVAWDLDRLHRRPIELEAFMSLADEKRLALATVAGDVDLATPQGRLVARLKGSVAAHETEHKKARQRRAARQKAERGHPNWSKAFGYLPGPNGPEPDPRTAPLVKQAYANILAGASLGDVCRQWNDAGAFTITGRPWTTTTLSKFLRKPRNAGLRAYKGARYGPVDRDAIVGKAQWSPLVDEATFWAAQAVLDAPGRAPGRKSVRRHLLTGLAGCGKCGNHLAGSYRTDGRVVYVCKACHGVAILADNIEPILYHIVAERLAMPDAVDLLRREIHDAAEAEAIRLELETLRGELDRLAVERAEGLLTARQVKISTDIVNAKITELQARRLDQERLRVFDGIPLGTPQVAGVIAELSPNRFRTVLDVLAEVVVQPVGKSGRVFNPGRVQVNWR

SEQ ID NO: 3348 - protein, 485 aa, synthetic construct
MTKKVAIYTRVSTTSQAEEGFSIDEQVDRLTRYAEAMGWQVSDTYTDAGLSGAKLERPAMQRLINDIENKAFDTVLVYKLDRLSRNVRDTLYLVKDVFTKNKIDFISLNESIDTSSAMGSLFLTILSAINEFERENIKERMTMGKLGRAKSGKSMMWTKTAFGYYHNRKTGILEVVPLQATIVEQIFTDYLSGISLTKLRDKLNESGHVGKDIPWSYRTLRQTLDNPVYCGYIKFKDSLFEGMHKPIIPYETYLKVQKELKERQQQTYERNNNPRPFQAKYMLSGMARCGYCGAPLRVVLGHKRKDGSRTMKYHCANRFPRKSKGVTVYNDNKKCDSGTYDLSNLENTVIDNLIGLQESNDSLLKIINGNNQPILDTSSFEEQISQIDKKIQKNSDLYLNDFITMDELKDRTDSLQAEKKLLKAKISENKFNDSTDVFELVKAQLGSIPINELSYDNKKKIVNNLVSKVDVTADNVDIIFKFQLA

SEQ ID NO: 3349 - protein, 452 aa, synthetic construct
MKAAIYIRVSTREQVENYSIQAQTEKLTALCRSKGWDVYDIFIDGGYSGSNINRPALNEMLSKLHEIDAVVVYRLDRLSRSQRDTTTLIEEYFLKNNVEFVSLSETLDTSSPFGRAMIGILSVFAQLERETIRDRMVMGKIKRIEAGLPLTTAKGRTFGYDVIDTKLYINEEEAKQLQLIYDIFEEEQSITSLQKRLKKLGFKVRTYNRYYSWLTNDLYCGYVSYKDKVHVKGIHEPIISEEQFYRVQEIFTRMGKNPNINRDSASLLNNLVVCSKCGLGFVHRRKDTMSRGKKYHYRYYSCKTYKHTHVLEKCGNKTWRADKLEELIINRVNNYSFASRNADKEDELDGLNEKLKIEHAKKKRLFDLYINGSYEVSELDSMMNDIDAQINYYESQIEANEELKKNKKIQENLADLATVDFDSLEFREKQLYLKSLISKIYIDGEQVTIEWL

SEQ ID NO: 3350 - protein, 485 aa, synthetic construct
MTKKVAIYTRVSTTNQAEEGFSVDEQIDRLTKYAEAMGWQVSDTYTDAGSSGAKLERPAMQRLINDIENKAFDTVLVYKLDRLSRSVRDTLYLVKDVFTKNKIDFVSLNESIDTSSAMGSLFLTILSAINEFERENIKERMTMGKLGRAKSGRSMMWTKTAFGYYHNRKTGILEIVPLQAAIVEQIFIDYLSGISLTKLRDKLNESGHIGKDIPWSYRTLRQTLDNPVYCGYIKFKGSLFEGMHKPIIPYETYLKVQKELEERQQQTYERNNNPRPFQAKYMLSGMARCGYCGAPLKIVLGHKRKDGSRTMKYHCANRFPRKTKGVTVYNDNKKCDSGTYDLSNLENTVIDNLMGFQENNDSLLKIINGDNQPILDTSSFEKQISQIDKKIQKNSDLYLNDFITMDELKVRTDSLQAEKKLLKAKISETKSNDSTDVFELVKTQLGSTPINELSYDNKKKIVNNLVSKVDVTADNVGIIFKFQLA

SEQ ID NO: 3351 - protein, 485 aa, synthetic construct
MTKKVAIYTRVSTTNQAEEGFSIDEQVDRLTKYAEAMGWQVSDTYTDAGFSGAKLERPAMQRLINDIENKAFDTVLVYKLDRLSRSVRDTLYLVKDVFTKNKIDFISLNESINTGSAMGSLFLTILSAINEFERENIKERMAMGKLGRAKSGKSMMWTKTAFGYYHNRKTGILEIAPLQATIVEQIFTDYLSGISLTKLRDKLNESGHIGKDIPWSYRTLRQTLDNPVYCGYIKFKDSLFEGMHKPIIPYETYLKVQKELEERQQQTYERNNNPRPFQAKYMLSGVARCGYCGAPLRIVLGHKRKDGSRTMRYHCANRFPRKTKGVTVYNDNKRCDSGTYDLSNLENTVIDNLIGFQEDNDSLLKIINGGNQPILDTSSFKKQISQIDKKIQKNSDLYLNDFITMDELKARTNSLQAEKKLLRAKISENKFNDSIDVFELVKTQLGSIPINELSYDDKKKIVNSLVSKVDVTADNVDIIFKFQLA

SEQ ID NO: 3352 - protein, 485 aa, synthetic construct
MTKKVAIYTRVSTTNQAEEGFSIDEQIDRLTKYAEAMGWQVSDTYTDAGFSGAKLERPAMQRLINDIEYKAFDTVLVYKLDRLSRSVRDTLHLVKDVFTKNKIDFISLNESIDTSSAMGSLFLTILSAINEFERENIKERMTMGKLGRARSGKSMMWTKTAFGYYHNRKTGILEIVPLQATIVEQIFTDYLSGISLTKLRDKLNESGHIGKDIPWSYRTLRQTLDNPVYCGYIKFKDNLFEGMHKPIIPYETYLRVQKELEERQQQTYERNNNPRPFQAKYMLSGMARCGYCGAPLKIVLGHKRKDGSRTMKYHCANRFPRKTKGVTVYNDDKKCDSGTYDLNNLENTVIDNLIGFQENNDSLLEIINGNNQPILDTNSIKKQISQIDKKIQKNSDLYLNDFITMDELKDRTDSLQAEKKLLRAKISETKFSDSTDVFELVKTQLGSIPINELSYDNKKKIVNNLVSKVDVTADNVDIIFKFQLA

SEQ ID NO: 3353 - protein, 469 aa, synthetic construct
MSYTTPVRAAVYLRISEDRSGEQLGVARQREDCLKLCDQRKWVPVEYLDNDVSASTGKRRPAYEQMLADITAGKIAAVVAWDLDRLHRRPIELEAFMSLADEKRLALATVAGDVDLATPQGRLVARLKGSVAAHETEHKKARQRRAARQKAERGHPNWSKAFGYLPGPNGPEPDPRTAPLVKQAYADILAGASLGDVCRQWNDAGAFTITGRPWTTTALSKFLRKPRNAGLRAYKGARYGPVDRDAIVGKAQWSPLVDEATFWAAQAVLDAPGRAPGRKSVRRHLLTGLAGCGKCGNHLAGSYRTGGRVVYVCKACHGVAILADNIEPILYHIVAERLAMPDAVDLLRREIHDAAEAETVRLELETLYGELDRLAVERAEGLLTARQVKICTDIVNAKITKLQARQLDQERLHVFDGIPLGTPQVAGVIAELSPDRFRAVLDVLAEVVVRPVGKSGRLFNPERVQVNWR

SEQ ID NO: 3354 - protein, 469 aa, synthetic construct
MSYTTPVRAAVYLRISEDRSGEQLGVARQREDCLKLCDQRRWVPVEYLDNDVSASTGKRRPAYEQMLADITAGKIAAVVAWDLDRLHRRPIELEAFMSLADEKRLALATVAGDVDLSTPQGRLVARLKGSVAAHETEHKKARQRRAARQKAERGHPNWSKAFGYLPGPNGPEPDPRTAPLVKQAYADILAGASLGDVCRQWNDAGAFTITGRPWTTTTLSKFLRKPRNAGLRAYRGARYGPVDRDAIVGKAQWSPLVDEATFWAAQAVLDAPGRAPGRKSVRRHLLTGLAGCGKCGNHLAGSYRTDGRVVYVCKACHGVAILADNIVPILYHIVAERLAMPDAVDLLRCEIHDAAEAETIRLELEALYGELDRLAVERAEGLLTARQVKISTDIVNAKITKLQARQLDQERLRVFDGIPLGTPQVAGMVAELSPDRFRAVLDVLAEVVVQPAGKGGRIVNPERVQVNWR

SEQ ID NO: 3355 - protein, 452 aa, synthetic construct
MKAAIYIRVSTREQVENYSIQAQTEKLTALCRSKDWDVYDIFIDGGYSGSNMNRPALNEMLSKLHEIDAVVVYRLDRLSRSQRDTITLIEEYFLKNSVEFVSLSETLDTSSPFGRAMIGILSVFAQLERETIRDRMVMGKIKRVEAGLPLTTAKGRTFGYDVIDTRLYINEEEAKQLQLIYDIFEEEQSITLLQKRLKKLGLKVRTYSCYNNWLTNDLYCGYVSYKDKVRVKGIHVPIISEEQFYRVQEIFTRMGKNPNVNRDSASLLNNLVVCSKCGLGFVHRRKDTTSRGKKYHYRYYSCKTYKHTHELEKCGNKIWRADKLEELIINRVNNYSFASRNVDKEDELDSLNEKLKIEHVKKKRLFDLYINGSYEVSELDSMMNDIDAQINYYESQIEANEELKKDKKIQESLANLATVDYDSLEFREKQLYLKSLINKIYIDGEQVTIEWL

SEQ ID NO: 3356 - protein, 469 aa, synthetic construct; identical to SEQ ID NO: 486

SEQ ID NO: 3357 - protein, 485 aa, synthetic construct
MTKKVAIYTRVSTTNQAEEGFSIDEQIDRLTKYAEAMGWQVSDTYTDAGCSGAKLERPAMQRLINDIENKAFDTVLVYKLDRLSRSVRDTLYLVKDVFTKNKIDFISLNESIDTSSAMGSLFLTILSAINEFERENIKERMTMGKLGRAKSGKSMMWTKTAFGYYHNRKTGILEIVPPQATIVEQIFTDYLSGISLTKLRDKLNESGHIGKDIPWSYRTLRQTLDNPVYCGYIKFKDRLFEGMHKPIIPYETYLKVQKELEERQQQAYERNNNQRPFQAKYMLSGMARCGYCGAPLRIVLGRKRKDGSRTMKYHCANRFPRKTKGVTVYNDDKKCDSGTYELGNLENTVIDNLIGFQENNDSLLKIINGNDQPILDTSSLKKQISQIDKKIQKNSDLYLNDFITMDELKERTDSLQAEKRLLKAKISENKFNDSTDVFELVKTQLGSIPINELSYDNKKKIVNNLVSKVDVTADNVDIIFKFQLA

SEQ ID NO: 3358 - protein, 469 aa, synthetic construct
MCYTTPVRAAVYLRISEDRSGEQLGVARQREDCLKLCDQRKWVPVEYLDNDVSASTGKRRPAYEQMLADITAGRIAAVVAWDLDRLHRRPIELEAFMSLADEKRLALATVAGDVDLATPQGRLVARLKGSVAAHETEHKKARQRRAARQKAERGYPNWSKAFGYLPGPSGPEPDPRTAPLVRQAYADILAGASLGDVCRQWNDAGAFTITGRPWTTTTLSKFLRKPRNAGLRAYKGARYGPVDRDAIVGKAQWSPLVDEATFWAAQAVLDAPGRAPGRKSVRRHLLTGLAGCGKCGNHLSGSYRTDGRVVYVCKACHGVAILADNIEPILYHIVTERLAMPDAVDLLRREIHDAAEAETIRLELETLYGELDRLAVERAEGLLTARQVKISTDIVNAKIAELQACQLDQERLRVLDGIPLGTPQVAGMIAELSPDRFRAVLDVLAEVVVQPVGKSGRIFNPERVQVNWR

SEQ ID NO: 3359 - protein, 452 aa, synthetic construct
MKAAIYIRVSTREQVENYSIQAQTEKLTALCRSKDWDVYDIFIDGGYSGSNMNRPALNEMLSKLHEIDAVVVYRLDRLSRSQRDTITLIEEHFLKNNVEFVSLSETLDTSSPFGRAMIGILSVFAQLERETIRDRMVMGKIKRIEAGLPLTTAKGRTFGYDVIDTKLYINEEEAKQLRLIYDIFEEEQSITFLQKRLKELGFKVRTYNRYNNWLTNDLYCGYVSYKDKVHVKGIHEPIISEEQFYRVQEIFTRMGKNPNMNRDSASLLNNLVVCSKCGLGFVHRRKDAMSRDKKYHYRYYSCKTYKHIHELEKCGNKIWRADKLEELIINRVNNYSIASRNADKEDELDSLNEKLKIEHAKKKRLFELYINGSYEVSELDSMMNDIDAQINNYESQIEANEELKRNKKIQENLADLAAVDFDSLEFREKQLYLKSLINKIYIDGEQVTIEWL

SEQ ID NO: 3360 - protein, 485 aa, synthetic construct
MTKKVAIYTRVSTTNQAEEGFSIDEQIDRLTKYAEAMGWQVSDTYTDAGFSGAKLERPAMQRLVNDIENKAFDTVLVYKLDRLSRSVRDTLHLVKDVFAKNKIDFISLNESIDTSSAMGSLFLTILSAINEFERENIKERMTMGKLGRAKSGKSMMWTKTAFGYHHNRRTGILEIVPLQATIVEQIFTDYLSGISLTKLRDKLNESGHIGKDIPWSYRTLRQTLDNPVYCGYIKFKDSLFEGMHEPIIPYETYLKVQKELEERQQQTYERNNNPRPFQAKYMLSGMARCGYCGAPLRVVLGHKRKDGSRTMKYHCANRFPRKTKGVTVYNDNKRCDSGTYDLSNLENTVIDNLIGFQENNDSLLKIINGNNQPILDTSSSKKQISQIDKKVQKISDLYLNDLITMDELKDRTDSLQAEKKLLKAKISGNKSNDSTGVFELVKTQLGSIPINELSYDNKKKIVNNLVSKVDVTADNVDIIFKFQLA

SEQ ID NO: 3361 - protein, 452 aa, synthetic construct
MKAAIYIRVSTREQVENYSIQAQTEKLTALCRSKDWDVYDIFIDGGYSGSNMNRPALNEMLSKLHEIDAVVVYRLDRLSRSQRDTITLIEEYFLKNSVEFVSLSETLDTSSPFGRAMIGILSVFAQLERETIRDRMVMGKIKRIEAGLPLTTAKGRTFGYDVIDTKLYINEEEAKQLQLIYDIFEEEQSITSLQKRLKKLGFKVRTYSRYNNWLTNDLYCGYVSYKDKVHVKGIHEPIISEEQFYRVQEIFTRMGKNPNMNRDSASLLSNLVVCSKCGLGFVHRRKDTMSRGKKYHYRYYSCKTYKHTHELEKCGNKIWRADKLEELIINRVNNYSFASRNADKEDELDSLNEKLKVEHAKKGRLFDLYINGSYEVSELDSMMNDIDAQINYYESQIEANEEQRKNKKIQENLADLATVDYDSLEFREKQLYLKSLINKIYVDGEQVTIEWL

SEQ ID NO: 3362 - protein, 485 aa, synthetic construct
MTKKVAIYTRVSTTNQAEEGFSIDEQIDRLTKYAEAMGWQVSDTYTDAGVSGAKLERPAMQRLINDIENKAFDTVLVYKLDRLSRSVRDTLYLVKDVFTKNKIDFISLNESIDTSSAMGSLFLTILSAINEFERENIKERMTMGKLGRAKSGKSMMWTKTAFGYYHNRKTGILEIVPLQATIVEQIFTDYLSGISLTKLRDKLNESGHIGKDIPWSYRTLRQTLDNPVYCGYIKFKDSLFEGMHKPIIPYETYLRVQKELEERQQQAYERNNNPRPFQAKYMLSGMARCGYCGAPLRIVLGHKRKDGSRTMKYHCTNRFPRKTKGVTVYNDNKKCDSGTYDLSNLENTVIDNLIGFQENDDSLLKIINGNNQPILDTSSFKEQISQIDKKIQKNSDLYLNDFITMDELRDRTDSLQAEKKLLEAKISENKFNDGTDVFELVKTQLGSIPINELSYDNKKKIVNNLVSKVDVTADSVDIIFKFQLA

SEQ ID NO: 3363 - protein, 452 aa, synthetic construct
MKAAIYIRVSTQEQVENYSIQAQTEKLTALCRSKGWDVYDIFIDGGYSGSNMNRPALNEMLSKLHEIDAVVVYRLDRLSRSQRDTTTLIEEYFLKNNVEFVSLSETLDTSSPFGRAMIGILSVFAQLERETIRDRMVMGKIKRIEAGLPLTTAKGRTFGYDVIDTKLYVNEEEAKQLRLIYDIFEEEQSITSLQKRLKKLGFKVRTYNRYNNWLTNDLYCGYVSYKDKVHVKGIHEPIISEEQFYRVQEIFTRMGKNPNMNRDSASLLNNLVVCSKCGLGFVHRSKDTMSRGKKYHYRYYSCKTYKHTHELEKCGNKTWRADKLEELIINRVNSYSYASRNVDKEDELDGLDEKLKIEHARKKRLFDLYINGSYEVSELDCMMNDIDAQINYYESQIEANGELKKNKKIQEHLANLATVDFDSLEFREKQLYLKSLINKIYIDGEQVTIEWL

SEQ ID NO: 3364 - protein, 469 aa, synthetic construct
MSYTTPVRAAVYLRISEDRSGEQLGVARQREDCLKLCDQRKWVPVEYLDNDVSASTGRRRPAYEQMLADITAGKIAAVVAWDLDRLHRRPIELEAFMSLADEKRLALMTVAGDVDLATPQGRLVARLKGSVAAHETEHKKARQRRAARQKAERGYPNWSKAFGYLPGPNGPEPDPRTAPLVKQAYADILAGASLGDVCRQWNDAGAFTITGRPWTTTTLSKFLRKPRNAGLRAYKGARYGPVDRDAIVGKAQWSPLVDEATFWAAQAVLDAPGRAPGRKSVRRHLLTGLAGCGKCGNHLAGSYRTDGRVVYVCKACHGVAILADNIEPILYHIVAERLAMPGAVDLLRREIHDAAEAETIRLELETLYGELDRLAVERAEGLLTARQVKISTDIVDTKITRLQARQLDQERLRVFDGIPLGTPQVAGTIAELSPDRFRAVLDVLAEVVVQPVGKSGRISNPERVQVNWR

SEQ ID NO: 3365 - protein, 452 aa, synthetic construct
MKAAIYIRVSTQEQVGNYSIQAQTEKLTALCRSKDWDVYDIFVDGGYSGSNMNRPALNEMLSKLHEIDAVVVYRLDRLSRSQRDTTTLIEEYFLKNNVEFVSLSETLDTSSPFGRAMIGILSVFAQLERETIRDRMVMGKIKRIEAGLPLTTAKGRTFGYDVIDTKLYINEEEAKQLRLIYDIFEEEQSITSLQKRLKKLGFKVRTYNRYNNWLTNDLYCGYVSYKDKVHVKGIHEPIISEEQFYRVQEIFTRMGKNPNMNRDSASLLSNLVVCSKCGLGFVHRSKDTMSRGKKYHYRYYSCKTYKHTHELEKCGNKTWRADKLEELIINRVNNYSFASRNADKEDELDSLNEKLKIEHAKKRRLFDLYINGSYEVSELDSMMNDIDAQIDYYESLIEANEELKKNKKIQENLADLAAVDFDSLEFREKQLYLKSLINKIYIDGEQVTIEWL

SEQ ID NO: 3366 - protein, 452 aa, synthetic construct
MKAAIYIRVSTQEQVGNYSIQAQTEKLTALCCSKDWDVYDIFIDGGYSGSNMNRPALNEMLSKLHEIDAVVVYRLDRLSRSQRDTTTLIEEYFLKNNVEFVSLSETLDTSSPFGRAMIGILSVFAQLERETIRDRMVMGKIKRIEAGLPLTTAKGRTFGYDVIDTKLYINEEEAKQLRLIYDIFEEEQSITSLQKRLKKLGFKVRTYNRYNNWLTNDLYCGYVSYKDKVHVKGIHEPIISEEQFNRVQEIFTRMGKNPNMNRDSESLLNNLVVCSKCGLGFVHRSKDTMSRGKKYHYRYYSCKTYKHTHELEKCGNKIWRADKLEELITNRVNNYSFASRNADKEDELDSLNEKLKIEYARKKRLFDLYINGSYKVSELDSMMNDIDAQINYYESQIEACEELKKNKKIQENLADLATVDFDSLGFREKQLYLKSLINKIYIDGEQVTIDWL

SEQ ID NO: 3367 - protein, 452 aa, synthetic construct
MKAAIYIRVSTREQVENYSIQAQTEKLTALCRSKDWDVYDIFIDGGYSGSNMNRPALNEMLSKLHEIDAVVVYRLDRLSRSQRDTITLIEEYFLKNNVEFVSLSETLDTSSPFGRAMIGILSVFAQLERETIRDRMVMGKIKRIEAGLPLTTAKGRTFGYDVIDTKLYINEEEAKQLRLIYDIFEEEQSITSLQKRVKKLGFKVRTYNRYNNWLTNDLYCGYVSYKDKVHVRGIHEPIISEEQFYRVQEIFTRMGKNPNMNRDSASLLNNLVVCGKCGLGFVHRRKDAMSRDKKYHYRYYSCKTYKHIHELEKCGNKIWRADKLEELIINRVNNYSLASRNVDKEDELDSLNEKLKIEHAKKRRLFDLYINGSYDVCELDSMMNVIDAQINYYESQIEANEELKKSKKIQENLAYLAAMDFDSLEFREKQLYLKSLINKIYIDGEQVTIEWL

SEQ ID NO: 3368 - protein, 485 aa, synthetic construct
MTKKVAIYTRVSTTNQAEEGFSIDEQTDRLTKYAEAMGWQVSDTYTDAGFSGAKLERPAMQRLINDIENKAFDTVLVYKLDRLSRSVRDTLYLVKDVFTKNKIDFISLNESINTSSAMGSLFLTILSAINEFERENIKERMTMGKLGRAKSGKSMMWTKTAFGYYHNRKTGILEIVPLQATIVEQIFTDYLSGISLTKLRDKLNEGGHIGKDIPWSYRTLRQTLDNPVYCGYIKFKDSLFEGMHKPIIPYETYLKVQKELEERQQQTYERNNNPRPFQAKYMLSGMARCGYCGAPLRIVLGHKRKDGSRTMKYHCANRFPRKTKGVTVYNDNKKCDSGTYDLSNLENTVIDILIGFQENNDSLLKIINGNNQPILDTSSFKEQISRIDKKIQKNSDLYLNDFITMDELRDRTDSLQAEKKLLKAKISENKFNDSTDVFELVKTQLGSIPINELSYDDKKKIVNNLVSKVDVTADNVDIIFKFQLA

SEQ ID NO: 3369 - protein, 452 aa, synthetic construct
MKAAIYIRVSTREQVENYSIQAQTERLTALCRSKDWDVYDIFIDGGYSGSNMNRPALNEMLSKLHEIDAVVVYRLDRLSRSQRDTITLIEEYFLKHNVEFVSLSETLDTSSPFGRAMIGILSVFAQLERETIRDRMVMGKIKRIEAGLPLTTAKGRTFGYDVIDTKLYINEEEAKQLRLIYDIFEEEQSITFLQKRLKKLGFKVHTYNRYNNWLTNDLYCGYVSYKDKVHVKGIHEPIISEEQFYRVQEIFTRMSKSPNMNRDSASLLNNLVVCSKCGLGFVHRRKDTMSHGKKYHYRYYSCKTYKHTHELEKCGNKIWRADKLEELIINRVNNYSFASRNVDKEDELDRLNEKLKIEHAKKKRLFDLYINGSYEVSELDSLMDDIDAQINYYESRIEANEELKKNKKIQENLANLATVDYDSLGFREKQLYLKGLINKIYIDGEQVTIEWL

SEQ ID NO: 3370 - protein, 469 aa, synthetic construct
MSYTTPVRAAVYLRISEDRSGEQLGVARQREDCLKLCDQRKWEPVEYLDNDVSASTGKRRPAYEQMLADITAGKIAAVVAWDLDRLHRRPIELEAFMSLADEKRLALATVAGDVDLATPQGRLVARLKGSVAAHETEHKRARQRRAARQKAERGLPNWSRAFGYLPGPNGPKPDPRTAPLVERAYADILAGASLGDVCRQWNDASAFTITGRPWTTTALSKFLRKPRNAGLRAYKGARYGPVDRDAIVGKAQWSPLVDEATFWAAQAVLDAPGRAPGRKSVRRHLLTGLAGCGKCGNHLAGSYRTDGRVVYVCKACHGVAILADNIEPILYHIVAERLAMPDAADLLRREIHDAAEAETIRLELETLYGELDRLAVERAEGLLTARQVKISTDIVNAKITRLQACLLDQERLRVLDGIPLGTPRVAGMIAELSPDRFRAVLDVLAEVVVQPVGKSGRIFNPERVQVNWR

SEQ ID NO: 3371 - protein, 452 aa, synthetic construct
MKAAIYIRVSTQEQVENYSIQAQTEKLTALCRSKDWDVYDIFVDGGYSGSNMNRPALNEMLSKLHEIDAVVVYRLDRLSRSQRDTTTLIEEYFLKNNVEFVSLSETLDTSSPFGRAMIGILSVFAQLERETIRDRMVMGKIKRIEAGLPLTTAKGRTFGYDVIDTKLYINEEEAKQLQLIYDIFEEEQSITSLQKRLKELGFKVRTYNRYNSWLTNDLYCGYVSYKDKVHVKGIHEPIISEEQFYRVQEIFTRMGKNPNMNRDSASLLNNLVVCGKCGLGFVHRSKDTMCRGKKYHYRYYSCKTYKHTHELEKCGNKIWRADKLEELIINRVNSYSFASRNVDKEDELDSLNEKLKIEHGKKKRLFDLYINGSYEVSELDSMMNDIDAQINYYESQIEAIEELKKNKKIQENLADLATVDFGSLEFREKQLYLKSLINKIYVDGEQVTIEWL

SEQ ID NO: 3372 - protein, 469 aa, synthetic construct
MSYTTPVRAAVYLRISEDRSGEQLGVARQREDCLKLCDQRKWVPVEYLDNDVSASTGKRRPAYEQMLADIIAGKIAAVVAWDLDRLHRRPIELEAFMSLADEKRLALATVAGDVDLATPQGRLVARLKGSVAAHETEHKRARQCRAARQKAERGHPNWSKAFGYLPGPNGPEPDPRTAPLVKQAYADILAGASLGDVCRQWNDAGAFTITGRPWTTTTLSKFLRKPRNAGLRAYKGARYGPVDRDAIVGKAQWSPLVDEATFWAAQAVLDAPGRAPGRKSVRRHLLTGLAGCGKCGNRLAGSYRTDGRVVYVCKACHGVAILADIIEPMLYHIVAERLAMPDAVDLLRREVHDAAEAETIRLELETLYGELDRLAVERAEGLLTARQVKISTDIVNAKITNLQARQLDQERLRVFGGIPLGTPQVAGVIAELSPDRFRAVLDVLAEVVVQPVGKSGRIFNPERVQVNWR

SEQ ID NO: 3373 - protein, 452 aa, synthetic construct
MKAAIYIRVSTQEQVGNYSIQAQTEKLTALCRSKGWDVYDIFIDGGYSGSNMNRPALNEMLSKLHEIDAVVVYRLDRLSRSQRDTTTLIEEYFLKNNVEFVSLSETLDTSSPFGRAMIGILSVFAQLERETIRDRMVMGKIKRIESGLPLTTAKGRTFGYDVIDTKLYINEEEAKQLRLIYDIFEEERSITSLQKRLKKLGFKVRTYNRYNNWLTNDLYCGYVSYKDKVHVKGIHEPIISEEQFYRVQEIFARMGKNPNMNRDSASLLSNLVVCSKCGLGFVHRSKDTMSRGKKYHYRYYSCKTYKHTHELEKCGNKTWRADKLEELIINRVNNYSFASRNADTEDELDSLNEKRKIEHARKKRLFDLYINGSYEVSELGSMMNDIDAQINYYESQIEANEELKKNKKIQGNLADLATVDFDSLEFREKQLYLKSLINKIYIDGEQVTIEWL

SEQ ID NO: 3374 - protein, 452 aa, synthetic construct
MKAAIYIRVSTREQVENYSIQAQTEKLTALCRSKDWDVYDIFIDGGYSGSNMNRPALNEMLSKLHEIDAVVVYRLDRLSRSQRDTITLIEEYFLKNNVEFVSLSETLDTSSPFGRAMIGILSVFAQLERETIRDRMVMGKIKRIEAGLPLTTAKGRTFGYDVIDTRLYINEEEAKQLQLIYDIFEEEQSITFLQKRLKKLGFKVHTYNRYNNWLTNDLYCGYVSYKDKVHVKGIHEPIISEEQFYRVQEIFTRMGKNPNMNRDSASLLNSLVVCSKCGLGFVHRRKDIMSRGKKYHYRYYSCKTYKHIHELEKCGNKIWRADRLEELIINRVNNYSFASRSADKEDELDSLNEKLKIERAKKKRLFDLYINGSYEVSELDSMMNDIDAQINYYESQIEANEELKKNEKIQENLAGLATVDFDSLEFREKQLYLKNLINKIYIDGEQVTIEWL

SEQ ID NO: 3375 - protein, 452 aa, synthetic construct
MKAAIYIRVSTREQVENYSIQAQTEKLTALCRSKDWDVYDIFIDGGYSGSNMNRPALNEMLSKLHEIDAVVVYRLDRLSRSQRDTITLIEEYFLKNNVEFVSLSETLDTSSPFGRAMIGILSVFAQLERETIRDRMVMGKIKRIEAGLPLTTAKGRTFGYDVIDTKLYINEEEAKQLRLIYDIFEEEQSITFLQKRLKKLGFKVHTYNRYNNWLTNDLYCGYVSYKDKVHVKGIHEPIISEEQFYRVQEIFTRMGKNPNMNRDSASLLNNLVVCSKCGLGFVHRRKDAMSRDKKYHYRYYSCKTYKHIHELEKCGNKIWRADKLEELIIDRVNSYSLASRNVDKEDGLDSLNERLKIEHAKKKRLFDLYLNGSYEVSELDSMMNDIDAQISYYEGQIEANEALIKNKKIQENLASLATVDFDSLEFREKQLYLKSLINKIYIDGEQVTIEWL

SEQ ID NO: 3376 - protein, 452 aa, synthetic construct
MKAAIYIRVSTREQVENYSIQAQTEKLTALCRSKDWDVYDIFIDGGYSGSNMNRPALNEMLSKLHEIDAVVVYRLDRLSRSQRDTITLIEEYFLKNNVEFVSLSETLDTSSPFGRAMIGILSVFAQLERETIRDRMVMGKIKRIEAGLPLTTAKGRTFGYDVIDTKLYINEEEAKQLQLIYGIFEEEQSITSLQKRLKKLGFKVHTYNRYNNWLTNDLYCGYVSYKDKVHVKGIHEPIISEEQFYRVQEIFTRMGKNPNMNRDSASLLNNLVVCSKCGLGFVHRRKDAMSRDKKYHYRYYSCKTYKHIHELEKCGNKIWRADELEELIINRVNNYSLASRNVDKGDGLDSLNEKLKIEHAKKKRLFDLYLNGSYEVSELDSMMNDIDAQISYYESQIEANEALIKNKKIQENLANLATVDFDSLEFREKQLYLKSLINKIYIDGEQVTIEWL

SEQ ID NO: 3377 - protein, 485 aa, synthetic construct
MTKKVAIYTRVSTTNQAEEGFSIDEQIDRLTKYAEAMGWQVSDTYTDAGLSGAKLERPAMQRLINDIENKAFDTVLVYKLDRLSRSVRDTLYLVKDVFTKNKIDFISLNESIDTSSAMGSLFLTILSAINEFERENIKERMTMGKLGRAKSGKSMMWTKTAFGYYHNRETGVLEIVPLQATIVEQIFTDYLSGISLTKLRDKLNESGHIGKDIPWSYRTLRQTLDNPVYCGYIKFKGSLFEGMHKPIIPYETYLKVQKELGERQQQTYERNNNPRPFQAKYMLSGMARCGYCGAPLRIVLGHKRKDGSRTMKYHCANRFPRKTKGVTVYNDNKKCDSGTYDLSSLENTVTDNLVGFQENSDSLLKIINGNNRPIPDTSSFKKQISQIDKRIQKNSDLYLNDFITMDELKDRTDSLQAEKKLLKAKISENKFNDSTDVFELVKAQLGSIPINELSYDNKKKIVNNLVSKVDVTADNVDIIFKFQLA

SEQ ID NO: 3378 - protein, 485 aa, synthetic construct
MTKKVAIYTRVSTTNQAEEGFSIDEQIDRLTKYAEAMGWQVSDTYTDAGFSGAKLGRPAMQRLINDIEDNAFDTVLVYKLDRLSRSVRDTLHLVKDVFTKNKIDFISLNESIDTSSAMGSLFLTILSAINEFERENIKERMTMGKLGRAKSGKSMMWTKTAFGYYHNRKTGILEIVPLQATIVEQIFTDYLSGISLTKLRDKLNESGHIGKDIPWSYRTLRQTLDNPVYCGYIKFKDSLFEGMHKPIIPYETYLKVQKELEERQQQTYERNNNPRPFQAKYMLSGMARCGYCGAPLKVVLGHKRKDGSRTMKYHCANRFPRKTKGITVYNDNKKCDSGTYDLCNLENTVIDNLIGFQENNDSLLKIINGNNQPILDTSSFKEQISQIDKKIRKNSDLYLNDFITMGELKDRTDSLQAEKKLLKARISENEFNDSTDVFELVKAQLGSIPINELSYDNKKKIVNNLVSKVDVTADNVDIIFKFQLA

SEQ ID NO: 3379 - protein, 452 aa, synthetic construct
MKAAIYIRVSTREQVENYSIQAQTEKLTALCRSKDWDVYDIFIDGGYSGSNMNRPALNEMLSKLHELDAVVVYRLDRLSRSQRDTITLIEEYFLKNNVEFVSLSETLDTSSPFGRAMIGILSVFAQLERETIRDRMVMGKIKRVEAGLPLTTAKGRTFGYDVIDTKLYINEEEAKQLRLIYDIFEEEQSITFLQKRLKKLGFKVRTYNRYNNWLTNDLYCGYVSYKDKVHVKGIHEPIISEEQFYRVQEIFTRMGKNPNMNRDSASLLNNLVVCGKCGLGFVHRRKDAMSRDKKYHYRYYSCKTYKHIHELEKCGNKIWRADKLEELIIDRVNNYSLAGRNVDKEDELDSLNEKLKVEHAKKKRLFDLYINGSYEVSELDSMMNDIDAQINYYESQIEANKELKKNKRIQENLAHLATVDFDSLEFREKQLYLKSLINKIYIDGDQVTIEWL

SEQ ID NO: 3380 - protein, 469 aa, synthetic construct
MSYTTPVRAAVYLRISEDRSGEQLGVARQREDCLKLCGQRKWVPVEYLDNDVSASTGKRRPAYEQMLADITAGKIAAVVAWDLDRLHRRPVELEAFMSLADEKRLALATVAGDVDLATPQGRLVARLKGVVAAHETEHKKARQRRAARQKAERGLPNWSKAFGYLPGPNGPAPDPRTAPLVKQAYADILAGASLGDVCRQWNDAGAFTITGRPWTTTTLSKFLRKPRNAGLRAYKGARYGPVDRDAIVGKAQWSPLVDEATFWAAQAVLDAPGRAPGRKSVRRHLLTGLAGCGKCGNYLAGSYRTDGRVVYVCKACHGVSILADIIEPILYRIVAERLAMPDAVDLLRREIHDAAEAETIRLELETLYGELDRLAVERAEGLLTARQVKISTDIVNAKITKLQAHQLDQERLRVFDGIPLGTPQIAGIIAELSPNRFRAVLDVLAEVVVQPVGKSGRIFNPERVQVNWR

SEQ ID NO: 3381 - protein, 485 aa, synthetic construct
MTKKVAIYTRVSTTIQAEEGFSIDEQVDRLTKYAEAMGWQVSDTYTDAGFSGAKLERPAMHRLINDIETKAFDTVLVYKLDRLSRSVRDTLYLVKDVFTKNKIDFISLNESIDTSSAMGSLFLTILSAINEFERENIKERMTMGKLGRAKSGKSMTWTKTAFGYYHNRKTGILEIVPLQAAIVEQIFTDYLSGISLTKLRDKLNESGHIGKDIPWSYRTLRQTLDNPVYCGYIKFKGSLFEGMHKPIIPYETYLKVQKELEKRQQQTYERNNNPRPFQAKYMLSGMARCGYCGAPLRIVLGHKRKDGSRTMKYHCANRFPRKTKGVTVYNDNKKCDSGTYDLSNLENTVIVNLIGLQENNDSLLKIINGNNQPILDTGSIEKQISQIDKKIQKNGDLYLNDFITMDELKDRTDSLQAEKKLLKAKISEDKFNDSTDVFELVKTQLGGIPINELSYDDKKKIVNNLVSKVDVTADNVDIIFKFQLA

SEQ ID NO: 3382 - protein, 452 aa, synthetic construct
MKAAIYIRVSTQEQVGNYSIQAQTEKLTALCRSKDWDVYDVFVDGGYSGSNMNRPALNEMLSKLHEIDAVVVYRLDRLSRSQRDTTTLIEEYFLKNNVEFVSLSETLDTSSPFGRAMIGILSVFAQLERETIRDRMVMGKIKRIEAGLPLTTAKGRTFGYDVIDTKLYINEEEAKQLQLIYDIFEEEQSITSLQKRLKKLGFKVRTYNRYNNWLTNDLYCGYVSYKDKVHVKGIHEPIISEEQFYRVQEIFTRMGKNPNMNRDSASLLNNLVVCSRCGLGFVHRSKDTMSRGKKYHYRYYSCKTYKHTHELEKCGNKTWRADKLEELIINRVNNYSLASRNVDKEDELASLNEKLKIEHAKKKRLFDLYINGSYEVSELDSMMNDIDAQINYYESQIEANEELKKNKKIQENLADLATEDFDSLEFHEKQLYLKSLINKIYIDGEQVTIDWL

SEQ ID NO: 3383 - protein, 469 aa, synthetic construct
MSYTTPVRAAVYLRISEDRSGEQLGVARQREDCLKLCDQRKWVPVEYLDNDVSASTGRRRPAYEQMLADITAGKIAAVVAWDLDRLHRRPIELEAFMSLADEKHLALATVAGDVDLATPQGRLVARLKGSVAAHETEHKKARQRRAARQKAERGYPNWSKAFGYLPGPNGPEPDPRTAPLVKQAYADILAGASLGDVCRQWNGAGTFTITGRPWTTTTLSKFLRKPRNAGLRAYKGARYGPVDRDAIVGKAQWSPLVDEATFWAAQAVLDAPGRAPGRKSVRRHLLTGLAGCGKCGNHLAGSCRTDGRVVYVCKACHGVAILADNIEPILYHIVAERLAVPDAVDLLRREIHDAAEAETIRLGLETLYGELDRLAVERAEGLLTARQVKISTDIVNAKIAKLQARQLDQERLRVFDGIPLGTSQVAGVIAELSPDRFRAVLDVLAEVVVQPVGKSGRIFNPERVQVNWR

SEQ ID NO: 3384 - protein, 485 aa, synthetic construct
MTRKVAIYTRVSTANQAEEGFSIDEQIDRLTKYAEAMGWQVSDTYTDAGFSGAKLERPAMQRLINGIENKAFDTVLVYKLDRLSRSVRDTLYLVKDVFTKNKIDFISLSESIDTSSAMGSLFLTILSAINEFERENIKERMTMGKLGRAKSGKSMMWTKTAFGYYHNRKTGILEIAPLQATIVEQIFTDYLSGISLTRLRDKLNESGHIGKDIPWSYRTLRQTLDNPVYCGYIKFKGSLFEGMHKPIIPYETYLKVQKELEERQQQAYERNNNPRPFQAKYMLSGMARCGYCGAPLRIVLGRRRKDGSRTMKYHCANRFPRKTRGVTVYNDNKKCDSGTYDLSNLENTVIDNLIGFQENNDSLLKIINGNNQPILDTSSFKKQISQIDKKIQKNSDLYLNDFITMDELKDRTDSLQAEKKLLKAKISENKFNDRTDVFELVKTQLGSIPINELSYDNKKKIVNNLVSKVDVTADNVDIIFKFQLT

SEQ ID NO: 3385 - protein, 485 aa, synthetic construct
MTEKVAIYTRVSTTNQAEEGFSIDEQIDRLTKYAEAMGWQVSDTYTDAGFSGAKLERPAMQRLINDIENKAFDTVLVYKLDRLSRSVRDTLHLVKDVFTKNKIDFISLNESIDTSSAMGSLFLTILSAINEFERENIRERMTMGKLGRAKSGKSMMWTKTAFGYYHNRETGILEIVPLQAAIVEQIFTDYLSGTSLTKLRDKLNESGHIGKDIPWSYRTLRQTLDNPVYCGYIKFKDSLFEGMHKPIIPYETYLKVQKELEERQQQTYERNNNPRPFQAKYMLSGVARCGYCGAPLRIVLGHKRKDGSRTMKYHCANRFPRKTKGVTVYNDIKKCDSGTYDLSNLENTVIDILIGFQENNDSLLKIINGNNQPILDTSSFKKQISQIDKKIQKNTDLYLNDFITMDELKDRTDSLQAEKKLLKAKISENKFNDSTDVFELVKTQLGSIPINELSYDNKKKIVNSLVSKVVVAADNVDIIFKFQLA

SEQ ID NO: 3386 - protein, 452 aa, synthetic construct
MKAAIYIRVSTREQVENYSIQAQTEKLTALCRSKDWDVYDIFIDGGYSGSNMNRPALNEMLSKLHEIDAVVVYRLDRLSRSQRDTITLIEEYFLKNNVEFVSLSETLDTSSPFGRAMIGILSVFAQLERETIRDRMVMGKIKRIEAGLPLTTAKGRTFGYDVIDTKLYINEEEAKQLRLIYDIFEEEQSITFLQKRLKKLGFKVRTYNRYNSWLTNDLYCGYVSYKDKVHVKGIHEPIISEEQFYRVQEIFTRMGKNPNMNRDSASLLNNLVVCSKCGLGFVHRRKDTTSRGKKYHYRYYSCKTYKHVHELEKCGNKIWRADKLEELIINRVSNYSVASRNVDKEDELGSLNEKLKIEHAKKKRLFDLYINGSYEVSELDSMMNDIDAQINYYESQTEACEELGKNKKVQESLADLAAVDYDSLEFREKQLYLKSLINKIYIDGEQVTIEWL

SEQ ID NO: 3387 - protein, 485 aa, synthetic construct
MTKKVAIYTRVSTTNQAEEGFSIDEQIDRLTKYAEAMGWQVSGTYTDAGFSGAKLERPAMQRLISDIENKAFDTVLVYKLDRLSRSVRDTLYLVKEVFTKNKIDFISLNESIDTSSAMGSLFLTILSAINEFERENIKERMTMGKLGRAKSGKSMMWTKTAFGYYHNRKTGILEIVPLQATIVEQIFTDYLSGISLTKLRDKLNESGHIGKDIPWSYRTLRQTLDNPVYCGYIKFKDSLFEGMHKPIIPYETYLRVQKELGERQQQTYERNNNPRPFQAKYMLSGMARCGYCGAPLKIVLGHKRKDGSRTMKYHCANRFPRKTKGVTVYNDNKKCDSGAYDLSNLENTVIDNLIGFQENNDSLLRIINGNDQPILDTSSLEKRISQIDKRIQKNSDLYLNDFITMDELRGRTDSLQAEKKLLKAQISENKFNDSTDVFELVKTQLGSIPINELSYDDKKKIVNNLVNKVDVTADNVDIIFKFQLA

SEQ ID NO: 3388 - protein, 485 aa, synthetic construct
MTKKVAIYTRVSTTNQAEEGFSIDEQIDRLTKYAEAMGWQVSDTYTDAGLSGAKLERPAMQRLINDIENKAFDTVLVYKLDRLSRSVRDTLYLVKDVFTKNKIDFISLSESIDTSSAMGSLFLTILSAINEFERENIKERMTMGKLGRAKSGKSMMWTKTAFGYYHNRETGILEIVPLQATIVEQIFTDYLSGISLTKLRDKLNEGGHIGKDIPWSYRTLRQTLDNPVYCGYIKFKDSLFEGMHKPIIPYETYLKVQKELEERQQQAYERNNNPRPFQAKYMLSGMARCGYCGAPLRIVLGHKRKDGSRTMKYHCANRFPRKTRGVTVYNDNKKCDSGTYDLGNLENTVIDNLVGFQENNDSLLKIINGNNQPILDTSSLKKQISQIDKKIQKNSDLYLNDFITMDELKDRTDSLQAEKKLLKAKISESKFNDSTDVFELVKTQLGSIPINELSYDNKKKIVNNLVSKVDVTADNVDIIFKFQLA

SEQ ID NO: 3389 - protein, 485 aa, synthetic construct
MTKKVAIYTRVSTTNQAEEGFSIDEQVDRLTKYAEAMGWQVSDTYTDAGFSGAKLERPAMQRLINDIENKVFDTVLVYKLDRLSRSVRDTLYLVKDVFTKNKIDFISLNESIDTSSAMGSLFLTILSAINEFERENIKERMTMGKLGRAKSGKSMMWTKTAFGYYHNRKTGILEIVPLQATVVEQIFTDYLSGISLTKLRDKLNESGHIGKDIPWSYRTLRQTLDNPVYCGYIKFKDSLFEGMHKPIIPYETYLKVQKELEERQQQTYERNNNPRPFQAKYMLSGMARCGYCGAPLRIVLGHKRKDGSRTMKYHCANRSPRKTKGVTVYNDNKKCDSGTYDLSILENTVIDNLIGFQENNDSLLKIISGNNQPIPDASSFREQISQIDKKIQKNSDLYLNDFITMDELKERTDSLQAEKKLLEAKISENKFNDSTDVFEQVKTQLGSIPINELSYDDKKKIVNNLVSKVDVTADNVDIIFKFQLA

SEQ ID NO: 3390 - protein, 485 aa, synthetic construct
MTKKVAIYTRVSTTNQAEEGFSIDEQIDRLTKYAEAMGWQVSDTYTDTGFSGAKLERPAMQRLINDIENKAFDTVLVYKLDRLSRSVRDTLYLVKDVFTKNKIDFVSLNESIDTSSAMGSLFLTILSAINEFERENIKERMTMGKLGRAKSGKSMMWTKTAFGYYHNRKTGILEIVPLQATIVEQIFTDYLSGISLTKLRDKLNESGHIGKDIPWSYRTLRQTLGNPVYCGYIKFKGSLFEGMHKPIIPYETYLKVQRELKERQQRTYERNNNPRPFQAKYMLSGAARCGYCGAPLRVVLGHKRKDGSRTMKYHCANRFPRKTRGVTVYNDNKKCDSGTYDLSNLENTVIDSLIGFQENNDSLLEIINGNNQPILDTRSFKKQISQIDKKIQKNSDLYLNDFITMDELKDRTDSLQAEKKLLKARISENEFNDSTDVFELVKTQLGSIPINELSYDNKKKIVNNLVSKVDVTADNVDIIFKFQLA

SEQ ID NO: 3391 - protein, 469 aa, synthetic construct
MSYTTPMRAAVYLRISEDRSGEQLGVARQREDCLKLCGQRKWEPVEYLDNDVSASTGKRRPAYEQMLADIAAGKITAVVAWDLDRLHRRPIELEAFMSLADEKRLALATVAGDVDLAAPQGRLVARLKGSVAAHETEHKKARQRRAARQKAERGLPNWSKAFGYLPGPNGPEPDPRTAPLVKQAYADILAGASLGDVCRQWNDAGALTITGRPWTATTLSKFLRKPRNAGLRAYKGARYGPVDRDAIVGKAQWSPLVDEATFWAAQAVLDAPGRAPGRKSVRRHLLTGLAGCGKCGNHLAGSYRTDGRVVYVCKTCHGVAILADNIEPILYHIVAERLAMPDAVDLLRREIHDAAEAETIRLELETLYGELDRLAVERAEGLLTARQVKISTDIVNAKITKLQARQLDQERLRVFDGIPLGTPQVAGKIAELSPDRFRAVLGVLAEVVVQPVGKSGRVFNPERVQVNWR

SEQ ID NO: 3392 - protein, 485 aa, synthetic construct
MTKKVAIYTRVSTTNQAEEGFSIDEQIDRLTKYAEAMGWQVSDTYTDAGISGAKLERPAMQRLINDIENKAFDTVLVYKLDRLSRSVRDTLYLVKDVFTKNNIDFISLSESVDTSSAMGSLFLTILSAINEFERENIKERMTMGKLGRAKSGKSMMWTKTAFGYYHNRTTGILEIVPLQATIVEQIFTDYLSGISLTKLRDKLNESGHIGKDIPWSYRTLRQTLDNPVYCGYIKFKGSLFEGMHKPIIPYETYLKVQKELEERQQQAYERNNNPRPFQAKYMLSGMARCGYCGAPLRIVLGHKRKDGSRTMKYHCANRFPRKTKGITVYNDNKKCDSGTYDLSNLENTVIDNLVGFQENNDSLLKIINGSNQPILDTSSFKKQISQIDKKIQKNSDLYLNDFITMDELKDRTDSLQAEKKLLEAKISENKSNDSTDVFELVRTQLGSIPINELSYDDKKKIVNNLVSKVDVTADNVDIIFKFQLA

SEQ ID NO: 3393 - protein, 452 aa, synthetic construct
MKAAIYIRVSTQEQVENYSIQAQTEKLTALCRSKDWDVYDIFIDGGYSGSNMNRPALNEMLSKLHEIDAVVVYRLDRLSRSQRDTITLIEEYFLKNNVEFVSLSETLDTSSPFGRAMIGILSVFAQLERETIRDRMVMGKIKRIEAGLPLTTAKGRTFGYDVIDTKLYINEEEAKLLQLIYDIFEEEQSITFLQKRLKKLGFKVRTYSRYNNWLTNDLYCGYVSYKDKVHVKGIHEPIISEEQFYRVQEIFARMGKNPNMNRDSASLLNNLVVCSKCGMGFVHRRKDTMSRGKKYHYRYYSCKTYKHIHELEKCGNKIWRADKLEELIINRVNNYSFVSRNADKEDELDCLNEKLRIEHAKRRRLFDLYINGSYEVSELDSMMNDIDAQINYYESQIEVNEELKKNKKIQKNLADLATVDFDSLEFREKQLYLKSLINKIYIDDEQVTIEWL

SEQ ID NO: 3394 - protein, 485 aa, synthetic construct
MTKKVAIYTRVSTTNQAEEGFSIDEQIDRLTKYAEAMGWQVSDTYTDAGFSGAKLERPAMQRLINDIENKAFDTVLVYKLDRLSRSVRDTLYLVKDVFTKNKIDFISLSESIDTSSAMGSLFLTILSAINEFERENIKERMTMGKLGRAKSGKSMMWTKTAFGYYHNRKTGILEIVPLQATIVEQIFTDYLSGISLTKLRDKLNESGHIGKDIPWSYRTLRQTLDNPVYCGYIKFKDSLFEGMHKPIIPYETYLKVQKELEERQQQTYERNNNPRPFQAKYMLSGMARCGYCGAPLRIVLGHKRKDGSRTMKYHCANRFPRKTKGVTVYNDNKKCDSGTYDLSNLENTVIDNLIGFQESNDSLLKIINGNNQPIQDTSSFKEQISQIDKKIQKNSDLYLNDFITMDELKDRTDSLQAEKKLLKAKISENKFNDCTDVFELVKTQLGSIPINELSYDNKKKIVNNLVSKVDVTADSVDIIFKFQLA

SEQ ID NO: 3395 - protein, 485 aa, synthetic construct
MTKKVAIYTRVSTTNQAEEGFSIDEQVDRLTKYAEAMGWQVSDTYTDAGLSGAKLERPAMQRLINDIENKAFDTVLVYKLDRLSRSVRDTLYLVKDVFTRNKIDFISLSESIDTSSAMGSLFLTILSAINEFERENIKERMTMGKLGRAKSGKSMMWTKTAFGYYHNRKTGILEIVPLQATIVEQIFTDYLSGISLTKLRDKLNESGHIGKDIPWSYRTLRQTLDNPVYCGYIKFKDNLFEGMHKPIIPYETYLKVQKELEERQQQTYERNNNPRPFQAKYMLSGMARCGYCGAPLRIVLGHKRKDGSRTMKYHCANRFPRKTKGVTVYNDNKKCDSGTYDLSNLENTVIDNLIGFQENNDSLLKIINGNNQPILDTSSFKKQISLIDKKIRKNSDLYLNDFITMDELKDRTDSLQAERKLLKAKISGNKFNDSTDVFELVKTQLGSIPINELSYDNKKKIVHNLVSKVDVTADNVDIIFKFQLA

SEQ ID NO: 3396 - protein, 485 aa, synthetic construct
MTKKVAIYTRVSTTNQAEEGFSIDEQIDRLTKYAEVMGWQVSDTYTDAGLSGAKLERPAMQRLINDIENKAFDTVLVYKLDRLSRSVRDTLYLVKDVFTKNKIDFISLNESIDTSSAMGSLFLTILSAINEFERENIKERMTMGKLGRAKSGKSMMWTKTAFGYYHNRKTGILEIVPLQATIVEQIFTDYLSGISLTRLRDKLNESGHIGKDIPWSYRTLRQTLDNPVYCGYIKFKDSLFEGMHKPIIPYETYLKVQKELEERQQQTYERNNNPRPFQAKYMLSGMARCGYCGAPLRIVLGRKRKDGSRTMKYHCANRFPRKTKGVTVYNDNRKCNSGTYDLSNLENTVIDNLIGFQENNDSLLKIINGNNQPILDTSSFKKQISQIDKKIQKNSDLYLNDFITMDELKDRTDSLQAEKKLLKAKISENKFDDSTDVFELVKTQLGSIPINELSYDNKKKIVNNLVSKVDVTADSVDIIFKFQLA

SEQ ID NO: 3397 - protein, 469 aa, synthetic construct
MCYTTPVRAAVYLRISEDRSGEQLGVARQREDCLKLCDQRKWEPVEYLDNDVSASTGKRRPAYEQMLADISAGKIAAVVAWDLDRLHRRPIELEAFMSLADEKRLALATVAGDVDLATPQGRLVARLKGSVAAHETEHKKARQRRAARQKAERGHPNWSKAFGYLPGPNGPEPDPRTAPLVKQAYADILAGASLGDVCRQWNAAGAFTITGRPWTTTTLSKFLRKPRNAGLRAYKGARYGPVDRDAIVGIARWSPLVDEATFWAAQAVLDAPGRAPGRKSVRRHLLTGLAGCGKCGNHLAGSYRTDGRVVYVCKACHGVAILADNIEPILYHIVAERLATPDAVDLLRREIRDAAEAETIRLELETLYGELDCLAVERAEGLLTARQVKISTDIVNAKIAKLQARQLDQERLRVFDGIPLGTPQVAGTIAELSPDRFRAVLDVLAEVVVQPVGKGGRIFNPERVQVNWR

SEQ ID NO: 3398 - protein, 452 aa, synthetic construct
MKAAIYIRVSTREQVENYSIQAQTEKLTALCRSKDWEVYDIFVDGGYSGSNMNRPALNEMLSKLHEIDAVVVYRLDRLSRSQRDTITLIEEYFLKNNVEFVSLSETLDTSSPFGRAMIGILSVFAQLERETIRDRMVMGKIKRIEAGLPLTTAKGRTFGYDVIDTKLYINEEEAKQLQLIYDIFEEEQSITFLQKRLKRLGFKVRTYNRYNNWLTNDLYCGYVSYKDKVHVKGIHEPIISEEQFYRVQEIFTRMGKNPNMNRDSASLLNNLVVCSKCGLGFVHRRKDAMSRDKKYHYRYYSCKTYKHIHELEKCGNKIWRADKLEELIINRVNNYSLASRNVDKEDELDSLNERLKIEHAKKKRLFDLYINGSYEVSELDSMMNDIDAQINYYESQIEANEELRKNKKIQENLANLATVDFDSLEFREKQLYLKSLINKIYIDGEQVTIEWL

SEQ ID NO: 3399 - protein, 485 aa, synthetic construct
MTRKVAIYTRVSTTNQAEEGFSIDEQIDRLTKYAEAMGWQVCDTYTDAGLSGAKLERPAMQRLINDIENKAFDTVLVYKLDRLSRSVRDTLYLVKDVFTKNKIDFISLNESIDTSSAMGSLFLTILSAINEFERENIKERMTMGKLGRAKSGKSMMWTKTAFGYHHNRKTGILEIVPLQATIVEQIFTDYLSGISLTKLRDKLNESGHIGKDIPWSYRTLRQTLDNPVYCGYIKFKDSLFEGMHKPIIPYETYLKVQKELGERQQQAYERNNNPRPFQAKYMLSGMARCGYCGAPLRVVLGRKRKDGSRTMKYHCANRFPRKTKGITVYNDNKKCDSGTYDLNNLENTVIDNLIGFQENNDSLLKIINGGNQPILDTSSFKKQISQIDKKIQKNNDLYLNDFITMDELKDRTDSLRAEKKLLKAKISENKFNDSTDVFELVKTQLGSIPINELSYDDKKKIVNNLVSKVDVTADSVGIIFKFQLA

SEQ ID NO: 3400 - protein, 485 aa, synthetic construct
MTKKVAIYTRVSTTNQAEEGFSIDEQIDRLTKYAEAMGWQVSDTYTDAGISGAKLERPAMQRLINDIENKAFDTVLVYKLDRLSRSVRDTLYLVKDVFARNKIDLISLNESIDTSSAMGSLFLTILSAINEFERENIKERMTMGKLGRAKSGKSMMWTKTAFGYYHNRKTGILEIVPLQAAIVEQIFTDYLSGISLTKLRDKLNGSGHIGKDIPWSYRTLRQTLDNPVYCGYIKFKDSLFEGMHKPIIPYETYLKVQKELEERQQQTYERNNNPRPFQAKYMLSGMARCGYCGAPLKIVLGHKRKDGSRTMKYHCANRFPRKTKGVTVYNDNKKCDSGAYDLGNLENTVIDYLIGFQENNDSLLKIINGNNQPTLDTSSFKKQISQIDKKIQKNSDLYLNDLITMDELKDRTDSLRAEKKLLKAKISENKFNDSTDVLELVKTQLGSIPINELSYDNKKKIVNNLVSKVDVTADNVDIIFKFQPA

SEQ ID NO: 3401 - protein, 485 aa, synthetic construct
MTKKVAIYTRVSTTNQAEEGFSIDEQIDRLTKYAEAMGWQVGDTYTDAGFSGAKLERPAMQRLINDIENKAFDTVLVYKLDRLSRSVRDTLYLVKDVFTKNKIDFISLNESIDTSSAMGSLFLTILSAINEFERENIKERMTMGKLGRAKSGKSMMWTKTAFGYYHNRKTGILEIVPLQATIVEQIFTDYLSGISLTKLRDKLNESGHIGKDIPWSYRTLRQTLDNPVYCGYIKFKDSLFEGMHKPIIPHETYLKVQRELEKRQQQTYERNNNPRPFQAKYMLSGMARCGYCGAPLRIVLGHKRKDGSRTMKYHCANRFPRKTKGVTVYNDNKKCDSGTYELSNLENTVIDNLIGFQENNDSLLKIINGNNQPILDTGSFKKQISQIDKKIQKNSDLYLNDFITMDELKDRTDSLQAEKKLLKAKISEAKFNDSTDVFELVKTQLGSIPINELSYDDKKKIVNNLVSKVDVTADNVDIIFKFQLA

SEQ ID NO: 3402 - protein, 469 aa, synthetic construct
MSYTTPVRAAVYLRISEDRSGEQLGVARQREDCLKLCGQRKWVPVEYLDNDVSASTGKRRPAYEQMLADITAGEIAAVVAWDLDRLHRRPIELEAFMSLADEKRLALATVAGDVDLATPQGRLVARLKGCVAVHETEHKKARQRRAARQKAERGYPNWSKAFGYLPGLNGPEPDPRTAPLVKQAYADILAGASLGDVCRQWNAAGAFTITGRPWTTTTLSKFLRKPRNAGLRAYKGARYGPVDRDAIVGKAQWSPLVDEATFWAAQAVLDAPGRAPGRKSVRRHLLTGLAGCGKCGNHLAGSYRTDGRVVYVCKACHGVAILADNIEPILYHIVAERLAMPDAVDLLRSEILDAAEAEATRLELETLYGELDRLAVERAEGLLTARQVKISTDIVNAKITKLQAHQQDQERLRVLDGIPLGTPQVAGVIAELSPNRFRAVLDVLAEVVVQPVGKGGRIFNRERVQVNWR

SEQ ID NO: 3403 - protein, 452 aa, synthetic construct
MKAAIYIRVSTREQVENYSIQAQTEKLTALCRSKDWDVYDVFIDGGYSGSNMNRPALNEMLSKLHEIDAVVVYRLDRLSRSQRDTITLIEEYFLKNNVEFVSLSETLDTSSPFGRAMIGILSVFAQLERETIRDRMVMGKIKRIEAGLPLTTAKGRTFGYDVIDTKLYINEEEAKQLRLIYDIFEEEQSITFLQKRLKELGFKVRTYNCYNNWLTNDLYCGYVSYRDKVHVKGIHEPIISEEQFYRVQEIFTRMGKNPNMNRDSASLLNNLVVCGKCGLGFVHRRKDAMSRDKKYHYRYYSCKTYKHIHELEKCGNKIWRADKLEELIINRVNNYSVASRNMDKEDELDSLNEKLKIEHAKKKRLFDLYINGSYEVSELDSMMSDIDAQINYYEGRIEANEELRKNKRIQENLADLATVDFDSLEFREKQLYLKSLINKIYIDGEQVTIEWL

SEQ ID NO: 3404 - protein, 485 aa, synthetic construct
MTKKVAIYTRVSTTNQAEGGFSIDEQIDRLTKYAEAMGWQVSDTYTDAGISGAKLERPAMQRLINDIENKAFDTVLVYKLDRLSRSVRDTLYLVKDVFTKNKIDFISLNESIDTSSAMGSLFLTILSAINEFERENIKERMTMGKLGRARSGKSMMWTKTAFGYYHNRETGILEIVPLQATIVEQIFTDYLGGISLTKLRDKLNESGHIGKDIPWSYRTLRQTLDNPVYCGYIKFKGSLFEGMHKPIIPYETYLKVQKELEERQQQACERNNNPRPFQAKYMLSGMARCGYCGAPLRIVLGRKRKDGSRTMKYHCANRFPRKTKGITVYNDNKKCDSGTYDLSNLENTVIDYLIGFQEDNDSLLKIINGNNRPILDTSSLKKQISQIDKKIQKNSDLYLNDFITMDELKDRTDSLQAEKKLLKAKISENKFNDSTDVFELVKTQLGGIPINELSYDNKKRIVNNLVSKVNVTADNVDIIFKFQLA

SEQ ID NO: 3405 - protein, 485 aa, synthetic construct
MTKKVAIYTRVSTTNQAEEGFSIDEQIDRLTKYAEAMGWQVSDTFTDAGFSGAKLERPAMQRLINDIENKAFDTVLVYKLDRLSRSVRDTLYLVKEVFTKNKIDFISLNESIDTSSAMGSLFLTILSAINEFEREDIKERMTMGKLGRAKSGKSMMWTKTAFGYYHNRKTGILEIVPLQATIVEQIFTDYLSGISLTKLRDKLNESGHIGKDIPWSYRTLRQTLDNPVYCGYIKFKGSLFEGMHKPIIPYETYLKVQKELEERQQQTYERNNNPRPFQAKYMLSGMARCGYCGAPLKIVLGHKRKDGSRTMKYHCANRFPRKTKGVTVYNDNKKCDSGTYDLSNLENTVIDILIGFQENNDSLLKIINGNNQPILDTSSFKKQISQIDKKIQKNSDLYLNDLITMDELKDRTDSLQAKKKLLKAKISENKFNDSTDVFELVKTQLGSIPINELSYDNKKKIVNDLVSKVDVTAGNVDIIFKFQLA

SEQ ID NO: 3406 - protein, 452 aa, synthetic construct
MKAAIYIRVSTREQVENYSIQAQTEKLTALCRSKDWDVYDVFIDGGYSGSNMNRPALNEMLSKLHEIDAVVVYRLDRLSRSQRDTITLIEEYFLKNNVEFVSLCETLDTSSPFGRAMIGILSVFAQLERETIRDRMVMGKIKRIEAGLPLTTAKGRTFGYDVIDTKLYINEEEAKQLQLIYDIFEEEQSITFLQKRLKKLGFKVRTYNRYNNWLTNDLYCGYVSYKDKVHVKGIHEPIISEEQFYRVQEIFTRMGKNPNMNRDSASLLNNLVVCSKCGLGYVHRRKDAMSRDKKYHYRYYSCKTYKHIHELEKCGNKIWRADKLEELIINRVNNYSLASRNVDKEDELDSLNEKLKIEHAKKKRLFDLYINGSFEVSELGSMMSDIDAQINYYEGQIEANEELKKNKKVQENLAHLATVDFDSLGFREKQLYLKSLINKIYIDGEQVTIEWL

SEQ ID NO: 3407 - protein, 469 aa, synthetic construct
MSYTTPVRAAVYLRISEDRSGEQLGVARQREDCLKLCGQRKWVPVEYLDNDVSASTGKRRPAYEQMLADITAGKIAAVVAWDLDRLHRRPIELEAFMSLADEKHLALATVAGDVDLATPQGRLVARLKGSVAAHETEHKKARQRRAARQKAERGYPNWSKAFGYLPGPNGPEPDPRTAPLVKQAYADILAGASLGDVCRRWNDAGAFTITGRLWTTTTLSKFLRKPRNAGLRAYKGARYGPVDRDAIVGKAQWSPLVDEATFWAAQAVLDAPGRAPGRKSVRRHLLTGLAGCGKCGNHLAGSYRTDGRVVYVCKACHGVAILADNIEPILYHIVAERLAMPDAVDLLRREIHDAAEAETIRLELETLYGELDRLAVERAEGLLTARQVKISTDIVNAKITKLQTRQLDQERLRVFDGIPLGTPQVAGVIAELSPDRFRAVLDVLAEVVVQPVGKSGRIFNPERVQVNWH

SEQ ID NO: 3408 - protein, 485 aa, synthetic construct; identical to SEQ ID NO: 1154

SEQ ID NO: 3409 - protein, 452 aa, synthetic construct
MKAAIYIRVSTREQVENYSIQAQTEKLTALCRSKDWDVYDIFIDGGYSGSNMNRPALNEMLSKLHEIDAVVVYRLDRLSRSQRDTITLIEEYFLKNNIEFVSLSETLDTSSPFGRAMIGILSVFAQLERETIRDRMVMGKIKRIEAGLPLTTAKGRTFGYDVIDTKLYINEEEAKQLQLIYDIFEEEQSITFLQKRLKKLGFKVRTYSCYNNWLTNDLYCGYVSYKDKVHVKGIHEPIISEEQFYRVQEIFTRMGKNPNMNRDSASLLNNLVVCSKCGLGFVHRRKDTVSRGKRYHYRYYSCKTYKHTHELEKCGNKIWRADKLEELIINRVSNYSFASRNVDKEGELDSLNEKLKTEHAKRKRLFDLYINGSYEVRELNSMMNDIDARIDYYESQIEANEELKKNKKIQENLADLATVDFDSLEFREKQLYLKSLINKIYIDGEQVTIEWL

SEQ ID NO: 3410 - protein, 452 aa, synthetic construct
MKAAIYIRVSTREQVENYSIQAQTEKLTALCRSKDWDVYDIFVDGGYSGSNMNRPALNEMLSKLHEIDAVVVYRLDRLSRSQRDTITLIEEYFLKNNVEFVSLSETLDTSSPFGRAMIGILSVFAQLERETIRDRMVMGKIKRIEAGLPLTTAKGRTFGYDVIDTKLYINEEEAKQLQLIYDIFEEEQSITFLQKRLKKLGFKVRTYNCYNNWLTNDLYCGYVSYKDKVHVKGIHEPIISEEQFYRVQEIFTRMGKNPNMNRDSASLLNNLVVCSKCGLGFVHRRKDAMSRDKKYHYRYYSCKTYKHIHELEKCGNKIWRADKLEELIINRVSNYSLASRNVDKEDELDSLNEKLKAEHAKKRRLFDLYINGSYEVSELDSMMNDIDAQINYYESQIEANEELRRNKKIQENLAYLATVDFDSLEFREKQLYLKSLINKIYIDGEQVTIEWL

SEQ ID NO: 3411 - protein, 485 aa, synthetic construct
MTKKVAIYTRVSTTNQAEEGFSIEEQIDRLTKYAEAMGWQVSDTYTDAGSSGAKLERPAMQRLINDIENKAFDTVLVYKLDRLSRSVRDTLYLVKDVFTKNKIDFISLNESIDTSSAMGSLFLTILSAINEFERENIKERMTMGKLGRAKSGKSMMWTKTAFGYHHNRKTGILEIVPLQATIVEQIFTDYLSGISLTKLRDKLNEGGHIGKDIPWSYRTLRQTLDNPVYCGYIKFKGSLFEGMHKPIIPYETYLKVQKELEERQQQTYERNNNPRPFQAKYMLSGVARCGYCGAPLRIVPGHKRKDGSRTMKYHCTNRFPRKTKGVTVYNDNKKCDSGTYDLSNLEDTVIDNLIGFQENNDSLLKIINGNNQPVLDTSSFKKQISQIDKKIQKNSDLYLNDFITMDELKDRTDSLQAEKKLLEAKISENKFNDSTDVFELVKTQLGSIPINELSYDNKKKIVNNLVGKVDVTADNVDIIFKFQLT

SEQ ID NO: 3412 - protein, 452 aa, synthetic construct
MKAAIYIRVSTREQVENYSIQAQTEKLTALCRSKDWDVYDIFIDGGYSGSNMNRPALNEMLSKLHEIDAVVVYRLDRLSRSQRDTITLIEEYFLKNNVEFVSLSETLDTSSPFGRAMIGILSVFAQLERETIRDRMVMGKIKRIEAGLPLTTAKGRTFGYDVIDTKLYINEEEAKQLQLIYDIFEEEQSITSLQKRLKKLGFKVHTYNRYNNWLTNDLYCGYVSYKDKVHVKGIHEPIISEEQFYRVQEIFTRMGKNPNMNRDSASLLNNLVVCSKCGLGFVHRRKDTMSRGKKYHYRYYSCKTYKHIHELEKCGNKIWRADRLEELVINRVNNYSFASRNVDKEDELDGLNEKLKIEHAKKKRLFDLYINGSYEVSELDSMMNDIDAQINYYESQIEANEELKKNKKIQENLASLMTVDYDSLEFREKQLYLKSLINKIYIDGEQVTIEWL

SEQ ID NO: 3413 - protein, 452 aa, synthetic construct
MKAAIYIRVSTREQVENYSIQAQTEKLTALCRSKDWDVYDIFIDGGYSGSNMNRPALNEMLSRLHEIDAVVVYRLDRLSRSQRDTITLIEEYFLKNNVEFVSLSETLDTSSPFGRAMIGILSVFAQLERETIRDRMVMGKIKRIEAGLPLTTAKGRTFGYDVIDTKLYINEEEAKQLQLIYDIFEEEQSITFLQKRLKKLGFKVHTYNRYNNWLTNDLYCGYVSYKDKVHVKGIHEPIISEEQFYRVQEIFTRMGKNPNMNRDSASLLNNLVVCSKCGLGFVHRRKDAMSRDKKYHYRYYSCKTYKHIHELEKCGNKIWRADKLEELVINRVNNYSLASRDVGKEAELDSLNEKLKIEHAKKKRLFGLYINGSYEVSELDSMMSVIDAQINHYESQIEANEELKKNKKIQENLVYLATVDFDSLEFREKQLYLKSLINKIYIDGEQVTIEWL

SEQ ID NO: 3414 - protein, 469 aa, synthetic construct
MCYTTPVRAAVYLRISEDRSGEQLGVARQREDCLKLCDQRKWVPVEYLDNDVSASTGKRRPAYEQMLADITAGKIAAVVAWDLDRLHRRPIELEAFMSLADEKRLALATVAGDVDLATPQGRLVARLKGSVAAHETEHKKARQRRAARQKAERGHPNWSRAFGYLPGPNGPEPDPRTAPLVKQAYADILVGASLGDVCRQWNDEGAFTITGRPWTTTTLSKFLRKPRNAGLRAYKGAPYGPVDRHAIVGKAQWSPLVDEATFWAAQAVLDAPGRAPGRKSVRRHLLTGLAGCGKCGNHLAGSYRTDGKVVYVCKACHGVAILADNIEPILYHIVAERLAMPGAVDLLRREIHDAAEAETIRLELETLYGELDRLAVERAEGLLTARQVKISTDIVNAKITKLQARQLDQERLRVFEGIPLGTPQVAGMIAELSPDRFRAVLVVLAEVVVQPVGKSGRIFNPERVQVNWR

SEQ ID NO: 3415 - protein, 452 aa, synthetic construct
MKAAIYIRVSTREQVENYSIQAQTEKLTALCRSKDWDVYDIFIDGGYSGSNMNRPALNEMLSKLHEIDAVVVYRLDRLSRSQRDTITLIEEYFLKNNVEFVSLSETLDTSSPFGRAMIGILSVFAQLERETIRDRMVMGKIKRIEAGLPLTTAKGRTFGYDVIDTKLYINEEEAKQLQLIYDIFEEEQSITFLQKRLKKLGFKVRTYNRYNSWLTNDLYCGYVSYKDKVHVKGIHEPIISEEQFYRVQEIFTRMGKNPNMNRDSASLLNNLVVCSKCGLGFVHRRKDTVSRGKKYHYRYYSCKTYKHIHELEKCGNKIWRADKLEELIINRVNNYSFASRNVDKEDELDSLNEKLRIEHVKKRRLFDLYINGSYEVSELDSMMNDIDAQINYYESQIEANEELKKNKKIQENLANLATVDYDSLEFREKQLYLKSLINKIYIDGEQVTIEWL

SEQ ID NO: 3416 - protein, 485 aa, synthetic construct
MTKKVAIYTRVSTTNQAEEGFSIDEQIDRLTKYAEAMGWQVSDTYTDAGCSGAKLERPAMQRLINDIENKAFDTVLVYKLDRLSRSVRDTLYLVKDVFTKNKVDFISLNESIDTSSAMGSLFLTILSAINEFERENIKERMTMGKLGRAKSGKSMMWTKTAFGYYHNRKTGILEIVPLQATIVEQIFTDYLSGISLTKLRDKLNEGGHIGKDVPWSYRTLRQTLDNPVYCGYIKFKDSLFKGMHKPIIPYETYLKVQKELGERQQQAYERNNNPRPFQAKYMLSGMARCGYCGAPLRIVLGHKRRDGSRTMKYHCTNRFPRKTKGATVYNDNKKCDSGTYDLGNLENTVIDNLIGFQENNDSLLKIINGNNQPILDTSSFKKQISQIDKKIQKNSELYLNDFITMDELRDRTDSLQAEKKLLKAKISENKFNDSTDVFELVKTQLGSIPINELSYDDKKKIVNNLVSKVDVTADNVDIIFKFQLA

SEQ ID NO: 3417 - protein, 485 aa, synthetic construct
MTKKVAIYTRVSTTNQAEEGFSIDEQIDRLTKYAEAMGWQVSDTYTDAGLSGAKLERPAMQRLINDIENKAFDTVLVYKLDRLSRSVRDTLYLVKDVFTKNKIDFISLNESIDTSSAMGSLFLTILSAINEFERENIKERMAMGKLGRAKSGKSMMWTKTAFGYYHNRETGILEIVPLQATIVVQIFTDYLSGISLTKLRDKLNESGHIGKDIPWSYRTLRQTLDNPVYCGYIKFKDSLFEGVHKPIIPYETYLKVQKELEERQRQTYERNNNPRPFQAKYMLSGMARCGYCGAPLKIVLGHKRKDGSRTMKYHCANRFPRKTKGITVYNDNKKCDSGTYDLSNLENTVIDSLIGFQENNDSLLKIINGNNQPILDTSSFKEQISQVDKKIQKNSDLYLNDLITMDELKARTDSLQAEKKLLKAKISENKFNDSTDVFELVKTQLGSIPINELSYDNKKKIVNNLVSKVDVTADNVDIIFKFQLA

SEQ ID NO: 3418 - protein, 452 aa, synthetic construct
MKAAIYIRVSTREQVENYSIQAQTEKLTALCRSKDWDVYDIFIDGGYSGSNMNRPALNEMLSKLHEIDAVVVYRLDRLSRSQRDTITLIEEYFLKNNVEFVSLSETLDTSSPFGRAMIGILSVFAQLERETIRDRMVMGKIKRIEAGLPLTTAKGRTFGYDVIDTKLYINEEEARQLRLIYDIFEEEQSITSLQKRLKKLGFKVCTYNRYNNWLTNDLYCGYVSYKDKVHVKGIHEPIISEEQFYRVQEIFTRMGKNPNVNRDSASLLNNLVVCSKCGLGFVHRRKDTMSRGKRYHYRYYSCKTYKHTHELEKCGNKIWRADKLEELIISRVNNYSLASRNVDKEDGLDCLNEKLKIEHAKKRRLFDLYLSGSYEVSELDSMMNDIDAQINYYESQIEANEGLKKNKKIQENLADLATGDFDSLEFREKQLYLKSLINKIYIDGEQVTIEWL

SEQ ID NO: 3419 - protein, 452 aa, synthetic construct
MKAAIYIRVSTQEQVGNYSIQAQTEKLTALCRSKDWDVYDIFVDGGYSGSNMNRPALNEMLSKLHEIDAVVVYRLDRLSRSQRDTTTLIEEYFLKNNVEFVSLSETLDTSSPFGRAMIGILSVFAQLERETIRDRMVMGKIKRIEAGLPLTTAKGRTFGYDVIDTKLYINEEEAKQLQLIYDIFEEEQSITSLQKRLKKLGFKVRAYNRYSNWLTNDLYCGYVSYKDKVHVKGIHEPIISEEQFYRVQEIFARMGKNPNMNRDSASLLNNLVVCSKCGLSYVHRRKDTMSRGKKYHYRYYSCKTYKHTHELEKCGNKTWRADRLEELIINRVNNYSLASRNVDKEDELNSLNEKLKTEHAKKKRLFDLYINGSYEVSELDSMMNDIDAQINYYESQIEANEELKKNKKIQENLADLATVDFDCLEFREKQLYLRSLINKICIDGEQVTIEWL

SEQ ID NO: 3420 - protein, 469 aa, synthetic construct
MSYTTPVRAAVYLRISEDRSGEQLGVARQREDCLKLCDQRKWVPVEYLDNDVSASTGKRRPAYEQMLADIAAGKIAAVVAWDLDRLHRRPIELEAFMSLADEKRLALATVAGDVDLATPQGRLVARLKGSVAAHETEHKKARQRRAARQKAELGHPNWSKAFGYLSGPNGPEPDPRTAPLVKQAYVDILAGASLGDVCRRWNGAGALTITGRPWTTTTLSKFLRKPRNAGLRAYKGARYGPVDRDAIVGKAQWSPLVDEATFWAAQAVLDAPGRAPGRKSVRRHLLTGLAGCGKCGNHLAGSYRTDGRVVYVCKACHGVAILADNIEPILYHIVAERLAMPDAVDLLRREIHDAAEAETIRLELETLYGELDRLAVERAEGLLTARQVKISTDIVNAKITKLQARQQDQERLRVLDGIPLGTPRVAGMIAELSPDRFRAVLDVLAEVVVQPVGKSGRIFNPERVQVNWR

SEQ ID NO: 3421 - protein, 452 aa, synthetic construct
MKAAIYIRVSTREQVENYSIQAQTEKLTALCRSKDWDVYDIFIDGGYSGSNMNRPALNEMLSKLHEIDAVVVYRLDRLSRSQRDTITLIEEYFLKNNVEFVSLSETLDTSSPFGRAMIGILSVFAQLERETIRDRMVMGKIKRIEAGLPLTTAKGRTFGYDVVDTKLYINEEEARQLRLIYDIFEEEQSITFLQKRLKKLGFKVRTYNRYSNWLTNDLYCGYVSYKDKVHVKGIHEPIISEEQFYRVQEIFTRMGKNPNMNRDSASLLNNLVVCGKCGLGFVHRRKDIMSRGKKYHYRYYSCKTYKHIHELEKCGNKIWRADKLEELIINRVNNYSFASRNADKEDELDSLNEKLKIERAKKKRLFDLYINGSYEVSELDSMMNDIDAQINYYESQIEANEELKKNKKVQENLAYLATVDFDSLGFREKQLYLKSLINKIYIDGEQVTIEWL

SEQ ID NO: 3422 - protein, 485 aa, synthetic construct
MTKRVAIYTRVSTTNQAEEGFSIDEQIDRLTKYAEAMGWQVSDTYTDAGLSGAKLERPAMQRLINDIENKAFDTVLVYKLDRLSRSVRDTLYLVKDVFTKNKIDFISLSESIDTSSAMGSLFLTILSAINEFERENIKERMTMGKLGRAKSGKSMMWTKTAFGYYHNRKTGILEIVPLQATIVEQIFTDYLSGISLTKLRDKLNESGHIGKDIPWSYRTLRQTLDNPVYCGYIKFKDSLFEGMHKPIIPYETYLKVQKELEERQQQTYERNNNPRPFQAKYMLSGMARCGYCGAPLKIVLGHKRKDGSRTMKYHCANRFPRKTKGVTAYNDNKKCDSGTYDLSNLENAVIDSLIGFQENNDSLLKIINGSNQPILDTSSFKKQISQIDKKIQKNTDLYLNDFITMDELKDRTDRLQAEKRLLKAKISENKFNDSTDVFELVKTQLGSIPINELSYDNKKKIVNNLVSKVDVTADNVDIIFKFQLA

SEQ ID NO: 3423 - protein, 452 aa, synthetic construct
MKAAIYIRVSTREQVENYSIQAQTEKLTALCRSKDWDVYDIFIDGGYSGSNMNRPALNEMLSKLHEIDAVVVYRLDRLSRSQRDTITLIEEYFLKNNVEFVSLSETLDTSSPFGRAMIGILSVFAQLERETIRDRMVMGKIKRIEAGLPLTTAKGRTFGYDVIDTKLYINEEEAKQLQLIYDIFEEEQSITFLQKRLKKLGFKVRTYNCYNNWLTNDLYCGYVSYKDKVHVKGIHEPIISEEQFYRVQEIFTRMGKNPNMNRDSASLLNNLVVCSKCGLGFVHRRKDAMSRSKKYHYRYYSCKTYKHIHELEKCGNKIWRADKLEELIINRVNNYSFASRNKEREDELDSLSEKLKTEHAKKKRLFDLYVNGSYEVSELDSMMNDIDAQINYYESQIEANEELKKNKKIQETLADLATVDFGSLEFREKQLYLKSLINKIYIDGEQVTIEWL

SEQ ID NO: 3424 - protein, 452 aa, synthetic construct
MKAAIYIRVSTREQVENYSIQAQTEKLTALCRSKDWDVYDIFIDGGYSGSNMNRPALNEMLSKLHEIDAVVVYRLDRLSRSQRDTITLIEEYFLKNNVEFVSLSETLDTSSPFGRAMIGILSVFAQLERETIRDRMVMGKIKRVEAGLPLTTAKGRTFGYNAIDTKLYINEEEAKQLQLIYDIFEEERSITLLQKRLKKLGFKVRTYSCYNNWLTNDLYCGYVSYKDKVHVKGIHEPIISEEQFYRVQEVFTRMGKNPNMNRDSASLLNNLVVCSKCGLSFVHRRKDTMSRGKKYHYRYYSCKTYKHTHELEKCGNKIWRADKLEELIINRVNNYSLASRNVDKEDELDSLNVKLKIEHAKKKRLFDLYINGSYEVSELDSMMNDIDAQINYYESQIEANGELKKNKKIQENLADLATVDFDSLEFREKQLYLKSLINKIYIDGEQVTIEWL

SEQ ID NO: 3425 - protein, 485 aa, synthetic construct
MTKKVAIYTRVSTTNQAEEGFSIDEQTDRLTKYAEAMGWQVSDTYTDAGFSGAKLERPAMQRLINDIENKAFDTVLVYKLDRLSRSVRDTLYLVKDVFTKNKIDFISLSESIDTSSAMGSLFLTILSAINEFERENIKERMTMGKLGRAKSGKSMMWTKTAFGYCHNRKTGILDIVPLQATIVEQIFTDYLGGISLTKLRDKLNESGHIGKDIPWSYRTLRQTLDNPVYCGYIKFKDSLFEGMHKPIIPYETYLKVQKELEERQQQTYERNNNPRPFQAKYMLSGMARCGYCGAPLRIVLGHKRKDGSRTMRYHCANRFPRKTKGVTVYNDNKKCDSGTYDLSNLENTVIDNLIGFQENNDSLLKIINGNNQPILDTSSIKKQISQIDKKIQKNSDLYLNDFITMDELKDRTDSLQAEKKLLKAKISENKFNDSTDVFELVKTQLGSIPINELSYDNKKKIVNNLVSKVDVTADNVDIIFKFQLA

SEQ ID NO: 3426 - protein, 452 aa, synthetic construct
MKAAIYIRVSTREQVENYSIQAQTEKLTALCRSKDWDVYDIFIDGGYSGSNMNRPALNEMLSKLHEIDAVVVYRLDRLSRSQRDTITLIEEYFLKNNVEFVSLSETLDTSSPFGRAMIGILSVFAQLERETIRDRMVMGKIKRVEAGLPLTTAKGRTFGYDVIDTKLYINEEEAKQLQLIYDIFEEEQSITFLQKRLKKLGFKVRTYNRYNSWLTNDLYCGYVSYKDKVHVKGIHEPIISEEQFYRVQEIFTRMGKNPNMNRDSASLLNNLVVCSKCGLGFVHRRKDTVSRGKKYHYRYYSCKTYKHTHELEKCGNKIWRADKLEELIINHVNSYSFASRNMDKGDELDSLNEKLKVEHAKKKRLFDLYTNGSYEVSELDSMMNDIDAQISYYESQIEANEELKRNKKIRENLADLATVDFDSLEFREKQLYLKSLINKIYIDGEQVAIVWL

SEQ ID NO: 3427 - protein, 469 aa, synthetic construct
MSYTTPVRAAVYLRISEDRSGEQLGVARQREDCLKLCGQHKWVPVEYLDNDVSASTGKRRPAYEQMLADITAGKIAAVVAWDLDRLHRRPVELEAFMSLADEQRLALATVAGDVDLATPQGRLVARLKGCVAAHETEHKKARQRRAARQKAERGLPNWSKAFGYLPGPNGPEPDPRTAPLVKQAYADILAGASLGDVCRQWNEAGAFTITGRPWTTTTLSKFLRKPRNAGLRAYKGARYGPVDRDAIVGKAQWSPLVDEATFWAAQAILDAPGRAPGRKSVRRHLLTGLAGCGKCGSHLAGSYRTDGRVVYVCKACHGVAILADNIEPILYHIVAERLAMPDAVDLLRREIHDAAEAETIRLELETLYGELDRLAVERAEGLLTARQVKICTDIVNAKIARLQARQLDQERLRVFDGIPLGAPQVAGMIAELSPDRFRAVLDVLAEVVVQPVGKGGRIFNPERVQVNWR

SEQ ID NO: 3428 - protein, 469 aa, synthetic construct
MSYTTPVRAAVYLRISEDRSGEQLGVARQREDCLKLCDQRKWVPVEYLDNDVSASTGKRRPAYEQMLADITAGKIAAVVAWDLDRLHRRPIELEAFMSLADEKRLALATVAGDVDLATPQGRLVARLKGCVAAHETEHKKARQRRAARQKAERGLPNWSKAFGYLPGPNGPEPDPRTAPLVEQAYADILAGASLGDVCRQWNGAGAFTITGRPWTTTTLSKFLRKPRNAGLRAYKGARYGPVDRDAIVGKAQWSPLVDEAIFWAAQAVLDAPGRAPGRKSVRRHLLTGLAGCGKCGNHLAGSYRTDGQIVYVCKACHGVSILAVNIEPILYHIVAERLALPDAVDLLRREIHDAAEAETIRLELETLYGELDRLAVERAEGLLTARQVKISTDIVNAKITRLQAHQLDQERLRVFDGIPLGTPQVAGIIAELSPNRFRAVLDVLAEVVVQPVGKNGRIFNPERVQVNWR

SEQ ID NO: 3429 - protein, 469 aa, synthetic construct
MSYTTLVRAAVYLRISEDRSGEQLGVARQREDCLKLCGQRKWAPVEYLDNDVSASTGKRRPAYEQMLADITAGKIAAVVAWDLDRLHRRPVELEAFMSLADEKRLALATVAGDVDLATPQGRLVARLKGCVAAHEIEHKKARQRRAARQKAERGLPNWSKAFGYLPGPNGPEPDPRTAPLVKQAYADILAGASLGDVRRQWNDAGAFTITGRPWTTTTLSKFLRKPRNAGLRTYKGARYGPVDRDAIVGKAQWSPLVDEATFWAAQAVLDAPGRAPGRKSVRRHLLTGLAGCGKCGNHLAGSYRTDGRVVYVCKACHGVAILADNIEPFLYHIVAERLAMPDAVDLLRRGTHDAAEAETIRLELETLYGELDRLAVERAEGLLTARQVKISTDIVNAKITELLARQQDQERLHVLDGIPLGTPQVAGTIAELGPDRFRAVLDVLAEVVVQPVGKSGRIFNPERVQVNWR

SEQ ID NO: 3430 - protein, 452 aa, synthetic construct
MKAAIYIRVSTREQVENYSIQAQTEKLTALCRSKDWDVYDIFIDGGYSGSNMNRPALNEMLSRLHEIDAVVVYRLDRLSRSQRDTITLIEEYFLKNNVEFVSLSETLDTSSPFGRAMIGILSVFAQLERETIRDRMVMGKIKRIEAGLPLTTAKGRTFGYDVIDTKLYINEEEAKQLQLIYDIFEEEQSITFLQKRLKKLGFKVHTYNRYNNWLTNDLYCGYVSYKDKVHVKGIHEPIISEEQFYRVQEIFTRMGKNPNMNRGSASLLNNLVVCSKCGLGFVHRRKDAMSRDKKYHYRYYSCKTYKHIHELEKCGNKIWRADKLEELIINHVNNYSLASRNVDKEVELDSLNERLKIEHARKKRLFDLYINGSYEVSELDSMMNDIDAQINYYESQIEANEELRKNKKIQENLADLATVDFDSLEFREKQLYLKSLINKIYIDGEQVTIEWL

SEQ ID NO: 3431 - protein, 452 aa, synthetic construct
MKAAIYIRVSTREQVENYSIQAQTEKLTALCRSKDWDVYDIFIDGGYSGSNMNRPALNEMLSKLHEIDAVVVYRLDRLSRSQRDTITLIEEYFLKNNVEFVSLSETLDTSSPFGRAMIGILSVFAQLERETIRDRMVMGKIKRIEAGLPLTTAKGRTFGYDVIDTKLYINEGEAKQLQLIYDIFEEERSITFLQKRLKKLGLKVRTYNRYNSWLTNDLYCGYVSYKDKVHVRGIHEPIISEEQFYRVQEIFARMGKNPNMNRDSASLLNNLVVCSKCGLGFVHRRKDTMGRGKKYHYRYYSCKTYKHTHELEKCGNKIWRADKLEELIINRVNNYSFASRNADKEDELDSLNEKLKIEHAKKKRLFDLYINGNYEVSELDSMMNDIDAQINYYESQIEANEELKKNKKIQENLANLATVDFDSLEFREKQRYLKSLINRIYIDGEQVTIEWL

SEQ ID NO: 3432 - protein, 485 aa, synthetic construct
MTKKVAIYTRVSTTNQAEEGFSIDEQIDRLTKYAEAMGWQVSDTYTDAGFSGAKLERPAMQRLINDIENKAFDTVLVYKLDRLSRSVRDTLYLVKDVFTKNKIDFISLNESIDTSSAMGSLFLTILSAINEFERENIKERMTMGKLGRAKSGKSMMWTKTAFGYYHNRKTGILEIVPLQATIVEQIFTDYLSGISLTKLRDKLNESGHIGKDIPWSYRTLRQTLDNPVYCGYIKFKDCLFEGMHKPIIPYETYLKVQKELEERQQQTYERNNNPRPFQAKYMLSGMARCGYCGAPLRIVLGHKRKDGSRTMKYHCANRFPRKTKGVTVYNDNKKCDSGTYDLSNLENTVIDNLIGFQENNDSLLKIINGNNQPILDTSSLKKQISQIDKKIQKNSDLYLNDFITMDELKDRTDSLQAEKKLLKAKISENKFNDSTDVFELVKTQLGSIPINELSYDNKKKIVNNLVSKVDVTADNVVIIFKFQLA

SEQ ID NO: 3433 - protein, 452 aa, synthetic construct
MKAAIYIRVSTREQVENYSIQAQTEKLTALCRSKDWDVYDIFIDGGYSGSNMNRPALNEMLSKLHEIDAVVVYRLDRLSRSQRDTITLIEEYFLKNNVEFVSLSETLDTSSPFGRAMIGILSVFAQLERETIRDRMVMGKIKRIEAGLPLTTAKGRTFGYDVIDTKLYINEEEAKQLQLIYDIFEEEQSITFLQKRLKKLGFKVRTYNRYNSWLTNDLYCGYVSYKDKVHVKGIHEPIISEEQFYRVQEIFARMGKNPNMNRDSASLLNNLVVCSKCGLGFVHRRKDAMSRDKKYHYRYYSCKTYKHIHELEKCGNKIWRADKLEELIINRVNNHSLASRNVDKEDELDSLNEKLKIEHAKKKRLFDLYMSGRYEVNELDSMMNDIDAQINYYESQIEANEELKKNKKIQENLAHLATVDFDSLEFREKQLYLKSLINKIYIDGEQVTIEWL

SEQ ID NO: 3434 - protein, 485 aa, synthetic construct; identical to SEQ ID NO: 565

SEQ ID NO: 3435 - protein, 452 aa, synthetic construct
MKAAIYIRVSTQEQVGNYSIQAQTEKLTALCRSKDWDVYDIFIDGGYSGSNMNRPALNEMLSKLHEIDAVVVYRLDRLSRSQRDTTTLIEEYFLKNNVEFVSLSETLDTSSPFGRAMIGILSVFAQLERETIRDRMVMGKIKRIEAGLPLTTAKGRTFGYDVIDTKLYINEEEAKQLQLIYDIFEEEQSITFLQKRLKKLGLKVHTYNRYNNWLTNDLYCGYVSYKDKVHVKGIHEPIISEEQFYRVQEIFTRMGKNPNMNRDSASLLSNLMVCSKCGLGFVHRSKDTMSRGKKYHYRYYSCKTYKHAHELEKCGNKTWRADKLEELIINRVNSYSFAGRNVDKEDELDSLNEKLKIEHAKKKRLFDLYISGSYEVSELDSMMNDIDAQISYYESQIEASEELKKDKKIQENLANLAAVDFDSLEFREKQLYLKSLINKIYIDGEQVTIEWL

SEQ ID NO: 3436 - protein, 469 aa, synthetic construct
MSYTTPVRAAVYLRISEDRSGEQLGVARQREDCLKLCDQRKWVPVEYLDNDVSASTGKRRPAYEQMLADITAGKIAAVVAWDLDRLHRRPIELEAFMSLADEKRLALATVAGDVDLATPQGRLVARLKGSVAAHETEHKKARQRRAARQKAERGLPNWSKAFGYLPGPNGPEPDPRTAPLVKQAYADILAGASLGDVCRRWNNAGAFTITGRPWTTTTLSKFLRKPRNAGLRAYKGARYGPVDRDAIVGKAQWSPLVDEATFWAAQAVLDAPGRAPGRKSVRRHLLTGLAGCGKCGYHLAGSYRTGGRVVYVCKACHGVAILADNIEPILYHIVAERLAMPGAVDLLRREIHDAAETETIRLELETLYGKLDCLAVERAEGLLTARQVKISTDIVNAKITELQARQQDQERLRVFDGIPLGTPQVAGMIAELSPDRFRAVLDVLAEVVVQPVGKSGRIFNPERVQVNWR

SEQ ID NO: 3437 - protein, 452 aa, synthetic construct
MKAAIYIRVSTREQVENYSIQAQTEKLTALCRSKDWDVYDIFIDGGYSGSNMNRPALNEMLSKLHEIDAVVVYRLDRLSRSQRDTITLIEEYFLKNNVEFVSLSETLDTSSPFGRAMIGILSVFAQLERETIRDRMVMGKIKRIEAGLPLTTAKGRTFGYDVIDTKLYINEEEAKQLQLIYDIFEEEQSITFLQKRLKKLGFKVRTYNRYNNWLTNDLYCGYVSYKDKVHVKGIHEPIISEEQFYRVQEIFTRMGKNPNMNRASASLLNNLVVCSKCGLGFVHRRKDAMSRDKKYHYRYYSCKTYKHIHELEKCGNKIWRADKLEELIIDRVNSYSLASRNVDKEDELDGLNEKLKTEHAKKKRLFDLYINGSYEVSELDSMMSDIDAQINYYESQIEANEELKKNKKIQENLADLATVDFDSLEFREKQLYLKSLINKIYIDGDQVTIEWL

SEQ ID NO: 3438 - protein, 485 aa, synthetic construct
MTKKVAIYTRVSTTNQAEEGFSIDEQIDRLTKYAEAMGWQVSDTYTDAGISGAKLERPAMLRLINDIENKAFDTVLVYKLDRLSRSVRDTLYLVKDVFTKNKIDFISLNESIDTSSAMGSLFLTILSAINEFERENIKERMTMGKLGRAKSGKSMMWTKTAFGYYHNRKTGILEIVPLQATIVEQIFTDYLSGISLTKLRDKLNESGHIGKDIPWSYRTLRQTLDNPVYCGYIKFKDSLFEGMHKPIIPYETYQKVQKELEERQQQTYERNNNPRPFQAKYMLSGMARCGYCGAPLRIVLGHKRKDGSRTMKYHCANRFPRKTKGVSVYNDNKKCDSGTYDLSNLENTVIGSLVGFQENNDSLLKIINGNNQPILDTSSPEKQISQIDEKIQKNCDLYLNDFITMDELKDRTDSLQAEKKLLKAKISENKFNDSTDVFELVKTQLGSIPINELSYDNKKKIVNNLVSKVDVTADNVDIIFKFQLA

SEQ ID NO: 3439 - protein, 469 aa, synthetic construct
MSYTTPVRAAVYLRISEDRSGEQLGVARQREDCLELCDQRKWVPVEYLDNDVSASTGKRRPAYEQMLADITAGKIAAVVAWDLDRLHRRPIELEAFMSLADEKRLALATVAGDVDLATPQGRLVARLKGSVAAHETEHKKARQRRAARQKAERGHPNWSKAFGYLPGPNGPEPDPRTAPLVTQAYADILAGASLGDVCRQWNGAGAFTITGRPWTTTTLSKFLRKPRNAGLRAYKGARYGPVDRDAIVGKAQWSPLVDEATFWAAQAVLDAPGRAPGRKSVRRHLLTGLAGCGKCGNHLAGSYRTDGRVVYVCKACHGVAILADNIEPILYHTVAERLAMPDAVDLLRREIHDAAEAETIRLELETLYGELDSLAVERAEGLLTARQVKISTDIVNAKITKLQARQLDQERLRVLDGVPLGTPQVAGKIAELSPDRFRAVLDVLAEVVVQPVGKSGRIFNPERVQVNWR

SEQ ID NO: 3440 - protein, 469 aa, synthetic construct
MSYTTPVRAAVYLRISEDRSGEQLGVARQREDCLELCDQRKWVPVEYLDNDVSASTSKRRPAYEQMLADITAGKIAAVVAWDLDRLHRRPIELEAFMSLADEKRLALATVAGDVDLATPQGRLVARLKGSVAAHETEHKKARQRRAARQKAERGHPNWSKAFGYLPGPNGPEPDPRTAPLVRQAYADILAGASLGDVCRQWNDAGAFTITGRPWATTTLSKFLRKPRNAGLRAYKGARYGPVDRDAIVGKAQWSPLVDEATFWAAQAVLDAPGRAPGRKSVRRHLLTGLAGCGKCGNHLVGSYRTDGRVVYVCKACHGVAILADNIVPILYHIVAERLAMPNAVDLLRREIHDVAEAETIRLELETLYDELDRLAVERAEGLLTARQVKISTDIVNAKIAKLQARQLDQERLRVFDGIPLGTPQVASVIAELSPDRFRAVLDVLAEVVVQPVGKGGRIFNPERVQVNWR

SEQ ID NO: 3441 - protein, 485 aa, synthetic construct
MTKKVAIYTRVSTTNQAEEGFSIDEQTDRLTKYAEAMGWQVSDTYTDAGFSGAKLERPAMQRLINDIGNKAFDTVLVYKLDRLSRSVRDTLHLVKEVFTKNKVDFISLNESIDTSSAMGSLFLTILSAINEFERENIKERMTMGKLGRAKSGKSMMWTKTAFGYYHNRKTGILEIVPLQATIVEQIFTDYLSGISLTKLRDKLNESGHIGKDIPWSYRTLRQTLDNPVYCGYIKFKDSLFEGMHKPIIPYETYLKVQKELEERQQQTYERNNNPRPFQAKYMLSGQARCGYCGAPLRIVLGHKRKDGSRTMKYHCANRFPRKTKGVTVYNDNKKCDSGTYDLRDLESAVIDNLIGFQENNDSLLKVINGNNQPIQDTSNFKKQISQIDKKIQKNSDLYLNDFITMDELRARTDSLQAEKKLLEAKISENKFNDSTEVFELVKTQLGSIPINELSYDNKKKIVNNLVSKVDVTADSVDIIFKFQLA

SEQ ID NO: 3442 - protein, 485 aa, synthetic construct
MTKKVAIYTRVSTTNQAEEGFSIDEQIDRLTKYAEAMGWQVSDTYTDAGFSGAKLERPAMQRLINDIENKAFDTVLVYRLDRLSRSVRDTLYLVKDVLTKNKIDFISLNESINTSSAMGSLFLTILSAINEFERENIKERMTMGKLGRAKSGKSMMWTKTAFGYYHNRKTGILEIVPLQATIVEQIFTDYLSGTSLTKLRDKLNESGHIGKDIPWSYRTLRQTLDNPVYCGYIKFKDSLFEGMHKPIIPYETYLKVQKELEERQQQTYERNNNPRPFQAKYMLSGVARCGYCGAPLRVVLGHKRKDGSRTMKYHCANRFPRKTKGVTVYNDNKKCDSGTYDLRNLENAVIDNLIGFQENNDSLLKIINGNNQPILDTSSLKKQISQIDKKIQKNSDLYLNDFITMDELKDRTDSLQAEKKLLKAKISEDKFNDGTDVFDRMKAQLGSIPINELSYDNKKKIVNNLVGKVDVTADNVDIIFKFQLA

SEQ ID NO: 3443 - protein, 485 aa, synthetic construct
MTKKVAIYTRVSTTNQAEEGFSIDEQVDRLTKYAEAMGWQVSDTYTDAGISGAKLERPAMQRLINDIENKAFDTVLVYKLDRLSRSVRDTLYLVKDVFTENKIDFISLNESIDTSSAMGSLFLTILSAINEFERENIKERMTMGKLGRAKSGKSMMWTKTAFGYYHNRKTGILEIVPLQATIVEQIFTDYLSGISLTKLRDKLNESGHIGKDIPWSYRTLRQTLDNPVYCGYIKFKDSLFEGMHKPIIPYETYLKVQKELEVRQQQTYERNNNPRPFQAKYMLSGMARCGYCGAPLRIVLGHKRKDGSRTMKYHCANRFPRKTKGITVYNDNRKCDSGAYDLSNLENTVIDNLIGFQKNNDSLLKIINGNNQPILDTSSFKKQISQIDKKIQKNSDLYLNDFITMDELKDRADSLQAEKKLLEAKISENKFNDRTDVFELVKTQLGSIPINELSYVNKKKIVNNLVSKVDVTADNVDIIFKFQLA

SEQ ID NO: 3444 - protein, 452 aa, synthetic construct
MKAAIYIRVSTREQAENYSIQAQTEKLTALCRSKDWDVYDIFIDGGYSGSNMNRPALNEMLSKLHEIDAVVVYRLDRLSRSQRDTITLIEEYFLKNNVEFVSLSETLDTSSPFGRAMIGILSVFAQLERETIRDRMVMGKIKRIEAGLPLTTAKGRTFGYDVIDTKLYINEEEAKQLRLIYDIFEEGQSITFLQKRLKELGFKVHTYNRYNSWLTNDLYCGYVSYKDKVHVKGIHEPIISEEQFYRVQEIFTRMGKNPNMNRDSASLLNSLVVCSKCGLGFVHRRKDTTSRGKKYHYRYYSCKTYKHIHELEKCGNKIWRADKLEELIINRVNNYSFASRNVDKEDELDSLNGKLKIEHAKKKRLFDLYINGSYEVGELDSMMSDIDAQINYYEGQIEANEGLRKNKKIQESLANLATVDYDSLEFREKQLYLKSLINKIYIDGEQVTIEWL

SEQ ID NO: 3445 - protein, 485 aa, synthetic construct
MTKKVAIYTRVSTTNQAEEGFSIDEQIDRLTKYAEAMGWQVSDTYTDAGFSGAKLERPAMQRLINDIENKAFDTVLVYKLDRLSRSVRDTLHLVKDVFTKNKIDFISLNESIDTSSAMGSLFLTILSAINEFERENIKERMTMGKLGRAKSGKSMMWTKTAFGYYHNRKTGILEIVPLQATIVEQIFTDYLSGISLTKLRDKLNESGHIGKDIPWSYRTLRQTLDNPVYCGYIKFKDSLFEGMHKPIIPYETYLKVQKELEERQQQTYERNNNPRPFQAKYMLSGMARCGYCGAPLKIVLGHKRKDGSRTMKYHCTNRFPRRTKGVTVYNDNKKCDSGTYDLSNLENTVIDNLIGFQENNDSLLKIINGNNQPILDTSGFKKQISQIDKKIQKYSDLYLNDFITMDELKDRTDSLQAERKLLRAKISENKFNDSTDVFELVKAQLGSIPINELSYDNKKKIVNNLVSKVDVTADNVDIVFKFQLA

SEQ ID NO: 3446 - protein, 469 aa, synthetic construct
MCYTTPVRAAVYLRISEDRSGEQLGVARQREDCLKLCDQRKWVPVEYLDNDASASTGKRRPAYEQMLADIAAGKIAAVVAWDLDRLHRRPIELEAFMSLADERRLALATVAGDVDLATPQGRLVARLKGSVAAHETEHKKARQRRAARQKAERGYPNWSKAFGYLSGPNGPEPDPRTAPLVEQAYADILAGASLGDVCRRWNDAGAFTITGRPWTTTALSKFLRKPRNAGLRAYKGARYGPVDRDAIVGKAQWSPLVDEATFWAAQAVLDAPGRAPGRKSVRRHLLTGLAGCGKCGNHLAGSYRTGGRVVYVCKACHGVAILADNIVPILYHIVAERLAMPDAVDLLRREIHDAAEAETIRLELETLYGELDRLAVERAEGLLTARQVKISTDIVNAKITKLQARQLDQERLRVLDGIPLGTPQVAGMIAKLSPDRFRAVLDVLAEVVVQPVGKSGRIFNPERVQVNWR

SEQ ID NO: 3447 - protein, 485 aa, synthetic construct
MTKKVAIYTRVSTTNQAEEGFSIDEQIDRLTKYAEAVGWQVSDTYTDAGISGAKLERPAMQRLINDIENKAFDTVLVYKLDRLSRSVRDTLYLVKDVFTRNKIDFISLSESIDTSSAMGSLFLTILSAINEFERENIKERMTMGKLGRAKSGKSMMWTKTAFGYYHNRKTGILEIVPLQATIVEQIFTDYLSGISLTKLRDKLNERGHIGKDIPWSYRTLRQTLDNPVYCGYIKFKDSLFEGMHKPIIPYETYLKVQKELEERQQQTYERNNNPRPFQAKYMLSGMARCGYCGAPLRVVLGHKRKDGSRTMKYHCANRFPRKTKDVTVYNDNKKCDSGTYDLSNLENTVIDNLIGLQENNDSLLKIIDGNNQPIPDTSSFKEQISQIDKKIQKNSDLYLNDFITMDELKDRTDGLQAEKKLLKAKINENKFNDSTDVFELVKTQLGSIPINELGYDDKKKIVNNLVSKVDVTADNVDIIFKFQLA

SEQ ID NO: 3448 - protein, 452 aa, synthetic construct
MKAAIYIRVSTREQVENYSIQAQTEKLTALCRSKDWDVYDIFIDGGYSGSNMNRPALNEMLSKLHEIDAVVVYRLDRLSRSQRDTITLIEEYFLKNNVEFVSLSETLDTSSPFGRAMIGILSVFAQLERETIRDRMVMGKIKRIEAGLPLTTAKGRTFGYDVIDTKLYINEEEAKQLQLIYDIFEEEQSITFLQKRLKELGFKVRTYSRYNSWLTNDLYCGYVSYKDKVHVKGIHEPIISEEQFYRVQEIFTRMGKNPNMNRDSASLLNNLVVCSKCGLGFVHRRKDTMRRGKKYHYRYYSCKTYKHTHELEKCGNKIWRADKLEELIINRVNNYSFASRNVDKEGELDSLSEKLKIEHAKKKRLFDLYINGSYNVSELDSMMNDIDAQINNYESQIEANEELKKNKKIQENLAGLATVDFDSLEFREKQLYLKSLINKIYIDGEQVIIEWQ

SEQ ID NO: 3449 - protein, 452 aa, synthetic construct
MKAAIYIRVSTREQVENYSIQAQTEKLTALCRSKDWDVYDIFIDGGYSGSNMNRPALSEMLSKLHEIDAVVVYRLDRLSRSQRDTITLIEEYFLKNNVEFVSLSETLDTSSPFGRAMIGILSVFAQLERETIRDRMVMGKIKRIEAGLPLTTAKGRTFGYDVIDTKLYINEEEAKQLRLIYDIFEEEQSITSLQRRLKRLGFKVRAYSRYNSWLTNDLYCGYVSYKDKVHVKGIHEPIISEEQFYRVQEIFTRMGKNPNMNRDSASLLSNLVVCSKCGLGFVHRRKDTMSRGKKYHYRYYSCKTYKHTHELEKCGNKIWRADKLEELVINRVNNYSFASRNVDKEDELDSLNEKLKIEHAKRKRLFDLYINGSYEVSELDSVMNEIDAQIDYYESQIEANEELKKDKKIQENLANLATVDYDSLEFREKQLYLKSLINKIYIDGEQVTIEWL

SEQ ID NO: 3450 - protein, 484 aa, synthetic construct
MTKKVAIYTRVSTTNQAEEGFSIDEQVDRLTKYAEAMGWQVSDAYTDAGFSGAKLERPAMQRLINDIENKAFDTVLVYKLDRLSRSVRDTLYLVKDVFTKNKIDFISLNESIDTSSAMGSLFLTILSAINEFERENIKERMTMGKLGRAKSGKSMMWTKTAFGYYHNRKTGILEVVPQATIVEQIFTDYLSGISLTKLRDKLNESGHIGKDIPWSYRTLRQTLDNPVYCGYIKFKGSLFEGMHKPIIPYETYLKVQKELEERQQQTYERNNNPRPFQAKYMLSGMARCGYCGAPLRIVLGHKRKDGSRTVKYHCANRFPRKTKGVTVYNDSKKCDSGTYDLSNLENTVINNLIGLQENNDSLLKIIDGNNQPILDTSSFKKQISQIDKKIQKISDLYLNDFITMDELKDRTNSLQAEKKLLKAKISENRFNDSTDVFELVKTQLGSIPINELSYDNKKRIVNNLVSKVDVTADNVDIVFKFQLA

SEQ ID NO: 3451 - protein, 469 aa, synthetic construct
MSYTTPVHAAVYLRISEDRSGEQLGVARQREDCLKLCDQRNWVPVEYLDNDVSASTGKRRPAYEQMLADITAGKIAAVVAWDLDRLHRRPIELEAFMSLADEKRLALATVAGDVDLATPQGRLVARLKGCVAAHETEHKKARQRRAARQKAERGHPNWSKAFGYLPGPNGPEPDPRTAPLVKQAYADILAGASLGDVCRQWNGAGAFTITGRPWTTTTLSKFLRKPRNAGLRAYKGARYGPVDRDAIVGKAQWSPLVNEATFWAAQAVLDAPGRAPGRKSVRRHLLTGLAGCGKCGNHLAGSYRTDGRVVYVCKACHGVTILADNIEPLLYHIVAERLAMPDAVDLLRRETHDAAEAETIRLELETLYGELDRLAVERAEGLLTARQVKICTDIVNAKITRLQARQLDQERLRVFDGIPLGTPQVAGVIAELSPDRFRAVLDVLAEVVVQPVGKSGRIFNPERVQVNWR

SEQ ID NO: 3452 - protein, 485 aa, synthetic construct
MTKKVAIYTRVSTTYQAEEGFSIDEQVDRLTKYAEAMGWQVSDTYTDAGFSGAKLERPAMQRLINDIENKAFDTVLVYKLDRLSRSVRDTLYLVKDVFTKSKIDFISLNECIDTSSAMGSLFLTILSAINEFERENIKERMTMGKLGRARSGKSMMWTKTAFGYYHNRKTGILEIVPLQATIVEQIFTDYLSGISLTKLRDKLNESGHIGKDIPWSYRTLRQTLDNPVYCGYIKFKGSLFEGTHKPIIPYETYLKVQKELEERQQQTYERNNNPRPFQAKYMLSGMARCGYCGAPLKIVLGHKRKDGSRTMKYHCANRFPRKTKGVTVYNGNKKCDSGTYDLSNLENTVIDNLIGFQENNDSLLKIINGNNQPILDTSSFKEQISQIDKKIQKNSDLYLNDFITMDELKDRTDSLRAEKKLLKAKISENRFNDSTDVFELVKTQLGSMPINELSYDNKKKIVNNLVSKVDVTADNVDIIFKFQLA

SEQ ID NO: 3453 - protein, 452 aa, synthetic construct
MKAAIYIRVSTREQVENYSIQAQTEKLTALCRSKDWDVYDIFIDGGYSGSNMNRPALNEMLSKLHEIDAVVVYRLDRLSRSQRDTITLIEEYFLKNNVEFVSLSETLDTSSPFGRAMIGILSVFAQLERETIRDRMVMGKIKRIEAGLPLTTAKGRTFGYDVIDTKLYINEEEAKQLQLIYDIFEEEQSITFLQKRLKELGFKVRTYNRYNNWLTNDLYCGYVSYKDKVHVKGIHEPIISEEQFYRVQEIFARMGKSPNMNRVSASLLNNLVVCSKCGLGFVHRRKDFMSRGKKYHYRYYSCKTYKHIHELEKCGNRIWRADKLEELIISRVNDYSLASRNVDKEDELDSLNEKLKIEHAKKKRLFELYINGSYEVSELDSMMNDIDAQINYYESQIEANEELKKNKKIQENLAHLATVDFDSLEFREKQLYLKSLINKIYIDGEQVTIEWL

SEQ ID NO: 3454 - protein, 485 aa, synthetic construct
MTKKVAIYTRVSTTSQAEEGFSIDEQIDRLTKYAEAMGWQVSDTYTDAGFSGAKLERPAMQRLINDIEDKAFDTVLVYKLDRLSRSVRDTLYLVKDVFTKNKIDFISLNESIDTSSAMGSLFLTILSAINEFERENIKERMTMGKLGRAKSGKSMMWTKTAFGYHHNRKTGILEIVPLQATIVEQIFTDYLSGISLTRLRDKLNESGHIGKDIPWSYRTLRQTLDNPVYCGYIKFKDSLFEGMHKPIIPYETYLKVQKELEERQQQTYERNNNPRPFQAKYMLSGMARCGYCGAPLRIVLGHKRKDGSRTMKYHCTNRFPRKTKGVTVYNDNKKCDSGTYDLSNLENTVIDSLVGFQENNDSLLKIINDNNQPILDTSSFKKQISQIDKKIQKNSDLYLNDFITMDELKDRTDSLQAEKKLLKAKICENKFNDSTDVFELVKTQLGSIPINELSYDNKKKIVNSLVSKVDVTADSVDIIFKFQLA

SEQ ID NO: 3455 - protein, 485 aa, synthetic construct
MTKKVAIYTRVSTTNQAEEGFSIDEQIDRLTRYAEAMGWQVSDTYTDAGLSGAKLERPAMQRLINDIENKAFDTVLVYKLDRLSRSVRDTLYLVKDVFTKNKIDFISLNESIDTSSAMGSLFLTILSAINEFERENIKERMTMGKLGRAKSGKSMMWTKTAFGYYHNRKTGILEIVPLQATIVEQIFTDYLSGISLTKLRDKLNESGHVGKDIPWSYRTLHQTLDNPVYCGYIKFKDSLFKGMHKPIIPYETYLKVQKELEERQRQTYERNNNPRPFQAKYMLSGMARCGYCGAPLRIVLGHKRKDGSRTMKYHCANRFPRKTKGVTVYNDNKKCDSGTYDLSNLENTVIDNLIGFQENNDSLLKIINCNNQPILDTSSFKEQISQIDKKIQKNSELYLNDFITMDELKDRTDSLQAEKKLLKAKISEDKSNDSTDVFELVKTQLGSIPINELSYDNKKKIVNSLVSKVDVTADNVDIIFKFQLA

SEQ ID NO: 3456 - protein, 452 aa, synthetic construct
MKAAIYIRVSTQEQVGNYSIQAQTEKLTALCRSKGWGVYDIFIDGGYSGSNMNRPALNEMLSKLHEIDAVVVYRLDRLSRSQRDTTTLIEEYFLKNNVEFVSLSETLDTSSPFGRAMIGILSVFAQLERETIRDRMVMGKIKRIEAGLPLTTAKGRTFGYDVIDTKLYINEEEAKQLQLIYDIFEEEQSITSLQKRLKKLGFKVRTYNRYNNWLTNDLYCGYVSYKDKVHVKGVHEPIISEEQFYRVQEIFTRMGKKPNMNRDSASLLNNLVVCSKCGLGFVHRSKDTMSRGKKYHYRYYSCKTYKHTHELEKCGNKIWRADKLEELVINRVNNYSFASCVVDKEDELDSLNEKLKIEHAKKKRLFDLYINGSYEVSELDSMMDDIDAQTNYYESQIEANEELKKNKKIQENLADLATVDFDSLEFREKQLYLKSLINKIYIDGEQVTIEWL

SEQ ID NO: 3457 - protein, 452 aa, synthetic construct
MKAAIYIRVSTREQVENYSIQAQTERLTALCRSKDWDVYDIFIDGGYSGSNMNRPALNEMLSKLHEIDAVVVYRLDRLSRSQRDTITLIEEYFLKNNVEFVSLSETLDTSSPFGRAMIGILSVFAQLERETIRDRMVMGKIKRIEAGLPLTTAKGRTFGYDVIDAKLYINEEEAKQLQLIYDIFEEEQSITSLQKRLKKLGFKVRTYSRYNNWLTNDLYCGYVSYKDKVHVKGIHEPVISEEQFYRVQEIFARMGKNPNMNRNSASLLNNLVVCSKCGLGFVHRRKDAMSRDKKYHYRYYSCKTYKHIHELEKCGNKIWRADKLEELIINRVNNYSLASRNVDKEDELDSLNEKLKIEHAKKRRLFDLYINGSYEVSELDSMMNDIDAQINYYESQIEANEELKKNKKIQENLAYLATVDFGSLEFREKQLYLKSLINKIYIDGEQVTIEWL

SEQ ID NO: 3458 - protein, 452 aa, synthetic construct
MKAAIYIRVSTREQVENYSIQAQTEKLTALCRSKDWDVYDIFIDGGYSGSNMNRPALNEMLSKLHEIDAVVVYRLDRLSRSQRDTITLIEEYFLKNNVEFVSLSETLDTSSPFGRAMIGILSVFAQLERETIRDRMVMGKIKRIEAGLPLTTAKGRTFGYDVVDTKLHINEEEAKQLRLIYDIFEEEQSITFLQKRLKKLGLKVRTYNRYISWLTNDLYCGYVSYKDKVHVKGIHEPIISEEQFYRVQEIFTRMGKNPNMNRDSASLLNNLVVCSKCGLGFVHRRKDTTSRGKKYHYRYYSCKTYKHTHELEKCGNKIWRADKLEELVIDRVNNYSFASRNVDKEDELASLNEKLKIEHAKKKRLFDLYINGSYEVSELDSMMNDIDAQINYYESQIEANEELKRNKKIQENLANLATVDYDSLEFREKQLYLKSLINKIYIDGELVTIEWL

SEQ ID NO: 3459 - protein, 469 aa, synthetic construct
MSYTTPVRAAVYLRISEDRSGEQLGVARQREDCLKLCGQRKWVPVEYLDNDVSASTGKRRPAYEQMLADIATGKIAAVVAWDLDRLHRRPVELEAFMSLADERRLALATVAGDVDLATPQGRLVARLKGSVAAHETEHKKARQRRAARQKAERGLPNWSKAFGYLPGPNGPEPDPRTAPLVKQAYADILAGASLGDVCRQWNDAGAFTITGRPWSTTALSKFLRKPRNAGLRAYKGARYGPVDRDAIVGKAQWGPLVDEATFWAAQAVLDAPGRAPGRKSVRRHLLTGLAGCGKCGNHLAGSYRTDGRVVYVCKACHGVTILADNIEPILYHVVAERLAMPDAVDLLRREIHDAAEAETIRLELKTLYGELDCLAVERAEGLLTARQVKISTDIVNAKITKLQARQLDQERLRVFDGIPLGTPQAAGKIAELSPDRFRAVLDVLAEVVVQPVGKSGRVFNPERVQVNWR

SEQ ID NO: 3460 - protein, 485 aa, synthetic construct
MTKKVAIYTRVSTTSQAEEGFSIDEQIDRLTKYAEAMGWQVSDTYTDAGLSGAKLERPAMQRLINDIETKAFDTVLVYKLDRLSRSVRDTLYLVKDVFTKNKIDFISLNESIDTSSAMGSLFLTILSAINEFERENIKERMTMGKLGRAKSGKSMMWTKTAFGYYHNRKTGILEIVPLQATIVEQIFTDYLSGISLTKLRDKLNESGHIGKDIPWSYRTLRQTLGNPVYCGYIKFKDSLFEGMHKPIIPYETYLKAQKELEERQQQTYERNNNPRPFQAKYMLSGMARCGYCGAPLKIVLGHKRKDGSRTMKYHCANRFPRKTKGVTVYNDNKKCDSGAYDLSNLENTVIDNLVGFQENNDSLLKIINGNNQPILDTSSFKKQIGQIDKKIQKNSDLYLNDFITMDELKDRTDSLQAEKKLLKAKISGNKLNDNTDVLELVKAQLGSIPINELSYDNKKKIVNNLVSKVDVTADNVDIVFKFQLA

SEQ ID NO: 3461 - protein, 452 aa, synthetic construct
MKAAIYIRVSTREQVENYSIQAQTEKLTALCRSKDWDVYDIFIDGGYSGSNMNRPALNDMLSKLHEIDAVVVYRLDRLSRSQRDTITLIEEYFLKNNVEFVSLSETLDTSSPFGRAMIGILSVFAQLERETIRDRMVMGKIKRVEAGLPLTTAKGRTFGYDVIDTKLYINEEEAKQLQLIYDIFEEEQSITFLQKRLKELGLKVRSYNRYNNWLTNDLYCGYVSYKDKVHVKGIHEPIISEDQFYRVQEIFTRMGKNPNMNRDSASLLNNLVVCSKCGLGFVHRRKDTTSRGKKYHYRYYSCKTYKHPHELEKCGNKIWRADKLEELIINRVSNYSFASRNADIEDELDGLNEKLKIEHAKKRRLFDLYLSGSYEVSELDSMMNDIDAQINYYESQIEANEELKKNKKIQENLANLASVDYDSLEFREKQLYLRSLINKIYIDGEQVTIEWL

SEQ ID NO: 3462 - protein, 485 aa, synthetic construct
MTKRVAIYTRVSTTNQAEEGFSIDEQIDRLTKYAEAMGWQVSDTYTDAGLSGAKLERPAMQRLINDIENKAFDTVLVYKLDRLSRSVRDTLYLVKDVFTKNKIDFISLNESIDTSSAMGSLFLTILSAINEFERENIKERMTMGKLGRAKSGKSMMWTKTAFGYSHNRKTGILEVVPLQATIVEQIFTDYLSGISLTKLRDKLNESGHIGKDIPWSYRTLRQTLDNPVYCGYIKFKGSLFEGMHKPIIPYETYLKVQKELEERQQQTYERNNNPRPFQAKYMLSGMARCGYCGAPLRIVLGHKRKDGSRTMKYHCANRLPRKTKGVTVYNDNKRCDSGTYDLSNLENTVIDNLIGFQENDDSLLKIINGNNQPILDTSSFKKQISQIDKKIQKNSDLYLNDFITMDELKDRTDSLQAEKKLLEAKISENKLNDSADVFELVKTQLGSIPINELSYDNKKKIVNNLVSKVDVTADNVDIIFKFQLA

SEQ ID NO: 3463 - protein, 485 aa, synthetic construct
MTRKVAIYTRVSTTNQAEEGFSIDEQIDRLTKYAEAMGWQVSDTYTDAGFSGAKLERPAMQRLINDIENKAFDTVLVYKLDRLSRSVRDTLYLVKEVFTKNKIDFISLNESINTSSAMGSLFLTILSAINEFERENIKERMTMGKLGRAKSGKSMMWTKTAFGYYHNRKTGILEIVPLQATIVEQIFTDYLSGISLTKLRDKLNESGHIGKDIPWSYRTLRQTLDNPVYCGYIKFKDSLFEGMHKPIIPYETYLKVQKELEERQQQTYERNNNPRPFQAKYMLSGMARCGYCGAPLRIALGHKRKDGSRTMKYHCANRFPRKTKGVTVYNDNKKCDSGTYDLSNLENTVIDNLIGFQKNNDSLLKIINGNNQPILDTSSFKKQISQIDKKIQKNSDLYLNDFITMDELKDRTDSLQAEKKLLKAKISENKFNDSTDVFELVKTQLGSIPINELSYDDKKKIVNNLVSKVDVTADNVDIIFKFRLA

SEQ ID NO: 3464 - protein, 452 aa, synthetic construct
MKAAIYIRVSTREQVENYSIQAQTEKLTALCRSKDWDVYDIFIDGGYSGSNMNRPALNEMLSKLHEIDAVVVYRLDRLSRSQRDTITLIEEYFLKNDVEFVSLSETLDTSSPFGRAMIGILSVFAQLERDTIRDRMVLGKIKRIEAGLPLTTAKGRTFGYDVIDTRLYINEEEAEQLQLIYDIFEEEQSITFLQKRLKKLGYKVRTYSRYNSWLTNDLYCGYVSYKDKVHVKGIHEPIISEEQFYRVQEILTRMGKNPNMNRDSASLLNNLVVCSKCGLGFVHRRKDTTSRGKKYHYRYYSCKTYKHTHELEKCGNKIWRADKLEELIINRVNNYSFAGRNEDKEDELDSLNEKLKIEHAKKKRLFDLYISGSYEVSELDSMMSDIDAQISYCESQIEANEELRKNKKIQENLANLATMDYDSLEFREKQLYLKSLINKIYIDGEQVTIEWL

SEQ ID NO: 3465 - protein, 452 aa, synthetic construct
MKAAIYIRVSTREQVENYSIQAQTEKLTALCRSKDWDVYDIFIDGGYSGSNMNRPALNEMLSKLHEIDAVVVYRLDRLSRSQRDTITLIEEYFLKNNVEFVSLSETLDTSSPFGRAMIGILSVFAQLERETIRDRMVMGKIKRIEAGLPLTTAKGRTFGYDVIDTKLYINEEEAKQLQLIYDIFEEEQSITFLQKRLKKLGFKVRTYNCYNNWLTNDLYCGYVSYKDKVHVKGIHEPIVSEEQFYRVQEIFARMGKNPNMNRDSASLLNNLVVCSKCGLGFVHRRKDAMSRDKKYHYRYYSCKTYKHIHELEKCGNKIWRADELEELIINRVNNYSFASRNADKEDELDSLNEKLKTEHAKKKRLFDLYINGSYEVSELDSMMNDIDAQISYYESQIEANEELKKNKKIREDLAYLATVDFDSLEFREKQLYLKSLINKIYIDGDQVTIEWL

SEQ ID NO: 3466 - protein, 485 aa, synthetic construct
MTKKVAIYTRVSTTNQAEEGFSIDEQIDRLTKYAEAMGWQVSDTYTDAGSSGAKLERPAMQRLINDIENKAFDTVLVYKLDRLSRSVRDTLYLVKDVFTKNKIDFISLNESIDTSSAMGSLFLTILSAINEFERENIKERMTMGKLGRAKSGKSMMWTKTAFGYYHNRKTGILEIVPLQAAIVEQIFTDYLSGISLTKLRDKLNESGHIGKDIPWSYRTLRQTLDNPVYCGYIRFKDSLFEGMHKPIIPYETYLKVQKELEERQRQTYERNNNPRPFQAKYMLSGMARCGYCGAPLRIVLGHRRKDGSRTMKYHCANRFPRKTKGVTVYNDNKKCDSSTYDLSNLENTVIDTLTGLQENNDSLLRIINGNNQPILDTSSFDKQISQIDKKIQKNSGLYLNDFITMGELKDRTDSLQAEKRLLKAKISENKFNDNTDVFELVKTQLGSIPINELSYDNKKKVVNNLVSKVDVTADNVDIIFKFQLA

SEQ ID NO: 3467 - protein, 485 aa, synthetic construct
MTKKVAIYTRVSTTNQAEEGFSIDEQVDRLTKYAEAMGWQVSDTYTDAGSSGAKLERPAMQRLINDIENKAFDTVLVYKLDRLSRSVRDTLYLVKDVFTKNKIDFISLNESIDTSSAMGSLFLTILSAINEFERENIKERMTMGKLGRAKSGKSMMWTKTAFGYYHNRKTGILEIVPLQATIVEQIFTDYLSGISLTKLRDKLNERGHIGKDIPWSYRTLRQTLDNPVYCGYIKFKDSLFEGMHKPIIPYETYLKVQKELEERQQQTYERNNNPRPFQAKYMLSGMARCGYCGAPLRIVLGHKRKDGSRTMKYHCANRFPRKTKGVTVYNDNKKCDSGSYDLSNLENTVIDSLIGFQENNDSLLKIINGNNQPILDTSSFEEQISQIDKKIQKNSDLYLNDFITMDELKDRTNSLQAERRLLKAKISENKSNDSTDVFELVKTQLGSIPINELSYDNKKKIVNNLVSKVDVTADSVDIIFKFQLT

SEQ ID NO: 3468 - protein, 452 aa, synthetic construct
MKAAIYIRVSTREQVENYSIQAQTEKLTALCRSKDWDVYDIFIDGGYSGSNMNRPALNEMLSKLHEIDAVVVYRLDRLSRSQRDTITLIEEYFLKNNVEFVSLSETLDTSSPFGRAMIGILSVFAQLERETIRDRMVMGKIKRIEAGLPLTTAKGRTFGYDVIDTKLYINEEEAKQLRLIYDIFEEEQSITSLQKRLKKLGFKVRTYSRYNNWLTNDLYCGYVSYKDKVHVKGIHEPIISEEQFYRVQEIFTRMGKNPNMNRDSASLLSNLVVCSKCGLGFVHRRKDTMSRGKKYHYRYYSCKTYKHTHELEKCGNKIWRADKLEELIINRVNNYSFASRNVDEEDELDGLNEKLKIEHAKKKRLFDLYINGSYNVSELDSMMNDIDAQINYYESQIEANGELKKNKKIQENLADLATVDFDSLEFREKQLYLKSLINKIYIDGEQVTIVWL

SEQ ID NO: 3469 - protein, 452 aa, synthetic construct
MKAAIYIRVSTQEQVGNYSIQAQTEKLTALCRSKDWDVYDIFVDGGYSGSNMNRPALNEMLSKLHEIDAVVVYRLDRLSRSQRDTTTLIEEYFLKNNVEFVSLSETLDTSSPFGRAMIGILSVFAQLERETIRDRMVMGKIKRIEAGLPLTTAKGRTFGYDVIDTKLYINEEEAKQLRLIYDIFEEEQSITFLQKRLKKLGFKVRTYNRYNSWLTNDLYCGYVSYKDKVHVRGIHEPIISEEQFYRVQEIFTRMGKNPNMNRDSASLLNSLVVCSKCGLSFVHRSKDTMSRGKKYHYRYYSCKTYKHTHELEKCGNKIWRADKLEELIINRVNNYSCASCDVDKEDELDSLNEELRTEHAKKKRLFDLYINGSYEVSELDSMMNDIDAQINYYESQIEANEELKKNKKIQENLADLATVDFDSLEFREKQLYLKSLINKIYIDGEQVTIEWL

SEQ ID NO: 3470 - protein, 452 aa, synthetic construct
MKAAIYIRVSTQEQVENYSIQAQTEKLTALCRSKDWDVYDIFIDGGYSGSNMNRPALNDMLSKLHEIDAVVVYRLDRLSRSQRDTITLIEEYFLKNNVEFVSLSETLDTSSPFGRAMIGILSVFAQLERETIRDRMVMGKIKRIEAGLPLTTAKGRTFGYDVIDTKLYINEEEAKQLRLIYDIFEEEQSITFLQKRLKELGFKVRTYNCYNNWLTNDLYCGYVSYKDKVHVKGIHEPIISEEQFYRVQEIFTRMGKSPNMNRDSASLLNNLVVCSKCGLGFVHRRKDTMSRGKKYHYRYYSCKTYKHIHELEKCGNKIWRADKLEELIINRVNNYSFASRNVDKEDELDSLNEKLKIEHAKKKRLFDLYINGSYEVSELDSMMNDIDAQINYYESQIEANEELKKSTKIRENLADLATVDYDSLGFREKRLYLKGLINKIYIDGEQVTIEWL

SEQ ID NO: 3471 - protein, 452 aa, synthetic construct
MKAAIYIRVSTREQVENYSIQAQTEKLTALCRSKDWDVYDIFVDGGYSGSNMNRPALNEMLSKLHEIDAVVVYRLDRLSRSQRDTITLIEEYFLKNNVEFVSLSETLDTSSPFGRAMIGILSVFAQLERETIRDRMVMGKIKRIEAGLPLTTAKGRTFGYDVIDTKLYINEEEAKQLQLIYDIFEEEQSITFLQKRLKKLGFKVHTYNRYNNWLTNDLYCGYVSYKDKVHVKGIHEPIISEEQFYRVQEIFTRMGKNPNMNRDSASLLNNLVVCSKCGLGFVHRRKDAMSRDKKYHYRYYSCKTYKYIHELEKCGNKIWRADKLEELIINRVNNYSLASRNVDKEDELDSLNEKLKIEHAKKKRLFDLYINGSYEVSELDSMMSDIDAQINYYESQIEANEELKKNKKIQENLADLATVDFDSLEFREKQLFLKSLINKIYIDGEQVTIEWL

SEQ ID NO: 3472 - protein, 452 aa, synthetic construct
MKAAIYIRVSTREQVENYSIQAQTEKLTALCRSKDWDVYDIFVDGGYSGSNMNRPALNEMLSKLHEIDAVVVYRLDRLSRSQRDTITLIEEYFLKNNVEFVSLSETLDTSSPFGRAMIGILSVFAQLERETIRDRMVMGKIKRIEAGLPLTTAKGRTFGYDVIDTKLYINEEEAKQLRLIYDIFEEEQSITFLQKRLKKLGFKVRTYNRYNSWLTNDLYCGYVRYKDKVHVKGIHEPIISEEQFYRVQEIFTRMGKNPNMNRDSASLLNNLVVCSKCGLGFVHRRKDTMSRGKKYHYRYYSCKTYKHTHELEKCGNKIWRADKLEELIINRVNNYSFAGRNVDKEDELVSLNEKLKIEHARKKRLFDLYINGSYEVSELDSMMNGIDAQISYYESQIEANEELKKNKKIQESLANLATVDYDSLEFREKQLYLKSLINKIYIDGEQVTIEWL

SEQ ID NO: 3473 - protein, 485 aa, synthetic construct
MTKKVAIYTRVSTTNQAEEGFSIDEQIDRLTKYAEAMGWQVSDTYTDAGLSGAKLERPAMQRLINDIENKAFDTVLVYKLDRLSRSVRDTLYLVKDVFTKNKIDFVSLSESIDTSSAMGSLFLTILSAINEFERENIKERMTMGKLGRARSGKSMMWTKTAFGYYHNRKTGILEIVPLQATIVEQIFTDYLSGISLTKLRDKLNESGHIGKDIPWSYRTLRQTLDNPVYCGYIKFKDSLFEGMHKPIIPYETYLKVQKELEERQQQTYERNNNPRPFQAKYMLSGMARCGYCGAPLRVVLGHKRKDGSRTMKYHCANRFPRKTKGVTVYNDNKKCDSGTYDLSNLENTVIDNLISFQENNDNLLKIIGGNNQPILDTSSFKKRISQIDKKIQKNSDLYLNDFVTMDELKDRTDSLQAEKKLLKAKISENKFNDGTDVFELVKTQLGSIPINELSYDDKKKIVNNLVSKVDVTADNVDIIFKFQLA

SEQ ID NO: 3474 - protein, 469 aa, synthetic construct
MSYTTPVRAAVYLRISEDRSGEQLGVARQREDCLKLCGQRKWVPVEYLDNDVSASTGKRRPAYEQMLADIAAGKVAAVVAWDLDRLHRRPVELEAFMSLADEKRLALATVAGDVDLATPQGRLVARLKGCVAAHETEHKKARQRRAARQKAERGLPNWSKAFGYLPGPNGPEPDPRTAPLVRQAYADILAGASLGDVCRQWNDAGAFTITGRPWTTTTLSKFLRKPRNAGLRAYKGARYGPVDRDAIVGKAQWSPLVDEATFWAAQAVLDAPGRAPGRKSVRRHLLTGLAGCGKCGNHLAGSYRTDGQVVYVCKACYGVAILADNIVPILYHVVAERLAMPDAVDLLRHEIHDAAEAEAIRLELETLYGELDRLAVERAEGLLTARQVKISTDIVNAKITKLQARQLDQERLRVFNGIPLGTPQVAGMIAELSPDRFRAVLDVLAEVVVQPVGKGGRTFSPERVQVNWR

SEQ ID NO: 3475 - protein, 452 aa, synthetic construct
MKAAIYIRVSTREQVENYSIPAQTEKLTALCRSKDWDVYDIFIDGGYSGSNMNRPALNEMLSKLHEIDAVVVYRLDRLSRSQRDTITLIEEYFLKNNVEFVSLSETLDTSSPFGRAMIGILSVFAQLERETIRDRMVMGKIKRIEAGLPLTTAKGRTFGYDVIDTKLYINEEEAKQLQLIYDIFEEEQSITSLQKRLKKLGFKVRTYNRYNNWLTNDLYCGYVSYKDKVHVKGIHEPIISEEQFYRVQEIFTRMGKNPNMNRDSASLLNGLVVCSKCGLSFVHRRKDAMSRDKKYHYRYYSCKTYKHIHELEKCGNKIWRADKLEELIIDRVNNYSLASRNVDKEDELGSLNEKLKAEHAKKKRLFDLYINGSYEVSELDSMMNDIDAQISYYESQIEASEGLRKNKKIQENLANLATVDFDSLEFREKQLYLKSLINKIYIDGEQVTIEWL

SEQ ID NO: 3476 - protein, 469 aa, synthetic construct
MSYTTPVRAAVYLRISEDRSGEQLGVARQREDCLKLCDQRKWVPVEYLDNDVSASTGKRRPAYEQMLADITAGKIAAVVAWDLDRLHRRPVELEAFMSLADEKRLALATVAGDVDLATPQGRLVARLKGCVAAHETEHKKARQRRAARQKAERGHPNWSKAFGYLPGPNGPEPDPRTAPLVKQAYADILAGASLGDVCRQWNDAGAFTITGRPWTTTTLSKFLRKPRNAGLRAYRGARYGPVDRDAIVGKAQWSPLVDEAAFWAAQAVLDAPGRAPGRKSVRRHLLTGLAGCGKCGNHLAGSYRTDGQIVYVCKACHGVSILAVNIEPILYHVVAERLAMPDAVDLLRREIHDAAEAETIRLELVTLYGELDRLAVERAEGLLTARQVKISTDVVNAKIAKLQARQLDQERLRVFDGIPLGTTQVAGMIAELSPDRFRAVLDVLAEVVVQPVGKSGRIFNPERVQVNWR

SEQ ID NO: 3477 - protein, 469 aa, synthetic construct
MSYTTPVRAAVYLRISEDRSGEQLGVARQREDCLKLCDQRKWVPVEYLDNDVSASTGKRRPAYEQMLADITAGKIAAVVAWDLDRLHRRLVELEAFMSLADEKRLALATVAGDVDLATPQGRLVARLKGSVAAHETEHKKARQRRAARQKAERGHPNWSKAFGYLPGPNGPEPDPRTAPLVKQAYTDILAGASLGDVCRQWNNAGASTITGRPWTTTTLSKFLRKPRNAGLRAYKGASYGPVDRDAIVGKAQWSPLVDEATFWAAQAVLDAPGRAPGRKSVRRHLLTGLAGCGKCGNHLAGSCRTDGRVVYVCKACHGVTILADNIEPILYHIVAERLAMPDAVDLLRREIHDVAEAETIRLELETLYGELDRLAVERAEGLLTARQVKISTDIVNAKITKLQARQQDQERLRVLDGIPLGTPQVVGMIAELSPDRFRAVLDVLAEVVVQPVGKSGRIFSPERVQVNWR

SEQ ID NO: 3478 - protein, 469 aa, synthetic construct
MSYTTPVRAAVYLRISEDRSGEQLGVARQREDCLKLCGQRKWVPVEYLDNDVSASTGKRRPAYEQMLADITAGKIAAVVAWDLDRLHRRPIELEAFMSLADEKRLALATVAGDVDLATPQGRLVARLKGCVAAHETEHKKARQRRAARQKAERGHPNWSKAFGYLPGPNGPEPDPRTAPLVKQAYADILAGASLGDVCRQWNDAGAFTITGRPWATTTLSKFLRKPRNAGLRAYKGARYGPVDRDAIVGKAQWSPLVDEATFWAAQAVLDAPGRAPGRKSVRRHLLTGLAGCGKCGNHLAGSYRTDGRVVYVCKACHGVAILADNIEPILYHIVAERLAMPDAVDLLRREIHDAAEAETIRQELEALYGELDRLAIERAEGLLTARQVKISTDIVNAKITKLQARQLDQARLRVFDGIPLGTPQVAGTIAELSPDRFRAVLDVLAEVVVQPVGRSGRIFNPERVQVNWR

SEQ ID NO: 3479 - protein, 452 aa, synthetic construct
MKAAIYIRVSTQEQVGNYSIQAQTEKLTALCRSKDWDVYDIFIDGGYSGSNMNRPALNEMLSKLHEIDAVVVYRLDRLSRSQRDTTTLIEEYFLKNNVEFVSLSETLDTSSPFGRAMIGILSVFAQLERETIRDRMVMGKIKRIEAGLPLTTAKGRTFGYNVIDTKLYINEEEAKQLQLIYDIFEEEQSITSLQKRLKKLGFKVRTYNRYNNWLTNDLYCGYVSYKDKVHVKGIHEPIISEEQFYRVQEIFTRMGKNPNMNRDSASLLSNLVVCSKCGLGFVHRSKDTMSRGKKYHYRYYSCKTYKHTHELEKCGNKTWRADKLEELIINRVNNYSFASRNVGREDELDSLHEKLKIEHAKKKRLFDLYINGGYEVSELDSMMSDIDAQINYYESQIEANEELRKTKKIQENLADLATVDFDSLEFREKQQYLKSLINKIYIDGEQVTIEWL

SEQ ID NO: 3480 - protein, 452 aa, synthetic construct
MKAAIYIRVSTREQVENYSIQAQTEKLTALCRSKDWDVYDIFIDGGYSGSNMNRPALNEMLSKLHEIDAVVVYRLDRLSRSQRDTITLIEEYFLKNNVEFVSLSETLDTSSPFGRAMIGILSVFAQLERETIRDRMVMGKIKRIEAGLPLTTAKGRTFGYDVIDTKLYINEEEAKQLRLIYDIFEEEQSITFLQKRLKKLGFKVHTYSRYNNWLTNDLYCGYVSYKDRVHVKGIHEPIISEEQFYRVQEIFTRMGKNPNMNRESASLLNNLVVCSKCGLGFVHRRKDAMSRDKKYHYRYYSCKTYKHIHELEKCGNKIWRADKLEELIIDRVNSYSLASRNVDKEDELGSLNEKLKIEHAKKKRLFDLYINGSYEVGELDSMMKDIDAQINYYGSLIEANEELKKNKKIQENLAELATVDFDSLEFREKQLYLKSLINKIYIDGEQVTIEWL

SEQ ID NO: 3481 - protein, 485 aa, synthetic construct
MTKKVAIYTRVSTTSQAEEGFSIDEQIDRLTKYTEAMGWQVIDTYTDAGLSGAKLERPAMQRLINDIENKAFDTVLVYKLDRLSRSVRDTLYLVKDVFTKNKIDFISLNESIDTSSAMGSLFLTILSAINEFERENIKERMTMGKLGRAKSGKSMMWTKTAFGYYHNRETGILEIVPLQAAIVEQIFTDYLSGISLTKLRDKLNESGHIGKDIPWSYRTLRQTLDNPVYCGYIKFKGSLFEGMHKPIIPYETYLKVQKELEERQQQTYERNNNPRPFQAKYMLSGVARCGYCGAPLRIVLGHKRRDGSRTMKYHCANRFPRKTKGVTVYNDNKKCDSGTYDLSNLENTVIDILIGFQENNDSLLKIINGNNQPIPDTSSFKKQISQIDKKIQKNSDLYLNDFISMDELKDRTDSLQAEKKLLKAKISGDKFNDSTDVFELVKTQLGSIPINELGYDDKKKIVNSLVSKVDVTADNVDIIFKFQLA

SEQ ID NO: 3482 - protein, 485 aa, synthetic construct
MTKKVAIYTRVSTTSQAEEGFSIDEQIDRLTKYAEAMGWQVSDTYTDAGFSGAKLERPAMQRLINDIENKAFDTVLVYKLDRLSRSVRDTLYLVKDVFTKNKIDFISLNESIDTSSAMGSLFLTILSAINEFERENIKERMTMGKLGRAKSGKSMMWAKTAFGYYHNRKTGILEIVPLQATIVEQIFTDYLSGISLTKLRDKLNESGHIGKDIPWSYRTLRQTLDNPVYCGYIKFKDSLFRGMHKPIISYETYLKVQKELEERQQQTYERNNNPRPFQAKYMLSGMARCGYCGAPLRIVLGHKRKDGSRTMKYHCANRFPRKTKGVTVYNDNKKCDSGAYDLSNLENTVIDSLIGFQENNDSLLKIIGGNNQPILDTSSFKKQISQIDKKIQKNSDLYLNDFITMDELKDRTDSLQAEKKLLKAKISENKLNDSTDVFELVKTQLGSIPINELSYDNKKKIVNNLVSKVDVTADNVDIIFKFQLA

SEQ ID NO: 3483 - protein, 452 aa, synthetic construct
MKAAIYIRVSTREQVENYSIQAQTEKLTALCRSKDWDVYDIFIDGGYSGSNLSRPALIEMLSKLHEIDAVVVYRLDRLSRSQRDTITLIEEYFLKNNVEFVSLSETLDTSSPFGRAMIGILSVFAQLERETIRDRMVMGKIKRVEAGLPLTTAKGRTFGYDVIDTKLYINEEEAKQLQLIYDIFEEERSITSLQRRLKRLGFKVRTYNRYNSWLTNDLYCGYVRYKDKVHVKGIHEPIISEEQFYRVQEIFTRMGKNPNMNRDSASLLNNLVVCSKCGLSFVHRRKDTMSRGKKYHYRYYSCKTYKHTHELEKCGNKIWRADKLEELIIDRVNNYSLASRNVDKEDELDSLNEKLKIEHAKKRRLFDLYINGSYEVSELDSMMNAIDARINYYESQIEANEELKKNKKIQENLAGLATVDFDSLEFREKQLYLKSLINKIYIDGEQVTIEWL

SEQ ID NO: 3484 - protein, 470 aa, synthetic construct
MCYTTPVRAAVYLRISEDRSGEQLGVARQREDCLKLCDQRKWVPVEYLDNDVSASTGKRRPAYEQMLADITAGKITAVVAWDLDRLHRRPIELEAFMSLADEKRLALATVAGDVDLATPQGRLVARLKGSVAAHETEHKKARQRRAARQKAERGHPNWSRAFGYLPGPNGPEPDPRTAPLVKQAYADILAGASLGDVCRQWNGAGAFTITGRPWTTTTLSKFLRKPRNAGLRAYKGARYGPVDRDAIVGKARWSPLVDEATFWAAQAVLDAPGRAPGRKSVRRHLLTGLAGCGKCGNHLAGSYRTDGRVVYVCKACHGVAILADNIEPILYHIVAERLAMPDAVGLLRREIHDAAEAETIRLELETLYGELDRLAVERAEGLLTARQVKISTDIVNAKITKLQARQLDQERLRVLGGIPLGTPQVAGVIAGLSPDRFRAVLDVLAEVVVQPVGKSGRIFNPERVRVNWRE

SEQ ID NO: 3485 - protein, 469 aa, synthetic construct
MSYTTPVRAAVYLRISEDRSGEQLGVARQREDCLKLCDQRKWEPVEYLDNDVSASTGKRRPAYEQMLADITAGKIAAVVAWDLDRLHRRPIELEAFMSLADEKRLALATVAGDVDLATPQGRLVARLKGSVAAHETEHKRARQRRAARQKAERGLPNWSKAFGYLPGPNGPEPDPRTAPLVKQAYADILAGASLGDVCRQWNDAGASTITGRPWSTTALSKFLRKPRNAGLRAYKGARYGPVDRDAIVGRAQWSPLVDEATFWAAQAVLEAPGRAPGRKSVRRHLLTGLAGCGKCGNHLAGSYRTDGRVVYVCKACHGVAILADNIEPILYHIVAERLAMPDAVDLLRRETHDAAEAETIRLELETLYGELDRLAVERAEGLLTARQVKISTDIVNAKITKLQARQLDQERLRVLDGIPLGTPQVAGMIAELSPDRFRAVLDVLAEVVVQPVGKSGRIFNPERVQVNWR

SEQ ID NO: 3486 - protein, 452 aa, synthetic construct
MKAAIYIRVSTREQVENYSIQAQTEKLTALCRSKDWDVYDIFVDGGYSGSNMNRPALNEMLGKLHEIDAVVVYRLDRLSRSQRDTITLIEEYFLKNNVEFVSLSETLDTSSPFGRAMIGILSVFAQLERETIRDRMVMGKIKRIEAGLPLTTAKGRTFGYDVIDAKLYINEEEAKQLQLIYDIFEEEQSITFLQKRLKKLGFKVRTYNRYNNWLTNDLYCGYVSYKDKVHVKGIHEPIISEEQFYRVQEIFTRMGKNPNMNRDSASLLNNLVVCSKCGLGFVHRRKDAMSRDKKYHYRYYSCKTYKHIHELEKCGNKIWRADKLEELVINRVNSYSVASRNVDKKDELDTLNEKLKIEHAKKKRLFDLYINGSYEVGELDSMMNDIDAQINYYESQIEANEELKRNKKVQENLAYLATVDFESLEFREKQLYLKSLINKIYIDGEQVTIEWL

SEQ ID NO: 3487 - protein, 469 aa, synthetic construct
MSYTTPVRAAVYLRISEDRSGEQLGVARQREDCLELCGQRKWVPVEYLDNDVSASAGKRRPAYDQMLADITAGKIAAVVAWDLDRLHRRPIELEAFMSLADEKRLALATVAGDVDLATPQGRLVARLKGCVAAHETEHKKARQRRAARQKAERGHPNWSKAFGYLPGPNGPEPDPRTAPLVKQAYTDILAGASLGDVCRQWNDAGAFTITGRPWTTTTLSKFLRKPRNAGLRAYKGARYGPVDRDAIVGKAQWSPLVDEGTFWAAQAVLDAPGRAPGRKSVRRHLLTGLAGCGKCGNHLAGSYHTNGRVVYVCKACHGVSILADNIEPILYHIVAERLAMPDAVDLLRREVHDAAEAEAIRLELETLYGELDRLAVERAEGLLTARQVKISTDIVNAKITKLQARQLDQERLRVFDGIPLGTPQVAGMIAELSPDRFRAVLDVLAEVVVQPVGKSGRISNPERVQVNWR

SEQ ID NO: 3488 - protein, 452 aa, synthetic construct
MKAAIYIRVSTQEQVENYSIQAQTEKLTALCRSKDWDVYDIFIDGGYSGSNMNRPALNEMLSKLHEIDAVVVYRLDRLSRSQRDTTTLIEEYFLKNNVEFVSLSETLDTSSPFGRAMIGILSVFAQLERETIRDRMVMGKIKRIEAGLPLTTAKGRTFGYDVIDTKLYINEEEAKQLQLIYDIFEEEQSITSLQKRLKKLGFKVRTYNRYNNWLTNDLYCGYVSYKDKVHVKGIHEPIISEEQFYRVQEIFTRIGRNPNMNRDSASLLNNLVVCGKCGLGFVHRSKDTMSRGKKYHYRYYSCKTYKHTHELEKCGNKTWRADKLEELIIIRVNNYSFASRNVDKEDELDSLNEKLKIEHAKKRRLFDLYVNGSYEVSELDSMMNDIDAQINYYESQIGAIEGLKKNRKIQETLADLATVDFDSLEFREKQLYLKSLINKIYIDGEQVTIEWL

SEQ ID NO: 3489 - protein, 452 aa, synthetic construct
MKAAIYIRVSTREQVENYSIQAQTEKLTALCRSKDWDVYDIFIDGGYSGSNMNRPALNEMLSKLHEIDAVAVYRLDRLSRSQRDTITLIEEYFLKNNVEFVSLSETLDTSSPFGRAMIGILSVFAQLERETIRDRMVMGKIKRIEAGLPLTTAKGRTFGYDVIDTKLYINEEEAKQLRLIYDIFEEERSITSLQKRLKKLGFKVRTYNRYNNWLTNDLYCGYVSYKDKVHVKGIHEPIISEEQFYRVQEIFARMGKNPNMNRNSASLLNNLVVCSKCGLGFVHRRKDIMSRGKKYHYRYYSCKTYKHIHELEKCGNKIWRADKLEELIINRVNNYSFASRNADKEDELDSLNEKLRIEHAKKKRLFDLYVNGSYEVSELDSMMNDIDAQINYYESQIEANEELKKNKKIQENLADLATVDFDSLEFREKQLYLKSLINKIYIDGEQVTIEWL

SEQ ID NO: 3490 - protein, 469 aa, synthetic construct
MSYTTPVRAAVYLRISEDRSGEQLGVARQREDCLKLCGQHKWVPVEYLDNDVSASTGKRRPAYEQMLADITAGKIAAVVAWDLDRLHRRPIELEAFMSLADEKRLALATVAGDVDLATPQGRLVARLKGSVAAHETEHKKARQRRAARQKAERGLPNWSKAFGYLPGPNGPEPDPRTAPLVKQAYADILAGASLGDVCRQWNDAGAFTITGRPWTTTTLSKFLRKPRNAGLRAYKGARYGPVDRDAIVGKAQWSPLVDEATFWAAQAVLDAPGRAPGRKSVRRHLLTGLAGCGKCGNHLAGSYRTDGKVVYVCKACHGVAILADNIEPILYHIVAERLAMPGAVDLLRREIYDAAEAETVRLELETLHGELDRLAVERAEGLLTARQVKIGTDIVNAKITKLQARQLDQERLRVFNGIPLGTPQVAGVIAELSPDRFRAVLDVLAEVVVQPVGKGGRIFSPERVQVNWR

SEQ ID NO: 3491 - protein, 452 aa, synthetic construct
MKAAIYIRVSTREQVENYSIQAQTEKLTALCRSKDWDVYDIFVDGGYSGSNMNRPALNEMLSKLHEIDAVVVYRLDRLSRSQRDTITLIEEYFLKNNVEFVSLSETLDTSSPFGRAMIGILSVFAQLERETIRDRMVMGKIKRIEAGLPLTTAKGRTFGYDVIDTKLYINEEEAKQLRLIYDIFEEEQSITLLQRRLKKLGFKVRTYNRYNNWLTNDLYCGYVSYKDKVHVKGIHEPIISEEQFYRVQEIFARMGKNPNMNRDSASLLNNLVVCGKCGLGFVHRRKDIVSRGKEYHYRYYSCKTYKHIHELEKCGNKIWRADKLEELIINRANDYSLASRNVDKEDELDSLNEKLKIEHAKKKRLFNLYINGSYEVSELDSMMNDIDAQINYYESQIEANEELKKNKKIQETLAHLATVDFDSLEFREKRLYLKSLINKIYIDGEQVTIEWL

SEQ ID NO: 3492 - protein, 485 aa, synthetic construct
MTKKVAIYTRVSTTNQAEEGFSIDEQIDRLTKYAEAMGWQVSGTYTDAGFSGAKLERPAMQRLINDIENKAFDTVLVYKLDRLSRSVRDTLYLVNDVFTKNKIDFVSLNESIDTSSAMGSLFLTILSAINEFERENIKERMTMGKLGRAKSGKSMMWTKTAFGYYHNRKTGILEIVPLQATIVEQIFTDYLSGISLTKLRDKLNESGHIGKDIPWSYRTLRQTLDNPVYCGYIKFKGSLFEGMHKPIIPYETYLKVQRELEERQQQTYERNNNPRPFQAKYMLSGMARCGYCGAPLKIVLGHKRKDGSRTMKYHCANRFPRKTKGVTVYNDNKKCDSGTYDLSNLENTVIDNLIGFQENNDSLLKVINGNNQPILDTSSFEKQISQIDKKIQKNSDLYLNDFITMDELKDRTDSLQAEKELLKAKISENKFNDSTDVFELVKAQLGSIPINELSYDNKKRIVNNLVSKVDVTADNVDIIFKFQLA

SEQ ID NO: 3493 - protein, 469 aa, synthetic construct
MSYTTPVRAAVYLRISEDRSGEQLGVARQREDCLKLCGQRKWVPVEYLDNDVSASTGKRRPAYEQMLADIAAGKIAAVVAWDLDRLHRRPIELEAFMSLADEKRLALATVAGDVDLATPQGRLVARLKGSVAAHETEHKRARQRRAARQKAERGHPNWSKAFGYLPGPNGPEPDPRTAPLVKQAYADILAGASLGDVCRQWNGAGAFTITGRPWTTTTLSKFLRKPRNAGLRAYKGARYGPVDRDAIVGKAQWSPLVDDATFWAAQAVLDAPGRAPGRKSVRRHLLTGLAGCGKCGNHLAGSYRADGRVVYVCKACHGVAILADNIEPILYHIVAERLAMPDAVDLLRREIHDAAEAETIRLELETLYDELDRLAVERAEGLLTARQVKISTDIVNAKITKLQAHQLDQERLRVLDGIPLGTPRVAGVIAELSPDRFRAVLDALAEVVVQPVGKSGRIFNRERVQVNWR

SEQ ID NO: 3494 - protein, 485 aa, synthetic construct
MTKKVAIYTRVSTTNQAEEGFSIDEQIDRLTKYAEAMGWQVSDTYTDAGSSGAKLERPAMQRLINDIGNKAFDTVLVYKLDRLSRSVRDTLYLVKDVFTKNKIDFISLNESIDTSSAMGSLFLTILSAINEFERENIKERMTMGKLGRAKSGKSMMWTKTAFGYYHNRKTGILEIVPLQATIVEQIFTDYLSGISLTKLRDKLNESGHIGKDIPWSYRTLRQTLDNPVYCGYIKFKDSLFEGMHKPIIPYETYLKVQKELEERQQQAYERNNNPRPFQAKYMLSGVARCGYCGAPLRIALGHKRKDGSRTMKYHCANRFPRKTKGVTVYNDNKKCDSGTYDLSNLENAVIDNLIGFQENNDSLLKIINGNNQPILDTSSFKKQISQIDKKIQKISDLYLNDFITMDELKDRTGSLQAEKKLLKAKISESKSNDSTDVFELVKTQLGSIPINELSYDNKKKIVNNLVSKVDVTADNVDIIFKFQLA

SEQ ID NO: 3495 - protein, 469 aa, synthetic construct
MSYTTPVRAAVYLRISEDRSGEQLGVARQREDCLKLCDQRKWVPVEYLDNDVSASTGKRRPAYEQMLADITAGKIAAVVAWDLDRLHRRPIELEAFMSLADEKRLALATVAGDVDLATPQGRLVARLKGSVAAHETEHKKARQRRAARQKAERGYPNWSKAFGYLPGPNGPEPDPRTAPLVKQAYADILAGASLGDVCRQWNDAGAFTITGRPWTTTTLSKFLRKPRNAGLRAYKGARYGPVDRDAIVGKAQWSPLVDEATFWAAQAVLDAPGRAPGRKSVRRHLLTGLAGCGKCGNHLAGSYRTDGRVVYVCKACHGVAILADNIEPILYHIVAERLAMPDAVDLLRREIHDAAEAETIRLELETLYGELDRLAVERAEGLLTARQVKISTDIVNAKITKLQVRQLDQERLRVLDGIPLGTPQVAGMIAELSPDRFRVVLDVLAEVVVQPVGKSGRISNPERVQVNWR

SEQ ID NO: 3496 - protein, 452 aa, synthetic construct
MKAAIYIRVSTREQVENYSIQAQTEKLTALCRSKDWDVYDIFIDGGYSGSNMNRPALNEMLSKLHEIDAVVVYRLDRLSRSQRDTITLIEEYFLKNNVEFVSLSETLDTSSPFGRAMIGILSVFAQLERETIRDRMVMGKIKRVEAGLPLTTAKGRTFGYDVVDTKLYINEEEAKQLQLIYDIFEEEQSITFLQKRLKKLGFKVRTYSRYNSWLTNDLYCGYVSYKDKVRVKGIHEPIISEEQFYRVQEIFTRMGKNPNMNRDSASLLNNLVVCSKCGLGFVHRRKDTMSRGKKYHYRYYSCKTYKHTHELEKCGNKIWRADKLEELIINRANNYSFASRNEDKEDELDSLNEKLKTEHAKKRRLFDLYVNGSYEVSELDGMMNDINAQINYYESQIEANEELKKDKKIQENLANLATVDYDSLGFREKQLYLKGLINKIYIDGEQVTIEWL

SEQ ID NO: 3497 - protein, 452 aa, synthetic construct
MKAAIYIRVSTREQVENYSIQAQTEKLTALCRSKDWDVYDIFIDGGYSGSNMNRPALNEMLSKLHEIDAVVVYRLDRLSRSQRDTITLIEEYFLKNNVEFVSLSETLDTSSPFGRAMIGILSVFAQLERETIRDRMVMGKIKRIEAGLPLTTAKGRTFGYDVIDTKLYINEEEAKQLQLIYDIFEEERSITFLQKRLKKLGFKVRTYNRYSNWLTNDLYCGYVSYKDKVHVKGIHEPIISEEQFYRVQEIFTRMGKNPNMNRDSASLLNNLVVCSKCGLGFVHRRKDAMSRSKKYHYRYYSCKTYKHIHELEKCGNKIWRADKLEELIINRVNSYSLVSRNVDKEDELDSLNEKLKIEHAKKKRLFDLYINGSYEVSELDSMMNDIDTQINCYESQIEANEELKKNKKIQENLANLATVDFDSLGFREKQLYLKSLINKIYIDGEQVTIEWL

SEQ ID NO: 3498 - protein, 469 aa, synthetic construct
MSYTTPVRAAVYLRISEDRSGEQLGVARQREDCLKLCDQRKWVPVEYLDNDVSASTGKRRPAYEQMLADITAGKIAAVVAWDLDRLHRRPIELEAFMSLADEKRLALATVAGDVDLATPQGRLVARLKGSVAAHETEHKKARQRRAARQKAERGHPNWSKAFGYQPGPNGPEPDPRTAPLVKQAYADILAGASLGDVCRQWNGAGAFTITGRPWTTTTLSKFLRKPRNAGLRAYKGARYGPVDRDAIVGKAQWSPLVDEATFWAAQAVLDAPGRAPGRKSVRRHLLTGLAGCGKCGNHLAGSYRTDGRVVYVCKACHGVAILADNIEPILYHIVAERLAMPDAVDLLRREIHDAAEAETIRLELETLYGELDRLAVERAEGLLTARQVKISTDVVNAKITKLQARQLDRERLRVFDGIPLGTPQVAGMIAELSPDRFRAVLDVLAEVVVQPAGKSGRIFNPERVRVNWR

SEQ ID NO: 3499 - protein, 469 aa, synthetic construct
MSYTTPVRAAVYLRISEDRSGEQLGVARQREDCLKLCDQRKWVPVEYLDNDVSASTGKRRPAYEQMLADITAGKIAAVVAWDLDRLHRRPIELEAFMSLADEKRLALATVAGDVDLATPQGRLVARLKGCVAAHETEHKKARQRRAARQKAERGLPNWSKAFGYLPGPNGPEPDPRTAPLVKQAYADILAGASLGDVCRQWNDAGAFTVTGRPWTTTALSKFLRKPRNAGLRAYKGARYGPVDRDAIVGKAQWSPLVDEATFWAAQAVLDAPGRAPGRKSVRRHLLTGLAGCGKCGNHLAGSYRTDGQVVYVCKACHGVSILADNIEPILYHIVAERLAMPDAVDLLRREIHDAAEAETIRLELETLYGELDRLAVERAEGLLTARQVKISTDIVNAKITKLQARQLDQERLRVFDGIPLGTPQVAGMITGLSPDRFRAVLDVLAEVVVQPVGKSGRTFNPERVQVNWR

SEQ ID NO: 3500 - protein, 452 aa, synthetic construct
MKAAIYIRVSTREQVENYSIQAQTEKLTALCRSKDWDVYDIFIDGGYSGSSMNRPALNEMLSKLHEIDAVVVYRLDRLSRSQRDTITLIEEYFLKNNVEFVSLSETLDTSSPFGRAMIGILSVFAQLERETIRDRTVMGKIKRIEAGLPLTTAKGRTFGYDVIGTKLYINEEEAKQLQLIYDIFEEEQSITFLQKRLKKLGLKVRTYNRYNNWLTNDLYCGYVSYKDKVHVKGIHEPIISEEQFYRVQEIFARMGKNPNMNRDSASLLNNLVVCSKCGLGFVHRRKDTMSRGKKYRYRYYSCKTYKHTHELEKCGNKIWRADKLEELIINRVNNYSFASRNVDKEDELDSLNEKLKVEHAKKKRLFDLYINGSYEVSELDCMMNDIDAQINYYESQIEASEELKKDKKIQENLADLATVDFDSLEFREKQLYLKSLINKIYIDGEQVTIEWL

SEQ ID NO: 3501 - protein, 452 aa, synthetic construct
MKAAIYIRVSTQEQVENYSIQAQTEKLTALCRSKDWDVYDIFIDGGYSGSNMNRPALNEMLSKLHEIDAVVVYRLDRLSRSQRDTITLIEEYFLKNNVEFVSLSETLDTSSPFGRAMIGILSVFAQLERETIRDRMVMGKIKRIEAGLPLTTAKGRTFGYDVIDTKLYINEEEAKQLRLIYDIFEEEQSITFLQKRLKKLGLKVRTYNRYNNWLTNDLYCGYVSYKDKVHVKGIHEPIISEEQFYRVQEIFTRMGKNPNMNRDSASLLNNLVVCSKCGLGFVHRRKDTMSRGKKYHYRYYSCKTYKHIHELEKCGNKIWRADKLEELIINRVNNYSFASRNADKEDELDSLNEKLKIGHVKKKRLFDLYINGSYEVSELDSMMNDIDAQINYYESQIEANEEPKKNKKIQEDLADLATVDFDSLEFREKQLYLKSLINKIYIDGEQVTIEWL

SEQ ID NO: 3502 - protein, 469 aa, synthetic construct
MSYTTPVRAAVYLRISEDRSGEQLGVARQREDCLKLCGQRKWVPVEYLDNDVSASTGKRRPAYEQMLADITAGKIAAVVAWDLDRLHRRPVELEAFMSLADEKRLALATVAGDVDLATPQGRLVARLKGCVAAHETEHKKARQRRAARQKAERGLPNWSKAFGYLPGPNGPEPDPRTAPLVKQAYADILAGASLGDVCGQWNDAGAFTITGRPWTSTTLSKFLRKPRNAGLRAYKGARYGPVDRDAIVGKAQWSPLVDEATFWAAQAVLDAPGRVPGRKSVRRHLLTGLAGCGKCGNRLAGSYRTDGRIVYVCKACHGVSILADNIEPVLHHIVAERLAMPDAVDLLRCEIHDAAEAETIRLELETLYGELDRLAVERAEGLLTARQVKISTDIVNAKITKLRARQLDQERLRVLDGIPLGTPQVAGMVAELSPDRFRAVLDVLAEVVVQPVGKSGRIFNPERVQVNWR

SEQ ID NO: 3503 - protein, 452 aa, synthetic construct
MKAAIYIRVSTREQVENYSIQAQTEKLTALCRSKDWDVYDIFIDGGYSGSNMNRPALNEMLSKLHEIDAVVVYRLDRLSRSQRDTLTLIEEYFLKNNVEFVSLSETLDTSSPFGRAMIGVLSVFAQLERETIRDRIVMGKIKRIEAGLPLTTAKGRTFGYDVIDTKLYINEEEAKQLQLIYDIFEEEQSITFLQKRLKKLGFKVHTYNRYNNWLTNDLYCGYVSYKDKVHVKGIHEPIISEEQFYRVQEIFTRMGRNPNMNRDSASLLNNLVVCSKCGLGFVHRRKDTKSRGKKYHYRYYSCKTYKHIHELEKCGNKIWRADKLEELVINRVNNYSFASRNVDKEDELDSLNEKLKIEHAKKKRLFDLYINGSYEVSELDSMMSDIDAQINYYESQIEANGELRKNKKIQENLADLATVDYDSLGFREKQLYLKSLINKIYIDGEQVTIEWL

SEQ ID NO: 3504 - protein, 452 aa, synthetic construct
MKAAIYIRVSTREQVGNYSIQAQTEKLTALCRSKDWDVYDIFVDGGYSGSNMSRPALNEMLSKLHEIDAVVVYRLDRLSRSQRDTTTLIEEYFLKNNVEFVSLSETLDTSSPFGRAMIGILSVFAQLERETIRDRMVMGKIKRIEAGLPLTTAKGRTFGYDVIDTKLYVNEEEAKQLRLIYDIFEEVQSITFLQKRLKKLGFKVRTYNRYSNWLTNDLYCGYVSYKDKVHVKGIHEPIISEEQFYRVQEIFTRMGKNPNMNRDSASLLSNLVVCSKCGLGFVHRSKDTMSRGKKYHYRYYSCKTYKHTHELEKCGNKTWRADKLEELIINRVNNYSFANRNVDKEDELDSLNERLKIEHAKKKRLFDLYINGSYEVSELDSMMNDIDARINYYESQIEANEELRRSKKIQENLADLAAVDFDSLEFREKQLYLKSLINKIYIDGEQVTIEWL

SEQ ID NO: 3505 - protein, 452 aa, synthetic construct
MKAAIYIRVSTREQVENYSIQAQTEKLTALCRSKDWDVYDIFIDGGYSGSNMNRPALNEMLSKLHEIDAVVVYRLDRLSRSQRDTITLIEEYFLKNNVEFVSLSETLDTSSPFGRAMIGILSVFAQLERETIRDRMVMGKIKRIEAGLPLTTAKGRTFGYDVIDTKLYINEEEAKQLQLIYDIFEEEQSITFLQKRLKKLGFKVRTYSRYNSWLTNDLYCGYVSYKDKVHVKGIHEPIISEEQFYRVQEIFTRMGKNPNTNRDSASLLNNLVACSKCGLGFVHRRKDTMSRGKKYHYRYYSCKTYKHTHELEKCGNKIWRADKLEELIINRVSNYSFASRNVDKDDELDSLNEKLKIEHAKKKRLFDLYINGSYEVSELDSMMNDIDAQINYYESQIEANEDLKKDKKIQESLANLATVDYDSLEFREKQLYLKSLINKIYIDGEQVTIEWL

SEQ ID NO: 3506 - protein, 469 aa, synthetic construct
MSYTTPVRAAVYLRISEDRSGEQLGVARQREDCLKLCGQRKWEPVEYLDNDVSASTGKRRPAYEQMLADITAGKIAAVVAWDLDRLHRRPIELEAFMSLADEKRLALATVAGDVDLATPQGRLVARLKGSVAAHETEHKRARQRRAARQKAERGHPNWSKAFGYLPGPNGPEPDPRTAPLVKQAYADILAGASLGDVCRQWNDAGAFTITGRPWTATTLSKFLRKPRNAGLRAYKGARYGPVDRDAIVGKAQWSPLVDEATFWAAQAVLDAPGRAPGRKSVRRHLLTGLAGCGKCGNHLAGSYRTDGRVVYVCKACHGIAILADNIEPILYHIVAERLAMPDAVDLLRREIRDAAEAEAIRLELETLYGELDRLAVERAEGLLTARQVKISTDIVNAKITKLQARQLDQERLRVLDGIPLGTPQAAGMIAVLSPNRFRAVLDVLAEVVVQPVGKSGRIFNPERVQVNWR

SEQ ID NO: 3507 - protein, 469 aa, synthetic construct
MCYTTPVRAAVYLRISEDRSGEQLGVARQREDCLKLCGQRKWVPVEYLDNDVSASTGKRRPAYEQMLADITAGKIAAVVAWDLDRLHRRPIELEAFMSLADEKRLALATVAGDIDLATPQGRLVARLKGSVAAHETEHKKARQRRAARQKAERGYPNWSKAFGYLPGPNGPEPDPRTAPLVKRAYADILAGASLGDVCRQWNDAGAFTITGRPWTTTTLSKFLRKPRNAGLRAYKGARYGPVDRDAIVGKARWSPLVDEATFWAAQAVLDAPGRAPGRKSVRRHLLTGLAGCGKCGNHLAGSYRTDGRVVYVCKACHGVTILADNIEPILYHVVAERLAKPDAVDLLRREIHGAAEAEAIRLELETLYGELDRLAVERAEGLLTARQVKISTDIVNAKITKLQARQLDQERLRVFDGIPLGTPQVAGKIAELSPDRFRAVLDVLAEVVVQPVGKSGRIFNPERVQVNWR

SEQ ID NO: 3508 - protein, 485 aa, synthetic construct
MTKKVAIYTRVSTTNQAEEGFSIDEQIDRLTKYAEAMGWQVSGTYTDAGFSGAKLERPAMQRLINDIENKAFDTVLVYKLDRLSRSVRDTLHLVKDVFTKNKIDFISLNESIDTSSAMGSLFLTILSAINEFERENIKERMTMGKLGRAKSGKSMMWTKTAFGYHHNRKTGILEIMPLQAAIVEQIFTDYLSGISLTKLRDKLNENGHIGKDIPWSYRTLRQTLDNPVYCGYIKFKDSLFEGMHKPIIPYETYLKVQKELEERQQQTYERNNNPRPFQAKYMLSGMARCGYCGAPLRIVLGHKRKDGSRTMKYHCVNRFPRKTKGITVYNDNKKCDSGTYDLSNLENTVIDNLIGFQENNDSLLKTINGNSQPIPDTSSFKEQISQIDKKIQKNSDLYLNDFITMDELKGRTDSLQAEKRLLKAKISENKFNDSTDVFELVKTQLGSIPINELSYDNKKKIVNNLVSKVDVTADSVDIIFKFQLA

SEQ ID NO: 3509 - protein, 469 aa, synthetic construct
MSYTTPVRAAVYLRISEDRSGEQLGVARQREDCLKLCGQRKWVPVEYLDNDVSASTGKRRPAYEQMLADIAAGKIAAVVAWDLDRLHRRPIELEAFMSLADENRLALATVAGDVDLATPQGRLVARLKGSVAAHETEHKKARQRRAARQKAERGYPNWSKAFGYLPGPNGPEPDPRTAPLVKQAYADILAGASLGDVCRQWNGAGAFTITGRPWTTTTLSKFLRKPRNAGLRAYKGARYGPVDRDAIVGKAQWSPLVDEATFWAAQAVLDAPGRAPGRKSVRRHLLTGLAGCGKCGNHLAGSYRTDGRVVYVCKACHGVAILADNIEPILYHTVAERLAMPDAVDLLRREIHDVAEAETIRLELETLYDELDRLAVERAEGLLTARQVKISTDIVSAKIIKLQARQLDQERLRVFDGIPLGTPQVAGMIAELSPDRFRAVLDVLAEVVVQPVGKGGRIFNPERVQVNWR

SEQ ID NO: 3510 - protein, 485 aa, synthetic construct
MTKKVAIYTRVSTTNQAEEGFSIDEQIDRLTKYAEAMGWQVSDTYTDAGSSGAKLERPAMQRLINDIENKAFDTVLVYKLDRLSRSVRDTLYLVKDVFTKNKIDFISLNESIDTSSAMGSLFLTILSAINEFERENIKERMTMGKLGRAKSGKSMMWTKTAFGYYHNRKTGILEIVPLQATIVEQIFTDYLSGISLTKLRDKLNESGHIGKDIPWSYRTLRQTLDNPVYCGYIKFKDSLFEGMHKPIIPYETYLKVQKELEERQRQTYERNNNPRPFQAKYMLSGMARCGYCGAPLRIVLGHKRKDGSRTMKYHCANRFPRKTKGVTVYNDNKKCDSGTYDLSNLEDTVIDNLIGFQENNDSLLKIINGDNQPVLDTSSFKKQISQIGKKIQKNSDLYLNDFITMDELKDRTDSLQAKKKLLEAKISENKFNDSTDVFELVKTQLGSIPIYELSYDDKKKIVNNLVSKVDVTADNVDIIFKFQLA

SEQ ID NO: 3511 - protein, 452 aa, synthetic construct
MKAAIYIRVSTREQVENYSIQAQTEKLTALCRSKDWDVYDIFIDGGYSGSNMNRPALNEMLSKLHEIDAVVVYRLDRLSRSQRDTITLIEEYFLKNNVEFVSLSETLDTSSPFGRAMVGILSVFAQLERETIRDRMVMGKIKRIEAGLPLTTAKGRTFGYDVIDTRLYINEEEAKQLQLIYDIFEEERSITLLQKRLKKLGFKVHTYNRYNNWLTNDLYCGYVSYKDKVHVKGIHEPIISEEQFYRVQEIFTRMGKNPNMNRDSASLLNSLVVCSKCGLSFVHRRKDTVSRGKKYHYRYYSCKTYKHTHELEKCGNKIWRADKLEELIINRVNNYSFASRNVDKEDELDSLNEKLKIEHAKKKRLFDLYINGSYEVSELDCMMNDIDAQINYYESQIEANEELKKDKKIQESLANLATVDYDSLEFREKQLYLKSLINKIYIDGEQVTIEWL

SEQ ID NO: 3512 - protein, 484 aa, synthetic construct
MTKKVAIYTRVSTTNQAEEGFSIDEQIDRLTKYAEAMGWQVSDTYTDAGSSGAKLERPAMQRLINDIENKAFDTVLVYKLDRLSRSVRDTLYLVKDVFTKNKIDFISLNESIDTSSAMGSLFLTILSAINEFERENIKERMTMGKLGRAKSGKSMMWTKTAFGYYHNRRTGILEIVPLQATIVEQIFTDYLSGISLTKLRDKLNESGHIGKDIPWSYRTLRQTLDNPVYCGYIKFKDSLFEGMHKPIVPYETYLKVQKELEERQQQTYERNNNPRPFQAKYMLSGMARCGYCGAPLKIVLGHKRKDGSRTVKYHCANRFPRKTKGITVYNDNKKCDSGTYDLSNLENAVIDNLIGFQENNDSLLKIINGNNRPILDTSSLEKQISQIDKKIQKNSDLYLNDFITMDELKDRTDSLQAEKKLLKAKISENRLNDSADVFELVKTQLGSIPINELSYDDKKKIVNNLVSKVDVTADNVDIIFKFLA

SEQ ID NO: 3513 - protein, 452 aa, synthetic construct
MKAAIYIRVSTQEQVENYSIQAQTEKLTALCRSKDWDVYDIFIDGGYSGSNMNRPALNEMLSKLHEIDAVVVYRLDRLSRSQRDTTTLIEEYFLRNNVEFVSLSETLDTSSPFGRAMIGILSVFAQLERETIRDRMVMGKIKRIEAGLPLTTAKGRTFGYDVIDTKLYINEEEAKQLRLIYDIFEEEQSITSLQKRLKRMGFKVRTYNRYSNWLTNDLYCGYVSYKDKVHVKGIHEPIISEEQFYRVQEIFTRTGKNPNMNRDSASLLNNLVVCSKCGLGFVHRSKDTMCRGKKYHYRYYSCKTYKHTHELEKCGNKTWRADKLEELVINRVNDYSFASRNVDKEDELDSLNEKLKIEHGKRKRLFDLYINGSYEVSELDSMMNDIDAQISHYESQIKANEELKKNRKIQENLADLATVDFDSLEFREKQLYLKSLINKIYIDGERVTIEWL

SEQ ID NO: 3514 - protein, 469 aa, synthetic construct
MSYTTPVRAAVYLRISEDRSGEQLGVARQREDCLKLCGQRKWVPVEYLDNDVSASTGKRRPAYERMLADITAGKIAAVVAWDLDRLHRRPIELEAFMSLADEKRLALATVAGDVDLATPQGRLVARLKGSVAAHETEHKKARQRRAARQKAERGHPNWSRAFGYLPGPNGPEPDPRTAPLVKQAYADILAGASLGDVCRQWNDAGASTITGRPWTTTTLSKFLRKPRNAGLRTYKGARYGPVDRGAIVGKAQWSPLVDEATFWAAQAVLDAPGRAPGRKSVRRHLLTGLAGCGKCGNHLAGSYRTDGRVVYVCKACYGVAILADNIEPILYHIVAERLAMPDAVDLLRREVHDAAEAETIRLELETLYGELDRLAVERAEGLLTARQVKISTDIVSAKITKLQACQLDQERLRVFDGIPLGTPQVAGMIAELSPNRFRAVLDVLAEVVVQPVGKSGRIFNPERVQVNWR

SEQ ID NO: 3515 - protein, 485 aa, synthetic construct
MTKKVAIYTRVSTTNQAEEGFSIDEQIDRLTKYAEVMGWQVSDTYTDAGSSGAKLERPAMQRLISDIENKAFDTVLVYKLDRLSRSVRDTLYLVKDVFTKNKIDFISLNESIDTSSAMGSLFLTILSAINEFERENIKERMTMGKLGRAKSGKSMMWSKTAFGYYHNRETGILEIVPLQATIVEQIFTDYLSGISLTKLRDKLNESGHIGKDIPWSYRSLRQTLDNPVYCGYIKFKDSLFEGMHKPIIPYETYLKVQKELEERQRRTYERNNNPRPFQAKYMLSGMARCGYCGAPLRIVLGHKRKDGSRTMKYHCANRFPRKTRGVTVYNDNKKCDSGTYDLRNLENTVIDNLIGLQENNDSLLEIINGDNQPILDTSSFEEQISQIDKKIQKNSDLYLNDFITMDELKDRTDSLQAERKLLKAKISENKFNDSTDVFELVKTQLGSIPINELSYDNKKKIVNNLVSKVDVTADNVDIIFKFQLA

SEQ ID NO: 3516 - protein, 485 aa, synthetic construct
MTKKVAIYTRVSTTSQAEEGFSIDEQTDRLAKYAEAMGWQVSVTYTDAGFSGAKLERPAMQRLINDIENKAFDTVLVYKLDRLSRSVRDTLYLVKDVFTKNEIDFISLNESIDTSSAMGSLFLTILSAINEFERENIKERMTMGKLGRAKSGKSMMWTKTAFGYYHNRETGILEIVPLQATIVEQIFTDYLSGISLTKLRDKLNESGHIGKDIPWSYRTLRQTLDNPVYCGYIKFKDSLFEGMHKPIIPYETYLKVQKELEERQQQAYERNNNPRPFQAKYMLSGMARCGYCGAPLRIVLGHRRKDGSRTMKYHCANRFPRKTKGVTVYNDNRKCDSGTYDLSNLENTVIDNLIGFQENNDSLLKIINGNNQPILDTSSFKKQISQIDKKIQKNSDLYLNDFITMDELKSRADSLQAEKKLLKAKISENKFNDSTDVFELVKTQLGSIPINELSYDNKKKIVNNLVSKVDVTADNVDIIFKFQLA

SEQ ID NO: 3517 - protein, 452 aa, synthetic construct
MKAAIYIRVSTQEQVGNYSIQAQTEKLTALCRSKDWDVYDIFIDGGYSGSNMNRPALNEMLSKLHEIDAVVVYRLDRLSRSQRDTTTLIEEYFLKNNVEFVSLSETLDTSSPFGRAMIGILSVFAQLERETIRDRMVMGKIKRIEAGLPLTTAKGRTFGYDVIDTKLYINEEEAKQLQLIYDIFEEEQSITFLQKRLKGLGFKVRSYNRYNNWLTNDLYCGYVSYKDKVHVKGIHEPIISEEQFYRVQEIFTRMGKNPNMNRDSASLLSNLVVCSKCGLGFVHRSKDTMSRGKKYHYRYYSCKTYKHTHELEKCGNKTWRADELEELIINRVNNYSFASRDVDKEDKLDSLSEKLKIEHAKKKRLFDLYINGSCEVSELDSMMNDIDARINYYESQIEANEELKKNKRIQKNLADLATVDFDSLEFREKQLYLKSLINKIYIDGEQVTIEWL

SEQ ID NO: 3518 - protein, 485 aa, synthetic construct
MTKKVAIYTRVSTTIQAEEGFSIDEQIDRLTKYAEAMGWQVSDTYTDAGVSGAKLERPAIQRLINDIGNKAFDAVLVYKLDRLSRSVRDTLYLVKDVFTKNKIDFISLNESIDTSSAMGSLFLTILSAINEFERENIKERMTMGKLGRAKSGKSMMWTKTAFGYYHNRKTGILEIVPLQATIVEQIFTDYLSGISLTKLRDKLNESGHIGKDIPWSYRTLRQTLDNPVYCGYIKFKDSLFEGMHKPIIPYETYLKVQKELGERQQQTYERNNNPRPFQAKYMLSGMARCGYCGAPLRIVLGHKRKDGSRTMKYHCANRFPRKTKGVTVYNDNKKCDSGTYDLSDLENTVIDNLIDLQENNDSLLKVINGNNRPILDTSSFKKQVSQIDKKIQKNSDLYLNDFITMDELKDRTDSLQAEKKLLKAKISENKFNDSTDVIELVKTQLGSIPINELSYDNKKKIVNNLVSKVDVTADNVDIIFKFQLA

SEQ ID NO: 3519 - protein, 452 aa, synthetic construct
MKAAIYIRVSTREQVENYSIQAQTEKLTALCRSKDWDVYDIFVDGGYSGSNMNRPALNEMLSRLHEIDAVVVYRLDRLSRSQRDTITLIEEYFLKNNVEFVSLSETLDTSSPFGRAMIGILSVFAQLERETIRDRMVMGKIKRIEAGLPLTTAKGRTFGYDVIDTKLYINEGEAKQLQLIYDIFEEEQSITSLQKRLKKLGFKVRTYNRYNNWLTNDLYCGYVSYKDKVHVKGIHEPIISEEQFYRVQEIFTRMGKNPNMNRDSASLLNNLVVCSKCGLGFVHRRKDAMSRDKKYHYRYYSCKTYKHIHELEKCGNKIWRADKLEELIINRVNNYSIASRNADKEDELDSLNEKLKIEHAKKKRLFELYVNGSYEVSELDSMMSDIDAQINYYESQVETNEELKKNKKIQENLAHLATVDFDSLEFREKQLYLKSLINKIYIDGEQVTIEWL

SEQ ID NO: 3520 - protein, 452 aa, synthetic construct
MKAAIYIRVSTQEQVGNYSIQAQTEKLTALCRSKDWDVYDIFIDGGYSGSNMNRPALNEMLSKLHEIDAVVVYRLDRLSRSQRDTTTLIEEYFLKNNVEFVSLSETLDTSSPFGRAMIGILSVFAQLERETIRDRMVMGKIKRIEAGLPLTTAKGRTFGYDVIDTKLYINEEEAKQLQLIYDIFEEEQSITFLQKRLKKLGFKVRTYNRYNSWLTNDLYCGYVSYKDKVHVKGIHEPIISEEQFYRVQEIFTRMGKNPNMNRDSASLLNNLVVCGKCGLGFVHRRKDTMCRGKKYHYRYYSCKTYKHAHELEKCGNKTWRADKLEELIINRVNNYSFASRNVDKEDELDSLNEKLKIERAKKKRLFDLYINGSYEVSELDSMMNDIDAQINYYESQIETNEELKKDKKIQENLADLATVDFDSLEFREKQLYLKSLINKIYIDGEQVTIEWL

SEQ ID NO: 3521 - protein, 485 aa, synthetic construct
MTRKVAIYTRVSTTNQAEEGFSIDEQIDRLTKYAEAMGWQVSDTYTDAGLSGAKLERPAMQRLINDIENKAFDTVLVYKLDRLSRSVRDTLYLVKDVFSKNKIDFVSLNESIDTSSAMGSLFLTILSAINEFERENIKERMTMGKLGRAKSGKSMMWTKTAFGYYHNRKTGILEIVPLQATIVEQIFTDYLSGISLSKLRDKLNESGHIGKDIPWSYRTLRQTLVNPVYCGYIKFKGSLFEGMHKPIIPYETYLKVQKELEERQQQTYERNNNPRPFQAKYMLSGVARCGYCGAPLRIVLGHKRKDGSRTMKYHCASRFPRRTKGVAVYNNNKKCDSGTYDLSNLENTVIDNLIGFQENDDSLLKIINGNNQPIPDTSSFKKRISQIDKKIQKSSDLYLNDFITMDELKDRTDSLQAEKKLLKAKISDNKFNDRTDAFELVKAQLGSIPINELSYENKKKIVNNLVSKVDVTADNVDIIFKFQLA

SEQ ID NO: 3522 - protein, 469 aa, synthetic construct
MSYTTPVRAAVYLRISEDRSGEQLGVARQREDCLKLCDQRKWVPVEYLDNDVSASTGKRRPAYEQMLADITAGKIAAVVAWDLDRLHRRPIELEAFMSLADEKRLALATVAGDVDLATPQGRLVARLKGCVAAHETEHKKARQRRAARQKAERGYPNWSKAFGYLPGPNGPEPDPRTAPLVKQAYADILAGASLGDVCRQWNDAGAFTITGRPWTTTTLSKFLRKPRNAGLRAYKGARYGPVDRDAIVGKAQWSPLVDGATFWAAQAVLDAPGRAPGRKSVRRHLLTGLAGCGKCGNRLAGSRRTDGRVVYVCKACHGVAILAVNIEPILYRIVAERLAMPDAVDLLRRETHDAAEAETIRLELETLYGELDRLAVERAEGLLTARQVKISTDIVNAKIAKLQARQLDQERLRVLDGIPLGTPRVAGMIAELSPDRFRAVLDVLVEVVVQPVGKSGRISNPERVQVNWR

SEQ ID NO: 3523 - protein, 452 aa, synthetic construct
MKAAIYIRVSTQEQVENYSIQAQTEKLTALCRSKDWDVYDIFIDGGYSGSNMNRPALNEMLSKLHEIDAVVVYRLDRLSRSQRDTTTLIEEYFLKNNVEFVSLSETLDTSSPFGRAMIGILSVFAQLERETIRDRTVMGKIKRIEAGLPLTTAKGRTFGYDVVDTKLYINEEEAKQLRLIYDIFEEEQSITFLQKRLKKLGFKVRTYNRYNNWLTNDLYCGYVSYKDKVRVKGIHEPIISEEQFYRVQEIFTRMGKNPNMNRDSASLLNNLVVCSKCGLGFVHRSKDTMCRGKKYHYRYYSCKTYKHTHELEKCGNKTWRADKLEELIINRVNNYSFAGRNVDKEDELDSLNEKLKVEHAKKKRLFDLYINGSYEVSELDSMMNDIDAQINYYESQIEANEESKKHRKIQENLADLATVDFDSLEFREKQLYLKSLINRIYIDGEQVTIEWL

SEQ ID NO: 3524 - protein, 485 aa, synthetic construct
MTKKVAIYTRVSTTNQAEEGFSIDEQIDRLTKYAEAMGWQVSDTYTDAGLSGAKLGRPAMQRLINDIEDKAFDTVLVYKLDRLSRSVRDTLYLVKDVFTKNKIDFISLNESIDTSSAMGSLFLTILSAINEFERENIKERMTMGKLGRAKSGKSMMWTKTAFGYYHNRKTGILEIVPLQATIVEQIFTDYLSGISLTKLRDKLNESGHIGKDIPWSYRTLRQILDNPVYCGYIKFKDSLFEGMHKPIIPYETYLKVQKELEERQQQAYERNNNPRPFQAKYMLSGMVRCGYCGAPLRIVLGHKRKDGSRTMKYHCANRFPRKTKGVTVYNDNKKCDSGTYDLNYLEDTVIDNLIGLQENNESLLKIINGNNHPILDTSSFKKQISQIDKKIQKNSDLYLNDFITMDELKDRTESLQAEKKLLKAKISENNFNDSTDVFELMKTQLGSIPINELSYDNKKKIVNNLVSKVDVTADNVDIIFKFQLA

SEQ ID NO: 3525 - protein, 452 aa, synthetic construct
MKAAIYIRVSTREQVENYSIQAQTEKLTALCRSRDWDVYDIFIDGGYSGSNMNRPALNEMLSKLHEIDAVVVYRLDRLSRSQRDTITLIEGYFLKNNVEFVSLSETLDTSSPFGRAMIGILSVFAQLERETIRDRMVMGKIKRIEAGLPPTTAKGRTFGYDVIDTKLYINEEEAKQLQLIYDIFEEEQSITFLQKRLKKLGLKVRTYNRYNNWLTNDLYCGYVSYKDKVHVKGIHEPIISEEQFYRVQEIFARMGKNPNMNRDSASLLNNLVVCSKCGLGFVHRRKDTTSRGKKYHYRYYSCKTYKHIHELEKCGNKIWRADKLEELIISRVSNYSLASRNADKEDELDSLNEKLRIEHAKKRRLFDLYINGSYEVSELDSMMNDIDAQINYYESQIEANEELKKNKKIQENLAGLATVDFDSLEFREKQLYLKSLISKIYIDGEQVTIEWL

SEQ ID NO: 3526 - protein, 452 aa, synthetic construct
MKAAIYIRVSTREQVENYSIQAQTEKLTALCRSKDWDVYDIFIDGGYSGSDMNRPALNEMLGKLHEIDAVVVYRLDRLSRSQRDTITLIEEYFLKNNVEFVSLSETLDTSSPFGRAMIGILSVFAQLERETIRDRMVMGKIKRVEAGLPLTTAKGRTFGYDVIDTKLYINEEEAKQLQLIYDIFEEEQSITFLQKRLKKLGFKVRTYSRYNSWLTNDLYCGYVSYKDKVHVKGIHEPIISEEQFYRVQEIFTRMGKNPNMNRDSASLLNNLVVCSKCGLGFVHRRKDTTSRGKKYHYRYYSCKTYKHIHELEKCGNKIWRADKLEELVINRVNNYSFASRNVDKEDELDSLNEKLKVEHAKKKRLFDLYINGSYEVSELDSMMNDIDAQINYYESQIEANEELKKNKKIQENPADLATVDFDSLEFREKQLYLKSLINKIYIDGEQVTIEWL

SEQ ID NO: 3527 - protein, 485 aa, synthetic construct
MTKKVAIYTRVSTTNQAEEGFSIDEQVDRLTKYAEAMGWQVSDTYTDAGFSGAKLERPAMRRLINDIENKAFDTVLVYKLDRLSRSVRDTLYLVKDVFTKNKIDFVSLNESIDTSSAMGSLFLTILSAINEFERENIKERMTMGKLGRAKSGKSMMWTKTAFGYYHNRKTGVLEIAPLQAAIVEQIFTDYLSGISLTKLRDKLNESGHIGKDIPWSYRTLRQTLNNPVYCGYIKFKDSLFEGMHKPIIPHETYLKVQEELEERQQQTYERNNNPRPFQAKYMLSGMARCGYCGAPLRIVLGHKRKDGSRTMRYHCANRFPRKTKGVTVYNDNKKCDSGTYDLSSLENTVIDNLIGFQENNDSLLKIINGNNLPILDTSSFVKQISQIDKKIQKNSDLYLNDFITMDELKDRTDSLQAEKELLRAKISENKFNDSTDVFELVRTQLGSIPINELSYDDKKKIVNNLVSKVDVTADSVDIVFKFQLA

SEQ ID NO: 3528 - protein, 485 aa, synthetic construct
MTKKVAIYTRVSTTNQAEEGFSIDEQIDRLTKYAEAMGWQVSDTYTDAGFSGAKLERPAMQRLINDIENKAFDTVLVYKLDRLSRSVRDTLYLVKEVFTRNKIDFISLNESINTSSAMGSLFLTILSAINEFERENIKERMTMGKLGRAKSGKSMMWTRTAFGYYHNRKTGILEIVPQQATVVERIFTDYLSGISLTKLRDKLNESGHIGKDIPWSYRTLRQTLDNPVYCGYIKFKDSLFEGMHKPIIPYETYLRVQKELEERQQQTYERNNNPRPFQAKYMLSGMARCGYCGAPLKIVLGHKRKDGSRTMKYHCTNRYPRKTKGVTVYNDNKKCDSGTYDLSNLENTVIDNLIGFQENNDSLLKIINGNNQPILDTSSFKKQISQIDKKIQKNSDPYLNDFITMDELKDRTDSLRAEKKLLEAKISENKFNDSTDVFELVKTQLGSVPINELSYDNKKKIVNSLVSKVDVTADNVDIIFKFQLA

SEQ ID NO: 3529 - protein, 452 aa, synthetic construct
MKAAIYIRVSTREQVENYSIQAQTEKLTALCRSKDWDVYDIFIDGGYSGSNMNRPALNEMLSKLHEIDAVVVYRLDRLSRSQRDTITLIEEYFLKNNVEFVSLSETLDTSSPFGRAMIGILSVFAQLERETIRDRMMMGKIKRAEAGLPLTTAKGRTFGYDVIDTKLYINEEEAKQLQLIYDIFEEVQSITLLQKRLKKLGFKVRTYSRYNNWLTNDLYCGYVSYKDKVHVKGVHEPIISEEQFYRVQEIFTRMGKNPNMNRDSASLLNNLVVCSKCGLGFVHRRKDTVSRGKKYHYRYYSCKTYRHIHELEKCGNKIWRADKLEELIINRVNNYSLASRNVDKEDELDSLNEKLKIEHAKKKRLFDLYINGSYDVSELDSMMNDIDAQINYYESQIEANEELKKNEKIQENLADLATVDFDSLEFREKQLYLKSLISKIYIDGEQVTIEWL

SEQ ID NO: 3530 - protein, 452 aa, synthetic construct
MKAAIYIRVSTQEQVENYSIQAQTEKLTALCRSKGWDVYDIFIDGGYSGSNMNRPALNEMLSKLHEIDAVVVYRLDRLSRSQRDTTTLIEEYFLKNNVEFVSLSETLDTSSPFGRAMIGILSVFAQLERETIRDRMVMGKIKRIEAGLPLTTAKGRTFGYDVIDTKLYINEEEAKQLRLIYDIFEEEQSITSLQKRLKKLGFKVRTYNRYNNWLTNDLYCGYVSYKDKVHVKGIHEPIISEEQFYRVQEIFTRMGKNPNMNRGSASLLSNLVVCSKCGLGFVHRSKDTMSRGKKYHYRYYSCKTYKHTQELEKCGNKTWRADRLEELIINRVNNYNFASRNVDKEDELDSLNKKLKIEHAKKKRLFDLYIHGSYEVSELDSMMNDINAQINYYESQIEANEELRKNKKIQENLADLAAVDFDSLEFREKRLYLKSLINKIYIDGEQVTIEWL

SEQ ID NO: 3531 - protein, 452 aa, synthetic construct
MKAAIYIRVSTQEQVGNYSIQAQTEKLTALCRSKDWDVYDIFVDGGYSGSNMNRPALNEMLSKLHEIDAVVVYRLDRLSRSQRDTTTLIEEYFLKNNVEFVSLSETLDTSSPFGRAMIGILSVFAQLERETIRDRMVMGKIKRIEAGLPLTTAKGRTFGYDVIDTKLYINEEEAKQLQLIYDIFEEEQSITLLQKRLKKLGFKVRTYNRYNNWLTNDLYCGYVSYKDKVHVKGIHEPIISEEQFYRVQEIFTRMGKNPNMNRDSASLLSNLVVCSKCGLGFVHRSKDTMSRGKKYHYRYYSCKTYKHTHELEKCGNKTWRADKLEELIINRVNNYGFASRNVGEEDELDSLNEKLKIEHAKKKRLFDLYINGSYEVSELDSMMSDIDAQINYYESQIGAYEELKKTKKIQENLADLATVDFDSLEFREKQLYLKSLISKIYVDGEQVTIEWL

SEQ ID NO: 3532 - protein, 469 aa, synthetic construct
MSYTTPVRAAVYLRISEDRSGEQLGVARQREDCLKLCDQRRWVPVEYLDNDVSASTGKRRPAYEQMLADIAAGKIAAVVAWDLDRLHRRPIELEAFMCLADEKRLALATVAGDVDLATPQGRLVARLKGSVAAHETEHKKARQRRAARQKAERGHPNWSKAFGYLPGPNGPEPDPRTAPLVKQAYADILAGASLGDVCRQWNDAGAFTVTGRPWTTTTLSKFLRKPRNAGLRAYKGARYGPVDRDAIVGKAQWSPLVDEATFWAAQAVLDAPGRAPGRKSVRRHLLTGLAGCGKCGNHLAGSYRTDGRVVYVCKACHGVAILADNIEPTLYHIVAERLAMPDAVDLLRREIHDVVEAETTRLELDTLYGELDRLAVERAEGLLTARQVKISTDIVNAKITKLQARQLDQERLRVFDGIPLGTPQVAGMIAELSPDRFRAVLDVLAEVVVQPVGKSGKIFNPERVQVNWR

SEQ ID NO: 3533 - protein, 452 aa, synthetic construct
MKAAIYIRVSTREQVENYSIQAQTEKLTALCRSKDWDVYDIFIDGGYSGSNMNRPALNEMLSKLHEIDAVVVYRLDRLSRSQRDTITLIEEYFLKNNVEFVSLSETLDTSSPFGRAMIGILSVFAQLERETIRDRMVMGKIKRIEAGLPLTTAKGRTFGYDVIDTKLYINQEEAKQLQLIYDIFEEEQSITFLQKRLKKLGFKVRTYNRYNNWLTNDLYCGYVSYKDKVHVKGIHEPIISEEQFYRVQEIFTRMGKNPNMNRDSASLLSNLVVCSKCGLGFVHRRKDTVSRGKKYHYRYYSCKTYKHTHELEKCGNKIWRADKLEELIINRVNNYSFASRNVDKEDELDSLNEKLKIERAKKKRLFDLYINGSYEVSELDSMMNDIDAQINYYESQIEANEELRKNKRIQENLADLATVDFDSLEFREKQLYLKSLINKVYIDGEQVTIEWL

SEQ ID NO: 3534 - protein, 485 aa, synthetic construct
MTKKVAIYTRVSTTNQAEEGFSIDEQIDRLTKYAEAMGWQVSDTYTDAGSSGAKLERPAMQRLINDIENKAFDTVLVYKLDRLSRSVRDTLYLVKDVFTRNKIDFISLSESIDTSSAMGSLFLTILSAINEFERENIKERMAMGKLGRAKSGKSMMWTKTAFGYYHNRKTGILEIVPLQATIVEQIFTDYLSGISLTKLRDKLNEGGPIGKDIPWSYRTLRQTLDNPVYCGYIKFKDNLFEGMHKPIIPYETYLKVQKELEKRQQQTYERNNNPRPFQAKYMLSGVARCGYCGAPLRIVLGHKRKDGSRTMKYHCANRFPRKTRGVTVYNDNKKCDSGTYDLSNLEDTVIDNLIGFQKNNDSLLKIINSNNQPILDTSSFEEQISQIDQKIQKNSDLYLNDFITMDELKDRTDSLQAEKKLLKAKISENKFNDSTDVFELVKTQLGSIPINELSYDNKKKIVNNLVSKVDVTADNLDIIFKFQLA

SEQ ID NO: 3535 - protein, 452 aa, synthetic construct
MKAAIYIRVSTREQVENYSIQAQTEKLTALCRSKDWDVYDIFIDGGYSGSNMNRPALNEMLSKLHEIDAVVVYRLDRLSRSQRDTITLIEEYFLKNNVEFVSLSETLDTSSPFGRAMIGILSVFAQLERETIRDRMVMGKIKRIEAGLPLTTAKGRTFGYDVIDTKLYINEEEAKQLRLIYDIFEEEQSITFLQKRLKELGLKVHTCNRYNSWLTNDLYCGYVSYKDKVHVKGIHEPIISEEQFYRVQEIFTRTGKNPNMNRDSASLLNNLVVCSKCGLGFVHRRKDTMSRGKKYHYRYYSCKTYKHIHELEKCGNKIWRADKLEELIISRVNDYSLASRNVGKEDELDSLSEKLKIEHAKKKRLFDLYINGSYEVSELDSMMNDIDAQINYYESQIEANEELKKNKKIQENLANLATVDYDSLEFREKQLYLKSLINKIYIDGEQVTIEWL

SEQ ID NO: 3536 - protein, 452 aa, synthetic construct
MKAAIYIRVSTREQVENYSIQAQTERLTALCRSKNWDVYDIFVDGGYSGSNMNRPALNEMLSKLHEIDAVVVYRLDRLSRSQRDTITLIEEYFLKNDVEFVSLSETLDTSSSFGRAMIGILSVFAQLERETIRDRMVMGKIKRIEAGLPLTTAKGRTFGYDVIDTKLYINEEEAKQLQLIYDIFEEVQSITFLQKRLKKLGFKVHTYSRYNSWLTNDLYCGYVSYKDKVHVKGIHEPIISEEQFYRVQEIFTRVGKNPNMNRDSASLLNNLVVCNKCGLGFVHRRKDTTSRGKKYHYRYYSCKTYKHTHELEKCGNKIWRADKLEELIINRVNDYSFASRNADKEDELDSLNERLKVEHAKKKRLFELYINGSCEVSELDSMMNDIDAQINYYESQIEANEELRENKKIQESLANLATVDYDSLEFREKQLYLKSLINKIYIDGEQVTIEWL

SEQ ID NO: 3537 - protein, 485 aa, synthetic construct
MTKKVAIYTRVSTTNQAEEGFSIDEQIDRLTKYAEAMGWQVSDTYTDAGLSGAKLERPAMQRLINDIENKAFDTVLVYKLDRLSRSVRDTLYLVKDVFTKNKIDFISLSESIDTSSAMGSLFLTILSAINEFERENIKERMTMGKLGRAKSGKSMMWTKTAFGYYHNRKTGILEIVPLQATVVEQIFTDYLSGISLTKLRDKLNESGHIGKDIPWSYRTLRQTLDNPVYCGYIKFKDSLFEGMHKPIIPYETYLKVQKELEERQQQTYERNNNPRPFQAKYMLSGVARCGYCGAPLRIVLGHKRKDGSRTMKYHCANRFPRKTKGVTVYNDNKKCDSGTYDLSNLENTVIDNLIGFQENNDSLLKIINGNNQPILDTSSLKKQISQIDKKIQKNSDLYLNDFITMDELKDRTDSLQAEKKLLEAKISENKFNDSTDVFELVKTQLGSIPINELSYDNKKKIVNNLVSKVDVTADNVDIIFKFQLA

SEQ ID NO: 3538 - protein, 469 aa, synthetic construct
MSYTTPVRAAVYLRISEDRSGEQLGVARQREDCLRLCGQRNWVPVEYLDNDVSASTGRRRPAYEQMLADITAGKIAAVVAWDLDRLHRRPIELEAFMSLADEKRLALATVAGDVDLATPQGRLVARLKGCVAAHETEHKKARQRRAARQKAERGHPNWSKAFGYLPGPNGPEPDPRTAPLVRQAYADILAGASLGDVCRQWNDAGAFTVTGRPWTTTALSKFLRKPRNAGLRAYKGARYGPVDRDAIVGKAQWSPLVDEATFWAAQAVLDAPGRAPGRKSVRRHLLTGLAGCGKCGNHLAGSYRTDGQVVYVCKACHGVSILADNIEPILYHIVAERLAMPDAVDLLRREIHDAAEAETVRLELETLYSKLDRLAIERAEGLLTARQVKISTDIVNAKITKLQARQLDQERLRVLDGIPLGTPRVAGMIAELSPDRFRAVLDVLVEVVVQPVGKSGRIFNPERVRVDWR

SEQ ID NO: 3539 - protein, 485 aa, synthetic construct
MTKKVAIYTRVSTTNQAEEGFSIDEQTDRLTKYAEAMGWQVCDAYTDAGVSGAKLERPAMQRLINDIENKAFDTVLVYKLDRLSRSVRDTLYLVKDVFTKNKIDFISLNESIDTSSAMGSLFLTILSAINEFERENIKERMTMGKLGRAKSGKSMMWTKTAFGYYHNRKTGILEIVPLQATIVEQIFTDYLSGISLTKLRDKLNESGHIGKDIPWSYRTLRQTLDNPVYCGYIKFKDSLFEGMHKPIIPYETYLKVQKELEERQQQTYERNNNPRPFQAKYMLSGMARCGYCGAPLRIVLGHKRKDGSRTMKYHCANRFPRKTKGITVYNDNKKCDSGTYDLNNLENTVIDNLIGFQENNDSLLKIINGNNLPILDTSSFKKQISQIDKKIQKNSDLYLNDFITMDELKDRTDSLQAEKKLLKAKISENKFNDSTDVFELVKTQLGSVPINELSYDSKKKIVNNLVSKVVVTADNVDIIFKFQLA

SEQ ID NO: 3540 - protein, 452 aa, synthetic construct
MKAAIYIRVSTHEQVANYSIQAQTEKLTALCRSKDWDVYDIFIDGGYSGSNMNRPALNEMLSRLHEIDAVVVYRLDRLSRSQRDTTTLIEEYFLKNNVEFVSLSETLDTSSPFGRAMIGILSVFAQLERETIRDRMVMGKIKRIEAGLPLTTAKGRTFGYDVIDTKLYINEEEAKHLQLIYDIFEEEQSITSLQKRLKKLGFKVRTYNRYSNWLTNDLYCGYVSYKDKVHVKGIHEPIISEEQFYRVQEIFTRMGKNPNMNRDSASLLNSLVVCSKCGLSFVHRSKDTMSRGKRYHYRYYSCKTYKHTHELEKCGNKTWRADKLEELIINRVNKYSFASRNVDKGDELDSLNEKLKIEHAKKKRLFDLYINGSYEVSELDSMMNDIDAQINYYESQIEANEELKKNKKIQENLADLATVDFDSLGFREKQLYLKSLVNKIYIDGEQVTIEWL

SEQ ID NO: 3541 - protein, 485 aa, synthetic construct
MTKKVAIYTRVSTTNQAEEGFSIDEQIDRLTKYAEAMGWQVSDTYTDAGLSGAKLERPAMQRLINDIENKAFDTVLVYKLDRLSRSVRDTLYLVKDVFTKNKIDFISLNESIDTSSAMGSLFLTILSAINEFERENIKERMTMGKLGRAKSGKSMMWTKTAFGYYHNRKTGILEIVPLQATIVEQIFTDYLSGTSLTKLRDKLNESGHIGKDIPWSYRTLRQTLDNPVYCGYIKFKDSLFEGMHKPIIPYETYLKVQKELEERQQQTYERNNNPRPFQAKYMLSGMARCGYCGAPLRIVLGRKRKDGSRTMKYHCANRFPRKTKGITVYNDNKKCDSGTYDLSNLENTVIDNLIGFQENNDSLLKIINGNDQPNLDTSSFTKQISQIDKKIQKNSDLYLNDFITMDELKERTDSLQAEKKLLKAKISENKFNDSTDVFELVKTQLGSIPINELSYDNKKKIVNNLVSKVDVTADNVDITFKFQLA

SEQ ID NO: 3542 - protein, 452 aa, synthetic construct
MKAAIYIRVSTQEQVGNYSIQAQTEKLTALCRSKGWDVYDIFIDGGYSGSNMNRPALNEMLSKLHEIDAVVVYRLDRLSRSQRDTTTLIEEYFLKNNVEFVSLSETLDTSSPFGRAMIGILSVFAQLERETIRDRMVMGKIKRIESGLPLTTAKGRTFGYDVIDTKLYVNEEEAKQLRLIYDIFEEEQSITSLQKRLKKLGFKVRTYNRYNNWLTNDLYCGYVSYKDKVHVKGIHEPIISEEQFYRVQEIFTRMGKNPNMNRDSASLLSSLVVCSKCGLGFVHRSKDTMSRGKKYHYRYYSCKTYKHTHELEKCGNKTWRADKLEELIINRVINYSFASRNADKEDELDGLNEKLKIEHAKKKRLFDLYINGSYEVSELDSMMNDIDAQINYYESQIEANEELKKNKKIQENLADLATVDFDSLEFREKQLYLKSLINKIYIDGEQVTIEWL

SEQ ID NO: 3543 - protein, 452 aa, synthetic construct
MKAAIYIRVSTQEQVGNYSIQAQTEKLTALCRSKDWDVYDIFVDGGYSGSNMNRPALNEMLSKLHEIDAVVVYRLDRLSRSQRDTTTLIEEYFLKNNVEFVSLSETLDTSSPFGRAMIGILSVFAQLERETIRDRMVMGKIKRIEAGLPLTTAKGRTFGYDVIDTKLYINEEEARQLRLIYDIFEEVQSITSLQKRLKKLGFKVRTYNRYSNWLTNDLYCGYVSYKDKVHVKGIHEPIISEEQFYRVQEIFTRMGKNPNMNRDNASLLSNLVVCSKCGLGFVHRSKDTMSRGKKYHYRYYSCKTYKHTHELEKCGNKTWRADKLEELIINRVNNYSFAGRNVDKDDELDSLNEKLKIEHAKKKRLFDLYINGSYEVSELDNMMNDIDAQINYYESQIEANEELRKTRGIQENLADLPTVDFDSLEFREKQLYLKSLINKIYVDGEQVTIEWL

SEQ ID NO: 3544 - protein, 485 aa, synthetic construct
MTIKVAIYTRVSTTNQAEEGFSIDEQIDRLTKYAGAMGWQVSDTYTDAGFSGAKLERPAMQRLINDIETKAFDTVLVYKLDRLSRSVRDTLYLVKDVFTKNKIDFISLNESINTSSAMGSLFLTILSAINEFERENIKERMTMGKLGRAKSGKSMMWTKTAFGYYHNRKTGILEIVPLQATIVEQIFTDYLSGISLTKLRDKLNESGHIGKDIPWSYRTLRQTLDNPVYCGYIKFKDSLFEGMHEPIIPYETYLKVQKELEERQQQTYERNNNPRPFQAKYMLSGMARCGYCGAPLKIVLGHKRKDGSRTMKYHCANRFPRKTKGVTVYNDNKKCDSGTYDLSNLENAVIDNLIGFQENSDSLLKIINGDNQPILDTSSFKKRISQIDKKIQKNSDLYLNDFITMDELKDRTDSLQAERKLLKAKVSENKFNDSTDVFELVRTQLGSIPINELSYDNKKKIVNNLVSKVDVTADNVDIIFKFQLA

SEQ ID NO: 3545 - protein, 485 aa, synthetic construct; identical to SEQ ID NO: 789

SEQ ID NO: 3546 - protein, 452 aa, synthetic construct
MKAAIYIRVSTREQVENYSIQAQTEKLTALCRSKDWDVYDVFIDGGYSGSNMNRPALNEMLSKLHEIDAVVVYRLDRLSRSQRDTITLIEEYFLKNNVEFVSLSETLDTSSPFGRAMIGILSVFAQLERETIRDRMVMGKIKRIEAGLPLTTAKGRTFGYDVIDTKLYINEEEAKQLQLIYDIFEEEQSITLLQKRLKKLGFKVRTYNRYNNWLTNDLYCGYVSYKDKVHVKGIHEPIISEEQFYRVQEIFTRMGKNPNMNRDSASLLNNLVVCSKCGLGFVHRRKDAMSRDKKYHYRYYSCKTYKHIHELEKCGNKIWRADKLEELIINRVNNYSLASRNVDKEDELDSLNEKLQIEHAKKRRLFDLYISGSYEVSELDSMMNDIDAQINYYESQIEANEELKKNKKIQENLAEMATVDFDSLEFREKQLYLKSLINKIYIDGEQVTIEWL

SEQ ID NO: 3547 - protein, 452 aa, synthetic construct
MKAAIYIRVSTREQVENYSIQAQTEKLTALCRSKDWDVYDIFIDGGYSGSNMNRPALNEMLSKLHEIDAVVVYRLDRLSRSQRDTITLIEEYFLKNNVEFVSLSETLDTSSPFGRAMIGILSVFAQLERETIRDRMVMGKIKRIEAGLPLTTAKGRTFGYDVIDTKLYINEEEAKQLQLIYDIFEEEQSITFLQKRLKKLGFKVRTYNRYSNWLTNDLYCGYVSYKDKVHVKGIHEPIISEEQFYRVQEIFTRMGKNPNMNRDSASLLNNLVVCSKCGLGFVHRRKDVMRRGKKYHYRYYSCKTYKHIHELEKCGNKIWRADKLEELIINRVNNYSLASRNVDKEDELDSLNEKLRIEHAKKRRLFDLYINGSYEVSELDSMMNDIDAQINYYESQIEANEELKKNKKIQENLAHLATVDFDSLEFREKQLYLKSLINKIYIDGEQVTIEWL

SEQ ID NO: 3548 - protein, 452 aa, synthetic construct
MKAAIYIRVSTREQVENYSIQAQTEKLTALCRSKDWDVYDIFIDGGYSGSNMNRPALNEMLSKLHEIDAVVVYRLDRLSRSQRDTITLIEEYFLKNNVEFVSLSETLDTSSPFGRAMIGILSVFAQLERETIRDRMVMGKIKRIEAGLPLTTARGRTFGYDVIDTKLYINEEEAKQLQLIYDIFEEEQSITFLQKRLKKLGFKVRTYSCYNNWLTNDLYCGYVSYKDKVHVKGIHEPIISEEQFYRVQEIFARMGKNPNMNRDSASLLNSLVVCSKCGLGFVHRRKDTMSRGKKYHYRYYSCKTYKHTHELEKCGNKIWRADKLEELIINRVNNYSFASRNVDKEDELDSLNEKLKIEHAKKKRLFDLYINGSYEVSELDSMMNDIDAQINYYESQIEANEELKKNKKIQENLANLATVDYDSLEFREKQLYLKSLINKIYIDGEQVTIEWL

SEQ ID NO: 3549 - protein, 485 aa, synthetic construct
MTKKVAIYTRVSTTNQAEEGFSIDEQIDRLTKYAEAMGWQVSDTYTDAGLSGAKLERPAMQRLINDIENKAFDTVLVYKLDRLSRSVRDTLYLVKDVFTKNKIDFISLNESIDTSSAMGSLFLTILSAINEFERENIRERMTMGKLGRAKSGKSMMWTKTAFGYYHNRKTGILEIVPLQATVVEQIFTDYLSGVSLTKLRDKLNESGHIGKDIPWSYRTLRQTLDNPVYCGYIKYKDSLFEGMHEPIIPYETYLKVQKELEERQQQTYERNNNPRPFQAKYMLSGMARCGYCGAPLKIVLGHKRKDGSRTMKYHCANRFPRKTKGVTVYNDNKKCDSGTYDLSSLENTVIDNLIGLQENNDSLLKIINGNNQPILDTSSFKEQISQIDKKIQKNSDLYLNDFITMDELKDRTDSLQAEKKLLKAKISENKFNDSTDVLELVKTQLGSIPINELSYDNKKKIVNNLVSKVDVTADNVDIIFKFQLA

SEQ ID NO: 3550 - protein, 469 aa, synthetic construct
MSYTTPARAAVYLRISEDRSGEQLGVARQREDCLKLCDQRKWVPVEYLDNDVSASTGRRRPAYEQMLADITAGKIAAVVAWDLDRLHRRPIELEAFMSLADEKRLALATVAGDVDLATPQGRLVARLKGSVAAHETEHKKARQRRAARQKAERGHPNWSKAFGYLPGPNGPEPDPRTAPLVKQAYADILAGASLGDVCRRWNDAGALTITGRPWTTTTLSKFLRKPRNAGLRAYKGARYGPVDRDAIVGKAQWSPLVDEATFWAAQAVLDAPGRAPGRKSVRRHLLTGLAGCGKCGNHLAGSYRTDGRVVYVCKACHGVAILADNIEPILYHIVAERLAMPDAVDLLRREIHDAAEAETVRLELETLYGELDRLAVERAEGLLTARQVKISTDIVNAKITKLQACQLDQERLRVFDGIPLGTPRVAGMIAELSPNRFRAVLDVLAEVVVQPVGKSGRIFNPERVQVNWR

SEQ ID NO: 3551 - protein, 452 aa, synthetic construct
MKAAIYIRVSTREQVENYSIQAQTEKLTALCRSKDWDVYDIFIDGGYSGSNMNRPALNEMLSKLHEIDAVVVYRLDRLSRSQRDTITLIEEYFLKNNVEFVSLSETLDTSSPFGRAMIGILSVFAQLERETIRDRMVMGKIKRIEAGLPLTTAKGRTFGYDVIDTKLYVNEEEAKQLQLIYDIFEEEQSITSLQRRLKKLGFKVRTYNRYNSWLTNDLYCGYVSYKDKVHVKGIHEPIISEEQFYRVQEIFTRMGKNPNMNRDSASLLNNLVVCGKCGLGFVHRRKDTMNRGKKYHYRYYSCKTYKHTHELEKCGNKIWRADKLEGLIISRVNSYSLASRNVDKEDELNSLNEKLKIEHAKKKRLFDLYINGSYDVSELDSMMNDIDAQINYYEGQIEANEELKKSKKIQENLAGLAAVDFDSLEFREKQLYLKSLINKIYIDGEQVTIEWL

SEQ ID NO: 3552 - protein, 485 aa, synthetic construct
MTRKVAIYTRVSTTNQAEEGFSIDEQIDRLTKYAEAMGWQVSDTYTDAGSSGAKLERPAMQRLINDIENKAFDTVLVYKLDRLSRSVRDTLYLVKDVFTKNKIDFISLNESIDTSSAMGSLFLTILSAINEFERENIKERMTMGKLGRAKSGKSMMWTKTAFGYYHNRKTGILEIVPLQATIVEQIFTDYLSGISLTKLRDKLNESGHIGKDIPWSYRTLRQILDNPVYCGYIKFKGSLFEGMHKPIIPYETYLKVQKELEERQQQTYERNNNPRPFQAKYMLSGMARCGYCGAPLRIVLGHKRKDGSRTMKYHCANRFPRKTRGVTVYNDNKKCDSGTYDLSDLENTVIDNLIGFQENNDSLLEIINGNNQPIPDAGSFEKQISQIDKKIQKNSDLYLNDFITMDELKDRTDSLQAERKLLKAKISENKFTDSTDVFELVKTQLGSIPINELSYDNKKKIVNNLVSKVDVTADNVDIIFKFQLA

SEQ ID NO: 3553 - protein, 469 aa, synthetic construct
MSYTTPVRAAVYLRISEDRSGEQLGVARQREDCLKLCGQRKWVPVEYLDNDVSASTGKRRPAYEQMLADITAGKIAAVVAWDLDRLHRRPVELEAFMSLADEKRLALATVAGDVDLATPQGRLVARLKGCVAAHETEHKKARQRRAARQKAERGLPNWSKAFGYLPGPNGPEPDPRTAPLVKQAYADILAGASLGDVCRRWNDAGAFTITGRPWTTTTLSKFLRKPRNAGLRAYKGARYGPVDRGAIVGRAQWSPLVDEATFWAAQAVLDAPGRAPGRKSVRRHLLTGLASCGKCGNHLAGSYRTDGRVVYVCKACHGVAILADNIEPILYHIVAERLAMPGAVDLLRREVHDAAEAETIRLELETLYGELDRLAVERAEGLLTARQVKISTDIVNAKITKLQARQPDQERLRVFDGIPLGTPQVAGVIAELSPNRFRAVLDVLAEVVVQPVGKGGRTLNPERVQVNWR

SEQ ID NO: 3554 - protein, 452 aa, synthetic construct
MKAAIYIRVSTREQVENYSIQAQTEKLTALCRSKDWDVYDIFIDGGYSGSNMNRPALNEMLGKLHEIDAVVVYRLDRLSRSQRDTITLIEEYFLKNNVEFVSLSETLDTSSPFGRAMIGILSVFAQLERETIRDRMVMGKIKRIEAGLPLTTAKGRTFGYNAIDTKLHINEEEAKQLQLIYDIFEEERSITFLQKRLKKLGFKVHSYNRYNNWLTNDLYCGYVSYKDKVHVKGIHEPIISEEQFYRVQEIFTRMGKNPNMNRDSASLLNNLVVCGKCGLGFVHRRKDAMSRDKKYHYRYYSCKTYKHIHELEKCGNKIWRADKLEELIIDRVNNYSFASRNADKEGELDSLNEKLKIEHAKKRRLFDLYINGSYEVSELDSMMNDIDAQISYYESQIEANEELKKNKRIRENLADLAAVDFDSLEFREKQLYLKSLINKIYIDGEQVTIEWL

SEQ ID NO: 3555 - protein, 452 aa, synthetic construct
MKAAIYIRVSTREQVENYSIQAQTERLTALCRSKDWDVYDIFIDGGYSGSNMNRPALNEMLSKLHEIDAVVVYRLDRLSRSQRDTITLIEEYFLKNNVEFVSLSETLDTSSPFGRAMIGILSVFAQLERETIRDRMVMGKIKRVEAGLPLTTAKGRTFGYDVIDTKLYINEEEAKQLQLIYDIFEEEQSITFLQKRLKKLGFKVRTYSRYNNWLTNDLYCGYVSYKDKVHVKGVHEPIISEEQFYRVQEIFARMGKNPNMNRDSASLLSNLVVCSKCGLGFVHRRKGTMSRGKKYHYRYYSCKTYKHIHELEKCGNKIWRADKLEELVINRVNNYSFASRNVDKEDELANLNEKLKIEHAKKKRLFDLYINGSYEESELDSMMNDVDAQINYYESQIEANEELKRNKKIQENLANLATVDYDGLEFREKQLYLKSLINKIYIDGEQVTIEWL

SEQ ID NO: 3556 - protein, 469 aa, synthetic construct
MSYTTPVRAAVYLRISEDRSGEQLGVARQREDCLKLCGQRKWVPVEYLDNDVSASTGRRRPAYEQMLADITAGKIAAVVAWDLDRLHRRPIELEAFMSLADEKRLALATVAGDVDLATPQGRLVARLKGSVAAHETEHKKARQRRAARQKAERGLPNWSKAFGYLPGPNGPEPDPRTAPLVKQAYADILAGASLGDVCRQWNDAGAFTITGRPWTTTTLSKFLRKPRNAGLRAYKGARYGPVDRDAIVGKAQWSPLVDEATFWAAQAVLDAPGRAPGRKSVRRHLLTGLAGCGKCGNHLAGSYRTDGRVVYVCKACHGVAILADNIEPILYHIVAKRLAMPDAVDLLRRGIHDAAEAETIRLELETLYGELDRLAVERAEGLLTARQVKISTDIVNAKITELQARQLDQERLRVFDGIPLGTPQVAGVIAELSPDRFRAVLDVLAEVVVQPVGKSSRIFNPERVQVNWR

SEQ ID NO: 3557 - protein, 469 aa, synthetic construct
MSYTTPVRAAVYLRISEDRSGEQLGVARQREDCLKLCDQRKWAPVEYLDNDVSASTGKCRPAYEQMLADITAGKIAAVVAWDLDRLHRRPIELEAFMSLADEKRLALATVAGDVDLATPQGRLVARLKGSVAAHETEHKKARQRRAARQKAERGLPNWSKAFGYLPGPNGPEPDPRTAPLVEQAYADILAGASLGDVCRQWNDAGAFTITDRPWSTTTLSKFLRKPRNAGLRAYKGARYGPVDRDAIVGKAQWSPLVDEATFWAAQAVLDAPGRAPGRKSVRRHLLTGLAGCGKCGNHLAGSCRTDGQIVYVCKACHGVSILAVNIEPILYHIVAERLAMPDAVDLLRRETHDAAEAETIRLELEALYGELDRLAVERAEGLLTARQVKISTDIVNAKITKLQARQLDQERLRVFNGIPLGTPQVAGMIAELSPDRFRAVLDVLAEVVVQPVGKSGRIFNPERVQVNWR

SEQ ID NO: 3558 - protein, 452 aa, synthetic construct
MKAAIYIRVSTREQVENYSIQAQTEKLTALCRSKDWDVYDIFIDGGYSGSNMNRPALNEMLSKLHEIGAVVVYRLDRLSRSQRDTITLIEEYFLKNNVEFVSLSETLDTSSPFGRAMIGILSVFAQLERETIRDRMVMGKIKRIEAGLPLTTAKGRTFGYDVIDTKLYVNEEEAKQLQLIYDIFEEEQSITFLQKRLKKLGFKVRTYSRYNNWLTNDLYCGYVSYKDKVHVKGIHEPIISEEQFYRVQEIFARMGKNPNMNRVSASLLSNLVVCSKCGLGFVHRRKDTMSRGKKYHYRYYSCKTYKHIHELEKCGNKIWRADILEELIINRVSNYSFAGRNVDKEDELDSLNEKLKIEHAKKKRLLDLYTNGSYEVSELDSMMNDIDAQISYYESQIEANEELKKNKKIQENLADLATVDFDSLEFREKQLYLKSLINKIYIDGEQVTIEWL

SEQ ID NO: 3559 - protein, 452 aa, synthetic construct
MKAAIYIRVSTQEQVENYSIQAQTEKLTALCRSKDWDVYDIFIDGGYSGSNMNRPALNEMLSKLHEIDAVVVYRLDRLSRSQRDTTTLIEEYFLKNNVEFVSLSETLDTSSPFGRAMIGILSVFAQLERETIRDRMVMGKIKRIESGLPLTTAKGRTFGYDVIDTKLYINEEEAKQLQLIYDIFEEEQSITLLQKRLKKLGFKVRTYNRYNSWLTNDLYCGYVSYKDKVHVKGIHEPIISEEQFYRVQEIFTRMGKNPNMNRDSASLLNSLVVCSKCGLGFVHRSKDTMSRGKKYHYRYYSCKTYKHTHELEKCGNKTWRADILEELIINRVNNYSLASRNVDKEDELDSLNEKLKIEHAKKKRLFDLYINGSYEVSELDSMMNDIDAQINYYESQIEANEELKKNKKIQENPADLATVDFDSLEFREKQLYLKSLINKIYIDGEQVTIEWL

SEQ ID NO: 3560 - protein, 469 aa, synthetic construct
MSYTTPVRAAVYLRISEDRSGEQLGVARQREDCLKLCDQRKWVPVEYLDNDVSASTGKRRPAYEQMLADITAGKIAAVVAWDLDRLHRRPIELEAFMSLADEKRLALATVAGDVDLATPQGRLVARLKGCVAAHETEHKKARQRRAARQKAERGHPNWSKAFGYLPGPNGPEPDPRTAPLVKQAYADILAGASLGDVCRQWNDVGAFTITGRPWTTTTLSKFLRKPRNAGLRAYKGARYGPVDRDAIVGKAQWSPLVDEAIFWAAQAVLDAPGRAPGRKSVRRHLLTGLASCGKCGNHLAGSYRTDGRVVYVCKACHGVSILAVNIEPILYHIVAERLAMPDAVDLLRREIHDAAKAETIRLELETLYGELDRLAVERAEGLLTARQVKISTDIVNAKITKLQACQLDQERLRVFDGIPLGTPQVAGMIAGLSPDRFRAVLDVLAEVVVQPVGRGGRIFNPERVQVNWR

SEQ ID NO: 3561 - protein, 485 aa, synthetic construct
MTKKVAIYTRVSTTNQAEEGFSIDEQIDRLTKYAEAMGWQVSDTYTDAGLSGAKLERPAMQRLINDIENKAFDTVLVYKLDRLSRSVRDTLYLVKDVFTKNKIDFISLNESIDTSSAMGSLFLTILSAINEFERENIKERMTMGKLGRAKSGKSMMWTKTAFGYYHNRKTGILEIVPLQATIVEQIFTDYLSGISLTKLRDKLNESGHIGKDIPWSYRTLRQTLDNPVYCGYIKFKDSLFEGMHKPIIPYETYLKVQKELEERQQQTYERNNNPRPFQAKYMLSGMARCGYCGAPLRIVLGHKRKDGSRTMKYHCANRFPRKTKGVTVYNDNKKCDSGTYDLSNLENTVIDNLVGLQENNDNLLKIINGNNQPILDTSSFKKQISQIDKKIQKISDLYLNDFITMDELKDRTDSLQAEKKLLKAKISENKFNDSTDVFELVKTQLGSIPINELSYDNKKKIVNNLVSKVDVTADNVDIIFKFQLA

SEQ ID NO: 3562 - protein, 452 aa, synthetic construct
MKAAIYIRVSTQEQVENYSIQAQTEKLTALCRSKDWDVYDIFIDGGYSGSNMNRPALNEMLSKLHEIDAVVVYRLDRLSRSQRDTTTLIEEYFLKNNVEFVSLSETLDTSSPFGRAMIGILSVFAQLERETIRDRMVMGKIKRIEAGLPLTTAKGRTFGYDVIDTKLYVNEEEAKQLQLIYDIFEEEQSITLLQKRLKKLGFKVRTYNRYNSWLTNDLYCGYVSYKDKVHVKGIHEPIISEEQFYRVQEIFTRTGKNPNMNRDSASLLSNLVVCSKCGLGFVHRSKDTMSRGKKYHYRYYSCKTYKHTHELEKCGNKTWRADKLEELIISRVNNYSLASRSVDKEDELDSLNEKLKIERARKKRLFDLYINGSYEVSELDSMMNDIDAQINYYESQIEAKEELRKNKKIQENLADLAAVDFDSLEFREKRLYLKSLINKIYIDGEQVTIEWL

SEQ ID NO: 3563 - protein, 485 aa, synthetic construct
MTKKVAIYTRVSTTNQAEEGFSIDEQIDRLTKYAEAMGWQVSDTYTDAGFSGAKLERPAMQRLISDIENRAFDTVLVYKLDRLSRSVRDTLYLVKDVFTKNKIDFISLNESIDTSSAMGSLFLTILSAINEFERENIKERMTMGKLGRAKSGKSMMWTKTAFGYYHNHKTGILEIVPLQATIVEQIFTDYLSGISLTKLRDKLNESGHIGKDIPWSYRTLRQTLDNPVYCGYIKFKDSLFEGMHKPIIPYETYLKVQIELEERQQQTYERNNNPRPFQAKYMLSGMARCGYCGAPLRIVLGHKRKDGSRTMKYHCANRFPRKTKGVTVYNDNKKCDSGTYDLSNLENTVIDNLIGFQENNDSLLKIINGNNQPILDTSSFKKQISQIDKKIQKNSDLYLNDFITMDELKDRTDSLQAEKRLLEAKISENKFNDSTDVFELVKAQLGSIPINELSYDNKKKIVNNLVSKVDVTADNVDIIFKFQLA

SEQ ID NO: 3564 - protein, 485 aa, synthetic construct
MTKKVAIYTRVSTTNQAEEGFSIDEQTDRLTKYAEAMGWQVGDTYTDAGFSGAKLERPAMQRLINDIESKAFDTVLVYKLDRLSRSVRDTLYLVKDVFTKNKIDFISLNESIDTSSAMGSLFLTILGAINEFERENIKERMTMGKLGRAKSGKSMMWTKTAFGYYHNRKTGILEIVPLQATIVEQIFTDYLSGISLTKLRDKLNESGHIGKDIPWSYRTLRQTLDNPVYCGYIKFKGSLFEGMHKPIIPYETFLKVQKELEERQQQTYERNNNPRPFQAKYMLSGMARCGYCGAPLRIVLGHKRKDGSRTMRYHCANRFPRKTKGVTAYNDNKKCDSGAYDLSNLENTVIANLIGFQENNDSLLKIINGNNQPILDTSSFKKQISQIDKKIQKNSDLYLNDFITMDELKDRTDSLQAEKKLLKAKISENKFNDSTDVFELVKTQLGSIPINELSYDDKKKIVNNLVSKVDVTADNVDIIFKFQLA

SEQ ID NO: 3565 - protein, 452 aa, synthetic construct
MKAAIYIRVSTREQVENYSIQAQTEKLTALCRSKGWDVYDIFIDGGYSGSNMNRPALNEMLSKLHEIDAVVVYRLDRLSRSQRDTITLIEEYFLKNNVEFVSQNETLDTSSPFGRAMIGILSVFAQLERETIRDRMVMGKIKRIEAGLPLTTAKGRTFGYDVIDTKLYINEEEAKQLQLIYDIFEEEQSITFLQKRLKKLGFKVRTYNRYNNWLTNDLYCGYVSYKDKVHVKGIHEPIISEEQFNRVQEIFTRMGKNPNMNRDSASLLNNLVVCSKCGLGFVHRRKDAMSRDKKYHYRYYSCKTYKHIHELEKCGNKIWRADKLEELIINRVNNYSLASRNVDKEDELDSLNEKLKTEHAKKKRLFELYINGSYEVSELDSMMNDIDAQIGYYESQIEANKELKKDKKIQENLADLATVDFDSLEFREKQLYLKSLINKIYIDGEQVTIEWL

SEQ ID NO: 3566 - protein, 485 aa, synthetic construct
MTKKVAIYSRVSTINQAEEGFSIDEQIDRLTKYAEAMGWQVSDTYTDAGFSGAKLERPAMQRLINDIEDKAFDTVLVYKLDRLSRSVRDTLYLVKDVFTKNKIDFISLNESIDTSSAMGNLFLTILGAINEFERENIKERMTMGKLGRAKSGKSMMWTKTAFGYHHNRKTGILEIVPLQATIVEQIFTDYLSGISLTKLRDKLNESGHIGKDIPWSYRTLRQTLDNPVYCGYIKFKDSLFEGMHKPIIPYETYLKVQKELEERQQQTYERNNNPRPFQAKYMLSGIARCGYCGAPLRIVLGHKRKDGSRTMKYHCANRFPRKTKGVTVYNDNKKCDSGTYDLCNLENTVIDNLFGFQENNDSLLKIINGNNQPILDTSSFKEQISRIDKKIQKNSDLYLNDFITMDELKDRTDSLQAEKRLLKARISENKFNDSTDVFELVKTQLGSIPINELSYDDKKKIVNNLVSKVDVTADSVDIIFKFQLA

SEQ ID NO: 3567 - protein, 452 aa, synthetic construct
MKAAIYIRVSTQEQVGNYSIQAQTEKLTALCRSKDWDVYGIFVDGGYSGSNMNRPALNEMLSKLHEIDAVVVYRLDRLSRSQRDTTTLIEEYFLKNNVEFVSLSETLDTSSPFGRAMIGILSVFAQLERETIRDRMVMGKIKRIEAGLPLTTAKGRTFGYDVIDTKLYINEEEAKQLQLIYDIFEEEQSITFLQKRLKKLGFKVRTYNRYNNWLTNDLYCGYVSYKDKVHVKGIHEPIISEEQFYRVQEIFARMGENPNMNRDSASLLNNLVVCGKCGLGFVHRSKDTMSRGKKYHYRYYSCKTYKHTHELEKCGNKTWRADKLEELIINRVNNYSFASRNADKEDELDGLNEKLKIEHARKKRLFDLYINGSYEVSELDSMMSDIDAQINHYESQIEANEELRKNKKIQENLADLAAVDFDSLEFREKRLYLKSLIDKIYIDGEQVTIEWL

SEQ ID NO: 3568 - protein, 485 aa, synthetic construct
MTRKVAIYTRVSTANQAEEGFSIDEQIDRLTKYAEAMGWQVSDTYTDAGLSGAKLERPAMQRLINDIENKAFDTVLVYKLDRLSRSVRDTLYLVKDVFTKNKIDFISLNESIDTSSAMGSLFLTILSAINEFERENIKERMTMGKLGRAKSGKSMMWTKTAFGYYHNRKTGILEIVPLQATIVEQIFTDYLSGISLTKLRDKLNESGHIGKDIPWSYRTLRQTLDNPVYCGYIKFKGSLFEGMHKPIIPYETYLKVQKELEERQQQTYERNNNPRPFQAKYMLSGMARCGYCGAPLRIVLGRKRKDGSRTMKYHCANRFPRRTKGITVYNDNRKCDSGTYDLSNLENTVINNLIGFQENNDSLLRIINGNNQPIPDTSSFEKQISQIDKKIQKNGDLYLNDFITMDELKDRTDSLQAEKKLLKAKISENKFNDRTDVSELVKTQLGSIPINELSYDNKKKIVNNLVSKVDVTADNVDIIFKFQLA

SEQ ID NO: 3569 - protein, 452 aa, synthetic construct
MKAAIYIRVSTREQVENYSIQAQTEKLTALCRSKDWDVYDIFIDGGYSGSNMNRPALNDMLSKLHEIDAVVVYRLDRLSRSQRDTITLIEEYFLKNNVEFVSLCETLDTSSPFGRAMIGILSVFAQLERETIRDRMVMGKIKRIEAGLPLTTAKGRTFGYDVIDTKLYINEEEAKQLRLIYDIFEEEQSITFLQKRLKKLGFKVRTYSRYNNWLTNDLYCGYVSYKDKVHVKGIHEPIISEEQFYRVQEIFTRMGENPNMNRDSASLLNNLVVCSRCGLGFVHRRKDTMSRGKKYHYRYYSCKTYKHIHELEKCGNKIWRADKLEELIINRVNNYSLASRVADKEDELDSLNEKLKIEHAKKKRLFELYINGSYEVSELDSMMNDIDAQINYYESQIKANEELKKNKKIQENLAELATVDFDSLEFREKQLYLKSLINKIYIDGEQVTIEWL

SEQ ID NO: 3570 - protein, 485 aa, synthetic construct
MTKKVAIYTRVSTTNQAEEGFSIDEQIDRLTKYAEAMGWQVSDTYTDAGLSGAKLERPAMQRLINDIENKAFDTVLVYKLDRLSRSVRDTLYLVKDVFTKNKIDFISLNESIDTSSAMGSLFLTILSAINEFERENIKERMTMGKLGRAKSGKSMMWTKTAFGYYHNRKTGILEIAPLQAAIVEQIFTDYLSGISLTKLRDKLNESGHIGKDIPWSYRTLRQTLDNPVYCGYIKFKDSLFEGMHKPIIPYETYLKVQKELEERQQQTYERNNNPRPFQAKYMLSGMARCGYCGAPLRIVLGHKRKDGSRTMKYHCANRFPRKTKGVTVYNDNKKCDSGTYDLSNLENTVIDNLVGFQEDNDSLLKIINGNNQPILDTSGLKEQISQIDKKIQKNSDLYLNDFITMDELKDRTDSLQAEKKLLKAKISENKFNDSTDVFELVKIQLGSIPINELSYDNKKKIVNSLVSKVDVTADNVDIIFKFQLA

SEQ ID NO: 3571 - protein, 469 aa, synthetic construct
MSYTTPVRAAVYLRISEDRSGEQLGVARQREDCLKLCGQRKWVPVEYLDNDVSASTGKRRPAYEQMLADITAGKIAAVVAWDLDRLHRRPIELEAFMNLADEKRLALATVAGDVDLATPQGRLVARLKGSVAAHETEHKKARQRRAARQKAERGYPNWSKAFGYLPGPNGPEPDPRTAPLVKQAYADILAGASLGDVCRQWNDAGAFTITGRPWATTTLSKFLRKPRNAGLRAYKGARYGPVDRDAIVGKAQWSPLVDEATFWAAQAVLDAPGRAPGRKSVRRHLLTGLAGCGKCGNHLAGSYRTDGRVVYVCKACHGVTILADNIEPILYHIVAERLAMPDAVDLLRREIHDAAEAETIRLELETLYGELDRLAVERAEGLLTARQVKISTDIVDAKIAKLQARQLDQERLRVFDGIPLGTPQVAGVIAELSPNRFRAVLDVLAEVVVQPVGKSGRISNPERVQVNWR

SEQ ID NO: 3572 - protein, 485 aa, synthetic construct
MTKKVAIYTRVSTTNQAVEGFSIDEQIDRLTKYAEAMGWQVSDTYTDAGFSGAKLGRPAMQRLINDIENKVFDTVLVYKLDRLSRSVRDTLYLVKDVFTKNKIDFISLNESINTSSAMGSLFLTILSAINEFERENIKERMTMGKLGRAKSGKSMMWTKTAFGYYHNRKTGILEIVPLQATIVEQIFTDYLSGISLTKLRDKLNEGGHIGKDIPWSYRTLRQTLDNPVYCGYIKFKDSLFEGMHKPIIPYETYLKVQKELEERQQQTYERNNNPRPFQAKYMLSGIARCGYCGAPLRIVLGHKRKDGSRTMKYHCANRFPRKTKGVTVYNGNKKCDSGTYDLSNLENTVIDNLIGLQENNDSLLKIINGNNQPSLDTSSFEEQISQIDKKIQKNSDLYLNDFITMDELKDRTDSLQAEKKLLKAKISENKFNDSTDVFELVKTQLGSIPINELSYDNKKKIVNNLVSKVDVTADNVDIIFKFQLA

SEQ ID NO: 3573 - protein, 485 aa, synthetic construct
MTKKVAIYTRVSTTNQAEEGFSIDEQIDRLTKYAEAMGWQVSDTYTDAGFSGAKLERPAMQRLINDIENKAFDTVLVYKLDRLSRSVRDTLHLVKDVFTKNKIDFISLNESINTSSAMGSLFLTILSAINEFERENIKERMTMGKLGRAKSGKSMMWTKTAFGYYHNRKTGILEIVPLQATIVEQIFTDYLSGISLTKLRDKLNESGHIGKDIPWSYRTLRQILDNPVYCGYIKFKDSLFEGMHKPIIPYETYLKVQKELEERQQQTYERNNNPRPFQAKYMLSGMARCGYCGAPLRIVLGHKRKDGSRTMKYHCANRFPRKAKGVTVYNDNKKCDSGTYDLSSLENTVIDNLIGFQENNDSLLKIINGSNQPILDTSGLKNQISQIDKKIQKNSDLYLNDFITMDELKDRTDSLQAEKKLLKAKISENKSNDSTDVFELVKTQLGSIPINELSYDNKKKIVNSLVSKVDVTADNVDIIFKFQLA

SEQ ID NO: 3574 - protein, 452 aa, synthetic construct
MKAAIYIRVSTREQVENYSIQAQTEKLTALCRSKDWDVYDIFIDGGYSGSNMNRPALNEMLSKLHEIDAVVVYRLDRLSRSQRDTITLIEEHFLKNNVEFVSLSETLDTSSPFGRAMIGILSVFAQLERETIRDRMVMGKIKRVEAGLPLTTAKGRTFGYDVIDTKLYINEEEARQLRLIYDIFEEEQSITFLQKRLKKLGFKVRTYNRYNNWLTNDLYCGYVSYKDKVHVKGIHEPIISEEQFYRVQEIFTRMGKNPNTNRDSASLLNNLVVCSKCGLGFVHRRKDTMSRGKKYHYRYYSCKTYKHTYELEKCGNKIWRADKLEELIINRVDNYSFASRNVGKEDELDSLNEKLKIEHAKKKRLFDLYINGSYEVSELDSMMNDIDAQINYYEGQIEANEELKINKKIQENLAYLATVDYDSLEFREKQLYLKSLINKIYIDGELVTIEWL

SEQ ID NO: 3575 - protein, 485 aa, synthetic construct
MTKKVAIYTRVSTTNQAEEGFSIDEQIDRLTKYAEAMGWQVSDTYTDAGFSGAKLERPAMQRLINDIENRAFDTVLVYKLDRLSRSVRDTLYLVKDVFTKNKIDFISLSESIDTSSAMGSLFLTILSAINEFERENIKERMTMGKLGRARSGKSMMWTKTAFGYYHNRKTGILEIVPLQATIVEQIFTDYLSGISLTKLRDKLNESGHIGKDIPWSYRTLRQTLDNPVYCGYIKFKGSLFEGMHKPIIPYETFLKVQKELEERQQQTYERNNNPRPFQAKYMLSGMARCGYCGAPLRIVLGHKRKDGSRTMKYHCANRFPRKTKGVTVYNDNKKCDSGTYDLSNLENTVIDNLISFQENNDSLLKIINGNNQPILDTSSFREQISQIDKKIQKNSDLYLNDFITMDELKDRTDSLQAEKKLLKAKISENKFNVSIDVFELVKTQLGSIPINELSYDNKKKIVNNLVSKVDVTADNVDIIFKFQLV

SEQ ID NO: 3576 - protein, 485 aa, synthetic construct
MTKKVAIYTRVSTTNQAEEGFSIDEQIDRLTKYAEAMGWQVSDTYTDAGLSGAKLERPAMQRLINDIENKAFDTVLVYKLDRLSRSVRDTLYLVKDVFTKNKIDFISLNESIDTSSAMGSLFLAILSAINEFERENIKERMTMGKLGRAKSGKSMMWTKTAFGYYHNRKTGILEIVPLQATIVEQIFADYLSGISLTKLRDKLNESGHIGKDIPWSYRTLRQTLDNPVYCGYIKFKGSLFEGMHKPIIPYETYLKVQKELEERQQQTYERNNNPRPFQAKYMLSGMARCGYCGAPLRIVLGHKRKDGSRTMRYHCANRFPRKTEGVTVYNDNKKCDSGTYDLSNLENTVIDNLIGFQENNDSLLKIINGNNQPILDTSSFKKQISQIDKKIQKNSDLYLNDFITMDELKDRTDSLQAEKKLLEAKISESKFNDSTDVFELVKTQLGSIPINELSYDDKKKIVNNLVSKVDVTADNVDIIFKFQRA

SEQ ID NO: 3577 - protein, 452 aa, synthetic construct
MKAAIYIRVSTQEQVGNYSIQAQTEKLTALCRSKDWDVYDIFIDGGYSGSNMNRPALNEMLSKLHEIDAVVVYRLDRLSRSQRDTTTLIEEYFLKNNVEFVSLSETLDTSSPFGRAMIGILSVFAQLERETIRDRMVMGKIKRIEAGLPLTTAKGRTFGYDVIDTKLYINEEEAKQLRLIYDIFEEEQSITFLQKRLKKLGFKVRTYSRYYSWLTNDLYCGYVSYKDKVHVKGIHEPIISEEQFYRVQEIFTRTGKNPNMNRDSASLLNNLVVCSKCGLGFVHRSKDTMCRGKKYHYRYYSCKTYKHTHELEKCGNKTWRADKLEELIIDRVNNYSFASRNVGKEDELDSLNEKLRIEHVKKKRLFDLYINGSYEVSELDSMMSDIDAQINYYESQIEANEELRKNKKTQENLADLAAVDFDSLEFREKQLYLKSLINKIYIDGEQVTIEWL

SEQ ID NO: 3578 - protein, 485 aa, synthetic construct
MTKKVAIYTRVSTTNQAEEGFSIDEQVDRLTKYAEAMGWQVSDTYTDAGLSGAKLERPAMQRLINDIENKAFDTVLVYKLDRLSRSVRDTLYLVKDVFTKNKIDFISLNESIDTSSAMGSLFLTVLSAINEFERENIKERMTMGKLGRAKSGKSMMWTKTAFGYYHNRKTGILEIVPLQATIVEQIFTDYLSGISLTKLRDKLNESGHIGKDIPWSYRTLRQTLDNPVYCGYIKFKGSLFEGMHKPIIPYETYLKVQKELEERQQQTYERNNNPRPFQAKYMLSGMARCGYCGAPLRIVLGHERKDGSRTMRYHCVNRSPRKTKGVTVYNDNKKCDSGTYDLRNLENTVIDNLIGFQENNDSLLKIINGNNQPILDTSSLKKQISQIDKKIQKNSDLYLNDFITMDELRDRTDSLQAEKKLLKAKISENEFNDSTDVFERVKAQLGSIPINELSYDDKKKIVNNLVSKVDVTADNVDIIFKFQLA

SEQ ID NO: 3579 - protein, 452 aa, synthetic construct
MKAAIYIRVSTQEQVGNYSIQAQTEKLTALCRSKGWDVYDIFIDGGYSGSNMNRPALNEMLSKLHEIDAVVVYRLDRLSRSQRDTTTLIEEYFLKNNVEFVSLSETLDTSSPFGRAMIGILSAVAQLERETIRDRMVMGKIKRIESGLPLTTAKGRTFGYDVIDTKLYINEEEAKQLQLIYDIFEEEQSITSLQKRLKELGFKVRSYNRYNNWLTNDLYCGYVSYKDEVHVKGIHEPIISEEQFYRVQEIFARMGKNPNMNRDSASLLSNLVVCSKCGLGFVHRSKDTMCRGKKYHYRYYSCKTYKHTHELEKCGNKTWRADRLEELIINRVNNYSFASRSVDKEDELDSLNEKLKVEHAKTKRLFDLYINGGYEVSELDSMMNDIDAQINYYESQIEASKELKKTKKIQENLADLATVDFDSLEFREKQLYLKSLINKIYIDGEQVTIEWL

SEQ ID NO: 3580 - protein, 452 aa, synthetic construct
MKAAIYIRVSTREQVENYSIQAQTEKLTALCRSKDWDVYDIFIDGGYSGSNMNRPALNEMLSKLHEIDAVVVYRLDRLSRSQRDTITLIEEYFLKNNVEFVSLSETLDTSSPFGRAMIGILSVFAQLERETIRDRMVMGKIKRIEAGLPLTTAKGRTFGYDVVDTKLYINEEEARQLQLIYDIFEEEQSITSLQRRLKKLGFKVHTYNRYNNWLTNDLYCGYVSYKDKVHVKGIHEPIISEEQFYRVQEIFTRMGKNPNMNRDSASLLNNLVVCSKCGLGFVHRRKDAMSRDKKYHYRYYSCKTYKHIHELEKCGNKIWRADKLEELIINRVNDYSLACRNVDKEDELDSLNEKLKVEHAKKKRLFDLYINGRYEVSELDSMMNDIDAQINHYESQIEANEALEKSKKIQENLAHLATVDFDSLEFREKQLYLKSLINKIYIDGEQVTIEWL

SEQ ID NO: 3581 - protein, 469 aa, synthetic construct
MSYTTPVRAAVYLRISEDRSGEQLGVARQREDCLKLCDQRKWVPVEYLDNDVSASTGKRRPAYEQMLEDIAAGKIAAVVAWDLDRLHRRPIELEAFMCLADERRLALATVAGDVDLATPQGRLVARLKGCVAAHETEHKKARQRRAARQKAERGLPNWSKAFGYLPGPNGPEPDPRTAPLVKQAYADILAGASLGDVCRQWNDAGAFTITGRPWTTTTLSKFLRKPRNAGLRAYKGARYGPVDRDAIVGKAQWRPLVDEATFWAAQAVLDAPGRAPGRKSVRRHLLTGLAGCGKCGNHLAGSYRTDGRVVYVCKACHGVSILADIIEPILYRIVAERLAMPDAVDLLRREIHDAAEAETIRLELEILYGELDRLAVERAEGLLTARQVKISTDIVNAKITKLRARQLDQERLRVFDGIPLGTPQVAGVIAELSPDRFRAVLDVLAEVVVQPVGKSGRIFNPERVRVNWH

SEQ ID NO: 3582 - protein, 469 aa, synthetic construct
MSYTTPVRAAVYLRISEDRSGEQLGVARQREDCLKLCGQRKWVPVEYLDNDVSASTGKRRPAYEQMLADITAGKIAAVVAWDLDRLHRRPIELEAFMSLADEKRLALATVAGDVDLATPQGRLVARLKGCVAAHETEHKKARQRRAARQKAERGLPNWSKAFGYLPGPNGPEPDPRTAPLVKQAYTDILAGASLGDVCRQWNDAGAFTITGRPWTTTTLSKFLRKPRNAGLRAYKGARYGPVDRDAIVGKAQWSPLVDEATFWAAQAVLDAPGRAPGRKSVRRHLLTGLAGCGKCGNHLAGSYRTDGRVVYVCKACYGIAILADNIEPILYHIVAERLAMPDAVDLLCREIHDAAEAETIRLELETLCGELDRLAVERAEGLLTARQVKISTDIVNAKITKLRARQLDQERLRVLDGIPLGTPQVAGMIAELSPDRFRAVLDVLAEVVVQPVGKRGGISDPERVQVNWR

SEQ ID NO: 3583 - protein, 485 aa, synthetic construct
MIKKVAIYTRVSTTNQAEEGFSIDEQIDRLTKYAEAMGWQVSDTYTDAGFSGAKLERPAMQRLINDIENKAFDTVLVYKLDRLSRSVRDTLYLVKDVFTKNKIDFISLNESIDTSSAMGSLFLTILSAINEFERENIKERMTMGKLGRAKSGKSMMWTKTAFGYYHNRETGILEIVPLQATIVEQIFTDYLSGISLTKLRDKLNEGGHIGKDIPWSYRTLRQTLDNPVYCGYIKFKDSLFEGMHKPIIPYETYLKVQKELEERQQQTYERNNNPRPFQAKYMLSGMARCGYCGAPLRIVLGHKRKDGSRTMKYHCANRFPRKTKGVTVYNDNKKCDSGTYDLRNLENTVIDNLIGFQENNDSLLKVINGNNQPILDTSSFKKQISQIDKKIQKNSDLYLNDFITMDELRDRTDSLQAEKRLLKAKISENKFNDSTDVFELVKTQLGSIPINELSYDNKKKIVNNLVSKVDVTADNVDIIFKFQLA

SEQ ID NO: 3584 - protein, 452 aa, synthetic construct
MKAAIYIRVSTREQVENYSIQAQTEKLTALCRSKDWDVYDIFIDGGYSGSNMNRPALNEMLSKLHEIDAVVVYRLDRLSRSQRDTITLIEEYFLKNNVEFVSLSETLDTSSPFGRAMIGILSVFAQLERETIRDRMVMGKIKRIEAGLPLTTAKGRTFGYDVIDTKLYINEEEAKQLQLIYDIFEEVQSITFLQKRLKKLGFRVHTYNRYNNWLTNDLYCGYVSYKDKVHVKGIHKPIISEEQFYRVQEIFTRMGRNPNMNRDSASLLNNLVVCSKCGLGFVHRRKDAMSRDKKYHYRYYSCKTYKHIHELEKCGNKIWRADKLEELIISRVNNYSLASRNVGKEDELDSLNEKLRIEHAKKRRLFDLYINGNYEVSELDSMMSDIDVQINYYESRIEANEELKKNKKIQENLAELATVDFDSLEFREKQLYLKSLINKIYIDGEQVTIEWL

SEQ ID NO: 3585 - protein, 452 aa, synthetic construct
MKAAIYIRVSTREQVENYSIQAQTEKLTALCRSKDWDVYDIFIDGGYSGSNMNRPALNEMLSRLHEIDAVVVYRLDRLSRSQRDTITLIEEYFLKNNVEFVSLSETLDTSSPFGRAMIGILSVFAQLERETIRDRMVMGKIKRIEAGLPLTTAKGRTFGYDVIDTKLYINEEEAKQLRLIYDIFEEEQSITFLQKRLKKLGFKVRTYNRYNNWLTNDLYCGYVSYKDKVHVKGIHEPIISEEQFYRVQEIFTRMGKNPNMNRDSASLLNNLVVCSRCGLGFVHRRKDTMSRGKKYHYRYYSCKTYKHTHELEKCGNKIWRADKLEELIVNRVNNYSFASRNVDKEDELDSLNEKLKIEHAKKKRLFNLYINGSYEVSELDSMMNDIDAQINYYESQIETNEGLKKNKKIQESLANLATVDYDSLEFREKQLYLKSLINKIYIDGEQVTIEWL

SEQ ID NO: 3586 - protein, 485 aa, synthetic construct
MTKKVAIYTRVSTTNQAEEGFSIDEQIDRLAKYAEAMGWQVSGTYTDAGFSGAKLERPAMQRLINDIENKAFDTVLVYKLDRLSRSVRDTLYLVKDVFTKNKIDFISLSESIDTSSAMGSLFLTILSAINEFERENIKERMTMGKLGRAKSGKSMMWTKTAFGYYHNRKTGILEIVPLQATIVEQIFTDYLSGISLTKLRDKLNESGHIGKDIPWSYRTLRQTLDNPVYCGYIKFKDSLFEGMHKPIIPYETYLKVQKELEERQQQTYVRNNNPRPFQAKYMLSGMARCGYCGAPLRIVLGHKRKDGSRTTKYHCTNRFPRKTKGVTVYNDNKKCDSGTYDLSNLENTVIDNLIGFQENNDSLLRIINGNNQPILETSSLKEQISQIDKKIQKNSDLYLNDFITMDELKDRTDSLQAEKKLLKAKISENKFNDSTDVFELVRTQLGSIPINELSYDNKKKIVNNLVSKVDVTADNVDIIFKFQLA

SEQ ID NO: 3587 - protein, 485 aa, synthetic construct
MTKKVAIYTRVSTTNQAEEGFSIDEQIDRLTKYAEAMGWRVSDTYTDAGSSGAKLERPAMQRLINDIESKAFDTVLVYKLDRLSRSVRDTLYLVKDVFTKNKIDFISLNESIDTSSAMGSLFLTILSAINEFERENIKERMTMGKLGRAKSGKSMMWTKTAFGYYHNRKTGILEIVPLQATIVEQIFTDYLSGISLTKLRDKLNESGHIGKDIPWSYRTLRQTLDNPVYCGYIKFKDSLYEGMHKPIIPYEIYLKVQKELEERQQQTYERNNNPRPFQAKYMLSGMARCGYCGAPLRIVLGHKRKDGSRTMKYHCANRFPRKTKGVTVYNDNKKCDSGTYDLSNLESTVIDGLIGFQENNDSLLNIINGNNQPILGASSFKEQISQIDKKIRKNSDLYLNDFITMDELKDRTDSLQAEKKLLKAKISENRFNDSTDVFELVKAQLGSIPINELSYDNKKKIVNNLVSKVDVTADNVDIIFKFQLA

SEQ ID NO: 3588 - protein, 485 aa, synthetic construct
MTKKVAIYTRVSTTSQAEEGFSIDEQIDRLTKYAEAMGWQVSDTYTDAGFSGAKLERPAMQRLINDIENKAFDTVLVYKLDRLSRSVRDTLYLVKDVFTKNNIDFISLNESIDTSSAMGSLFLTILSAINEFERENIKERMTMGKLGRAKSGKSMMWTKTAFGYYHNRKTGILEIVPLQATIVEQIFTDYLSGISLTKLRDKLNESGHIGKDIPWSYRTLRQTLDNPVYCGYIKFKDSLFEGMHKPIIPYETYLRVQKELEERQQQTCERNNNPRPFQAKYMLSGMARCGYCGAPLRIVLGHKRKDGSRTMKYHCANRFPRKTKGVTVYNDNKKCDSGTYDLSNLENTVIDNLIGFQENNDSLLKIINGNNQPILDTSSLKKQISQIDKKIQKNSDLYLNDFITMDELKDRTDSLQAEKRLLEAKISENKFDDSTDVFELVKTQLGSIPINELSYDNKKKIVNNLVSKVDVTADNVDIIFKFQLA

SEQ ID NO: 3589 - protein, 452 aa, synthetic construct
MKAAIYIRVSTREQVENYSIQAQTEKLTALCRSKGWDVYDIFIDGGYSGSNMDRPALNEMLSRLHEIDAVVVYRLDRLSRSQRDTITLIEEYFLKNNVEFVSLSETLDTSSPFGRAMIGILSVFAQLERETIRDRMVMGKIKRIEAGLPLTTAKGRTFGYDVIDTKLYINEEEAKQLQLIYDIFEEEQSITSLQKRLKKLGFKVRTYNRYNNWLTNDLYCGYVSYKDKVHVKGIHEPIISEEQFYRVQEIFTRMGKNPNMNRDSASLLNNLVVCSKCGLSFVHRRKDAVSRDKKYHYRYYSCKTYKHIHELEKCGNKIWRADKLEELVINRVNSYSLASRNVDKEDELDSLNEKLRTEHAKKKRLFDLYINGSYEVSELDSMMNDIDARISYYESQIEANEELKKNKKIQENLAHLATVDFDSLEFREKQLYLKSLINKIYIDGEQVTIEWL

SEQ ID NO: 3590 - protein, 452 aa, synthetic construct
MKAAIYIRVSTQEQVENYSIQAQTEKLTALCRSKDWDVYDIFIDGGYSGSNMNRPALNEMLSKLHEIDAVVVYRLDRLSRSQRDTITLIEEYFLKNNVEFVSLSETLDTSSPFGRAMIGILSVFAQLERETIRDRMVMGKIKRVEAGLPLTTAKGRTFGYDVIDTKLYINEEEAKQLQLIYDIFEEEQSITLLQKRLKKLGFKVRTYNRYNSWLTNDLYCGYVSYKDIVHVKGIHEPIISEEQFYRVQEIFTRMGKNPNMNRDSASLLNNLVVCSKCGLGFVHRRKDTTSRGKRYQYRYYSCKTYKHIHELEKCGNKIWRADKLEELIIDRVNNYSLASRNVDKEDGLDSLNEKLKIEHAKKKRLFDLYINGSYGVSELDSMMNDIDAQISYYESQIEANEELKKNKRIQENLANLATVDYDSLEFREKQLYLKSLINKIYIDGEQVTIEWL

SEQ ID NO: 3591 - protein, 452 aa, synthetic construct
MKAAIYIRVSTREQVENYSIQAQTEKLTALCRSKDWDVYDIFIDGGYSGSNMNRPALNEMLSKLHEIDAVVVYRLDRLSRSQRDTITLIEEYFLKNNVEFVSLSETLDTSSPFGRAMIGILSVFAQLERETIRDRMVMGKIKRIEAGLPLTTAKGRTFGYDVIDTKLYINKGEARQLQLIYDIFEEERSITFLQKRLKKLGFKVHTYNRYNNWLTNDLYCGYVSYKDKVHVKGIHEPIISEEQFYRVQEIFTRMGKNPNMNRDSASLLNNLVVCSKCGLGFVHRRKDAMSRDKKYHYRYYSCKTYKHIHELEKCGNKIWRADKLEELIIDRVNSYSLASRNVDKEDELDGLNEKLKTEHAKKKRLFDLYINGSYEVGELDSMMSDIDAQINYYESQIEANEELKKNKKIQENLADLATVDFGSLEFREKQLYLKSLINKIYIDGEQVTIEWL

SEQ ID NO: 3592 - protein, 452 aa, synthetic construct
MKAAIYIRVSTREQVENYSIQAQTEKLTALCRSKDWDVYDIFIDGGYSGSNMNRPALNEMLSKLHEIDAVVVYRLDRLSRSQRDTITLIEEYFLKNNVEFVSLSETLDTSSPFGRAMIGILSVFAQLERETIRDRMVMGKIKRIEAGLPLTTAKGRTFGYDVIDSKLYINEEEAKQLQLIYDIFEEEQSITLLQKRLKKLGFKVCTYSRYNNWLTNDLYCGYVSYKDKVHVKGIHEPIISEEQFHRVQEIFTRMGKNPNMNRDSASLLNNLVVCSKCGLGFVHRRKDTTSRGKKYHYRYYSCKTYKHTHELEKCGNKIWRADKLEELIVDRVSNYSFASRNVDKEDELDSLNEKLKIEHAKRKRLFDLYINGGYEVSELDSMMNDIDAQINYYESQIEANEELKKNRKIQENLANLATVDYDSLEFREKQLYLKSLINKIYIDGEQVTIEWL

SEQ ID NO: 3593 - protein, 452 aa, synthetic construct
MKAAIYIRVSTREQVENYSIQAQTEKLTALCRSKDWDVYDIFVDGGYSGSNMNRPALNEMLSKLHEIDAVVVYRLDRLSRSQRDTITLIEEYFLKNNVEFVSLSETLDTSSPFGRAMIGILSVFAQLERETIRDRMVMGKIKRIEAGLPLTTAKGRTFGYDVIDTRLYINEEEAKQLQLIYDIFEEEQSITFLQKRLKKLGFKVRTYNRYNNWLTNDLYCGYVSYKDKVHVKGIHEPIISEEQFYRVQEIFARMGKNPNMNRDSASLLNNLVVCSKCGLGFVHRRKDAMSRDKKYHYRYYSCKTYKHIHELEKCGNKIWRADKLEELIINRVNNYSLASRNADKEDELDSLNEKLQIEHAKKRRLFDLYISGSYEVSELDSMMNDIDAQINYYESQIEANEELKKNKKIQENLAHLATVDFDSLEFREKQLYLKSLINKIYIDGEQVTIEWL

SEQ ID NO: 3594 - protein, 485 aa, synthetic construct
MTKKVAIYTRVSTTNQAEEGFSIDEQIDRLTKYAEAMGWQVSDTYTDAGFSGAKLERPAMQRLINDIENEAFNTVLVYKLDRLSRSVRDTLYLVKDVFTKNKIDFISLNESIDTSSAMGSLFLTILSAINEFERENIKERMTMGKLGRAKSGKSMMWTKTAFGYYHNRKTGILEIVPLQATIVEQIFTDYLGGISLTKLRDKLNESGHIGKDIPWSYRTLRQTLDNPVYCGYIKFKDSLFEGMHKPIIPYETYLKVQKELEERQQQTYRRNNNPRPFQAKYMLSGMARCGYCGAPLRIVLGHKRKDGSRTMKYHCANRFPRKTKGVTVYNDNKKCDSGTYDLSDLENTVIGNLIGFQEDSDSLLKIINGNNQPILDTSSLKKQISQIDKKIQKNSDLYLNDLITLDELKDRTDSLQAEKKLLKAKISENKFSDSTDVLELVKTQLGSIPINELSYDNKKKIVNNLVSKVDVTADNVDIIFRFQLA

SEQ ID NO: 3595 - protein, 485 aa, synthetic construct
MTKKVAIYTRVSTTNQAEEGFSIDEQIDRLTKYAEAMGWQVSDTYTDAGFSGAKLERPAMQRLINDIETKAFDTVLVYKLDRLSRSARDTLYLVKEVFTKNKIDFISLNESIDTSSAMGSLFLTILSAINEFERENIKERMTMGKLGRAKSGKSMMWTKTAFGYYHNRKTGILEIVPLQATIVEQIFTDYLSGISLTKLRDKLNESGHIGKDIPWSYRTLRQTLDNPVYCGYIKFKDSLFEGMHKPIIPYETYLKVQKELEERQQQTYERNNNPRPFQAKYMLSGMARCGYCGAPLRIVLGRKRKDGSRTMKYHCANRFPRKTRGVTVYNDNKKCDSGTYDLSNLENTVIDNLIGFQENNDSLLKIINGNNQSILDTSSFKKQITLIDKKIQKNSDLYLNDFITMDELKDRTDSLQAEKKLLKAKISGNKSNDSTYVFELVKTQLGSIPINELSYDDKKKIVNSLVSKVDVTADNVDIIFKFQLA

SEQ ID NO: 3596 - protein, 452 aa, synthetic construct
MKAAIYIRVSTQEQVGNYSIQAQTEKLTALCRSKDWDVYDIFIDGGYSGSNMNRPALNEMLSKLHEIDAVVVYRLDRLSRSQRDTTTLIEEYFLKNNVEFVSLSETLDTSSPFGRAMIGILSVFAQLERETIRDRMVMGKIKRIEAGLPLTTAKGRTFGYDVIDTKLYINEEEAKQLQLIYDIFEEEQSITSLQKRLKKLGFKVRTYNRYSNWLTNDLYCGYVSYKDKVHVKGIHEPIVSEEQFYRVQEIFTRMGKNPNMNRDSASLLNNLVVCSKCGLNFVHRSKDTMSRGKKYHYRYYSCKTYKHTHELEKCGNKTWRADKLEELIISRVNNYSFASRNVDKEDELDGLNGKLKTEYAKKKRLFDLYINGSYEVSELDSMMNDIDAQIDYYEGQIEAIEELKKNRKIQENLAGLATVDFDSLEFREKQLYLKSLINKIYIDGEQVTIEWL

SEQ ID NO: 3597 - protein, 452 aa, synthetic construct
MKAAIYIRVSTREQVENYSIQAQTEKLTALCHSKDWDVYDIFIDGGYSGSNMNRPALNEMLSKLHEIDAVVVYRLDRLSRSQRDTITLIEEYFLKNNVEFVSLSETLDTSSPFGRAMIGILSVFAQLERETIRDRMVMGKIKRVEAGLPLATAKGRTFGYDVIDTKLYVNEEEAKQLQLIYDIFEEEQSITFLQKRLKKLGFKVRTYNRYNSWLTNDLYCGYVSYKDKVHVKGIHEPIISEEQFYRVQEIFTRMGKNPNMNRDSASLLNNLVVCSKCGLGFVHRRKDTMSRGKKYHYRYYSCKTYKHTHELEKCGNKIWRADKLEELIINRVSNYSFASRNVDKEDELDSLNEKLKIEHAKKKRLFDLYINGSYEVSELDSMMNDIDAQINYYESQIEANVKLKKDKKIQENLADLATVDYDSLEFREKQLYLKSLINKIYIDGEQVTIEWL

SEQ ID NO: 3598 - protein, 485 aa, synthetic construct
MTKKVAIYTRVSTTNQAEEGFSIDEQIDRLTKYAEAMGWQVSDTYTDAGSSGAKLERPAMQRLINDIENKAFDTVLVYKLDRLSRSVRDTLYLVKDVFTKNKIDFISLNESIDTSSAMGSLFLTILSAINEFERENIKERMTMGKLGRAKSGKSMMWTKTAFGYYHNRKTGILEIVPLQATIVEQIFTDYLSGISLTRLRDKLNESGHIGKDIPWSYRTLRQTLDNPVYCGYIKFKGSLFEGMHKPIIPYETYLRVQRELEERQQQTYERNNNPRPFQAKYMLSGMARCGYCGAPLRIVLGHRRKDGSRTMKYHCANRFPRKTKGVTVYNDNKKCDSGAYDLNNLENTVIDNLIGFQENNDSLLKIINGSNQPILDTSSFKKQISRIDKKIQKNSDLYLNDFITMDELKDRTDSLQVEKRLLEAKISENKFYDGTNVLELVKTQLGSIPINELSYDNKKKIVNNLVSKVDVTADNVDIIFKFQLA

SEQ ID NO: 3599 - protein, 469 aa, synthetic construct
MSYTTPVRAAVYLRISEDRSGEQLGVARQREDCLKLCDQRKWVPVEYLDNDVSASTGKRRPAYEQMLADITAGKIAAVVAWDLDRLHRRPIELEAFMSLADEKRLALATVAGDVDLATPQGRLVARLKGSVAAHETEHKKARQRRAARQKAERGYPNWSKAFGYLPGPNGPEPDPRTAPLVKQAYADILAGASLGDVCRQWNDAGASTITGRPWTTTTLSKFLRKPRNAGLRAYKGARYGPVDRDAIVGKAQWSPLVDEATFWAAQAVLDAPGRAPGRKSVRRHLLTGLAGCGKCGNHLAGSYRTDGRVVYVCKACHGVAILADNIEPILYHVVAERLAMPDAVDLLRREIHDAAEAETIRLELETLYGEMDRLAVERAEGLLTARQVKISTDIVNAKITKLQACQLDQERLRVFDGIPLGTPQVAGMIAELSPNRFRAVLDVLAEVVVQPVGKRSRIFNPERVQVNWR

SEQ ID NO: 3600 - protein, 469 aa, synthetic construct
MSYTTPVRAAVYLRISEDRSGEQLGVARQREDCLKLCDQRKWVPVEYLDNDVSASTGKRRPAYEQMLADITAGKIAAVVAWDLDRLHRRPIELEAFMCLADEKRLALATVAGDVDLATPQGRLVARLKGSVAAHETEHKKARQRRAARQKAERGLPNWSKAFGYLPGPNGPEPDPRTAPLVKQAYADILAGASLGDVCRQWNDAGAFTITGRPWTTTALSKFLRKPRNAGLRAYKGARYGPVDRDAIVGKAQWSPLVDEATFWAAQAVLDAPGRAPGRKSVRRHLLTGLAGCGKCGNHLAGSYRTDGRVVYVCKACHGVAILADSIEPILYHIVAERLARPDAVDLLRREVHDAAEAETIRLELETLYGELDRLAVERAEGLLTARQVKISSDIVNAKITKLQARQLDQERLRVLDGIPLGTPQVAGTIAELSPDRFRAVLDVLAEVVVQPVGKSGKIFSPERVQVNWR

SEQ ID NO: 3601 - protein, 452 aa, synthetic construct
MKAAIYIRVSTQEQVGNYSIQAQTEKLTALCRSKDWDVYDIFIDGGYSGSNMNRPALNEMLSKLHEIDAVVVYRLDRLSRSQRDTTTLIEEYFLKNNVEFVSLSETLDTSSPFGRAMIGILSVFAQLERETIRDRMVMGKIKRIEAGLPLTTAKGRTFGYDVIDTKLYINEEEARQLQLIYDIFEEEQSITSLQKRLKKLGFKVRTYNRYSNWLTNDLYCGYVSYKDKVHVKGIHEPIISEEQFYRVQEIFTRMGKNPNMNRDSASLLNSLVVCSKCGLSFVHRSKDTMSRGKKYHYRYYSCKTYKHTHELEKCGNKIWRADKLEELVINRVNNYSFASRNVDKGDELDSLNEKLKIEHAKKKRLFDLYINGSYEVSELDSMMNDIDAQINYYESQIGASEELKKNKKVQENLAELATVDFDSLEFREKQLYLKSLINKIYIDGEQVTIEWL

SEQ ID NO: 3602 - protein, 452 aa, synthetic construct
MKAAIYIRVSTREQVENYSIQAQTEKLTALCRSKDWDVYDTFIDGGYSGSNMNRPALNEMLSKLHEIDAVVVYRLDRLSRSQRDTITLIEEYFLKNNVEFVSLSETLDTSSPFGRAMIGILSVFAQLERETIRDRMVMGKIKRIEAGLPLTTAKGRTFGYDVIDTKLYINEEEAKQLQLIYDIFEEEQSITFLQKRLKKLGFKVRTYNRYSNWLTNDLYCGYVSYKDKVHVKGIHEPIISEEQFCRVQEIFTRMGKNPNMNRDSASLLNNLVVCSKCGLGFVHRRKDTVSRGKKYHYRYYSCKTYKHTHELEKCGNKIWRADKLEELIINRVNNYSFVSRNVDKENELDSLNEKLKIEHVKKKRLFDLYLNGSYEVSELDGMMNDIDAQINYYESQIEANEELKKSKKIQGSLANLATVDYDSLEFREKQLYLKSLINKIYIDGEQVTIEWL

SEQ ID NO: 3603 - protein, 452 aa, synthetic construct
MKAAIYIRVSTREQVENYSIQAQTEKLTALCRSKDWDVYDIFIDGGYSGSNMNRPALNEMLSKLHEIDAVVVYRLDRLSRSQRDTITLIEEYFLKNNVEFVSLSETLDTSSPFGRAMIGILSVFAQLERETIRDRMVMGKIKRIEAGLPLTTARGRAFGYDVIDTKLYINEEEAKQLRLIYDIFEEEQSITFLQKRLKKLGLKVRTYNRYNNWLTNDLYCGYVSYKDKVHVKGIHEPIISEEQFYRVQEIFTRMGKNPNMNRDSASLLNNLVVCSKCGLGFVHRRKDAKSRDKKYHYRYYSCKTYKHIHELEKCGNKIWRADKLEELIISRVNNYSLASRNVDKEDELDSLNEKLKIEHAKKKRLFDLYINGSYEVSELDSMMSDIDAQINYYESQIEANEELKKDKKIQENLAHLATVDFDSLEFREKQLYLKSLINKIYIDGEQVTIEWL

SEQ ID NO: 3604 - protein, 469 aa, synthetic construct
MSYTTPVRAAVYLRISEDRSGEQLGVARQREDCLKLCGQRKWVPVEYLDNDVSASTGKRRPAYEQMLADITAGKIAAVVAWDLDRLHRRPIELEAFMSLADEKRLALATVAGDVDLATPQGRLVARLKGSVAAHETEHKRARQRRAARQKAERGLPNWSKAFGYLPGPNGPEPDPRTAPLVKQAYADILAGASLGDVCRRWNDAGAFTITGRPWTTTTLSKFLRKPRNAGLRAYKGARYGPVDRDAIVGKAQWSPLVDETTFWAAQAVLDAPGRAPGRKSVRRHLLTGLAGCGKCGNHLAGSYRTDGRVVYVCKACHGVAILADNIEPILYHIVAERLAMPNAADLLRREIHDAAEAEAIRLELETLYGELDRLAVERAEGLLTARQVRISTDIVNARITKLQARQLDQERLRVFDGIPLGTPRVAGMIAELSPDRFRAVLDVLAEVVVQPVGKSGRIFNPERVQVSWR

SEQ ID NO: 3605 - protein, 469 aa, synthetic construct
MSYTTPVRAAVYLRISEDRSGEQLGVARQREDCLKLCDQRKWVPVEYLDNDVSASTGKHRPAYEQMLADITAGKIAAVVAWDLDRLHRRPIELEAFMSLADEKRLALATVAGDVDLATPQGRLVARLKGCVAAHETEHKKARQRRAAKQKAERGLPNWSKAFGYLPGPNGPEPDPRTAPLVKQAYAGILAGASLGDVCRQWNDAGALTITGRPWTTTTLSKFLRKPRNAGLRAYKGARCGPVDRDAIVGKAQWSPLVDDATFWAAQAVLDAPGRAPGRKSVRRHLLTGLAGCGKCGNHLAGSYRTDGRVVYVCKACHGVAVLADNIEPILYHIVAERLAMPNAVDLLRREIHDAAEAETIRLELETLYGELDRLAVERAEGLLTARQVKISTDIVNAKITKLQARQLDQERLRVLGGIPLGTPQVAGMIAELSSDRFRAVLDVLAEVVVQPVGKSGRIFNPERVQVNWR

SEQ ID NO: 3606 - protein, 485 aa, synthetic construct
MTKKVAIYTRVSTTNQAEEGFSIDEQIDRLTKYAEAMGWQVSDTYTDAGISGAKLERPAMQRLINDIENKAFDTVLVYKLDRLSRSVRDTLYLVKDVFTKNKIDFISLNESIDTSSAMGSLFLTILSAINEFERENIKERMTMGKLGRAKSGKSMMWTKTAFGYYHNRETGILEIVPLQATIVKQIFTDYLSGISLTKLRDKLNESGHIGKDIPWSYRTLRQTLDNPVYCGYIKFKDSLFEGMHKPIIPYETYLKVQKELEERQQQTYERNNNPRPFQAKYMLSGMARCGYCGAPLRIVLGHKRKDGSRTMKYHCANRFPRKTKGVTVYNENKRCDSGTYDLSNLENTVIDNLIGFQENNDSLLKIINGNNRPILDTSSFKKQISQIDKKIQKNSDLYLNDFITMDELKDRTDSLQAEKKLLKAKISENKFNDNTDVFELVKTQLGSVPINELSYDNKKKIVNNLVSKVDVTADNVDIIFKFQLA

SEQ ID NO: 3607 - protein, 452 aa, synthetic construct
MKAAIYIRVSTREQVENYSIQAQTEKLTALCRSKDWDVYDVFIDGGYSGSNMNRPALNEMLSKLHEIDAVVVYRLDRLSRSQRDTITLIEEYFLKNNVEFVSLSETLDTSSPFGRAMIGILSVFAQLERETIRDRMVMGKIKRIEAGLPLTTARGRTFGYDVIDTKLYINEEEARQLQLIYDIFEEEQSITSLQKRLKKLGFKVRTYNRYNNWLTNDLYCGYVSYKDKVHVKGIHEPIISEEQFYRVQEIFTRMGKSPNMNRDSASLLNNLVVCSKCGLGFVHRRKDAMSRSKKYHYRYYSCKTYKHIHELEKCGNKIWRADKLEELIISRVNNYSLASRNVDKEDELVSLSEKLKIEHAKKKRLFDLYVSGSYEVSELDSMMNDIDAQINYYESQIEANEELKKNKRIQENLAYLATVDFDSLEFREKQLYLKSLISKIYIDGEQVTIEWL

SEQ ID NO: 3608 - protein, 452 aa, synthetic construct
MKAAIYIRVSTQEQVENYSIQAQTEKLTALCRSKDWDVYDIFIDGGYSGSNMNRPALNEMLSKLHEIDAVVVYRLDRLSRSQRDTTTLIEEYFLKNNVEFVSLSETLDTSSPFGRAMIGILSVFAQLERETIRDRMVMGKIKRIEAGLPLTTAKGRTFGYDVIDTKLYVNEEEAKQLRLIYDIFEEEQSITSLQKRLKKLGFKVRSYNRYNNWLTNDLYCGYVSYKDKVHVRGIHEPIISEEQFYRVQEIFTRMDKNPNMNRDSASLLSNLVVCSKCGLGFVHRSKDTMSRGKKYHYRYYSCKTYKHAHELEKCGNKTWRADKLEELIINRVNNYSFASRNADKEDELDSLNEKLKIEHAKKRRLFDLYINGSYEVSELDSMMNDIDAQINHYESQIEANEELKKNKKIQENLAGLATVDFDSLEFREKQLYLKSLINKIYIDGEQVTIEWL

SEQ ID NO: 3609 - protein, 452 aa, synthetic construct
MKAAIYIRVSTQEQVGNYSIQAQTEKLTALCRSKDWDVYDIFIDGGYSGSNMNRPALNEMLSKLHEIDAVAVYRLDRLSRSQRDTTTLIEEYFLKNNVEFVSLSETLDTSSPFGRAMIGILSVFAQLERETIRDRMVMGKIKRIEAGLPLTTAKGRTFGYDVIDTKLYINEEEAKQLQLIYDIFEEEQSITFLQKRLKELGFKVRSYNRYNNWLTNDLYCGYVSYKDKVHVKGIHEPIISEEQFYRVQEIFTRMGKNPNMNRDSASLLNNLVVCSKCGLGFVHRSKDTMCRGKKYHYRYYSCKTYKHTHELEKCGNKTWRADKLEELIINRVSNYSFASRNVDKEDELDSLNEKLKIEHAKKKRLFDLYINGSYEVSELDSMMNDIDAQIDYYESQIEANEELKKNKKIQENLADLATVDFDSLEFREKQLYLKSLINKIYIDGEQVTIEWL

SEQ ID NO: 3610 - protein, 452 aa, synthetic construct
MKAAIYIRVSTREQVENYSIQAQTEKLTALCRSKDWDVYDIFIDGGYSGSNMNRPALNEMLSKLHEIDAVVVYRLDRLSRSQRDTITLIEEYFLKNNVEFVSLSETLDTSSPFGRAMIGILSVFAQLERETIRDRMVMGKIKRIEAGLPLTTAKGRTFGYDVIDTKLYINEEEAKQLQLIYDIFEEEQSITFLQKRLKKLGFKVRTYNRYNNWLTNDLYCGYVSYKDKVHVKGIHEPIISEEQFYRVQEIFARMGKSPNMNRDSASLLNNLVVCGKCGLGFVHRRKDAMSRDKKYHYRYYSCKTYKHIHELEKCGNKIWRADKLEELIINRVNNYSLASRNVDKEDELDSLNERLKIEHAKKKRLFDLYINGSYEVSELDSMMKDIDAQINYYESQIEANEELKKNKKIQENLADLATVDFDSLKFREKQLYLKSLINKIYIDGEQVTIEWL

SEQ ID NO: 3611 - protein, 485 aa, synthetic construct
MTRKVAIYTRVSTTNQAEEGFSIDEQIDRLTKYAEAMGWQVSDTYTDAGFSGAKLERPAMQRLINDIENKAFDTVLVYKLDRLSRSVRDTLYLVKDAFTKNKIDFISLNESIDTSNAMGSLFLTILSAINEFERENIKERMTMGKLGRAKSGKSMMWTKTAFGYYHNRKTGILEIVPLQATIVEQIYTDYLSGISLTKLRDKLNESGHIGKDIPWSYRTLRQTLDNPVYCGYIRFKDSLFEGMHKPIIPYETYLKVQKELEERQQQAYERNNNPRPFQAKYMLSGMARCGYCGAPLRIVLGHKRKDGSRTMKYHCANRFPRKTKGVTVYNDNKKCDSGTYGLSHLENTVIDSLIGLQENNDSLLKIINGNNQPILDTGSIKKQISQIDKKIQKNSDLYLNDFITMDELKDRTDSLQAEKKLLEAKIGENKFNNSTDVFELVKTQLGSVPINELSYDNKKKIVNNLVSKVDVTAGNVDIIFKFQLA

SEQ ID NO: 3612 - protein, 452 aa, synthetic construct
MKAAIYIRVSTQEQVGNYSIQAQTEKLTALCRSKDWDVYDIFVDGGYSGSNMNRPALNEMLSKLHEIDAVVVYRLDRLSRSQRDTTTLIEEYFLKNNVEFVSLSETLDTSSPFGRAMIGILSVFAQLERETIRDRMVMGKIKRIEAGLPLTTAKGRTFGYDVIDTKLYINEEEAKQLQLIYDIFEEEQSITFLQKRLKKLGFKVRTYNRYNNWLTNDLYCGYVSYKDKVHVKGVHEPIISEEQFYRVQEIFTRMGKNPNMNRDCASLLNNLVVCSKCGLGFVHRSKDTMSRGKKYHYRYYSCKTYKHTHELVKCGNKTWRADKLEELIINRVNNYSFASRNADKEDELDGLNEKLKIEHARKKRLFDLYINGSYDVSELDSMMSDIDAQINYYESQIEANEELRKNRKIQENLADLATVDFDSLEFREKQLYLKSLINKIYIDGEQVTIEWL

SEQ ID NO: 3613 - protein, 452 aa, synthetic construct
MKAAIYIRVSTREQVENYSIQAQTEKLTALCRSKDWDVYDIFIDGGYSGSNMNRPALNEMLSKLHEIDAVVVYRLDRLSRSQRDTITLIEEYFLKNNVEFVSLSETLDTSSPFGRAMIGILSVFAQLERETIRDRMVMGKIKRIEAGLPLTTAKGRTFGYDVIDTKLYINEEEAKQLQLIYDIFEEEQSITFLQKRLKKLGFKVHTYNRYNNWLTNDLYCGYVSYKDKVHVKGIHEPIISEEQFYRVQEIFARMGKNPNMNRDSASLLSNLVVCSKCGLGFVHRRKDTTSRGKKYHYRYYSCKTYKHTHELEKCGNKIWRADKLEELIISRVNNYSFASRDVDKEDELDGLNEKLKIEHAKKKRLFDLYINGSYEVSELDSMMSDIDAQINYYESQIEANEELKKNKKIQENLANLATMDYDSLEFREKQLYLKSLINKIYIDGEQVTIEWL

SEQ ID NO: 3614 - protein, 452 aa, synthetic construct
MKAAIYIRVSTREQVENYSIQAQTEKLTALCRSKDWDVYDIFIDGGYSGSNMNRPALNEMLSKLHEIDAVVVYRLDRLSRSQRDTITLIEEYFLKNNVEFVSLSETLDTSSPFGRAMIGILSVFAQLERETIRDRMVMGKIKRIEAGLPLTTAKGRTFGYDVIDTKLYINEEEAKQLQLIYDIFEEEQSITLLQKRLKKLGFKVRTYNRYNNWLTNDLYCGYVSYKDKVHVKGIHEPIISEEQFYRVQEIFTRMGKNPNMNRDSASLLNNLVVCSKCGLGFVHRRKDTMSRGKKYHYRYYSCKTYKHTHELEKCGNKIWRADKLEELVINRVNDHSLASRDVDKEDELDSLDEKLKIEQAKRKRLFDLYINGSYNVSELDSMMNDIDAQINYYESQIEANGELRKNKKIQENLADLATVDFDGLEFREKQLYLKSLINKIYIDGEQVTIEWL

SEQ ID NO: 3615 - protein, 469 aa, synthetic construct
MSYTTPVRAAVYLRISEDRSGEQLGVARQREDCLKLCDQRKWVPVEYLDNDVSASTGKRRPAYEQMLADITAGKIAAVVAWDLDRLHRRPIELEAFMSLADEKRLALATVAGDVDLATPQGRLVARLKGSVAAHETEHKKARQRRAARQKAERGHPNWSKAFGYLPGPNGPEPDPRTAPLVKQAYADILAGASLGDVCRQWNDAGAFTITGRPWTTTTLSKFLRKPRNAGLRAYKGARYGPVDRDAIVGKAQWSPLVDEATFWAAQAVLDAPGRAPGRKSVRRHLLTGLAGCGKCGNHLAGSYRTDGRVVYVCKACHGVAILADNIEPILYHIVAERLAMPDAVDLLRREIHDAAEAETIRLELETLYGELDRLAVERAEGLLTARQVKISTDIVNAKITKLQARQQDQERLRVLAGIPLGTPQVAGMIAELSPDRFRAVLDVLAEVVVQPVGKSGRTFNPERVQVNWR

SEQ ID NO: 3616 - protein, 469 aa, synthetic construct
MCYTTPVRAAVYLRISEDRSGEQLGVARQREDCLKLCGQRKWEPVEYLDNDVSASTGKRRPAYEQMLADITAGKIAAVVAWDLDRLHRRPIELEAFMSLADEKRLALATVAGDVDLATPQGRLVARLKGSVAAHETEHKKARQRRAARQKAERGYPNWSKAFGYLPGPNGPEPDPRTAPLVKQAYADILAGASLGDVCRQWNGAGAFTITGRLWTATTLSKFLRKPRNAGLRAYRGARHGPVDRDAIVGKAQWSPLVDEATFWAAQAVLDAPGRAPGRKSVRRHLLTGLAGCGKCGNHLAGSYRTDGRVVYVCKACHGVAILADNIEPILYHIVAERLAMPDAVDLLRREIQDAAEAETIRLELETLYGELDRLAVERAEGLLTARQVKISTDIVNAKITKLQARQLDQERLRVLDGIPLGTPQVAGKIAELSPGRFRTVLDVLAEVVVQPVGKGSRAFNPERVQVNWR

SEQ ID NO: 3617 - protein, 452 aa, synthetic construct
MKAAIYIRVSTREQVENYSIQAQTEKLTALCRSKDWDVYDIFIDGGYSGSNMNRPALNEMLSKLHEIDAVVVYRLDRLSRSQRDTITLIEEYFLKNNVEFASLSETLDTSSPFGRAMIGILSVFAQLERETIRDRMVMGKIKRIEAGLPLTTAKGRTFGYDVIDTKLYINEEEAKQLQLIYDIFEEEQSITFLQKRLKKLGFKVRTYNRYNSWLTNDLYCGYVSYKDKVHVKGIHEPIISEEQFHRVQEIFTRMGKNPNMNRDSASLLNNLVVCGKCGLGFVHRRKDTTSRGKKYHYRYYSCKTYKHIHELEKCGNKIWRADKLEELIINRVNNYSLASRNVDKGDELDSLNEKLKIEHAKKKRLFDLYISGSYEVSELDSMMNDIDAQINYYESRIEANEELKKDKKIQENLANLATVDYDSLGFREKQLYLKSLINKIYIDGEQVTIEWL

SEQ ID NO: 3618 - protein, 452 aa, synthetic construct
MKAAIYIRVSTREQVENYSIQAQTEKLTALCRSKDWDVYDIFIDGGYSGSNMNRPALNEMLSRLHEIDAVVVYRLDRLSRSQRDTITLIEEYFLKNNVEFVSLSETLDTSSPFGRAMIGILSVFAQLERETIRDRMVMGKIKRIEAGLPLTTAKGRTFGYDVIDTKLYINEEEAKQLRLIYDIFEEEQSITFLQKRLKELGFKVRTYNRYNNWLTNDLYCGYVSYKDKVHVKGIHEPIISEEQFHRVQEIFTRMGKNPNMNRDSASLLNNLVVCGKCGLGFVHRRKDIMSRDKKYHYRYYSCKTYKHIHELEKCGNKIWRADKLEELIINRVNNYSLAGRNVDKGDELDSLNEKLKIEHAKKKRLFELYINGSYEVSELDSMMNDIDAQINYYESQIEANEELRKNRKIQENLAHLATVDFDSLEFREKQLYLKSLINKIYIDGEQVTIEWL

SEQ ID NO: 3619 - protein, 485 aa, synthetic construct
MTKKVAIYTRVSTTNQAEEGFSIDEQIDRLTKYAEAMGWQVSDTYTDAGLSGAKLERPAMQRLINDIENKAFDTVLVYKLDRLSRSVRDTLYLVKDVFAKNKIDFISLNESIDTSSAMGSLFLTILSAINEFERENIKERMTMGKLGRAKSGKSMMWTKTAFGYYHNRETGILEIVPLQATIVEQIFTDYLSGISLTKLRDKLNESGHIGKDIPWSYRTLRQTLDNPVYCGYIKFKDSLFEGMHKPIIPYETYLKVQKELEERQQQTYERNNNPRPFQAKYMLSGMARCGYCGAPLRIVLGHKRKDGSRTMKYHCANRFPRKTKGVTVYNDNKKCDSGTYDLSNLENTVIDSLIGFQENNDGLLKIINGDNQPILDTSSFKKQISLIDKKIQKNSNLYLNDLITMDELKDRTDSLQAEKRLLKAKISENKFNDSTDVFELVKTQLGGIPINELSYDNKKKIVNNLVSRVDVTADSVDIIFKFQLT

SEQ ID NO: 3620 - protein, 452 aa, synthetic construct
MKAAIYIRVSTREQVENYSIQAQTEKLTALCRSKDWDVYDIFIDGGYSGSNMNRPALNEMLSKLHEIDAVVVYRLDRLSRSQRDTITLIEEYFLKNNVEFVSLSETLDTSSPFGRAMIGILSVFAQLERETIRDRMVMGKIKRIEAGLPLTTAKGRTFGYDVIDTKLYINEEEAKQLRLIYDIFEEERSITSLQKRLKKLGFKVRTYSRYNSWLTNDLYCGYVSYKDKVHVKGIHEPIISEEQFYRVQEIFTRMGKNPNMNRDSASLLNNLVVCGKCGLGFVHRRKDTMSRGKKYHYRYYSCKTYKHTHELEKCGNKIWRADKLEELIINRVNNYSFASRNVDKEGELDSLNEKLKIEHAKKKRLFDLYINGSYEVGELDSMMNDIDAQINYYESQIEANEELRKNKKIQENLANLATVDYDSLEFREKQLYLKSLINKIYIDGEQVTIEWL

SEQ ID NO: 3621 - protein, 452 aa, synthetic construct
MKAAIYIRVSTQEQVENYSIQAQTEKLTALCRSKDWDVYDIFIDGGYSGSNMNRPALNEMLSKLHEIDAVVVYRLDRLSRSQRDTTTLIEEYFLKNNVEFVSLSETLDTSSPFGRAMIGILSVFAQLERETIRDRMVMGKIKRIEAGLPLTTAKGRTFGYDVIDTKLYINEEEAKQLQLIYDIFEEEQSITSLQKRLKKLGFKVRTYNRYNNWLTNDLYCGYVSYKDKVHVKGIHEPIISEEQFYRVQEIFTRMGKNPNMNRDSASLLSSLVVCSKCGLGFVHRSKDTMCRGKKYHYRYYSCKTYKHTHELEKCGNKTWRADKLEELIINRVNNYSFVSRNVDKEDELDSLNEKLKIEHAKKKRLFDLYINGSYEVSELDSMMNDIDAQINYYESRIEANEELKKNKKIQENLADLATVDFDSLEFREKQLYLKSLINKIYIDGEQVTIEWL

SEQ ID NO: 3622 - protein, 485 aa, synthetic construct
MTKKVAIYTRVSTTNQAEEGFSIDEQIDRLTKYAEAMGWQVSDTYTDAGSSGAKLERPAMQRLINDIENKAFDTVLVYKLDRLSRSVRDTLYLVKDVFTKNKIDFISLNESIDTSSAMGSLFLTILSAINEFERENIKERMTMGKLGRAKSGKSMMWTKTAFGYYHNRKTGILEVVPLQATIVEQIFTDYLSGISLTKLRDKLNEGGHIGKDIPWSYRTLRQTLDNPVYCGYIKFKDSLFEGMHKPIIPYETYLKVQKELKERQQQTYERNNNPRPFQAKYMLSGMARCGYCGAPLRIMLGRKRKDDSRTMKYHCANRFPRKTKGVTVYNDNKKCDSGTYDLSDLENTVIDNLIGLQENNDSLLKIINGNNQPILDTSSFKRQISQIDKKIQKNSDLYLNDFITMDELKDRTDRLQAEKKLLRAKISENKFNDSTDVFELVKTQLGSIPINELSYDNKKKIVNNLVSKVDVTADNVDIIFKFQLA

SEQ ID NO: 3623 - protein, 469 aa, synthetic construct
MSYTTPVRAAVYLRISEDRSGEQLGVARQREDCLKLCDQRKWVPVEYLDNDVSASTGKRRPAYEQMLADITAGRIAAVVAWDLDRLHRRPIELEAFMSLADEKRLALATVAGDVDLATPQGRLVARLKGSVAAHETEHKKARQRRAARQKAERGLPNWSKAFGYMPGPNGPEPDPRTAPLVKQAYADILAGASLGEVCRQWNDAGAFTITGRPWTTTALSKFLRKPRNAGLRAYKGARYGPVDRDAIVGKARWSPLVDEAIFWAAQAVLDAPGRAPGRKSVRRHLLTGLAGCGKCGNHLAGSYRTDGKVVYVCKACHGVAILADNIEPVLYHIVAERLAMPDAVDLLRREIHDAAEAETIRLELETLYGELDCLAVERAEGLLTARQVKISTDIVNAKITKLQARQLDQERLRVLDGIPLGTPQVAGMIAELSPDRFRAVLDVLAEVVVQPVGKSGRIFNPERVQVNWR

SEQ ID NO: 3624 - protein, 452 aa, synthetic construct
MKAAIYIRVSTREQVENYSIQAQTEKLTALCRSKDWDVYDIFVDGGYSGSNMNRPALNEMLSKLHEIDAVVVYRLDRLSRSQRDTITLIEEYFLKNNVEFVSLSETLDTSSPFGRAMIGILSVFAQLERETIRDRMVTGKIKRIEAGLPLTTAKGRTFGYDVIDTKLYINEEEAKQLQLIYDIFEEEQSITFLQKRLKKLGFKVHTYNRYNNWLTNDLYCGYVSYKDKVHVKGIHEPIISEEQFYRVQEIFTRMGKNPNMNRDSASLLNNLVVCSKCGLGFVHRRKDAMSRDKKYHYRYYSCKTYKHIHELEKCGNKIWRADELEELVINRVNSYSVASRNVDKEDELDSLNEKLKTEHAKKKRLFDLYINGSYEVSELDSMMSDIDAQINYYESQIKANEELKRNKKIQENLAHLATVDFDSLEFREKQLYLKSLINKIYIDGEQVTIEWL

SEQ ID NO: 3625 - protein, 485 aa, synthetic construct
MTKKVAIYTRVSTTNQAEEGFSIDEQIDRLTKYTEAMGWQVSDTYTDAGFSGAKLERPAMQRLINDIESKAFDTVLVYKLDRLSRSVRDTLYLVKDVFTKNKIDFISLNECIDTSSAMGSLFLTILSAINEFERENIKERMTMGKLGRARSGKSMMWTKTAFGYHHNRKTGILEIAPLQATVVEQIFTDYLSGISLTKLRDKLNESGHIGKDIPWSYRTLRQTLDNPVYCGYIKFKGSLFEGMHKPIIPYETYLKVQKELEERQQQTYERNNNPRPFQAKYMLSGMARCGYCGAPLRIVLGRKRKDGSRTMKYHCANRFPRKTKGVTVYNDNKKCDSGTYDLSNLENTVIDNLISLQENNDSLLKIINGNNQPILDTSSFKKQISQIDKKIQKNSDLYLNDFITMDELKDRTDSLQAEKKLLKARISENKFNDSTDVFELVKTQLGSIPINELSYDNKKKIVNNLVSKVDVTADNVDIIFKFQLA

SEQ ID NO: 3626 - protein, 452 aa, synthetic construct
MKAAIYIRVSTREQVENYSIQAQTEKLTALCRSKDWDVYDIFIDGGYSGSNMNRPALNEMLSKLHEIDAVVVYRLDRLSRSQRDTITLIEEYFLKNNVEFVSLSETLDTSSPFGRAMIGILSVFAQLERETIRDRMVMGKIKRIEAGLPLTTAKGRTFGYDVIDTKLYINEEEAKQLQLIYDIFEEEQSITFLQKRLKKLGFKVRTYNRYNNWLTNDLYCGYVSYKDKVHVKGIHEPIISEEQFYRVQEIFTRMGKNPNMNRDSASLLNNLVVCSKCGLGFVHRRKDAMSRDKKYHYRYYSCKTYKHIHELEKCGNKIWRADKLEELIINRVNNYSLASRNVDKGDELDSLNEKLRIEHAKKKRLFDLYINGSYDVSELDSMMNDIDAQINYYESQIEANEELKKNKKIQENLANLATVDFDSLEFREKQLYLKSLINKIYIDGEQVTIEWL

SEQ ID NO: 3627 - protein, 485 aa, synthetic construct
MTKKVAIYTRVSTTNQAEEGFSIDEQIDRLTKYAEAMGWQVSDTYTDAGFSGAKLERPAMQRLINDIENKAFDTVLVYKLDRLSRSVRDTLYLVKEVFTKNKIDFISLNESIDTSSAMGSLFLTILSAINEFERENIKERMTMGKLGRAKSGKSMMWTKTAFGYYHNRKTGILEIVPLQAAIVEQIFTDYLSGISLTKLRDKLNESGHIGKDIPWSYRTLRQTLDNPVYCGYIKFKDSLFEGMHKPIIPYETYLKVQKELEERQQQTYERNNNPRPFQAKYMLSGMARCGYCGAPLRVVLGHKRKDGSRTMKYHCANRFPCKTRGVTVYNDNKKCDSGTYDLGSLENTVIGNLIGFQENDDSLLKIINGNNQPILDTSSYKKQISQIDKKIQKNSDLYLNDLITMDELKDRTDSLQAEKKLLRAKISENKFNDSIDVFELVKTQLGSIPINELSYDNKKKIVNNLVSKVDVTADNVDIIFKFQLA

SEQ ID NO: 3628 - protein, 452 aa, synthetic construct
MKAAIYIRVSTREQVENYSIQAQTEKLTALCRSKDWDVYDIFIDGGYSGSNMNRPALNEMLSKLHEIDAVVVYRLDRLSRSQRDTITLIEEYFLKNNVEFVSLSETLDTSSPFGRAMIGILSVFAQLERETIRDRMVMGKIKRIEAGLPLTTAKGRTFGYDVIDTKLYINEEEAKQLRLIYDIFEEEQSITFLQKRLKKLGFKVRSYNRYHNWLTNDLYCGYVSYKDKVHVKGIHEPIISEEQFYRVQEIFTRMGKNPNMNRDSASLLNNLVVCSKCGLGFVHRRKDAMSRDKKYRYRYYSCKTYKHIHELEKCGNKIWRADKLEELIINRVNNYSLASRNVDKEDELDSLNEKLKIEHAKKKRLFDLYINGSYEMSELDSMMNDIDAQINYYESQIEANEELKKNKKIQENLAYLATVDFDSLEFREKQLYLKSLINKIYIDGEQVTIEWL

SEQ ID NO: 3629 - protein, 485 aa, synthetic construct
MTKKVAIYTRVSTTNQAEEGFSIDEQIDRLTKYAEAMGWQVSDTYTDAGISGAKLERPAMQRLINDIENKAFDTVLVYKLDRLSRSVRDTLYLVKDVFTKNKIDFISLNESIDTSSAMGSLFLTILSAINEFERENIKERMTMGKLGRAKSGKSMMWTKTAFGYYHNRNTGILEIVPLQATIVEQIFTDYLSGISLTKLRDKLNESGHIGKDIPWSYRTLRRTLDNPVYCGYIKFKDSLFEGMHKPIIPYETYLKVQKELEERQQQTYERNNNPRPFQAKYMLSGMARCGYCGAPLRIVLGHKRKDGSRTMKYHCANRFPRRTKGVTVYNDNKKCDSGTYDLSDLENTVIDNLVGFQENNDSLRKIINGNNQPILDTSSLKKQISQIDKKIQKNSDLYLNDFITMDELKDRTDSLQAKKKLLKAKISGNKFNDSTDVFELVKTQLGSIPINELSYDNKKKIVNNLVSKVDVTADNVDIIFKFQLA

SEQ ID NO: 3630 - protein, 452 aa, synthetic construct
MKAAIYIRVSTREQVENYSIQAQTEKLTALCRSKDWDVYDIFIDGGYSGSNMNRPALNEMLSKLHEIDAVVVYRLDRLSRSQRDTITLVEEHFLKNNVEFVSLSETLDTSSPFGRAMIGILSVFAQLERETIRDRMVMGKIKRIEAGLPLTTAKGRTFGYDVIDTKLYINEEEAKQLQLIYDIFEEEQSITFLQKRLKELGFKVRTYNCYNNWLTNDLYCGYVSYKDKVRVKGIHEPIISEEQFYRVQEIFARMGKNPNMNRDSASLLNSLVVCSKCGLGFVHRRKDIMSRDKKYHYRYYSCKTYKHIHELEKCGNKIWRADKLEELIIDRVNNYSLASRDADKEDELGSLNEKLKIEHAKKKRLFELYISGSYEVSELDSMMSDIDAQISYYESQIKANEELKKDKKIQENLAYLATVDFDSLEFREKQLYLKSLINKIYIDGEQVTIEWL

SEQ ID NO: 3631 - protein, 469 aa, synthetic construct
MSYTTPVRAAVYLRISEDRSGEQLGVARQREDCLKLCDQRKWVPVEYLDNDVSASTGKRRPAYEQMLADITAGKIAAVVAWDLDRLHRRPIELEAFMSLADEKRLALATVAGDVDLATPQGRLVARLKGCVAAHETEHKKARQRRAARQKAERGLPNWSKAFGYLPGPNGPEPDPRTAPLVKQAYADILAGASLGDVCRQWNDAGAFTITGRPWTTTALSKFLRKPRNAGLRAYKGARHGPVDRDAIVGRAQWSPLVDEATFWATQAVLDAPGRAPGRKSVRRHLLTGLAGCGKCGNHLAGSYRADGRVVYVCKACHGVAILADNIEPILYHIVAERLAMPDAVDLLCREIHDAAGAETIRLELETLYGELDRLAVERAEGLLTARQVKISTDIVNAKITKLQARQLDQERLRVLGGIPLGTPQVAGMIAELSPDRFRAVLDVLAEVVVQPVGKSGRVLNPERVQVNWR

SEQ ID NO: 3632 - protein, 452 aa, synthetic construct
MKAAIYIRVSTQEQVENYSIQAQTEKLTALCRSKDWDVYDIFIDGGYSGSNMNRPALNEMLSKLHEIDAVVVYRLDRLSRSQRDTITLIEEHFLKNNVEFVSLSETLDTSSPFGRAMIGILSVFAQLERETIRDRMVMGKIKRVEAGLPLTTAKGRTFGYDVIDTKLYINEGEAKQLRLIYDIFEEEQSITSLQKRLKELGFKVRTYSRYNNWLTNDLYCGYVSYKDKVHVKGIHEPIISEEQFYRVQEIFTRMGKNPNMNRDSASLLNNLVVCSKCGLGFVHRRKDTTSRGKKYHYRYYSCKTYKHIHELEKCGNKIWRADKLEELIINRVNNFSLVSRNVDKEDELGRLNEKLKIEHAKKKRLFDLYINGSYEASELDSMMNDIDAQINYYESQIETNEELKKNKKIQENLAHLATVDFDSLEFREKQLYLKSLINKIYIDGEQVTIEWL

SEQ ID NO: 3633 - protein, 452 aa, synthetic construct
MKAAIYIRVSTREQVENYSIQAQTEKLTALCRSKDWDVYDIFIDGGYSGSNMSRPALNEMLSKLHEIDAVVVYRLDRLSRSQRDTITLIEEYFLKNNVEFVSLSETLDTSSPFGRAMIGILSVFAQLERETIRDRMVMGKIKRVEAGLPLTTAKGRTFGYDVIDTKLHINEEEAKQLQLIYDIFEEEQSITFLQKRLKKLGFKVRTYSRYNSWLTNDLYCGYVSYKDKVHVKGIHEPIISEEQFYRVQEIFTRTGKNPNMNRDSASLLNNLVVCSKCGLSFVHRRKDTVSRGKKYHYRYYSCKTYKHTHELEKCGNKIWRADKLEELIINRVNNYSFASRNVDEEDELDSLNEKLKIEHVKKKRLLDLYINGSYEVSELDSMMNDIDAQINYYESQIEANEELKKNKKIQENLADLATMDLDSLEFREKQLYLKSLINKIYIDGEQVTIEWL

SEQ ID NO: 3634 - protein, 469 aa, synthetic construct
MSYTTPVRAAVYLRISEDRSGEQLGVARQREDCLKLCDQRKWVPVEYLDNDVSASTGKRRPAYEQMLADITAGKIAAVVAWDLDRLHRRPIELEAFMSLADEKRLALATVAGDVDLATPQGRLVARLKGCVAAHETEHKKARQRRAARQKAERGLPNWSKAFGYLPGPNGPEPDPRTAPLVKQAYADILAGASLGDVCRQWNDAGAFTITGRPWTTTALSKFLRKPRNAGLRAYKGARYGPVDRDAIVGKAQWSPLVDEATFWAAQAVLDAPGRAPGRRSVRRHLLTGLAGCGKCGNHLAGSYRTDGRVVYVCKACHGVAILAENIEPILYHIVAERLAMPDAVDLLRREIHDAAEAETIRLELETLHGELDRLAVERAEGLLTARQVKISTDIVNAKITKLQARQLDQERLRVFDGIPLGTPQVAGMIAELSPDRFRAVLDVLAEVVVQPVGKSSRIFNPERVQVNWR

SEQ ID NO: 3635 - protein, 485 aa, synthetic construct
MTKKVAIYTRVSTTNQAEEGFSIDEQIDRLAKYAEAMGWQVSDTYTDAGFSGAKLERPAMQRLINDIENKAFDTVLVYKLDRLSRSVRDTLYLVKEVFTKNKIDFISLNESIDTSSAMGSLFLTILSAINEFERENIKERMTMGKLGRAKSGKSMMWTKTAFGYYHNRKTGILEIVPLQATIVEQIFTDYLSGISLTKLRDKLNESGHIGKDIPWSYRTLRQTLDNPVYCGYIKFKGRLFEGMHKPIIPYETYLKVQKELEGRQQQTYERNNNPRPFQAKYMLSGMARCGYCGAPLKIVLGHKRKDGSRTMKYHCANRFPRKTRGVTVYNDNKKCDSGTYDLRNLENTVIDNLVGFQENNDSLLKIINGNNQPILDTSSLKKQISQIDEKIQKNSDLYLNDFITMDELKDRTDSLQGEKKLLKAKISENKFNDSTDVFELVKTQLGSIPINELSYDNKKKIVNNLVSKVDVTADNVNIIFKFQLA

SEQ ID NO: 3636 - protein, 469 aa, synthetic construct
MSYTTPVRAAVYLRISEDRSGEQLGVARQREDCLKLCSQRKWVPVEYLDNDVSASTGIRRPAYEQMLADITAGKIAAVVAWDLDRLHRRPIELEAFMSLADEKRLALATVAGDVDLATPQGRLVARLKGSVAAHETEHKRARQRRAARQKAERGHPNWSKAFGYLPGPNGPEPDPRTAPLVKQAYADILAGASLGDVCRQWNDAGAFTITGRPWTTTALSKFLRKPRNAGLRAYKGARYGPVDRDAIVGKAQWSPLVNEATFWAAQAVLDAPGRAPGKKSVRRHLLTGLAGCGKCGSRLAGSHRTDGQVVYVCKACHGVAILADNIEPILYHTVAERLAMPDAVDLLRREIHDAAEAETIRLELETLYGELDRLAVERAEGLLTARQVKISTDIVNAKISKLQARQLDQERLRVLGGIPLGTPQVVGTIAELSPDRFRAVLDVLAEVVVQPVGKSGRIFNPERVQVNWR

SEQ ID NO: 3637 - protein, 469 aa, synthetic construct
MSYTTPMRAAVYLRISEDRSGEQLGVARQREDCLELCGQRKWVPVEYLDNDVSASTGKRRPAYEQMLADITAGKIAAVVAWDLDRLHRRPIELEAFMSLADEKRLALATVAGDVDLATPQGRLVARLKGCVAAHETEHKKARQRRAARQKAERGLPNWSKAFGYLPGPNGPEPDPRTAPLVKRAYADILAGASLGDVCRRWNDAGAFTITGRPWTTTTLSKFLRKPRNAGLRAYKGARYGPVDRDAIVGKAQWSPLVDEATFWAAQAVLDAPGRAPGRKSVRRHLLTGLAGCGKCGNHLAGSYRTDGRVVYVCKACHGVAILADNIEPILYHIVAERLAMPDAVDLLRREIHDAAEAETIRLELETLYGELDRLAVERAEGLLTARQVKISTDIVNAKIARLQARQLDQERLRVFDGIPLGTPQVAGMIAELSPDRFRAVLDVLAEVVVQPVGKSGGIFNPERVQVNWR

SEQ ID NO: 3638 - protein, 452 aa, synthetic construct
MKAAIYIRVSTREQVENYSIQAQTEKLTALCRSKDWDVYDVFIDGGYSGSNMNRPALNEMLSKLHEIDAVVVYRLDRLSRSQRDTITLIEEYFLKNNVEFVSLSETLDTSSPFGRAMIGILSVFAQLERETIRDRMVMGKIKRIEAGLPLTTAKGRTFGYDVIDTKLYINEEEAKQLQLIYDIFEEEQSITFLQKRLKKLGFKVRTYNRYNNWLTNDLYCGYVSYKDKVHVKGIHEPIISEEQFYRVQEIFARMGKNPNMNRDSASLLNNLVVCSKCGLSFVHRRKDAMGRDKKYHYRYYSCKTYKHIHELEKCGNKIWRADKLEELIIDRVNNYSLASRDADKEDELGSLNEKLKIEHAKKKRLFELYISGSYEVSELDSMMSDIDAQISYYESQIKANEELKKNKKVQENLANLATVDFDSLEFREKQLYLKSLINKIYIDGEQVTIEWL

SEQ ID NO: 3639 - protein, 452 aa, synthetic construct
MKAAIYIRVSTREQVENYSIQAQTEKLTALCRSKDWDVYDVFIDGGYSGSNMNRPALNEMLSKLHEIDAVVVYRLDRLSRSQRDTITLIEEYFLKNNVEFVSLSETLDTSSPFGRAMIGILSVFAQLERETIRDRMVTGKIKRIEAGLPLTTAKGRTFGYDVIDTKLYINEEEAKQLQLIYDIFEEEQSITFLQKRLKKLGLKVRTYSCYNNWLTNDLYCGYVSYKDKVHVKGIHEPIISEEQFYRVQEIFARMGKNPNMNRDSASLLNNLVVCSKCGLGFVHRRKDAMSRDKKYHYRYYSCKTYKHIHELEKCGNKIWRADELEELVINRVNSYSVASRNVDKEGELDSLNEKLKTEHAKKKRLFDLYINGNYEVSELDSMMNDIDAQINYYESQIEANEELKKSKKIQENLAYLAAVDFDSLEFREKQLYLKSLINKIYIDGEQVTIEWL

SEQ ID NO: 3640 - protein, 452 aa, synthetic construct
MKAAIYIRVSTREQVENYSIQAQTEKLTALCRSKDWDVYDIFIDGGYSGSNMNRPALNEMLSKLHEIDAVAVYRLDRLSRSQRDTITLIEEYFLKNNVEFVSLSETLDTSSPFGRAMIGILSVFAQLERETIRDRMVMGKIKRIEAGLPLTTAKGRTFGYDVIDTKLYINEEEARQLRLIYDIFEEERSITCLQKRLKKLGFKVRTYNRYNNWLTNDLYCGYVSYKDKVHVKGIHEPIISEEQFYRVQEIFTRMGKNPNMNRDSASLLNNLVVCSRCGLGFVHRRKDATSRDKKYHYRYYSCKTYKHIHELEKCGNKIWRADKLEELIINRVNNYSFASRNVDKEDELDSLNEKLKIEHAKKKRLFDLYINGSYEVSELDSMMKDIDAQINYYESQIEANEELRKNRKIQENLAHLATVDFDSLEFREKQLYLKSLINKIYIDGEQVTIEWL

SEQ ID NO: 3641 - protein, 485 aa, synthetic construct
MTKKVAIYTRVSTTNQAEEGFSIDEQIDRLTKYAEAMGWQVSDTYTDAGFSGAKLERPAMQRLINDIENKAFDTVLVYKLDRLSRSARDTLYLVKDVFTKNKIDFISLNESIDTSSAMGSLFLTILSAINEFERENIKERMTMGKLGRAKSGKSMMWTKTAFGYYHNRKTGILEIVPLQATIVEQIFTDYLSGISLTKLRDKLNESGHIGKDIPWSYRTLRQTLDNPVYCGYIKFKDSLYEGMHKPIIPYETYLKVQKGLEERQQQTYKRNNNPRPFQAKYMLSGMARCGYCGAPLRIVLGRKRKDGSRTMKYHCANRFPRKTKGVTVYNDNKKCDSGTYDLSYLENTVIDSLIGFQEDNDSLLKIINGNNQPILDISSFKEQISQIDKKIQKNSDLYLNDFITMDELEDRTDSLQAERKLLKAKISESKFNDSTDVFELVKTQLGSIPINELSYDNKKKIVNNLVSKVDVTADNVDIIFKFQLA

SEQ ID NO: 3642 - protein, 452 aa, synthetic construct
MKAAIYIRVSTQEQVENYSIQAQTEKLTALCRSKDWDVYDIFIDGGYSGSNMNRPALNEMLSKLHEIDAVVVYRLDRLSRSQRDTITLIEEYFLKNNVEFVSLSETLDTSSPFGRAMIGILSVFAQLERETIRDRMVMGKIKRIEAGLPLTTAKGRTFGYDVIDTKLYINEEEAKQLQLIYDIFEEEQSITFLQKRLKKLGFKVRTYNRYKDWLTNDLYCGYVSYKDKVHVKGIHEPIISEEQFYRVQEILTRMGKNPNMNRDSASLLNNLVVCGKCGLGFVHRRKDTMSRGRKYHYRYYSCKTYKHIHELEKCGNKIWRADKLEELIINRVNNYSLASRNVGEEDELDSLNEKLKIEHAKRRHLFDLYINGSYEVRGLDSMMSDIDAQINYYESQIAANEEPKKNKKIQENLADLATVDFDSLEFREKQLYLKSLINKIYIDGEQVTIEWL

SEQ ID NO: 3643 - protein, 485 aa, synthetic construct
MTKKVAIYTRVSTTNQAEEGFSIDEQIDRLTKYAEAMGWQVSDSYTDAGFSGAKLERPAMQRLINDIENRAFDTVLVYKLDRLSRSVRDTLYLVKDVFTKNKIDFISLSESIDTSSAMGSLFLTILSAINEFERENIKERMTMGKLGRAKSGKSMMWTKTAFGYYHNRETGILEIVPLQATIVEQIFTDYLSGISLTKLRDKLNESGHIGKDIPWSYRTLRQTLNNPVYCGYIKFKDSLFEGMHKPIIPYETYLKVQKELEKRQQQTYERNNNPRPFQAKYMLSGMARCGYCGAPLRIVLGHKRKDGSRTMKYHCANRFPRKTNGITVYNDNKKCDSGTYDLSNLENTVIDNLIGFQENNDSLLKIINGNNQPILGTSSFKEQISQIDKKIQKNSDLYLNDFITMDELKDRTDSLQAEKKLLKAKISENKFNDSANVFELVKTQLGSIPISELSYDNKKRIVNNLVSKVDVTADNVDIIFKFQLA

SEQ ID NO: 3644 - protein, 452 aa, synthetic construct
MKAAIYIRVSTQEQVENYSIQAQTEKLTALCRSKGWDVYDIFIDGGYSGSNMNRPALNEMLSKLHEIDAVVVYRLDRLSRSQRDTTTLIEEYFLKNNVEFVSLSEALDTSSPFGRAMIGILSVFAQLERETIRDRMVMGKIKRIEAGLPLTTAKGRTFGYDVIDTKLYINEEEAKQLQLIYDIFEEEQSITFLQKRLKKLGFKVRTYNRYNNWLTNDLYCGYVSYKDKVHVKGIHEPIISEEQFYRVQEIFTRMGKNPNMNRDSASLLSNLVVCSKCGLGFVHRSKDTMSRGKKYHYRYYSCKTYKHTHELEKCGNKTWRADKLEELVINRVNNYSFASRNVDKEDELDSLNEKLKTEHAKRKRLFDLYINGSYEVSELDSMMNDIDAQINHYESQIEANERLKKNKKIQENLADLATMDFDSLEFREKQLYLKSLISKIYIDGEQVTIEWL

SEQ ID NO: 3645 - protein, 452 aa, synthetic construct
MKAAIYIRVSTREQVENYSIQAQTEKLTALCRSKDWDVYAIFVDGGYSGSNMNRPALNEMLSKLHEIDAVVVYRLDRLSRSQRDTITLIEEYFLKNNVEFVSLSETLDTSSPFGRAMIGILSVFAQLERETIRDRMVMGKIKRIEAGLPLTTAKGRTFGYDVIDTKLYINEEEAKQLQLIYDIFEEEQSITSLQKRLKKLGFKVHTYNRYNNWLTNDLYCGYVSYKDKVHVKGIHEPIISEEQFYRVQEIFTRMGKNPNMNRDSASLLNNLVVCSKCGLGFVHRRKDAMSRDKKYHYRYYSCKTYKHIHELEKCGNKIWRADKLEELVINRVNNYSLASRNVEKEDELDSLNEKLKIEHAKKKRLFDLYINGSYEVSELDSMMSDIDAQINYYESRIEANEELKKNKRIQENLANLATVDLDSLEFREKQLYLKSLINKIYIDGEQVTIEWL

SEQ ID NO: 3646 - protein, 469 aa, synthetic construct
MSYTTPVRAAVYLRISEDRSGEQLGVARQREDCLKLCDQRKWVPVEYLDNDVSASTGKRRPAYEQMLADITAGKIAAVVAWDLDRLHRRPVELEAFMSLADEKRLALATVAGDVDLATPQGRLVARLKGCVAAHETEHKKARQRRAARQKAERGHPNWSKAFGYLPGPNGPEPDPRTAPLVKQAYADILAGASLGDVCRRWNDTGAFTITGRPWTTTTLSKFLRKPRNAGLRAYKGARYGPVDRDAIVGKAQWSPLVDEATFWAAQAVLDAPGRAPGRKSVRRHLLTGLAGCGKCGNHLAGSYRTDGRVVYVCKACHGVAILADNIEPILYHVVAERLAMPDAVDLLCREIHDAAEAETIRLELETLYGELDRLAVERAEGLLTARQVKISTDIVNAKITKLQARQLDQERLRVFDGIPLGTPRVAGMIAELSPDRFRAVLDVLAEVVVQPVGKSGRISNPERVQVNWR

SEQ ID NO: 3647 - protein, 469 aa, synthetic construct
MSYTTPVRAAVYLRISEDRSGEQLGVARQREDCLKLCGQRKWEPVEYLDNDVSASTGKRRPAYEQMLADITAGKIAAVVAWDLDRLHRRPVELEAFMSLADEKRLALATVAGDVDLATPQGRLVARLKGSVAAHETEHKKARQRRAARQKAERGYPNWSKAFGYLPGPNGPEPDPRTAPLVKQAYADILAGASLGDVCRQWNDAGAFTITGRPWTTTTLSKFLRKPRNAGLRAYRGARCGPVDRDAIVGKAQWSPLVDEATFWAAQAVLDAPGRAPGRKSVRRHLLTGLAGCGKCGSHLSGSYRTDGRVVYVCKACHGIAILADNIEPILYHIVAERLAMPDAVDLLRREVHDAAEAETIRLELETLYGELDRLAVERAEGLLTARQVKISTDIVNAKITKLQARQLDQERLRVFDGIPLGTPQVAGMIAELSPDRFRAVLNVLAEVVVQPVGKGGRIFNPERVQVNWR

SEQ ID NO: 3648 - protein, 485 aa, synthetic construct
MTKKVAIYTRVSTTNQAEEGFSIDEQIDRLTKYAEAMGWQVSDTYTDAGFSGAKLERPAVQRLINDIENKAFDTVLVYKLDRLSRSVRDTLHLVKDVFTKNKIDFISLNESIDTSSAMGSLFLTILSAINEFERENIKERTTMGKLGRAKSGKSMMWTKTAFGYYHNRKTGILEIVPLQATIVEQIFTDYLSGISLTKLRDKLNESGHIGKDIPWSYRTLRQTLDNPVYCGYIKFKDSLFEGMHKPIIPYETYLKVQKELEERQQQTYERNNNPRPFQAKYMLSGVARCGYCGAPLRIVLGHKRKDGSRTMRYHCANRFPRKTKGVTVYNDNKKCDSGTYDLSDLENTVIDNLIGFQENNDSLLKIINGNNQPILDTSSLKKQISQIDKKIQKNSDLYLNDFITMDELKDRTDSLQAEKKLLQAKISENKFNDSTDVFELVETQLGSIPINELSYDNKKKIVNNLVSKVDVTADNVDIIFKFQLA

SEQ ID NO: 3649 - protein, 452 aa, synthetic construct
MKAAIYIRVSTQEQVGNYSIQAQTEKLTALCRSKDWDVYDIFIDGGYSGSNMNRPALNEMLSKLHEIDAVVVYRLDRLSRSQRDTTTLIEEYFLKNDVEFVSLSETLDTSSPFGRAMIGILSVFAQLERETIRDRMVMGKIKRIEAGLPLTTAKGRTFGYDVIDTKLYINEEEAKQLQLIYDIFEEEQSITSLQKRLKKLGFKVRTYNRYSNWLTNDLYCGYVSYKDKVHVKGIHEPIISEEQFYRVQEIFTRMGKNPNMNRDSASLLNNLVVCSKCGLGFVHRRKDTMSRGKKYHYRYYSCKTYKHTHELEKCGNKTWRADKLEELIINRVNNYSFASRNVDKEDELDSLNEKLRVEHAKKKRLFDLYINGSYEVSELDSMMSDIDAQINHYESQIGANEKLKKNKKIQENLADLATMDFDSLEFREKQQYLKSLINKIYIDGEQVTIEWL

SEQ ID NO: 3650 - protein, 451 aa, synthetic construct
MKAAIYIRVSTQEQVGNYSIQAQTEKLTALCRSKDWDVYDIFIDGGYSGSNMNRPALNKMLSKLHEIDAVVVYRLDRLSRSQRDTTTLIEEYFLKNNVEFVSLSETLDTSSPFGRAMIGILSVFAQLERETIRDRMVMGKIKRIEAGLPLTTAKGRTFGYDVIDTKLYINEEEAKHLQLIYDIFEEEQSITSLQKRLKKLGFKVRTYNRYNNWLTNDLYCGYVSYKDKVHVRGIHEPIISEEQFYRVQEIFTRMGKNPNMNRDNASLLSNLVVCSKCGLGFVHRSKDTMSRGKKYHYRYYSCKTYKHTHELEKCGNKTWRADKLEELIINRVNNYSFASRNVDKEDELHGLNEKLIEHAKKKRLFDLYINGSYEVSELDSMMNDIDAQINYYESQIEAKEELRKNKKIQENLADLATVDFDSLEFREKQLYLKSLINKIYIDGEQVTIEWL

SEQ ID NO: 3651 - protein, 452 aa, synthetic construct
MKAAIYIRVSTREQVENYSIQAQTEKLTALCRSKDWDVYDIFIDGGYSGSNMNRPALNEMLSKLREIDAVVVYRLDRLSRSQRDTITLIEEYFLKNDVEFVSLSETLDTSSPFGRAMIGILSVFAQLERETIRDRMVMGKIKRIEAGLPLTTAKGRTFGYDVIDTKLYINEEEAKQLQLIYDIFEEEQSITFLQRRLKKLGFKVRTYSRYNNWLTNDLYCGYVSYKDKVHVKGIHEPIISEEQFYRVQEIFTRMGKNPNMNRDSASLLNNLVVCSKCGLSFVHRRKDTMSRGKKYHYRYYSCKTYKHTHELEKCGNKIWRADRLEELIVDRVNNYSSAGRNVDKEDELDSLNEKLKIEHAKKKRLFDLYINGSYEVSELDSMMNDIDAQINHYESQIEASEELKKNKKIQESLANLATVDYDSLEFREKQLYLKSLINKIYIDGEQVTIEWL

SEQ ID NO: 3652 - protein, 452 aa, synthetic construct
MKAAIYIRVSTQEQVENYSIQAQTEKLTALCRSKDWDVYDIFIDGGYSGSNMNRPALNKMLSKLQEIDAVVVYRLDRLSRSQRDTTTLIEEYFLKNNVEFVSLSETLDTSSPFGRAMIGILSVFAQLERETIRDRMVMGKIKRIEAGLPLTTAKGRTFGYDVIDTKLYINEEEAKQLQLIYDIFEEEQSITSLQKRLKKLGFKVRTYNRYNSWLTNDLYCGYVSYKDKVHVKGIHEPIISEEQFYRVQEIFTRMGKNPNMNRDSASLLSNLVVCSKCGLGFVHRSKDAMSRGKKYHYRYYSCKTYKHTHELEKCGNKTWRADKLEELIINRVNNYSFASRNVDKEDELNSLNEKLKIEHAKKKRLFDLYINGSYEVSELDSMMNDIDAQINYYESQIEANEELKKNRKIQENLADLATRDFDSLEFREKRLYLKSLINKIYIDGEQVTIEWL

SEQ ID NO: 3653 - protein, 485 aa, synthetic construct
MTKKVAIYTRVSTTNQAEEGFSIDEQIDRLTKYAEAMGWQVSDTYTDAGFSGAKLERPAMQHLINDIENKAFDTVLVYKLDRLSRSVRDTLYLVKDVFTKNKIDFISLNECIDTSSAMGSLFLTILSAINEFERENIKERMTMGKLGRAKSGKSMMWTKTAFGYYHNRKTGILEIVPLQATIVKQIFTDYLSGISLTKLRDKLNESGHIGKDIPWSYRTLRQTLDNPVYCGYIKFKDSLFEGMHKPIIPCETYLKVQKELEERQQQTYERNNNPRPFQAKYMLSGMARCGYCGAPLKIVLGHKRKDGSRTMKYHCANRFPRKTKGVTVYNDNKKCDSGTYDLSNLENTVIDSLIGFQENNDSLLEIINGNNQPILDTSSFKNQITQIDKKIQKNCDLYLNDFITMEELKDRTDSLQAEKRLLKAKISENKFNDSADVFELVKTQLGSIPINELSYDNKKKIVNNLVSKVDVTADNVDIIFKFQLA

SEQ ID NO: 3654 - protein, 452 aa, synthetic construct
MKAAIYIRVSTQEQVGNYSIQAQTDKLTALCRSKGWDVYDIFIDGGYSGSNMNRPALNEMLSRLHEIDAVVVYRLDRLSRSQRDTTTLIEEYFLKNNVEFVSLSETLDTSSPFGRAMIGVLSVFAQLERETIRDRMVMGKIKRIEAGLPLTTAKGRTFGYDVIDTKLYINEEEAKQLQLIYDIFEEEQSITFLQKRLKKLGFKVRTYNRYNNWLTNDLYCGYVSYKDKVHVKGIHEPIISEEQFYRVQEIFTRMGKNPNMNRDSASLLSNLVVCSKCGLGFVHRSKDTMSRGKKYHYRYYSCKTYKHTHELEKCGNKTWRADKLEELIIDRVNNYSFASRNADKEDELDSLNEKLKIEHARKKRLFDLYINGGYEVSELDSMMNDIDAQINYYESRIEANEELKENRKIQENLADLATVDFDSLEFREKQLYLKSLINKIYIDGEQVTIEWL

SEQ ID NO: 3655 - protein, 452 aa, synthetic construct
MKAAIYIRVSTREQVENYSIQAQTEKLTALCRSKDWDVYDIFVDGGYSGSNMNRPALNEMLSKLHEIDAVVVYRLDRLSRSQRDTITLIEEYFLKNNVEFVSLSETLDTSSPFGRAMIGILSVFAQLERETIRDRMVMGKIKRIEAGLPLTTAKGRTFGYDVIDTKLYINEEEAKQLQLIYDIFEEEQSITFLQKRLKKLGFKVRTYSRYNNWLTNDLYCGYVSYKDKVHVKGIHEPIISEEQFYRVQEIFTRMGKNPNMNRDSASLLNNLVVCSKCGLGFVHRRKDTMSRGKKYHYRYYSCKTYKHTHELEKCGNKIWRADKLEELIIDCVNNYSFASRNVDKEDELDSLNEKLKIEHAKKKRLFDLYINGSYEVGELDCMMNDIDAQINYYEGQIKANEELKKNKKIQENLADLATVDFDGLEFREKQLYLKSLINKIYIDGEQVTIEWL

SEQ ID NO: 3656 - protein, 469 aa, synthetic construct
MSYTTPVRAAVYLRISEDRSGEQLGVARQREDCLKLCVQRKWVPVEYLDNDVSASTGKRRPAYEQMLADITAGRIAAVVAWDLDRLHRRPIELEAFMSLADEKRLALATVAGDVDLATPQGRLVARLKGCVAAHETEHKKARQRRAARQKAERGLPNWSKAFGYLPGPNGPEPDPRTAPLVKQAYADILAGASLGDVCRRWNDAGAFTITGRPWTTTTLSKFLRKPRNAGLRAYKGARYGPVDRDAIVGKAQWSPLVDEATFWAAQAVLDAPGRAPGRKSVRRHLLTGLAGCGKCGNHLAGSYRTDGRVVYVCKACHGVAILADNVEPILYHIVAERLAMPDAVDLLRREVHDAAEAETIRLELETLYGELDRLAVERAEGLLTARQVKISTDIVNAKITKLQARRLDQERLRVFDGIPLGTPQVAGMIAELSPDRFRAVLDVLAEVVVQPVGKSGRTFNPERVQVNWR

SEQ ID NO: 3657 - protein, 485 aa, synthetic construct
MTKKVAIYTRVSTTNQAEEGFSIDEQIDRLTKYAEAMGWQVSDTYTDAGFSGAKLERPAMQRLISDIENKAFDTVLVYKLDRLSRSVRDTLYLVKEVFTKNKIDFISLNESIDTSSAMGSLFLTILSAINEFERENIKERMTMGKLGRAKSGKSMMWTRTAFGYYHNRNTGILEIVPLQATIVEQIFTDYLSGISLTKLRDKLNESGHIGKDIPWSYRTLRQTLDNPVYCGYIKFKDSLFEGMHKPIIPYETYLKVQKELEERQQQAYERNNNPRPFQAKYMLSGMARCGYCGAPLRIVLGHKRKDGSRTMKYHCANRFPRKTKGVTVYNDNKKCDSGTYDLSNLENTVIDSLIGLQGNNDSLLKIINGNNQPILDTSSFKKQISQIDKKIQKNSDLYLNDFITMEELKDRTDSLQAQKKLLKAKISENKYNDSTDVFELVKTQLGSIPISELSYDNKKKIVNNLVSKVDVTADNVDIIFKFQLA

SEQ ID NO: 3658 - protein, 485 aa, synthetic construct
MTKKVAIYTRVSTTNQAEEGFSIDEQVDRLTKYAEAMGWQVSDTYTDAGFSGAKLERPAMQRLINDIENKAFDTVLVYKLDRLSRSVRDTLYLVKDVFTKNKIDFISLSESIDTSSAMGSLFLTILSAINEFERENIKERMTMGKLGRAKSGKSMMWTKTAFGYYHNRKTGILEIVPLQAAIVEQIFTDYLSGISLTKLRDKLNESGHIGKDIPWSYRTLRQTLDNPVYCGYIKFKGSLFEGMHKPIIPYETYLKVQKELEERQQQTYERNNNPRPFQAKYMLSGMARCGYCGAPLRIVLGHKRKDGSRTMKYHCANRFPRKTKGVTVYNDNKKCDSGTYDLSNLENSVIDNLIGFQENNDSLLKIINGNNQPILDTSSFKEQISQIDKKIQKNSDLYLNDFITMDELKDRTDSLQAEKKLLKAKISESKFNDSTDVFELVKTQLGSIPINELSYDNKKKIVNNLVSKVDVTADNVDIIFKFQLA

SEQ ID NO: 3659 - protein, 485 aa, synthetic construct
MTKKVAIYTRVSTTNQAEEGFSIDEQTDRLTKYAEAMGWQVSDTYTDAGFSGAKLERPAMQRLINDIENKAFDTVLVYKLDRLSRSVRDTLYLVKDVFTKNKIDFISLNESIDTSSAMGSLFLTILSAINEFERENIKERMTMGKLGRAKSGKSMMWTKTAFGYYHNRKTGILEIVPLQATIVKQIFTDYLSGISLTKLRDRLNESGHIGKDIPWSYRTLRQTLDNPVYCGYIKFKGSLFEGMHKPIIPYETYLKVQKELEERQQQTYERNNNPRPFQAKYMLSGMARCGYCGAPLRIVLGHKRKDGSRTMKYHCANRFPRKTRGVTVYNDNKKCDSGTYDLCNLENTVIDNLIGFQENNDSLLKIINGDNQPILDTGSFEKQISQIDKKIQKNSDLYLNDFITMDELRDRTDSLQAEKKLLKAKISENKFNGSTDVSELVKAQLGSIPINELSYDNKKKIVNSLVSKVDVTADSVDIIFKFQLA

SEQ ID NO: 3660 - protein, 485 aa, synthetic construct
MTKKVAIYTRVSTTNQAEEGFSIDEQIDRLTKYAEAMGWQVSDTYTDAGSSGAKLERPAMQRLISDIENKAFDTVLVYKLDRLSRSVRDTLYLVKDVFTKNKIDFISLNESIDTSSAMGSLFLTILSAINEFERENIKERMTMGKLGRAKSGKSMMWTKTAFGYYHNRKTGILEIVPLQATIVEQIFTDYLSGISLTKLRDKLNESGHIGKDIPWSYRTLRQTLDNPVYCGYIKFKGSLFEGLHKPIIPYETYLKVQKELEERQQQTYERNNNPRPFQAKYMLSGMARCGYCGAPLRIVLGHRRKDGSRTMKYHCANRFPRKTGGVTVYNDNKKCDSGTYDLSNLENTVIDNLIGLQENNDSLLKIINGNNQPILDTSSFKKQISQIDKRIQRNSDLYLNGFITMDELKDRTGSLQAEKKLLKAKISENKFNDSTDVFELVKTQLGSVPINELSYDNKKKIVNNLVSKVDVTADSVDIIFKFQLA

SEQ ID NO: 3661 - protein, 452 aa, synthetic construct
MKAAIYIRVSTQEQVGNYSIQAQTEKLTALCRSKDWDVYDIFIDGGYSGSNMNRPALNEMLSKLHEIDAVVVYRLDRLSRSQRDTTTLIEEYFLKNNVEFVSLSETLDTSSPFGRAMIGILSVFAQLERETIRDRMVMGKIKRIEAGLPLTTAKGRTFGYDVIDTKLYINEEEARQLRLIYDIFEEEQSITFLQKRLKKLGFKVRTYNRYNNWLTNDLYCGYVSYKDKVHVKGIHEPIISEEQFYRVQEIFTRMGKSPNMNRDSASLLNNLVMCSKCGLGFVHRSKDTMSRGKKYHYRYYSCKTYKHTHELEKCGNKTWRADRLEELIINRVNNYSFASRNVDKEDELDSLNEKLKIEHAKKKRLFDLYINGSYEASELDSMMNDIDAQINYYESQIEASEELKKNKKIQENLADLATVDFDSLEFREKRLYLKGLINKIYIDGEQVTIEWL

SEQ ID NO: 3662 - protein, 452 aa, synthetic construct
MKAAIYIRVSTREQVENYSIQAQTEKLTALCRSKDWDVYDIFIDGGYSGSNMNRPALNEMLCKLHEIDAVVVYRLDRLSRSQRDTITLIEEHFLKNNVEFVSLSETLDTSSPFGRAMIGILSVFAQLERETIRDRMVMGKIKRIEAGLPLTTAKGRTFGYDVIDTKLYINEEEAKQLQLIYDIFEEEQSITFLQKRLKKLGFKVRTYSCYNNWLTNDLYCGYVSYKDKVHVKGIHEPIISEEQFYRVQEIFTRMGKNPNMNRDSASLLNNLVVCGKCGLGFVHRRKDTISRGKKYHYRYYSCKTYKHIHELEKCGNKIWRADELEELIINRVSDYSFASRNVDKEDELDSLNERLKIEHAKKKRLFDLYINGSYEVSELDSMMNDIDAQINYYESQIEANEELRKNRKIQKDLADLATVDYDSLEFREKQLYLKSLINKIYIDGEQVTIEWL

SEQ ID NO: 3663 - protein, 469 aa, synthetic construct
MSYTTPVRAAVYLRISEDRSGEQLGVARQREDCLKLCSQRKWVPVEYLDNDVSASTGKRRPAYEQMLADIVAGKIAAVVAWDLDRLHRRPIELEAFMSLADEKRLALATVAGDVDLATPQGRLVARLKGSVAAHETEHKKARQRRAARQKAERGLPNWSKAFGYLPGPNGPEPDPRTAPLVKQAYADILAGASLGDVCRQWNDAGAVTITGRPWTTTTLSKFLRKPRNAGLRAYKGARYGPVDRDAIVGKARWSPLVDEATFWAAQAVLDAPGRAPGRKSVRRHLLTGLAGCGKCGNHLAGSYRTDGRVVYVCRVCYGVTILADNIEPILYHIVAERLAMPDAVDLLRREIRDAAEAETIHLELKTLYGELDRLAVERAEGLLTARQVKISTDIVNAKITKLQARQLDQERLRVLDGVPLGTPQVAGMIAELSPDRFRAVLDVLAEVVVQPVGKSGRIFNPERVQVNWR

SEQ ID NO: 3664 - protein, 469 aa, synthetic construct
MSYTTPVRAAVYLRISEDRSGEQLGVARQREDCLKLCDQRKWEPVEYLDNDVSASIGKRRPAYEQMLVDITAGKIAAVVAWDLDRLHRRPIELEAFMSLADEKRLALATVAGDVDLATPQGRLVARLKGSVAAHETEHKKARQRRAARQKAERGHPNWSKAFGYLPGPNGPEPDPRTAPLVKQAYADILAGASLGDVCRQWNDAGASTITGRPWTTTTLSKFLRKPRNAGLRAYKGACYGPVDRDAIVGKAQWSPLVDEATFWAAQAVLDAPGRAPGRKSVRRHLLTGLAGCGKCGNHLAGSYRTDGRVVYVCKACHGVAILADNIEPILYHVVAERLAMPDAVDLLRCEIHDAAEAETIRLELGTLYGELDRLAVERAEGLLTARQVKISTDIVNAKITKLQARQLDQERLRVFDGIPLGTPQVAGMIAELSPNRFRAVLDVLAEVVVQPVGKSGRIFNPERVQVNWR

SEQ ID NO: 3665 - protein, 452 aa, synthetic construct
MKAAIYIRVSTREQVENYSIQAQTEKLTALCRSKDWDVYDIFIDGGYSGSNMNRPALNEMLSKLHEIDAVVVYRLDRLSRSQRDTITLIEEYFLKNNVEFVSLSETLDTGSPFGRAMIGILSVFAQLERETIRDRMVMGKIKRVEAGLPLTTAKGRTFGYDVIDTKLYINEEEAKQLQLIYDIFEEEQSITFLQKRLKKLGLKVRTYGCYNNWLTNDLYCGYVSYKDKVHVKGIHEPIISEEQFHRVQEIFTRMGKNPNMNRDSASLLNNLVVCSKCGLGFVHRRKDTMSRGKKYHYRYYSCKTFKHTHELEKCGNKIWRADKLEELIVNRVNNYSFASRNVDKEDELDSLNEKLKIEHAKKKRLFDLYISGSYEVSELDSMMSDIDAQINYYESQIEANEELKRSKKIQENLANLATVDYDSLEFREKQLYLKSLINKIYIDGEQVTIEWL

SEQ ID NO: 3666 - protein, 452 aa, synthetic construct
MKAAIYIRVSTREQVENYSIQAQTEKLTALCRSKDWDVYDIFIDGGYSGSNMNRPALNEMLSKLHEIDAVVVYRLDRLSRSQRDTITLIEEYFLKNNVEFVSLSETLDTSSPFGRAMIGILSVFAQLERETIRDRMVMGKIKRIEAGLPLTTAKGRTFGYDVIDTKLYINEEEAKQLQLIYDIFEEEQSITFLQKRLKKLGFKVRTYSCYNNWLTNDLYCGYVSYKDKVHVKGIHEPIVSEEQFYRVQEIFARMGKNPNMNRDSASLLNNLVVCSKCGLGFVHRRKDAMSRDKKYHYRYYSCKTYKHIHELEKCGNKIWRADELEELVINRVNSYSVASRNVDKEDELDSLNEKLKTEHAKKKRLFDLYINGGYEVSELDSMMNDINAQINYYESQIEANEELKKNKKIQENLANLATVDFDSLEFRKKQLYLKSLINKIYIDGEQVTIEWL

SEQ ID NO: 3667 - protein, 452 aa, synthetic construct
MKAAIYIRVSTREQVENYSIQAQTEKLTALCRSKDWDVYDIFVDGGYSGSNMNRPALNEMLSKLHEIDAVVVYRLDRLSRSQRDTITLIEEYFLKNNVEFVSLSETLDTSSPFGRAMIGILSVFAQLERETIRDRMVMGKIKRIEAGLPLTTAKGRTFGYDVIDTKLYINEEEAKQLRLIYDIFEEERSITFLQKRLKKLGFEVRTYNRYNNWLTNDLYCGYVSYKDKVHVKGIHEPIISEEQFYRVQEIFTRMGKNPNMNRDSASLLNNLVVCGKCGLGFVHRRKDAMSRDKKYHYRYYSCKTYKHIHELEKCGNKIWRADKLEELVINRVNNYSFASRNVDKEDELDSLNEKLRIEHAKKRRLFDLYISGRYVVSELDSMMNDIDAQINYYESQIEANEELKKDKKIQENLAHLATVDFGSLEFREKQLYLKSLINKIYIDGEQVTIEWL

SEQ ID NO: 3668 - protein, 452 aa, synthetic construct
MKAAIYIRVSTQEQVENYSIQAQTEKLTALCRSKDWDVYDIFIDGGYSGSNMNRPALNEMLSKLHEIDAVVVYRLDRLSRSQRDTITLIEEYFLKNDVEFVSLSETLDTSSPFGRAMIGILSVFAQLERETIRDRMVMGKIKRIEAGLPLTTAKGRTFGYDVVDTKLYINEEEAKQLQLIYDIFEEEQSITSLQKRLKKLGFKVHTYNRYNNWLTNDLYCGYVSYKDKVHVKGIHEPIISEEQFHRVQEIFTRMGKGPNMNRDSASLLNNLVVCSKCGLGFVHRRKDTMSRGKKYHYRYYSCKTYKHTHELEKCGNKIWRADKLEELIINRVNDYSLAGRNVDKEGELDGLNEKLKVEHAKKKRLFDLYINGSYEVSELDSMMNDIDAQINYYESQIEANEELKKDKKIQESLANLATVDYDSLEFREKQLYLKSLINKIYIDGEQVTIEWL

SEQ ID NO: 3669 - protein, 469 aa, synthetic construct
MSYTTPVRAAVYLRISEDRSGEQLGVARQREDCLKLCDQRKWVPVEYLDNDVSASTGKRRPAYEQMLADITAGKIAAVVTWDLDRLHRRPIELEAFMSLADEKRLALATVAGDVDLATPQGRLVARLKGCVAAHETEHKKARQRRAARQKAERGHPNWSNAFGYLPGPNGPEPDPRTAPLVKQAYADILAGASLGDVCRQWNDAGAFTITGRPWTTTTLSKFMRKPRNAGLREYRGARYGPVDRGAIVGKAQWSPLVDEATFWAAQAVLDAPGRAPGRKSVRRHLLTGLAGCGKCGNHLAGSYRTDGQVVYVCKVCHGVSILAVNIEPILYRIVAERLAMPDAVDLLRREIHDAAEAETIRLELETLYGELDRLAVERAEGLLTARQVKISTDIVNAKITKLQARQLDRERLRVLDGIPLGTPQVAGMIAELSPDRFRAVLGVLAEVVVQPVGKSGRIFNPERVQVNWR

SEQ ID NO: 3670 - protein, 469 aa, synthetic construct
MSYTTPVRAAVYLRISEDRSGEQLGVARQREDCLKLCDQRKWVPVEYLDNDVSASTGKRRPAYEQMLADITAGKIAAVVAWDLDRLHRRPIELEAFMGLADEKRLALATVAGDVDLATPQGRLVARLKGCVAAHETEHKKARQRRAARQKAERGLPNWSKAFGYLPGPNGPEPDPRIAPLVKQAYTDILAGASLGDVCRQWNDAGAFTITGRPWTTTILSKFLRKPRNAGLRAYKGARYGPVDRDAIVGKAQWSPLVDEATFWAAQAVLDAPGRAPGRKSVRRHLLTGLAGCGKCGNHLAGSYRTGGRVVYVCKACHGVAILADNIEPILYHTVAERLAMPDAADLLRRDIHDAAEAETTRLELETLYGELDRLAVERAEGLLTARQVKISTDIVNAKITKLQARQLDQERLRVFDGIPLGTPRVAGMIAELSPNRFRAVLDVLAEVVVQPVGKSGRIFNPERVQVNWR

SEQ ID NO: 3671 - protein, 469 aa, synthetic construct
MSYTTPVRAAVYLRISEDRSGEQLGVARQREDCLKLCDQRKWVPVEYLDNDVSASTGKRRPAYEQMLADITAGKIAAVVAWDLDRLHRRPIELEAFMSLADEKRLALATAAGDVDLATPQGRLVARLKGSVAAHETEHKKARQRRAARQKAERGHPNWSKAFGYLPGPNGPEPDPRTAPLVKQAYADILAGASLGDVCRQWNDVGAFTITGRPWTTTTLSKFLRKPRNAGLRAYKGARYGPVDRDAIVGKAQWSPLVDEATFWAAQAVLDAPGRAPGRKSVRRHLLTGLAGCGKCGNHLAGSYRTDGRVVYVCRACHGVAILADSIEPILYHIVAERLAMPDAVDLLRREIHDAAEAETIRLELETLYGELDRLAVERAEGLLTARQVKISTDIVNAKIAKLQARQLDQERLRVLDGIPLGTPQVAGMIAELSPDRFRAVLDVLAEVVVQQVGKSGRIFNPERVQVNWR

SEQ ID NO: 3672 - protein, 452 aa, synthetic construct
MKAAIYIRVSTREQVENYSIQAQTEKLTALCRSKDWDVYDVFIDGGYSGSNMNRPALNEMLSKLHEIDAVVVYRLDRLSRSQRDTITLIEEYFLKNNVEFVSLSETLDTSSPFGRAMIGILSVFAQLERETIRDRMVMGKIKRIEAGLPLTTANGRTFGYDVIDAKLYINEEEAKQLRLIYDIFEEEQSITSLQKRLKKLGFKVHTYNRYNNWLTNDLYCGYVSYKDKVHVKGIHEPIISEEQFYRVQEIFTRMGKNPNMNRDSASLLNNLVVCSKCGLGFVHRRKDAMSRDKKYHYRYYSCKTYKHIHELEKCGNKIWRADELEELIINRVNNYSLASRNADKEDELDSLNEKLKIEHAKKKRLFDLYINGSYEVSELDSMMKDIDAQINYYESQIEANEGLKKNKKIQESLANLATVDFDSLEFREKQLYLKSLINKIYIDGEQVTIEWL

SEQ ID NO: 3673 - protein, 469 aa, synthetic construct
MSYTTPVRAAVYLRISEDRSGEQLGVARQREDCLKLCDQRKWVPVEYLDNDVSASTGKRRPAYEQMLADITAGKIAAVVAWDLDRLHRRPIELEAFMSLADEKRLALATVAGDIDLATPQGRLVARLKGSVAAHETEHKKARQRRAARQKAERGYPNWSQAFGYLPGPNGPEPDPRTAPLVKQAYADILAGASLGDVCRQWNDAGAFTITGRPWTTTTLSKFLRKPRNAGLRAYKGARYGPVDRDAIVGKAQWGPLVDEATFWEAQTVLDAPGRAPGRKSVRRHLLTGLAGCGKCGNHLAGSYRTDGRVVYVCKTCHGVAILADNIEPILYHVVAERLAVPDAVDLLRREIHDAAEAETIRLELETLYGELDRLAVERAEGLLTARQVKISTDIVSAKIAKLQARQQDQERLRVLGGIPLGTPQVAGTIAELSPDRFRAVLDVLAEVVVQPVGKSGRIFNPERVQVNWR

SEQ ID NO: 3674 - protein, 485 aa, synthetic construct
MTKKVAIYTRVSTTNQAEEGFSIDEQIDRLTKYAEAMGWQVSDTYTDAGISGAKLERPAMQRLINDIENKAFDTVLVYKLDRLSRSVRDTLYLVKDVFTKNKIDFISLNESIDTSSAMGSLFLTILSAINEFERENIKERMTMGKLGRAKSGKSMMWTKTAFGYYHNRKTGILEIVPQQATIVEQIFTDYLSGISLTKLRDKLNESGHIGKDIPWSYRTLRQTLDNPVYCGYIKFKGRLFEGMHKPIIPYETYLKVQKELEERQQQTYERNNNPRPFQAKYMLSGMARCGYCGAPLRIVLGHKRKDGSRTMKYHCANRFPRKTKGVTVYNDNKKCDSGTYDLSNLENTVIDSLIGFQENNDSLLKIINGNNQPIPDTSSFKKQISQIDKKIQKNSDLYLNDFITMDELKDRTDSLQAEKKLLKAKISENKFNDSSDVFELVKTQLGSIPINELSYDNKKKIVNSLVSKVDVTADNVDIIFKSQLA

SEQ ID NO: 3675 - protein, 452 aa, synthetic construct
MKAAIYIRVSTQEQVGNYSIQAQTEKLTALCRSKDWDVYDIFIDGGYSGSNMNRPALNEMLSKLHEIDAVVVYRLDRLSRSQRDTTTLIEEYFLKNNVEFVSLSETLDTSSPFGRAMIGILSVFAQLERETIRDRMVMGKIKRIEAGLPLTTAKGRTFGYDVIDTKLYINEEEAKQLQLIYDIFEEEQSITSLQKRLKKLGFKVRTYNRYNNWLTNDLYCGYVSYKDKVHVKGIHEPIISEEQFYRVQEIFTRMGKNPNMNRDSASLLNNLVVCSKCGLGFVHRRKDTMSGGKKYHYRYYSCKTYKHTHELEKCGNKIWRADKLEELVINRVNNYSFVSRNVDKEDELDSLNEKLKIEHAKKKRLFDLYINGSYEVSELDSMMNDIDAQINYYESQIEASKELKKNKKIQENLADLATVDFDSLEFREKQLYLKSLINKIYIDGEQVTIEWL

SEQ ID NO: 3676 - protein, 452 aa, synthetic construct
MKAAIYIRVSTREQVENYSIQVQTEKLTALCRSKDWDVYDIFIDGGYSGSNMNRPALNEMLSKLHEIDAVVVYRLDRLSRSQRDTITLIEEYFLKNNVEFVSLCETLDTSSPFGRAMIGILSVFAQLERETIRDRMVMGKIKRIEAGLPLTTAKGRTFGYDVIDTKLYINEEEAKQLQLIYDIFEEEQSITILQKRLKKLGFKVRTYNRYYNWLTNDLYCGYVSYKDKVHVKGIHEPIISEEQFYRVQEIFTRVGKNPNMNRDSASLLSGLVVCSKCGLGFVHRRKDTMSRSKKYHYRYYSCKTYKHTHELEKCGNKIWRADKLEELIINRVNNYSFASHNVDKEDELDSLNEKLKIEHAKRKRLFDLYINGNYEVSELDSMMSDIDAQINYYESQIEANEELKKNKKIQENLANLSTVDYDSLEFREKQLYLKSLINKIYIDGEQVTIEWL

SEQ ID NO: 3677 - protein, 452 aa, synthetic construct
MKAAIYIRVSTQEQVGNYSIQAQTEKLTALCRSKDWDVYDIFIDGGYSGSNMNRPALNEMLSKLHEIDAVVVYRLDRLSRSQRDTTTLIEEYFLKNNVEFVSLSETLDTSSPFGRAMIGILSVFAQLERETIRDRMVMGKIKRIEAGLPLTTAKGRTFGYDVIDTKLYINEEEARQLQLIYDIFEEEQSITSLQKRLKKLGFKVRTYNRYNNWLTNDLYCGYVSYKDKVHVKGIHEPIISEEQFYRVQEIFTRMGKNPNMNRDSASLLNNLVVCSKCGLGFVHRSKDTMSRGKKYHYRYYSCKTYKHTHELEKCGNKTWRADKLEELIINRVNNYSFASRSADKEDELDSLNEKLKIEHARKKRLFDLYINGSYEVSELDGMMSDIDAQINYYEGQIEANEELKKNKKIQENLADLATVDFDSLEFREKQLYLKSLINKIYIDGEQVTIEWL

SEQ ID NO: 3678 - protein, 452 aa, synthetic construct
MKAAIYIRVSTREQVENYSIQAQIEKLTALCRSKDWDVYDIFIDGGYSGSNTNRPALNEMLSKLHEIDAVVVYRLDRLSRSQRDTITLIEEYFLKNNVEFVSLSETLDTSSPFGRAMIGILSVFAQLERETIRDRMVMGKIKRVEAGLPLTTAKGRTFGYDVIDTKLYINEEEAKQLQLIYDIFEEEQSITFLQKRLKKLGFKVRTYSRYNSWLTNDLYCGYVSYKDKVHVKGIHEPIISEEQFYRVQEIFARMGKNPNMSRDNASLLNNLVVCSKCGLGFVHRRKDTVSRGKKYHYRYYSCKTYKHTHELEKCGNKIWRADKLEELIINRVNNYSFASRNVGKEDELDSLNEKLKIEHAKKKRLFDLYINGSYGVSELDSMMNDIDARINYYESQIEANEELKRNKKIQENLADLATVDYDSLEFREKQLYLKSLINKIYIDGEQVTIEWL

SEQ ID NO: 3679 - protein, 452 aa, synthetic construct
MKAAIYIRVSTREQVENYSIQAQTEKLTALCRSKDWDVYDVFIDGGYSGSNMNRPALNEMLSKLHEIDAVVVYRLDRLSRSQRDTITLIEEYFLKNNVEFVSLSETLDTSSPFGRAMIGILSVFAQLERETIRDRMVMGKIKRIEAGLPLTTAKGRTFGYDVIDTKLYINEEEARQLQLIYDIFEEEQSITFLQKRLKKLGFKVHTYNRYNNWLTNDLYCGYVSYKDKVHVKGIHEPIISEEQFYRVQEIFTRMGKNPNTNRDSASLLSNLVVCSKCGLGFVHRRKDTMSRGKKYHYRYYSCKTYKHTHELEKCGNKIWRADKLEELVINRVNNYSSASRNADKEDELDSLNEKLKIEHAKKKRLFDLYINGSYEVSELDSMMNGIDAQINYYESQVEANEELKKNKKIQENLANLATVDYDSLEFREKQLYLKSLINKIYIDGELVTIEWL

SEQ ID NO: 3680 - protein, 452 aa, synthetic construct
MKAAIYIRVSTREQVENYSIQAQTEKLTALCRSKDWDVYDIFIDGGYSGSNMNRPALNEMLSKLHEIDAVVVYRLDRLSRSQRDTITLIEEYFLKNNVEFVSLSETLDTSSPFGRAMIGILSVFAQLERETIRDRMVMGKIKRIEAGLPLTTAKGRTFGYDVIDTKLYINEEEAKQLQLIYDIFEEEQSITFLQKRLKKLGFKVRTYSRYNSWLTNDLYCGYVSYKDKVHVKGVHEPIISEEQFYRVQEIFTRMGKNPNMNRDSASLLNNLVVCSKCGLGFVHRRKDTMSRGKKYHYRYYSCKTYKHTHELEKCGNKIWRADKLEELIINRVNNYSFASRNVDKEDELDSLNEKLKIEHVKKKRLFDLYINGSYEVSELDSMMSDIDAQINYYESQIEANEALKKNKKIQENLANLASVDYDSLEFREKQLYLKSLINKIYIDGEQVIIEWL

SEQ ID NO: 3681 - protein, 485 aa, synthetic construct
MTKKVAIYTRVSTINQAEEGFSIDEQVDRLTKYAEAMGWQVSDTYTDAGFSGAKLERPAMQRLINDIENKAFDTVLVYKLDRLSRSVRDTLYLVKDVFTKNKIDFISLNESINTSSAMGSLFLTILSAINEFERENIKERMTMGKLGRAKSGKSMMWTKTAFGYYHNRKTGILEIVPLQATIVEQIFTDYLSGISLTKLRDKLNESGHIGKDIPWSYRTLRQTLDNPVYCGYIKFKDSLFEGLHKPIIPYETYLKVQKELEERQRQTYERNNNPRPFQAKYMLSGMARCGYCGAPLRIVLGHKRKDGSRTMKYHCANRFPRKTKGVTVYNDNKKCDSGTYDLSDLENTVIDNLIGFQENNDSLLKIINGVNQPILDTSSFKKQISQIDKKIQKNSDLYLNDFITMDELKARTDSLQAEKKLLKAKISENKFNDSTGVFELVKTQLGSIPINELSYDNKKKIVNNLVSKVDVTADNVDIIFKFQLS

SEQ ID NO: 3682 - protein, 452 aa, synthetic construct
MKAAIYIRVSTREQVENYSIQAQTEKLTALCRSKDWDVYDIFVDGGYSGSNMNRPALNEMLSKLHEIDAVVVYRLDRLSRSQRDTITLIEEYFLKNNVEFVSLSETLDTSSPFGRAMIGILSVFAQLERETIRDRMVMGKIKRIEAGLPLITAKGRTFGYDVIDTKLYINEEEAKQLQLIYDIFEEEQSITYLQKRLKKLGFKVRSYNRYNNWLTNDLYCGYVSYKDKVHVKGIHEPIISEEQFYRVQEIFARMGKNPNMNRDSASLLNNLVVCSKCGLGFVHRRKDAMSRDKKYHYRYYSCKTYKHIHELEKCGNKIWRADKLEELIINRVNDYSVASRNVDKEDELDSLNEKLKIEHAKKRRLFDLYINGSYEVSELDSMMNDIDAQINYYESQIEANEELTKNKKIRENLADLATVDFDSLEFREKQLHLKSLISKIYIDGEQVTIEWL

SEQ ID NO: 3683 - protein, 452 aa, synthetic construct
MKAAIYIRVSTREQVENYSIQAQTEKLTALCRSKDWDVYDIFIDGGYSGSNMNRPALNEMLSKLHEIDAVVVYRLDRLSRSQRDTITLIEEYFLKNNVEFVSLSETLDTSSPFGRAMIGILSVFAQLERETIRDRMVMGKIKRIEAGLPLTTAKGRTFGYDVIDAKLYINEEEAKQLQLIYDIFEEEQSITFLQKRLKELGFKVRTYNRYNNWLTNDLYCGYVSYKDKVHVKGIHEPIISEEQFYRVQEILTRTGKNPNMNRDCASLLNNLVVCSKCGLGFVHRRKDTTSRGKKYHYRYYSCKTYKHTHELEKCGNKIWRADRLEELIINRVNNYSFASRNADKEDELDSLNEKLKIEHAKRKRLFDLYINGSYEVSELDSMMNDIDAQINYYESQIEVNEELKKDKKIQESLANLATVDYDSLEFREKQLYLKSLINKIYIDGEQVTIEWL

SEQ ID NO: 3684 - protein, 452 aa, synthetic construct
MKAAIYIRVSTREQVENYSIQAQTEKLTALCRSKEWDVYDIFIDGGYSGSNMNRPALNEMLSKLHEIDAVVVYRLDRLSRSQRDTITLIEEYFLKNNVEFVSLSETLDTSSPFGRAMIGILSVFAQLERETIRDRMVMGKIKRIEAGLPLTTAKGRTFGYDVIDTKLYINEEEAKQLRLIYDIFEEEQSITFLQKRLKKLGFKVRTYNCYNNWLTNDLYCGYVSYKDKVHVKGIHEPIISEEQFYRVQEIFTRMGKNPNMNRDSASLLNNLVVCSKCGLGFVHRRKDAMSRDKKYHYRYYSCKTYKHIHELEKCGNKIWRADELEELVINRVNSYSVASRNVDKEDELGSLNEKLKIEHAKKKRLFDLYINGSYEVSELDSMMNDIDAQINYYESQIEANEELKKNKKIQENLAYLATVDFDSLEFREKQLYLKSLINKIYIDGEQVTIEWL

SEQ ID NO: 3685 - protein, 452 aa, synthetic construct
MKAAIYIRVSTREQVENYSIQAQTEKLTALCRSKDWDVYDIFIDGGYSGSNMNRPALNEMLSKLHEIDAVVVYRLDRLSRSQRDTITLIEEYFLKNNVEFVSLSETLDTSSPFGRAMIGVLSVFAQLERETIRDRMVMGKIKRVEAGLPLTTAKGRTFGYDVIDTKLYINEEEAKQLQLIYDIFEEEQSITFLQKRLKKLGFKVRTYNRYNNWLTNDLYCGYVSYKDKVHVKGIHEPIISEEQFYRVQEIFTRMGKNPNMNRDSASLLSNLVVCSKCGLGFVHRRKDTTSRGKKYHYRYYSCKTYKHTHELEKCGNRIWRADKLEELVINRVNNYSLASRNVDKEDELESLNEKLKIEHVRKKRLFDLYINGSYEVSELDSMMNDIDAQINYYESQIEANEELKKNKKIQENLANLATVDYDSLEFREKRLYLKSLINKIYIDGEQVTIEWL

SEQ ID NO: 3686 - protein, 452 aa, synthetic construct
MKAAIYIRVSTREQVENYSIQAQTEKLTALCRSKDWDVYDIFIDGGYSGSNMNRPALNEMLSKLHEIDAVVVYRLDRLSRSQRDTITLIEEYFLKNNVEFVSLSETLDTSSPFGRAMIGILSVFAQLERETIRDRMVMGKIKRIEAGLPLTTAKGRTFGYDVIDTKLYINEEEAKQLQLIYDIFEEEQSITFLQKRLKKLGFKVRTYSCYNSWLTNDLYCGYVSYKDKVHVKGIHEPIISEEQFYRVQAIFTRMGKNPNMNRDSASLLNNLVVCSKCGLGFVHRRKDTMSRGKKYHYRYYSCKTYKHIHELEKCGNKIWRADKLEELIINRVNNYSFASRNMDKEDELDSLNEKLKIEHAKKKRLFDLYINGSYEVSELDSMMNDIDAQINYYESQIEANEELKKNKKIQENLADLATMDFDSLEFREKQLYLKSLINKIYIDGEQVTIEWL

SEQ ID NO: 3687 - protein, 452 aa, synthetic construct
MKAAIYIRVSTREQVENYSIQAQTEKLAALCRSKDWDVYDIFIDGGYSGSNMNRPALNEMLSKLHEINAVVVYRLDRLSRSQRDTITLIEEYFLKNNVEFVSLSETLDTSSPFGRAMIGILSVFAQLERETIRDRMVMGKIKRIEAGLPLTTAKGRTFGYDVIDTKLYINEEEAKQLRLIYDIFEEEQSITFLQKRLKKLGFKVRTYNRYNNWLTNDLYCGYVSYKDKVHVKGIHEPIISEEQFYRVQEIFTRMGKNPNMNRDSASLLNNLVVCSKCGLGFVHRRKDATSRDKKYHYRYYSCKTYKHIHELEKCGNKIWRADKLEELVINRVNNYSLACRDVDKEGELDSLNEKLKIEHAKKKRLFDLYINGSYEVSELDSMMGDIDAQISYYESQIEANEELKKNKKIQENLADLATVDFDSLEFREKQLYLKRLINKIYIDGEQVTIEWL

SEQ ID NO: 3688 - protein, 485 aa, synthetic construct
MTKKVAIYTRVSTTNQAEEGFSIDEQIDRLTKYAEAMGWQVSGTYTDAGFSGAKLERPAMQRLINDIENKAFDTVLVYKLDRLSRSVRDTLYLVKDVFTKNKIDFISLNESINTSSAMGSLFLTILSAINEFERENIKERMTMGKLGRAKSGKSMMWTKTAFGYYHNRKTGILEIVPLQATIVEQIFTDYLSGISLTKLRDKLNENGHIGKDIPWSYRTLRQTLDNPVYCGYIKFKDSLFEGMHKPIIPYETYLKVQKELEKRQQQTYERNNNPRPFQAKYMLSGMARCGYCGAPLRIALGHKRKDGSRTMKYHCANRFPRKTKGVTVYNDNKKCDSGTYDLSDLENTVIDNLIGLQENNDSLLKIIDGNNQPILDTSSFKEQISQIDKKIQKDSDLYLNDFITMDELKDRTDSLQAEKKLLKAKISENKFNDSTDVFELVKTQLGSIPINELSYDNKKRIVNNLVSKVDVTAGNVDIIFKFQLA

SEQ ID NO: 3689 - protein, 452 aa, synthetic construct
MKAAIYIRVSTQEQVGNYSIQAQTEKLTALCRSKDWDVYDIFIDGGYSGSNMNRPALNEMLSKLHEIDAVVVYRLDRLSRSQRDTTTLIEEYFLKNNVEFVSLSETLDTSSPFGRAMIGILSVFAQLERETIRDRMVMGKIKRIEAGLPLTTAKGRTFGYDVIDTKLYINEEEAKQLQLIYDIFEEEQSITLLQKRLKKLGFKVRTYNRYNSWLTNDLYCGYVSYKDKVHVKGIHEPIISEEQFYRVQEIFARMGKNPNMNRDSASLLNSLVVCSKCGLGFVHRSKDTMSHGKKYHYRYYSCKTYKHTHELEKCGNKTWRADKLEELIINRVNNYSFASRNVGKEDELDSLNEKLKIEHAKKKRLFDLYINGSYEVSELDSMMDDIDAQISYYESQIVANEELKKNKKIQEGLANLATVDFDSLEFREKQLYLKSLINKIYIDGEQVTIEWL

SEQ ID NO: 3690 - protein, 485 aa, synthetic construct
MTKKVAIYTRVSTTNQAEEGFSIDEQIDRLTKYAEAMGWQVSDTYTDAGFSGAKLVRPAMQRLINDIENKAFDTVLVYKLDRLSRSVRDTLYLVKDVFTKNKIDFISLNESIDTSSAMGSLFLTILSAINEFERENIKERMTMGKLGRAKSGKSMMWTKTAFGYYHNRKTGILEIVPLQATIVEQIFTDYLSGISLTKLRDKLNESGHIGKDIPWSYRTLRQTLDNPVYCGYIKFRDSLFEGMHKPIIPYETYLKVQKELEERQQQAYERSNNPRPFQAKYMLSGMARCGYCGAPLRIVLGHKRKDGSRTMKYHCANRFPRRTKGVTVYNDNKKCDSGTYGLSNLENIVIDNLIGFQENNDSLLKIINGNNQPILDTSSLKKQISQIDKKIQKNSDLYLNDFITMDELKDRTDSLQAEKKLLEAKISENKFNDSTDVFELVKTQLGSIPINELSYDNKKKIVNNLVSKVDVTADNVDIIFKFQLA

SEQ ID NO: 3691 - protein, 452 aa, synthetic construct
MKAAIYIRVSTREQVENYSIQAQTEKLTALCRSKDWDVYDIFIDGGYSGSNMNRPALNEMLSKLHEIDAVVVYRLDRLSRSQRDTITLIEEYFLKNNVEFMSLSETLDTSSPFGRAMIGILSVFAQLERETIRDRMVMGKIKRVEAGLPLTTAKGRTFGYDVVDTKLYINEEEAKQLQLIYDIFEEEQSITFLQKRLKKLGFRVRSYNRYNSWLTNDLYCGYVSYKDKVHVKGIHEPIISEEQFYRVQEIFTRMGKNPNINRDSASLLNNLVVCSKCGLGFVHRRKDTMSRGKKYHYRYYSCKTYKHTHELEKCGNKIWRADKLEELIINRVNNYSFASRNVDKEDELDSLNEKLKVERAKKKRLFDLYINGSYEVSELDSMMNDIDAQINYYESQIEANEGLKKDKKIQESLANLATVDYDSLEFREKQLYLKSLINKIYIDGEQVTIEWL

SEQ ID NO: 3692 - protein, 469 aa, synthetic construct
MSYTTPVRAAVYLRISEDRSGEQLGVTRQREDCLKLCGQRKWVPVEYLDNDVSASTGKRRPAYERMLADITAGKIAAVVAWDLDRLHRRPIELEAFMSLADEKRLALATVAGDVDLATPQGRLVARLKGCVAAHETEHKKARQRRAARQKAERGHPNWSKAFGYLPGPNGPEPDPRTAPLVKQAYADILAGASLGDVCRQWNAAGAFTITGRPWTTTALSKFLRKPRNAGLRAYKGARYGPVDRDAIVGKAQWSPLVDEATFWAAQAVLDAPGRAPGRKSVRRHLLTGLAGCGRCGSHLAGSYRTDGRVVYVCKACHGVSILADNIVPILYHIVAERLAMPDAVDLLCREIHDAAGAETIRLELETLYGELDRLAVERAEGLLTARQVKISTDIVNAKIAKLQARQLDQERLRVLDGIPLGTPQVAGMIAELSPDRFRAVLDVLAEVVVQPVGKSGRIFNPERVQVNWR

SEQ ID NO: 3693 - protein, 469 aa, synthetic construct
MCYTTPVRAAMYLRISEDRSGEQLGVARQREDCLKLCDQRKWVPVEYLDNDVSASTGKRRPAYEQMLADITAGRVAAVVAWDLDRLHRRPIELEAFMSLADEKRLALATVAGDVDLATPQGRLVARLKGSVAAHETEHKKARQRRAARQKAERGHPNWSKAFGYLPGPNGPEPDPRTAPLVKQAYADILAGASLGDVCRRWNDAGAFTITGRPWTSTTLSKFLRKPRNAGLRAYKGARYGPVDRDAIVGKAQWSPLVDEATFWAAQAVLDAPGRAPGRKSVRRHLLTGLAGCGKCGNYLAGSHRTDGRVVYVCKACHGVSILADNIEPILYRIVAERLATPDAVDLLRREVHDAAEAGTIRLELETLYGELDRLAVERAEGLLTARQVKISTDIVDAKITKLQARQQDQERLRVLDGIPLGTPQVAGMIAELSPDRFRAVLDVLAEVVVQPVGKSGRIFNPERVQVSWR

SEQ ID NO: 3694 - protein, 452 aa, synthetic construct
MKAAIYIRVSTQEQVENYSIQAQTEKLTALCRSKDWDVYDIFIDGGYSGSNMNRPALNKMLSKLHEIDAVVVYRLDRLSRSQRDTTTLIEEYFLKNNVEFVSLSETLDTSSPFGRAMIGILSVFAQLERETIRDRMVMGKIKRIEAGLPLTTAKGRTFGYDVIDTKLYINEEEAKQLRLIYDIFEEVQSITFLQKRLKKLGFKVRTYNRYNNWLTNDLYCGYVSYKDKVHVKGIHEPIISEEQFYRVQEIFTRMGKNPNMNRDSASLLNNLVVCSKCGLGFVHRSKDTMCRGKKYHYRYYSCKTYKHTHELEKCGNKTWRADKLEELIINRVNNYSFVSRNVGKEDELDSLYEKLKIEHAKKKRLFDLYINGSYEVSELDSMMNDIDAQINYYESQIEASEGLKKNKKIQENLADLAAVDFDSLEFREKQLYLKSLINKIYIDGEQVTIDWL

SEQ ID NO: 3695 - protein, 452 aa, synthetic construct; identical to SEQ ID NO: 2123

SEQ ID NO: 3696 - protein, 485 aa, synthetic construct
MTRKVAIYTRVSTTNQAEEGFSIDEQIDRLTKYAEAMGWQVSDTYTDAGFSGAKLERPAMQRLINDIENKAFDTVLVYKLDRLSRSVRDTQYLVKDVFTKNKIDFISLNESIDTSSAMGSLFLTILSAINEFERENIKERMTMGKLGRAKSGKSMMWTKTAFGYYHNRKTGILEIVPLQATIVEQIFTDYLSGISLTKLRDKLNESGHIGKDIPWSYRTLRQTLDNPVYCGYIKFKDSLFEGMHKPIIPYETYLKVQKELEERQQQTYERNNNPRPFQAKYMLSGMARCGYCGAPLRVVLGHKRRDGSRTMKYHCANRFPRKTKGVTVYNDNKKCDSGTYDLSNLENTVIDSLVGFQENNDSLLKIINGNNQPILDTSSFKEQISQIDKKIQKNSDLYLNDFITMDELKDRTDRLQAEKKLLKAKISENKFNDSTDVFELVKTQLGSIPINELSYDNKKKIVNNLVNKVDVTADNVDIIFKFQLA

SEQ ID NO: 3697 - protein, 485 aa, synthetic construct
MTKKVAIYTRVSTANQAEEGFSIDEQIDRLTKYAEAMGWQVSDTYTDAGFSGAKLERPAMQRLINDIENKAFDTVLVYKLDRLSRSVRDTLYLVKNVFTRNKIDFISLNESIDTSSAMGSLFLTILSAINEFERENIKERMTMGKLGRAKSGKSMMWTKTAFGYYHNRKTGILEIVPLQATIVEQIFTDYLSGISLTKLRDKLNESGHIGKDIPWSYRTLRQTLDNPVYCGYIKFKDSLFEGMHKPIIPYETYLKVQKELEGRQQQTYERNNNPRPFQAKYMLSGMARCGYCGAPLRIVLGHKRKDGSRTMKYHCANRFPRKAKGVTVYNDNKKCDSGTYDLSNLENTVIDNLIGFQENNDSLLKIINGNNQPILDTSSFKKQISQIDKKIQKNSDLYLNDFITMDELKDRTDSLQAEKKLLKAKISENKFNDSTDVFELVKTQLGSIPINELSYDNKKKIVNNLVSKVDVTADNVDIIFKFQLA

SEQ ID NO: 3698 - protein, 485 aa, synthetic construct
MTKKVAIYTRVSTTNQAEEGFSIDEQVDRLTKYAEAMGWQVSDTYTDAGFSGAKLERPAMQRLINDIENRAFDTVLVYKLDRLSRSVRDTLYLVKDVFTKNKIDFVSLNESINTSSAMGSLFLTILSAINEFERENIKERMTMGKLGRAKSGKSMMWTRTAFGYYHNRKTGILEVVPLQATIVEQIFTDYLSGISLTKLRDKLNESGHIGKDIPWSYRTLRQTLDNPVYCGYIKFKDSLFEGMHKPIIPYETYLKVQKELEERQQQTYERNNNPRPFQAKYMLSGMARCGYCGAPLKIVLGHKRKDGSRTMKYHCANRFPRKTKGATVYNDNKKCDSGTYDLSNLENTVIDSLIGFQENNDCLLKIINGNNQPILDTSSFKEQISQIDKKIQKNSDLYLNDFITMDELKDRTDSLQAEKKLLKAKISENKFNDSTDVFELVKTQLGSIPINELSYDNKKRIVNNLVSKVDVTADNVDIIFKFQLA

SEQ ID NO: 3699 - protein, 452 aa, synthetic construct
MKAAIYIRVSTREQVENYSIQAQTEKLTALCRSKDWDVYDIFIDGGYSGSNMNRPALNEMLSKLHEIDAVVVYRLDRLSRSQRDTITLIEEYFLKNNVEFVSLSETLDTSSPFGRAMIGILSVFAQLERETIRDRMVMGKIKRVEAGLPLTTAKGRTFGYDVIDTKLYINEEEAEQLQLIYDIFEEEQSITFLQKRLKKLGFKVRTYSCYSSWLTNDLYCGYVSYKDKVHVKGIHEPIISEEQFYRVQEIFTRMGRNPNMNRDSASLLNNLVVCSKCGLGFVHRRKDTTSRGKKYHYRYYSCKTYKHTHELEKCGNKIWRADKLEELIINRVNNYSLASRNVDKEDELDSLNEKLRIEHAKKKRLFDLYINGSYEVSELDSMMNDVDAQINYYESQIEANEELKKNKKIQENLADLATVDYDSLEFREKQLYLKSLINKIYIDGEQVTIEWL

SEQ ID NO: 3700 - protein, 485 aa, synthetic construct
MTKKVAIYTRVSTTNQAEEGFSIDEQIGRLTKYAEAMGWQVSDTYTDAGSSGAKLERPAMQRLINDIENKAFDTVLVYKLDRLSRSVRDTLYLVKDVFTKNKIDFISLNESIDTSSAMGSLFLTILSAINEFERENIKERMAMGKLGRAKSGKSMMWTKTAFGYYHNRKTGILEIVPLQATIVKQIFTDYLSGISLTKLRDKLNESGHIGKDIPWSYRTLRQTLDNPVYCGYIKFKDSLFEGMHKPIIPYETYLKVQKELEERQQQTYERNNNPRPFQAKYMLSGMARCGYCGAPLRIVLGHKRKDGSRTMKYHCANRFPRKTKGVTVYNDNKKCNSGTYDLGNLENTVIDNLIGFQENNDSLLKIINGNNQPILDTSSFIKQISQIDKKIQKNSDLYLNDLITMDELRDRTDSLQAEKKLLEAKISENKFNDRTDVFELVKTQLGSIPINELSYDNKKKIVNNLVSKVDVTADNVDIIFKFQLA

SEQ ID NO: 3701 - protein, 469 aa, synthetic construct
MSYTTPVRAAVYLRISEDRSGEQLGVARQREDCLKLCDQRKWVPVEYLDNDVSASTGKRRPAYEQMLADITAGKIAAVVAWDLDRLHRRPIELEAFMSLADEKRLALATVAGDVDLATPQGRLVARLKGSVAAHETEHKKARQRRAARQKAERGHPNWSKAFGYLPGPNGPEPDPRTAPLVKQAYTDILAGASLGDVCRQWNDAGAFTITGRPWTTTTLSKFLRKPRNAGLRAYKGARYGPVDRDAIVGKAQWSPLVDEATFWAAQAVLDAPGRAPGRKSVRRHLLTGLAGCGKCGNHLAGSYRTDGRVVYVCKACHGVAILADNIEPILYHIVAERLAMPGAVDLLRREIQDAAEAETIRLELETLYGELDRLAVERAEGLLTARQVKISTDIVSAKIAKLQTRQLDQERLRVFDGIPLGTPQVAGVIAGLSPDRFRAVLDVLAEVVVQPVGKSGRIFNPERVQVNWR

SEQ ID NO: 3702 - protein, 452 aa, synthetic construct
MKAAIYIRVSTREQVENYSIQAQTEKLTALCRSKDWDVYDIFIDGGYSGSNMNRPALNEMLSKLHEIDAVVVYRLDRLSRSQRDTITLVEEYFLKNNVEFVSLSETLDTSSPFGRAMIGILSVFAQLERETIRDRMVMGKIKRIEAGLPLTTAKGRTFGYDVIDTKLYINEEEAKQLQLIYDIFEEEQSIAFLQKRLKKLGFKVHTYSRYNNWLTNDLYCGYVSYKDKVHVKGIHEPIISEEQFYRVQEIFTRMGKNPNMNRDSASLLSNLVVCSKCGLSFVHRRKDTMSRGKKYHYRYYSCKTYKHTHELEKCGNKIWRADKLEELIISRVNNYSFASRNVDKEDELDSLNENLKIEHAKKKRLFDLYINGSYEMSELDSMMNDIDAQINYYESRIEATEELKKNKKIRENLANLATVDYDSLGFREKQLYLKSLINKIYIDGEQVSIEWL

SEQ ID NO: 3703 - protein, 485 aa, synthetic construct
MTKKVAIYTRVSTTNQAEEGFSIDEQIDRLTKYAEAMGWQVSDTYTDAGLSGVKLERPAMQRLINDIENKAFDTVLVYKLDRLSRSVRDTLYLVKDVFTKNKIDFISLNESIDTSSAMGSLFLTILSAINEFERESIKERMTMGKLGRAKSGKSMMWTKTAFGYYHNRKTGILEIVPLQATIVEQIFTDYLSGISLTKLRDKLNESGHIGKDIPWSYRTLRQTLDNPVYCGYIKFKDSLFEGMHKPIIPYETYLKVQKELEVRQQQTYERNNNPRPFQAKYMLSGMARCGYCGAPLKTVLGHKRQDGSRTMKYHCANRFPRKTKGITVHNDNKKCDSGTYDLSDLENTVIDNLIGLQENSDSLLKIINGNNQPILDTSSFEKQISRIDKKIQKNSDLYLNDFITMDELKDRTDSLQAEKKLLKAKVSENKFNDSTDVFELVKTQLGSIPINELSYDNKKKIVNNLVSKVDVTTDNVDIIFKFQLA

SEQ ID NO: 3704 - protein, 485 aa, synthetic construct
MTKKVAIYTRVSTTNQAEEGFSIDEQIDRLTKYAEAMGWRVSGTYTDAGFSGAKLERPAMQRLINDIENKAFDTVLVYKLDRLSRSVRDTLYLVKDVFTKNKIDFISLNESIDTSNAMGSLFLTILSAINEFERENIKERMTMGKLGRAKSGKSMMWTKTAFGYYHNRKTGILEIVPLQATIVEQIFTDYLSGISLTKLRDKLNESGHIGKDIPWSYRALRQTLDNPVYCGYIKFKDSLFEGMHKPIIPYETYLKVQKELEERQQQAYERNNNPRPFQAKYMLSGMARCGYCGAPLKIVLGHKRKDGSRTMKYHCANRFPRKTKGVTVYNDNKKCNSGAYDLSNLENTVIDSLIGFQENNDSLLKIINGDNQPILDTSSFEKQISQIDKKIQKNSDLYLNDFITMDELKDRTDSLQAEKKLLKAKISGNKFNDSTDVFELVKTQLGSIPINELSYDNKKKIVNNLVSKVDVTADNVDIIFKFQPA

SEQ ID NO: 3705 - protein, 485 aa, synthetic construct
MTKKVAIYTRVSTTNQAEEGFSIDEQIDRLTKYAEAMGWQVSDTYTDAGLSGAKLERPAMQRLINDIENKAFDTVLVYKLDRLSRSVRDTLYLVKDVFTKNKIDFISLNESIDTSSAMGSLFLTILSAINEFERENIKERMTMGKLGRAKSGKSMMWTKTAFGYYHNRKTGILEIVPLQATIVEQIFTDYLSGISLTKLRDKLNESGHIGKDIPWSYRTLRQTLDNPVYCGYIKFKDSLFEGMHKPIIPYETYLKVQKELEERQQQTYERNNNPRPFQAKYMLSGMARCGYCGAPLKIVLGYKRKDGSRTMKYHCANRFPRKTKGVTVYNDNKKCDSGTYDLSDLENAVIGNLIGFQENDDSLLKIINGNNQPTLDTSSFKKQISQIDKKIQKNSDLYLNDFITMDELKARTDSLQAEKKLLKAKISENKFNDSTDVFELVKTQLGSIPINELSYDNKKKIVNNLVSKVDVTADNVGIIFKFQLA

SEQ ID NO: 3706 - protein, 469 aa, synthetic construct
MSYTTPVRAAVYLRISEDRSGEQLGVARQREDCLKLCDQRKWVPVEYLDNDVSASTGKRRPAYDQMLADISAGKIAAVVAWDLDRLHRRPIELEAFMSLADEKRLALATVAGDVDLATPQGRLVARLKGSVAAHETEHKKARQRRAARQKAERGHPNWSKAFGYLPGPNGPEPDPRTAPLVKQAYADILAGASLGDVCRQWNDAGAFTITGRPWATTALSKFLRKPRNAGLRAYRGARYGPVDRDAIVGKAQWSPLVDEATFWAAQAVLDAPGRAPGRKSVRRHLLTGLAGCGKCGNHLAGSYRTDGRVVYVCKACHGVAILADNIEPILYHIVAERLAMPDAVDLLRREIHDAAEAETIRLELETLYGELDRLAVERAEGLLTARQVKISTDIVNAKITELQARQLDQERLRVLDGIPLGTPQVAGTIAELSPDRFRAVLDVLAEVVVQPVGKSGRIFSPKRVRVNWR

SEQ ID NO: 3707 - protein, 452 aa, synthetic construct
MKAAIYIRVSTREQVENYSIQAQTEKLTALCRSKDWDVYDIFIDGGYSGSNMNRPALNEMLSKLHEIDAVVVYRLDRLSRSQRDTITLIEEYFLKNNVEFVSLSETLDTSSPFGRAMIGILSVFAQLERETIRDRMVMGKIKRVEAGLPLTTAKGRTFGYDVIDTKLYINEEEAKQLQLIYDIFEEEQSITFLQKRLKRLGFKVHTYSRYNNWLTNDLYCGYVSYKDKVHVRGIHEPIISEEQFYRVQEIFTRMGKNPNMNRDSASLLNNLVVCSKCGLGFVHRRKDTTSRGKRYHYRYYSCKTYKHTHELEKCGNKIWRADKLEELIINRVNNYSFASRNVDEEDELDSLNEKLKIEHAKRKRLFDLYINGSYEVSELDGMMSDIDAQISYYESQIEANEELKKNKKIQENLANQATVDYDSLELREKQLYLKSLINKIYIDGEQVTIEWL

SEQ ID NO: 3708 - protein, 485 aa, synthetic construct
MTKKVAIYTRVSTTNQAEEGFSIDEQVDRLTKYAEAMGWQVSDTYTDAGFSGAKLERPAMQRLINDIENKAFDTVLVYKLDRLSRSVRDTLYLVKDVFTKNKIDFISLNESIDTSSAMGSLFLTILSAINEFERENIKERMTMGKLGRAKSGKSMMWTKTAFGYYHNRKTGILEIVPLQATIVEQIFTDYLSGISLTKLRDKLNESGHIGKDIPWSYRTLRQTLDNPVYCGYIKFKDILFEGMHKPIIPYETYLKVQKELEERQQQTYERNNNPRPFQAKYMLSGMARCGYCGAPLRIVLGHKRKDGSRTMKYHCANRFPRKTNGVTVYNDNKKCDSGTYDLSNLENAVIDNLIGFQENNDSLLKIINGNNQPILDTSSFKKQISQIDKKIQKNSDLYLNDFITMDELKDRTDSLQAEKKLLEAKISENQFNDSTDVFELVKTQLGSIPINELSYDDKKKIVNSLVSKVDVTADNVDIIFKFQLA

SEQ ID NO: 3709 - protein, 452 aa, synthetic construct
MKAAIYIRVSTREQVENYSIQAQTEKLTALCRSKDWDVYDIFIDGGYSGSNMNRPALNEMLSKLREIDAVVVYRLDRLSRSQRDTITLIEEYFLKNNVEFVSLSETLDTSSPFGRAMIGILSVFAQLERETIRDRMVMGKIKRIEAGLPLTTAKGRTFGYDVIDTKLYVNEEEAKQLQLIYDIFEEEQSITSLQKRLKQLGFKVRTYNRYNNWLTNDLYCGYVSYKDKVRVKGIHEPIISEEQFYRVQEIFTRMGKNPNMNRDSASLLNNLVVCSKCGLGFVHRRKDAMSRDKRYHYRYYSCKTYKHIHELEKCGNKIWRADKLEELIINRVNDYSLASRNVDKEDELDSLNEKLKIEHAKKKRLFDLYINGSYEVSELDSMMNDIDAQINYYESQIEANEELKRNKKIQENLADLATVDFDSLEFREKQRYLKSLINKIYIDGEQVTIEWL

SEQ ID NO: 3710 - protein, 452 aa, synthetic construct
MKAAIYIRVSTREQVENYSIQAQTEKLTALCRSKDWDVYDIFIDGGYSGSNMNRPALNEMLSKLHEIDAVVVYRLDRLSRSQRDTITLVEEYFLKNNVEFVSLSETLDTSSPFGRAMIGILSVFAQLERETIRDRMVMGKIKRIEAGLPLTTAKGRTFGYDVIDTKLYINEEEAKQLQLIYDIFEEEQSITLLQKRLKELGFKVRTYNRYNNWLTNDLYCGYVSYKDKVHVRGIHEPIISEEQFYRVQEIFTRMGKNPNMNRDSASLLNNLVVCSKCGLGFVHRRKDTISRGKKYHYRYYSCKTYKHTHELEKCGNKIWRADKLEELIINRVNNYSFASRNVDKEDELDSLNEKLKIEHAKKRRLFDLYINGSYGVSELDSMMKDINAQINYYESQIVAVEELKKNKKIQKNLADLATVDYDSLEFREKQRYLKSLINKIYIDGEQVTIEWL

SEQ ID NO: 3711 - protein, 452 aa, synthetic construct
MKAAIYIRVSTREQVENYSIQAQTEKLTALCRSKDWDVYDIFIDGGYSGSNMNRPALNEMLSKLHEIDAVVVYRLDRLSRSQRDTITLIEEYFLKNNVEFVSLSETLDTSSPFGRAMIGILSVFAQLERETIRDRMVMGKIKRIEAGLPLTTAKGRTFGYDVIDTKLYINEEEAKQLQLIYDIFEEEQSITLLQKRLKKLGFKVRTYSCYNNWLTNDLYCGYVSYKDKVHVKGIHEPIISEEQFYRVQEIFTRMCKNPNMNRDSASLLNNLVVCSKCGLGFVHRRKDTMSRGKKYHYRYYSCKTYKHTHELEKCGNKIWRADKLEELIINRVNNYSFASRNVDKEDELDSLNEKLKIERAKKKRLFDLYINGSYDVSELDSMMNDIDAQINYYESQIEASEELKKNKKIQESLANLATVDYDSLEFREKQLYLKSLINKIYIDGEQVTIEWL

SEQ ID NO: 3712 - protein, 452 aa, synthetic construct
MKAAIYIRVSTREQVENYSIQAQTEKLTALCRSKDWDVYDIFIDGGYSGSNMNRPALNEMLSKLHEIDAVVVYRLDRLSRSQRDTIILIEEHFLKNNVEFVSLSETLDTSSPFGRAMIGILSVFAQLERETIRDRMVMGKIKRIEAGLPLTTAKGRTFGYDVIDTKLYINEEEAKQLRLIYDIFEEVQSITFLQKRLKKLGFKVRTYSRYNNWLTNDLYCGYVSYKDKVHVKGIHEPIISEEQFYRVQEIFTRMGKNPNMNRDSASLLNSLVVCSKCGLGFVHRRKDTTSRGKKYHYRYYSCKTYKHTHELEKCGNKIWRADKLEELVINRVNNYSFASRNVGKEDELASLNEKLKIEHAKKKRLFDLYINGSYEVSELDSMMNNIDAQINYYESQIEVNEELKRNKKIQENLANLATVDYDSLEFREKQLYLKSLINKIYIDGEQVTIEWL

SEQ ID NO: 3713 - protein, 469 aa, synthetic construct
MCYTTPVRAAMYLRISEDRSSEQLGVARQREDCLKLCDQRQWVPVEYLDNDVSASTGKRRPAYEQMLADITAGKIAAVVAWDLDRLHRRPIELEAFMSLADEKRLALATVAGDVDLATPQGRLVARLKGSVAAHETEHKKARQRRAARQKAERGHPNWSKAFGYLPGPNGPEPDPRTAPLVKQAYADILAGASLGDVCRRWNDAGAFTITGRPWTTTALSKFLRKPRNAGLRAYKGARYGPVDRDAIVGKAQWSPLVDEATFWAAQAVLDAPGRAPGRKSVRRHLLTGLAGCGKCGNHLAGSYRTDGRVVYVCKACHGVAILADNIEPTLYHIVAERLAMPDAVDLLRREIHDATEAETIRLELETLYGELDRLAVERAEGLLTARQVKISTDIVNAKITKLQARQLDQERLRVFNGIPLGTPRVAGMIAELSPDRFRAVLDVLAEVVVQPVGKGGRAFNPERVRVNWR

SEQ ID NO: 3714 - protein, 469 aa, synthetic construct; identical to SEQ ID NO: 947

SEQ ID NO: 3715 - protein, 452 aa, synthetic construct
MKAAIYIRVSTREQVENYSIQAQTEKLTALCRSKDWDVYDIFVDGGYSGSNMNRPALNEMLSKLHEIDAVVVYRLDRLSRSQRDTITLIEEYFLKNNVEFVSLSETLDTSSPFGRAMIGILSVFAQLERETIRDRMVMGKIKRIEAGLPLTTAKGRTFGYDVIDTKLYINEEEAKQLQLIYDIFEEEQSITSLQKRLKKLGFKVRTYNRYNNWLTNDLYCGYVSYKDKVHVKGIHEPIISEEQFYRVQEIFARMGKNPNMNRGSASLLNNLVVCSKCGLGFVHRRKDTMSRGKKYHYRYYSCKTYKHIHELEKCGNKIWRADKLEELIVNRVNNYSVASRNADKEDELDSLNEKLKIEHAKKKRLFDLYINGSYEVSELDSMMGDIDAQINYYESQIEANGGLKKNKKIQENLAYLATVDFDSLEFREKQLYLKSLINKIYIDGEQVTIEWL

SEQ ID NO: 3716 - protein, 452 aa, synthetic construct
MKAAIYIRVSTREQVENYSIQAQTEKLTALCRSKDWDVYDIFIDGGYSGSNMNRPALNEMLSKLHEIDAVVVYRLDRLSRSQRDTITLIEEYFLKNNVEFVSLSETLDTSSPFGRAMIGILSVFAQLERETIRDRMVMGKIKRIEAGLPLTTAKGRTFGYDVIDTKLYINEEEAKQLQLIYDIFEEEQSITSLQKRLKKLGFKVHTYNRYNNWLTNDLYCGYVSYKDKVRVKGIHEPIISEEQFYRVQEIFTRMGKNPNMNRDSASLLNNLVVCSKCGLGFVHRRKDAMSRDKKYHYRYYSCKTYKHIHELEKCGNKIWRADELEELIIDRVNNYSFASRNADKEDELDSLNEKLKIEHAKRKRLFDLYINGSYGASELDSMMKDIDAQINYYESQIEANEELRKNKKIQENLADLATVDFDSLEFREKQLYLKSLINKIYIDGEQVTIEWL

SEQ ID NO: 3717 - protein, 485 aa, synthetic construct
MTKKVAIYTRVSTTNQAEEGFSIDEQTDRLTKYAEAMGWQVSDTYTDAGFSGTKLERPAMRRLINDIENKAFDTVLVYKLDRLSRSVRDTLYLVKDVFTKNKIDFISLNESIDTSSAMGSLFLTILSAINEFERENIKERMTMGKLGRAKSGKSMMWTKTAFGYYHNRKTGILEIVPLQAAIVEQIFTDYLSGISLTKLRDKLNESGHIGKDIPWSYRTLRQTLDNPVYCGYIKFKDSLFEGMHKPIIPYETYLKVQKELEERQQQAYERNNNPRPFQAKYMLSGMARCGYCGAPLRIVLGHKRKDGSRTMKYHCANRFPRKTKGVTVYNDNKKCDSGAYDLSNLENTVIDNLIGFQENNDSLLKIINGNNQPILDTSSFKKQISQIDKKIQKNSDLYLNGFITMDELKDRTDSLQAEKKLLEAKISENKFNDSTDVFELVKTQLGSIPINELSYDNKKKIVNSLVSKVDVTADNVDIIFKFQLA

SEQ ID NO: 3718 - protein, 452 aa, synthetic construct
MKAAIYIRVSTQEQVGNYSIQAQTEKLTALCRSKDWDVYDIFIDGGYSGSNMNRPALNEMLSRLHEIDAVVVYRLDRLSRSQRDTTTLIEEYFLKNNVEFVSLSETLDTSSPFGRAMIGILSVFAQLERETIRDRMVMGKIKRIEAGLPLTTAKGRTFGYDVIDTRLYINEEEAKQLRLIYDIFEEEQSITSLQKRLKKLGFKVRTYNRYNNWLTNDLYCGYVSYKDKVHVKGIHEPIISEEQFYRVQEIFTRMGKNPNMNRDSASLLNNLVVCSKCGLGFVHRSKDTMSRGKKYHYRYYSCKTYKHTHELEKCGNKTWRADKLEELIINRVNNYSFASRSADKEDELDSLNEKLKIEHARRKRLFDLYINGSYEVSELDSMMNDIDAQINYYESQIEASEELKKNKKIQENLADLATVDFDSLEFREKQLYLRSLINKIYIDGEQVTIEWL

SEQ ID NO: 3719 - protein, 452 aa, synthetic construct
MKAAIYIRVSTREQVENYSIQAQTEKLIALCRSKDWDVYDIFIDGGYSGSNMNRPALNEMLSKLHEIGAVVVYRLDRLSRSQRDTITLIEEYFLKNNVEFVSLSETLDTSSPFGRAMIGILSVFAQLERETIRDRMVMGKIKRIEAGLPLTTAKGRTFGYDVIDTKLYINEEEAKQLQLIYDIFEEEQSITLLQKRLKKLGFKVRTYSCYNNWLTNDLYCGYVSYKDKVHVKGIHEPIISEEQFYRVQEIFTRMGKNPNMNRDSASLLNNLVVCSKCGLGFVHRRKDTMSRGKKYHYRYYSCKTYKHTHELEKCGNKIWRADRLEELIINRVNNYSFASRNVDKEGELDSLNEKLKIEHAKKRRLFDLYINGSYEVSELDSMMNDIDAQISYYESQIEANEELRKNKKIQENLAYLATVDFDSLEFREKQLYLKSLINKIYIDGEQVTIEWL

SEQ ID NO: 3720 - protein, 452 aa, synthetic construct
MKAAIYIRVSTQEQVENYSIQAQTEKLTALCRSKDWDVYDIFIDGGYSGSNMNRPALNEMLSKLHEIDAVVVYRLDRLSRSQRDTITMIEEYFLKNNVEFVSLSETLDTSSPFGRAMIGILSVFAQLERETIRDRMVMGKIKRIEAGLPLTTAKGRTFGYDVIDTKLYINEEEAKQLQLIYDIFEEEQSITFLQKRLKKLGFKVHTYSRYNNWLTNDLYCGYVSYKDKVHVKGIHEPIISEEQFYRVQEIFTRMGKNPNTNRDSASLLNSLVVCSKCGLGFVHRRKDTMSRGKKYHYRYYSCKTYKHTHELEKCGNKIWRADKLEELIINRVSNYSLASRNVDKEGELDSLNEKLKIEHAKKKRLFDLYISGSYEVSELDSMMNDIDVQINYYESQIVANEELKKDKKIQENLADLATVDFDSLEFREKQLYLKSLINKIYVDGEQVTIEWL

SEQ ID NO: 3721 - protein, 469 aa, synthetic construct
MSDTTPVRAAVYLRISEDRSGEQLGVARQREDCLKLCDQRKWVPVEYLDNDVSASTGKRRPAYEQMLADITAGKIAAVVAWDLDRLHRRPIELEAFMSLADEKRLALATVAGDVDLATPQGRLVARLKGSVAAHETEHKKARQRRAARQKAERGYPNWSKAFGYLPGPNGPEPDPRTAPLVKQAYADILAGASLGDVCRRWNDAGAFTITGRPWTTTTLSKFLRKPRNAGLRAYKGARYGPVDRDAIVGKAQWSPLVDEATFWAAQAVLDAPGRAPGRKSVRRHLLTGLAGCGKCGNHLAGSYRTDGKVVYVCKACHGVAILADNIEPILYHIVAERLAMPDAVDLLRREIHDVAEAETIRLELETLYGELDRLAVERAEGLLTARQVKISTDIVNTKITKLQARQLDQERLRVLDGIPLGTPQVAGMIAELSPDRFRAVLDVLAEVVVQPVGKSGRIFNPERVQVNWR

SEQ ID NO: 3722 - protein, 485 aa, synthetic construct
MTRKVAIYTRVSTTNQAEEGFSIDEQIDRLTKYAEAMGWQVSDTYTDAGFSGAKLERPAMQRLINDIENKAFDTVLVYKLDRLSRSVRDTLYLVKDVFTKNKIDFISLNESIDTSSAMGSLFLTILSAINEFERENIKERMTMGKLGRAKSGKSMMWTKTAFGYYHNRKTGILEIVPLQATIVEQIFTDYLSGISLTKLRDKLNESGHVGKGIPWSYRTLRQTLDNPVYCGYIKFKGSLFEGMHKPIIPYETYLKVQKELEERQQQTYERNNNPRPFQAKYMLSGMARCGYCGAPLKIVLGHKRKDGSRSMKYHCANRFPRKTKGVTVYNDNKKCDSGTYDLSNLEDTVIDTLIGFQENNDSLLKIINGDNQPILDASSFKEQISQIDKKIQKNSDLYLNDFITMDELKVRTDSLQAEKKLLKAKISENKFNDSTDVFGLVKTQLGSIPINELSYDNKKKIVNNLVSKVDVTADNVDIIFKFQLA

SEQ ID NO: 3723 - protein, 452 aa, synthetic construct; identical to SEQ ID NO: 1833

SEQ ID NO: 3724 - protein, 469 aa, synthetic construct
MSYTTPVRAAVYLRISEDRSGEQLGVARQREDCLKLCGQRKWVPVEYLDNDVSASTGKRRPAYEQMLADITAGKIAAVVAWDLDRLHRRPIELEAFMSLADEKRLALATVAGDVDLATPQGRLVARLKGCVAAHETEHKKARQRRAARQKAERGHPNWSKAFGYLPGPNGPEPDPRTAPLVKQAYADILAGASLGDVCRRWNDAGAFTITGRPWTTTTLSKFLRKPRNAGLRAYKGARYGPVDRDAIVGKAQWSPLVDEATFWAAQAVLDAPGRAPGRKSVRRHLLTGLAGCGKCGNHLAGSYRTDGRVVYVCKACHGVAILADNIEPILYHIVAERLAMPDAVELLRREIHDAAEAETIRLELETLYGELDRLAVERAEGLLTARQVKISTDIVNAKITKLQARQLDQERLRVFDGIPLGTPQVAGRIAELSPDRFRAVLDVMAEVVVQPVGKGGRISNPERVQVNWR

SEQ ID NO: 3725 - protein, 485 aa, synthetic construct
MTKKVAIYTRVSTTNQAEEGFSIDEQIDRLTKYAEAMGWQVSDTYTDAGFSGAKLERPAMQRLINDIEDKAFDTVLVYKLDRLSRSVRDTLYLVKDVFTKNKIDFISLNESIDTSSAMGSLFLAILSAINEFERENIKERMTMGKLGRAKSGKSMMWTKTAFGYYHNRKTGILEIVPLQATIVEQIFTDYLSGISLTKLRDKLNEGGHIGKDIPWSYRTLRQTLDNPVYCGYIKFKGSLFEGMHKPIIPYETYLKVQKELEERQRQTYERNNNPRPFQAKYMLSGMARCGYCGAPLRIVLGHKRKDGSRTMKYHCANRFPRRTKGVTVYNDNKKCDSGTYDLSNLENTVIDILIGFQENNDSLLKIINGNNQPILDTSSLKKQISQIDKKIQKNSDLYLNDFITMDELRDRTDSLQAEKKLLKAKISENKLNDSTDVFELVKTQLGSIPINELSYDNKKKIVNNLVSKVDVTADNVDIIFKFQLA

SEQ ID NO: 3726 - protein, 452 aa, synthetic construct
MKAAIYIRVSTREQVENYSIQAQAEKLTALCRSKDWDVYDIFIDGGYSGSNTNRPALNEMLSKLHEIDAVVVYRLDRLSRSQRDTITLIEEYFLKNNVEFVSLSETLDTSSPFGRAMIGILSVFAQLERETIRDRMVMGKIKRIEAGLPLTTAKGRTFGYDVVDTKLYINEEEAKQLQLIYDIFEEERSITLLQKRLKKLGFKVRTYNRYNNWLTNDLYCGYVSYKDKVHVKGIHEPIISEEQFNRVQEIFARMGKNPNMNRDSASLLNNLVVCSKCGLGFVHRRKDIMSHDKKYHYRYYSCKTYKHIHELEKCGNKIWRADKLEELIINRVNNYSLASRSVDKEDELDSLNEKLKIEHAKKKRLFDLYINGSYEVSELDSMMSDIDAQINYYESQIETNEELKKNKKIQENLAYLATVDFDSLEFREKQLYLKSLINKIYIDGEQVTIEWL

SEQ ID NO: 3727 - protein, 452 aa, synthetic construct
MKAAIYIRVSTREQVENYSIQAQTEKLTALCRSKDWDVYDIFIDGGYSGSNMNRPALNEMLSKLHEIDAVVVYRLDRLSRSQRDTITLIEEYFLKNNVEFVSLSETLDTSSPFGRAMIGILSVFAQLERETIRDRMVMGKIKRIEAGLPLTTAKGRTFGYDVVDTKLYINEEEAKQLQLIYDIFEEEQSITFLQKRMKKLGFEVRTYNCYNNWLTNDLYCGYVSYKDKVHVKGIHEPIISEEQFYRVQEIFTRMGKNPNMNRDSASLLNNLVVCSKCGLGFVHRRKDTVSRGKKYHYRYYSCKTYKHIHELEKCGNKIWRADKLEELIINRVNNYSFASRNVDKEDELDSLNEKLKIERAKKKRLLDLYINGSYEVGELDSMMNDIDAQINYYESQIEANEELEKNEKIQENLADLATVDYDSLEFREKQLYLKSLINKIYIDGEQVTIEWL

SEQ ID NO: 3728 - protein, 485 aa, synthetic construct
MTKKVAIYTRVSTANQAEEGFSIDEQIDRLTKYAEAMGWQVSDTYTDAGFSGAKLERPAIQRLINDIENKAFDTVLVYKLDRLSRSVRDTLYLVKDVFTKNKIDFISLNESIDTSSAMGSLFLTILSAINEFERENIKERMTMGKLGRAKSGKSMMWTKTAFGYYHNRKTGILEIVPLQATIVEQIFTDYLGGISLTKLRDKLNESGHIGKDIPWSYRTLRQTLDNPVYCGYIKFKDSLFEGMHKPIIPYETYLKVQKELEERQQQTYERNNNPRPFQAKYMLSGMARCGYCGAPLRIVLGHKRKDGSRTMKYHCANRFPRKTKGITVYNDNKKCDSGTYDLSDLENTVIDNLIGLQENNDSLLKIINGNNQPILDTSSFKKQISQIDKKIQKNSDLYLNDFITMDELKDRTDSLQAEKKLLKAKISENNFNDSTDVFELVRTQLGSIPINELSYDNKKKIVNNLVSKVDVTADNVDIIFKFQLA

SEQ ID NO: 3729 - protein, 485 aa, synthetic construct
MTKRVAIYTRVSTTNQAEEGFSIDEQIDRLTKYAEAMGWQVSDTYADAGFSGAKLERPAMQRLINDVENKAFDTVLVYKLDRLSRSVRDTLYLVKDVFTKNKIDFISLNESIDTSSAMGSLFLTILSAINEFERENIKERMTMGKLGRAKSGKSMMWTKTAFGYYHNRKTGILEIVPLQATIVEQIFTDYLSGMSLTKLRDKLNESGHIDKDIPWSYRTLRQTLDNPVYCGYIKFKGSLFEGMHKPIIPYETYLKVQKELEERQQQTYERNNNPRPFQAKYMLSGMARCGYCGAPLRIVLGHKRKDGSRTMKYHCANRFPRKTKGITVYDDNEKCDSGTYDLSNLENTVIDNLIGFQENNDSLLKIINGNNQPILDTSSFKKQTSQIDEKIRKNSDLYLNDFITMDELKDRTDSLQAEKRLLRAKISENKFNGSSDVFELEKTQLGSIPINELSYDNKKRIMNNLVSKVDVTADSVDIIFKFQLA

SEQ ID NO: 3730 - protein, 469 aa, synthetic construct
MSYTTPVRAAVYLRISEDRSGEQLGVARQREDCLKLCGQRKWVPVEYLDNDVSASTGKRRPAYEQMLADITAGKIAAVVAWDLDRLHRRPVELEAFMSLADEKRLALATVAGDVDLATPQGRLVARLKGCVAAHETEHKKARQRRAARQKAERGYPNWSKAFGYLPGPNGPEPDPRTAPLVKQAYADILAGASLGDVCRQWNDAGAFTITGRPWATTTLSKFLRKPRNAGLRAYKGARYGPVDRDTIVGRAQWSPLVDEATFWAAQAVLDAPGRAPGRKSVRRHLLTGLAGCGKCGNHLAGSYRTDGRVVYVCKACHGVAILADNIEPILYHIVAERLAMPDAVDLLRREIHDAAEAETIRLELETLYDELDRLAVERAEGLLTARQVKISTDIVNAKITKLQARQLDQERLRVFDGIPLGTPQVAGMIAELSPDRFRAVLGVLAEVVVQPVGKSGRIFNPERVQVNWR

SEQ ID NO: 3731 - protein, 452 aa, synthetic construct
MKAAIYIRVSTREQVENYSIQAQTEKLTALCRSKDWDVYDIFTDGGYSGSNMNRPALNEMLSKLHEIDAVVVYRLDRLSRSQRDTITLIEEYFLKNNVEFVSLSETLDTSSPFGRAMIGILSVFAQLERETIRDRMVMGKIKRIEAGLPLTTAKGRTFGYDVIDTKLYINEEEAKQLQLIYDIFEEEQSITFLQKRLKKLGFKVRTYSCYNNWLTNDLYCGYVSYKDKVHVKGIHEPIISEEQFCRVQEIFTRMGKNPNMNRDSASLLNNLVVCGKCGLGFVHRRKDAMSRDKKYHYRYYSCKTYKHIHELEKCGNKIWRAEKLEELIIKRVNNYSLASRNVDKEDELDSLSEKLKIEHAKKKRLFDLYINGSYEVSELDSMMNDIDAQISYYESQIEANEELKKDKKIQENLANLATVDFDSLEFREKQLYLKSLINKIYIDGEQVTIEWL

SEQ ID NO: 3732 - protein, 469 aa, synthetic construct
MSYTTPVRAAVYLRISEDRSGEQLGVARQREDCLKLCVQRKWVPVEYLDNDVSASTGKRRPAYEQMLADITAGKIAAVVAWDLDRLHRRPIELEAFMSLADEKRLALATVAGDVDLATPQGRLVARLKGCVAAHETEHKKARQRRAARQKAERGLPNWSKAFGYLPGPNGPEPDPRTAPLVKQAYADILAGASLGDVCRQWNGAGAFTITGRSWTPTTLSKFLRKPRNAGLRAYKGARYGPVDRDAIVGKAQWRPLVDEATFWAAQAVLDAPGRAPGRKSVRRHLLTGLAGCGKCGYHLAGSYRTDGRVVYVCKACHGVAILADNIEPILYRIVAERLAMPDAVDLLRRDIHDAAEAETIRLELETLYGELDRLAVERAEGLLTARQVKISTDIVNARITKLQARQLDQERLRVFDGIPLGTLQVAGMIAELSPDRFRAVLDVLAEVVVQPVGKSGRTLNPERVQVNWR

SEQ ID NO: 3733 - protein, 485 aa, synthetic construct
MTKKVAIYTRVSTTNQAEEGFSIDEQIDRLTKYAEAMGWQVSDTYTDAGFSGAKLERPAMQRLINDIENKAFDTVLVYKLDRLSRSVRDTLYLVKDVFTKNKIDFVSLNESINTSSAMGSLFLTILSAINEFERENIKERMTMGKLGRAKSGKSMMWTKTAFGYYHNRKTGILEIVPLQATIVEQIFTDYLSGISLTKLRDKLNESGHIGKDIPWSYRTLRQTLDNPVYCGYIKFKGSLFEGMHKPIIPYETYLKVQKELEERQQQTYERNNNPRPFQAKYMLSGMARCGYCGAPLRIVLGHKRKDGSRTMKYHCANRFPRKTKGVTVYNDNKKCDSGTYDLSNLENTVIDNLIGFQENNDSLLKIINGNDQPILDTSSFKKQISQIDEKIQKNSDLYLNDFITMDELKDRTDSLQAEKKLLEAKVSENKFNDSTDVFELVKTQLGSIPINELSYDNKKRIVNNLVSKVDVTADNVDIIFKFQLA

SEQ ID NO: 3734 - protein, 485 aa, synthetic construct
MTKKVAIYTRVSTTNQAEEGFSIDEQIDRLTKYAEAMGWQVSDTYTDAGSSGAKLERPAMQRLINDIGNKAFDTVLVYKLDRLSRSVRDTLYLVKDVFTKNKIDFISLNESIDTSSAMGSLFLTILSAINEFERENIKERMTMGKLGRAKSGKSMMWTKTAFGYYHNRKTGILEIVPLQATIVEQIFTDYLSGTSLTKLRDKLNESGHIGKDIPWSYRTLRQTLDNPVYCGYIKFKDSLFEGMHKPIIPYETFLKVQKELEERQQQAYERNNNPRPFQAKYMLSGMARCGYCGAPLRIVLGHKRKDGSRTMKYHCANRFPRKTKGVTVYNDNKKCDSGTYDLSNLENTVIDNLIGFQENNESLLKIINGNNQPILDTSSFKKQISQIDKKIQKISDLYLNDFITMDELKDRTDSLQAEKKLLKAKISENKFNDSTDAFELVKTQLGSIPINELSYDNKKKIVNNLVSKVDVTADNVDIIFKFQLA

SEQ ID NO: 3735 - protein, 485 aa, synthetic construct
MTKKVAIYTRVSTTSQAEEGFSIDEQIGRLTKYAEAMGWQVSGTYTDGGFSGAKLERPAMQRLINDIENKAFDTVLVYKLDRLSRSVRDTLYLVKDVFTKNKIDFISLNESIDTSSAMGSLFLTILSAINEFERENIKERMTMGKLGRAKSGKSMMWTKTAFGYCHNRKTGILEIVPLQATIVEQIFTDYLSGISLTKLRDKLNESGHIGKDIPWSYRTLRQTLDNPVYCGYIKFKDSLFEGMHKPIIPYETYLRVQRELEERQQQTYERNNNPRPFQAKYMLSGMARCGYCGAPLRIVLGHKRKDGSRAMKYHCANRFPRKTKGVTVYNDNKKCDSGTYDLSNLENTVIDNLIGFQENNDSLLKIINGNNQPILDTSSLKKQISQIDKKIQKNSDLYLNDFITMDELKDRTDSLQAEKKLLKAKISESKFNDSTDVFELVKTQLGSIPINELSYDNKKKIVNNLVSKVDVTADNVDIIFKFQLA

SEQ ID NO: 3736 - protein, 452 aa, synthetic construct
MKAAIYIRVSTREQVENYSIQAQTEKLTALCRSKDWDVYDIFIDGGYSGSNMNRPALNEMLSKLHEIDAVVVYRLDRLSRSQRDTITLIEEYFLKNNVEFVSLSETLDTSSPFGRAMIGILSVFAQLERETIRDRMVMGKIKRIEAGLPLTTAKGRTFGYDVIDTKLYINEEEAKQLQLIYDIFEEEQSITSLQKRLKKLGFKVHTYNRYNNWLTNDLYCGYVSYKDKVHVKGIHEPIISEEQFYRVQEIFTRMGKNPNMNRDSASLLNNLVVCSKCGLGFVHRRKDAMSRDKKYHYRYYSCKTYKHIHELEKCGNKIWRADKLEELIISRVNNYSLASRNVDKEDELDNLNEKLKIEHAKKKRLFDLYINGSYEVSELDSMMNDIDAQIDYYESQIEANEELKKNKKIQENLADLATVDFDSLEFREKQLYLKSLINKIYIDGEQVTIEWL

SEQ ID NO: 3737 - protein, 469 aa, synthetic construct
MCYTTPVRAAVYLRISEDRSGEQLGVARQREDCLKLCDQRKWVPVEYLDNDVSASTGKRRPAYEQMLADITAGKIAAVVAWDLDRLHRRPIELEAFMSLADEKRLALATVAGDVDLATPQGRLVARLKGSVAAHETEHKKARQRRAARQKAERGHPNWSKAFGYLPGPNGPEPDPRTAPLVKQAYADILTGASLGDVCRQWNGAGAFTITGRPWTTTTLSKFLRKPRNAGLRAYKGARYGPVDRDAIVGKAQWSPLVDEATFWAAQAVLDAPGRAPGRKSVRRHLLTGLAGCGKCGNHLAGSYRADGRVVYVCKVCHGVAILADNIEPILYHIVAERLAMPDAVDLLRREIHDVAEAETIRLELETLYGELDRLAVERAEGLLTARQVKICTDIVNAKITKLQARQLDQERLRVLDGIPLGTPQVAGKIAELSPDRFRAVLDVLAEVVVQPVGKSGRIFNPERVQVNWR

SEQ ID NO: 3738 - protein, 485 aa, synthetic construct
MTKKVAIYTRVSTTNQAEEGFSIDEQVDRLTKYAEAMGWRVSDTYTDAGLSGAKLERPAMQRLINDIENKAFDTVLVYKLDRLSRSVRDTLYLVKDVFTKNKIDFISLNESIDTSSAMGSLFLTILSAINEFERENIKERMTMGKLGRAKSGKSMMWTKTAFGYYHNRKTGILEIVPLQATIVEQIFTDYLSGISLTKLRDKLNESGHIGKDIPWSYRTLRQTLDNPVYCGYIKFKDSLFEGMHKPIIPYETYLKVQKELEERQQQTYERNNNPRPFQAKYMLSGMARCGYCGAPLKIVLGHKRKDGSRTMKYHCANRFPRKTEGVTVYNDNKKCDSGTYDLSNLENTVIDDLIGFQENNDSLLKIINGNNQPILDTSSFKKQISQIDKKIQKNSDLYLNDFITMDELKDRTDSLQAEKKLLRAKISENKFNDSTDVFELVKTQLGSIPINELSYDDKKKIVNNLVSKVDVTADNVDIIFKFQLA

SEQ ID NO: 3739 - protein, 485 aa, synthetic construct
MTKKVAIYTRVSTTNQAEEGFSIDEQIDRLTKYAEAMGWQVSDTYTDAGLSGAKLERPAMQRLINDIENKTFDTVLVYKLDRLSRSVRDTLYLVKDVFTKNKIDFISLNESIDTSSAMGSLFLTILSAINEFERENIKERMTMGKLGRARSGKSMMWTRTAFGYYHNRKTGILEIVPLQATIVEQIFTDYLSGISLTKLRDKLNESGHIGKDIPWSYRTLRQTLDNPVYCGYIKFKESLFEGMHKPIIPYETYLKVQKELEERQQQTYERNNNPRPFQAKYMLSGMARCGYCGAPLRIVLGHRRKDGSRTMKYHCANRFPRKTKGVTVYNDNKKCDSGTYDLSNLENTVIDNLIGFQENSDSLLKIINGNNRPILDTSSFKEQISQIDKKIQKNSDLYLNDFITMDELKDRTDSLQAEKKLLEAKISENKFNDSTDVFELVKTQLGSIPINELSYDNKKKIVNNLVSKVDVTADSVDIIFKFQLA

SEQ ID NO: 3740 - protein, 485 aa, synthetic construct
MTKKVAIYTRVSTTNQAEEGFSIDEQIDRLTKYAEAMGWQVSDTYTDAGSSGAKLERPAMQRLINDIENKAFDTVLVYKLDRLSRSVRDTLYLVKDVFTKNKIDFISLNESIDTSSAMGSLFLTILSAINEFERENIKERMTMGKLGRAKSGKSMMWTKTAFGYYHNRKTGILEIVPLQATIVEQIFTDYLSGISLTKLRDKLNESGHIGKDIPWSYRTLRQTLDNPVYCGYTKFKGSLFEGMHKPIIPYETYLKVQKELEERQQQTYERNNNPRPFQAKYMLSGMARCGYCGAPLRIVLGHKRKDGSRTMKYHCANRFPRKTKGVTVYNDNKKCDSGTYDLSDLENTVIDNLIGFQEDNDSLLKIINGNNQPILDTSSFKKQISQIDRKIQKNSDLYLNDFITMDELKERTDSSQAEKKLLKAKISENKSNDSADVFELVKAQLGSIPINELSYDNKKKIVNNLVSKVDVTADNVDIIFKFQLA

SEQ ID NO: 3741 - protein, 452 aa, synthetic construct
MKAAIYIRVSTREQVENYSIQAQTEKLTALCRSKDWDVYDIFIDGGYSGSNMNRPALNEMLSKLHEIDAVVVYRLDRLSRSQRDTITLIEEYFLKNNVEFVSLSETLDTSSPFGRAMIGILSVFAQLERETIRDRMVMGKIKRVEAGLPLTTAKGRTFGYDVIDTKLYINEEEAKQLQLIYDIFEEEQSITFLQKRLKKLGFKVRTYNRYNNWLTNDLYCGYVSYKDKVHVKGIHEPIISEEQFYRVQEIFTRMGKNPNANRDSASLLNNLVVCSKCGLGFVHRRKDTMSRGKKYHYRYYSCKTYKHTHELEKCGNKIWRADKLEELIVNRVNNYSLASRNVDKEDELDSLNEKLKVERAKKRRLFDLYINGSYEVSELDSMMNDIDAQINYYEGLIEANEVLRKNKKIQESLADLATVDLDSLEFREKQLYLKSLINKIYIDGEQVTIEWL

SEQ ID NO: 3742 - protein, 452 aa, synthetic construct
MKAAIYIRVSTREQVENYSIQAQTEKLTALCRSKDWDVYDIFIDGGYSGSNMNRPALNEMLSKLHEIDAVVVYRLDRLSRSQRDTITLIEEYFLKNNVEFVSLSETLDTSSPFGRAMIGILSVFAQLERETIRDRMVMGKIKRIEAGLPLTTAKGRTFGYDVIDTKLYINEEEAKQLRLIYDIFEEEQSITFLQKRLKKLGFKVRTYNRYNNWLTNDLYCGYVSYKDKVHVKGIHEPIISEEQFYRVQEIFTRMGKNPNMNRDSASLLNNLVVCSKCGLGFVHRRKDAMSRDKKYHYRYYSCKTYKHIHELEKCGNKIWRADKLEELIIDRVNNYSLASRDADKEDELGSLNEKLKIEHAKKKRLFDLYINGSYEVGELDSMMSDIDAQISYYEGQIEANEELRKNKKTQENLANLATVDFDSLEFREKQLYLKSLINKIYIDGEQVTIEWL

SEQ ID NO: 3743 - protein, 485 aa, synthetic construct
MTKKVAIYTRVSTTNQAEEGFSIDEQIDRLTKYAEAMGWQVSDTYTDAGSSGAKLERPAMQRLINDIENKAFDTVLVYKLDRLSRNVRDTLYLVKDVFTKNKIDFISLSESIDTSSAMGSLFLTILSAINEFERENIKERMTMGKLGRAKSGKSMMWTKTAFGYYHNRKTGILEIVPLQATIVEQIFTDYLSGISLTKLRDKLNESGHIGKDIPWSYRTLRQTLDNPVYCGYIKFKGSLFEGMHKPIIPYETYLKVQKELEERQRQTYERNSNPRPFQAKYMLSGMARCGYCGAPLRIVLGHKRKDGSRTMKYHCTNRFPRKTKGITVYNDNKKCDSGTYDLSNLENTVIDSLIGFQENNDSLLKIINGNNQPILDTSSFKEQISQIDKKIQKNSDLYLNDFITMDELKDRTDSLQAEKKLLKAKISENKFNDSTDVFELVKTQLGSIPINELSYDNKKRIVNNLVSKVDVTADNVDIIFKFQLA

SEQ ID NO: 3744 - protein, 452 aa, synthetic construct
MKAAIYIRVSTQEQVGNYSIQAQTEKLTALCRSKDWDVYDIFIDGGYSGSNMNRPALNEMLSKLHEIDAVVVYRLDRLSRSQRDTTTLIEEYFLKNNVEFVSLSETLDTSSPFGRAMIGILSVFAQLERETIRDRMVMGKIKRIEAGLPLTTAKGRTFGYDVVDTKLYINEEEAKQLQLIYDIFEEEQSITFLQKRLKKLGFKVRSYNRYNNWLTNDLYCGYVSYKDKVHVKGIHEPIISEEQFYRVQEIFTRMGKNPNMNRDSASLLNNLVVCSKCGLGFVHRSKDTMCRGKKYHYRYYSCKTYKHIYELEKCGNKTWRADKLEELIINRVNNYSFASRNADKEDELDSLNEKLKIEHARKKRLFDLYISGSYEVSELDSMMNDIDAQINYYGSQIEANEELKKNKKIQENLAGLATVDFDSLEFREKQLYLKGLISKIYIDGEQVTIEWL

SEQ ID NO: 3745 - protein, 485 aa, synthetic construct
MTKKVAIYTRVSTTNQAEEGFSIDEQIGRLTKYAEAMGWQVSDTYTDAGFSGAKLERPAMQRLINDIENKAFDTVLVYKLDRLSRSVRDTLHLVKDVFTKNKIDFISLNESIDTSSAMGSLFLTILSAINEFERENIKERMTMGKLGRARSGKSMMWTKTAFGYYHNRKTGILEIVPLQATIVEQIFTDYLSGISLTKLRDKLNESGHIGRDIPWSYRTLRQTLDNPVYCGYIKFKDSLFEGMHKPIIPYETYLKVQKELEERQQQTYERNNNPRPFQAKYMLSGMARCGYCGAPLKIVLGHKRKDGSRTMKYHCANRFPRKTRGVTVYNDNKKCDSGTYDLSNLENTVIDILIGFQENNDSLLKIINGNNQPILDTSSLKKQISQIDKKILKNSDLYLNDFITMDELKDRTDSLQAEKKLLKAKISENKFNDSTDVFGLVKTQLGSIPINELSYDNKKKIVNNLVSKVDVTADSVNIIFKFQLA

SEQ ID NO: 3746 - protein, 469 aa, synthetic construct
MSYTTPVRAAVYLRISEDRSGEQLGVARQREDCLKLCDQRKWVPVEYLDNDVSASTGERRPAYEQMLADITAGKIAAVVAWDLDRLHRRPIELEAFMSLADEKRLALATVAGDVDLATPQGRLVARLKGSVAAHETEHKKARQRRAARQKAERGHPNWSKAFGYLPGPNGPEPDPRTAPLVKQAYADILAGASLGDVCRQWNDAGAFTITGRPWATTTLSKFLRKPRNAGLRAYKGARYGPVDRDAIVGKAQWSPLVDEATFWAAQAVLDAPGRAPGRKSVRRHLLTGLAGCGKCGNHLAGSYRTDGQVVYVCKACYGVTILADNIVPILYHVVAERLAMPDAVDLLRHEIHDAAEAEAIRLELETLYGELDRLAVERAEGLLTARQVKISTDIVNAKITKLQARQLDQERLRVFNGIPLGTPQVAGVIAELSPDRFRAVLDVLAEVVVQPVGKGGRIFSPERVQVNWR

SEQ ID NO: 3747 - protein, 452 aa, synthetic construct
MKAAIYIRVSTREQVENYSIQAQTEKLTALCRSKDWDVYDIFIDGGYSGSNMNRPALNEMLSKLHEIDAVVVYRLDRLSRSQRDTITLIEEYFLKNNVEFVSLSETLDTSSPFGRAMIGILSVFAQLERETIRDRMVMGKIKRIEAGLPLTTAKGRTFGYDVIDTKLYINEEEARQLQLIYDIFEEEQSITFLQKRLKKLGFKVRTYNCYNNWLTNDLYCGYVSYKDKVHVKGIHEPIISEEQFYRVQEIFARMGKNPNMNRESASLLNNLVVCSKCGLGFVHRRKDAMSRSKKYHYRYYSCKTYKHIHELEKCGNKIWRADKLEELIINRVNNYSLAGRNVDKEDELDSLNEKLKIEHAKKKRLFDLYINGSYEVSELDSMMNDIDAQINYYESQIEANKELKRNKKIQENLAYLATVDFDSLEFREKQLYLKSLINKIYIDGEQVTIEWL

SEQ ID NO: 3748 - protein, 452 aa, synthetic construct
MKAAIYIRVSTQEQVGNYSIQAQTEKLTALCRSKDWDVYDIFIDGGYSGSNMDRPALNEMLSKLHEIDAVVVYRLDRLSRSQRDTTTLIEEYFLKNNVEFVSLSETLDTSSPFGRAMIGILSVFAQLERETIRDRMVMGKIKRIEAGLPLTTAKGRTFGYDVIDTKLYINEEEAKQLQLIYDIFEEEQSITSLQKRLKKLGFKVRTYNRYNNWLTNDLYCGYVSYKDKVHVKGIHEPIISEEQFYRVQEIFTRMGKNPNMNRDSASLLNNLVVCSKCGLSFVHRSKDTMSRGKKYHYRYYSCKTYKHTHELEKCGNKTWRADKLEELIINRVNNYSFAGRNVDKEDELDSLNEKLKIEHAKKKRLFDLYINGSYEVGELDSMMNDIDAQINYYESQIEANEELRKNKKIQENLADLATVDFDSLEFREKQLYLKSLINKIYIDGEQVTIEWL

SEQ ID NO: 3749 - protein, 469 aa, synthetic construct
MCYTTPVRAAVYLRISEDRSGEQLGVARQREDCLKLCDQRKWVPVEYLDNDVSASTGKRRPAYEQMLADITAGKIAAVVAWDLDRLHRRPIELEAFMCLADEKRLALATVAGDVDLATPQGRLVARLKGSVAAHETEHKKARQRRAARQKAERGHPNWSKAFGYLPGPNGPEPDPRTAPLVKQAYADILAGASLGDVCRQWNDAGAFTVTGRPWITTTLSKFLRKPRNAGLRAYKGARYGPVDRDAIVGKAQWSPLVDEATFWAAQAVLDAPGRAPGRKSVRRHLLTGLAGCGKCGNHLAGSYRTDGRVVYVCKACHGVAILADNIEPILYHIVAERLAMPDAVDLLRREIHDAAEAETVRLELETLHGELDRLAVERAEGLLTARQVKISTDIVNAKITKLQARQLDQERLRVFGGIPLGTQQVAGVIAELSPNRFRAVLDVLAEVVVQPVGKGGRIFNPGRVQVNWR

SEQ ID NO: 3750 - protein, 452 aa, synthetic construct
MKAAIYIRVSTREQVENYSIQAQTEKLTALCRSKDWDVYDIFTDGGYSGSNMNRPALNEMLSKLHEIDAVVVYRLDRLSRSQRDTITLIEEYFLKNNVEFVSLSETLDTSSPFGRAMIGILSVFAQLERETIRDRMVMGKIKRIEAGLPLTTAKGRTFGYDVIDTKLYINEVEAKQLQLIYDIFEEERSITSLQKRLKKLGFKVRTYNCYNNWLTNDLYCGYVSYKDKVHVKGIHEPIISEEQFYRVQEIFTRMGKNPNMNRDSASLLNNLVVCSKCGLGFVHRRKDAMSRNKKYHYRYYSCKTYKHIHELEKCGNKIWRADKLEELIINRVNNYSLASRNVDKEDELDSLNEKLKTEHAKKKRLFDLYINGSYEMSELDSMMSDIDAQINYYESQIEANEELKKNKRIQESLAELATVDFDSLGFREKQLYLKSLINKIYIDGEQVTIEWL

SEQ ID NO: 3751 - protein, 452 aa, synthetic construct
MKAAIYIRVSTREQVENYSIQAQTEKLTALCRSKDWDVYDVFIDGGYSGSNMNRPALNEMLSKLHEIDAVVVYRLDRLSRSQRDTITLIEEYFLKNNVEFVSLSETLDTSSPFGRAMIGILSVFAQLERETIRDRMVMGKIKRIEAGLPLTTAKGRTFGYDVIDTKLYINEEEAKQLQLIYDIFEEEQSITSLQKRLKKLGFKVHTYNRYNNWLTNDLYCGYVSYKDKVHVKGIHEPIISEEQFYRVQEIFTRMGKNPNMNRDSASLLNNLVVCSKCGLGFVHRRKDIMSRGKKYHYRYYSCKTYKHIHELEKCGNKIWRADKLEELIINRVNNYSLANRNVDKEDELDNLNEKLKVEHAKKKRLFDLYINGSYEVSELDSLMSDIDAQISNYESQIEANEELKKNKKIQENLADLATVDFDSLEFREKQLYLKSLINKIYIDGEQVTIEWL

SEQ ID NO: 3752 - protein, 452 aa, synthetic construct
MKAAIYIRVSTREQVENYSIQAQTEKLTALCRSKDWDVYDIFIDGGYSGSNMNRPALSEMLSKLHEIDAVVVYRLDRLSRSQRDTITLIEEYFLKNNVEFVSLSETLDTSSPFGRAMIGILSVFAQLERETIRDRMVMGKIKRIEAGLPLTTAKGRTFGYDVIDTKLYINEEEAKQLQLIYDIFEEEQSITFLQKRLKKLGFKVRTYSRYNNWLTNDLYCGYVSYKDKVHVKGIHEPIISEEQFYRVQEIFTRMGKNPNMNRDSASLLNNLVVCSKCGLGFVHRRKDTMSRGKKYHYRYYSCKTYKHTHELEKCGNKIWRADKLEELIIDRVNNYSFASRNVDKEDELGSLNEKLKIEHVKKKRLFDLYINGGYEVSELDSMMNDIDAQINYYEGQIEANEELKKNKKIQENLANLATVDYDSLEFREKQLYLKSLINKIYIDGEQVTIEWL

SEQ ID NO: 3753 - protein, 452 aa, synthetic construct
MKAAIYIRVSTREQVENYSIQAQTEKLTALCRSKDWDVYDVFIDGGYSGSNMNRPALNEMLSKLHEIDAVVVYRLDRLSRSQRDTITLIEEYFLKNNVEFVSLSETLDTGSPFGRAMIGILSVFAQLERETIRDRMVMGKIKRIEAGLPLTTAKGRTFGYDVIDTKLYINEEEAKQLQLIYDIFEEEQSITFLQKRLKKLGLKVRTYNRYNNWLTNDLYCGYVSYKDKVHVKGIHEPIISEEQFYRVQEIFARMGKNPNMNRDSASLLNNLVVCSKCGLGFVHRRKDIMSHGKKYHYRYYSCKTYKHIHELEKCGNKIWRADKLEELIINRVNNYSLTSRSVGKEDELDSLNEKLKIEHAKKKRLFDLYINGSYEVSELDSMMNDIDAQINYYESQIEANVELRKNRRIQENLADLATVDFDSLEFREKQLYLKSLINKIYIDGEQVTIEWL

SEQ ID NO: 3754 - protein, 452 aa, synthetic construct
MKAAIYIRVSTREQVENYSIQAQTEKLTALCRSKDWDVYDIFIDGGYSGSNMNRPALNEMLSKLHEIDAVVVYRLDRLSRSQRDTITLIEEYFLKNNVEFVSLSETLDTSSPFGRAMIGILSVFAQLERETIRDRMVMGKIKRIEAGLPLTTAKGRTFGYDVIDTKLYINEEEAKQLQLIYDIFEEEQSITSLQKRLKKLGFKVRTYSCYNNWLTNDLYCGYVSYKDKVRVKGIHEPIISEEQFYRVQEIFTHMGKSPNMNRDSASLLNNLVVCSKCGLGFVHRRKDTMSRGKKYHYRYYSCKTYKHIHELEKCGNKIWRADKLEELIINRVNNYSFASRNVDKEGELDSLNERLKIEHAKKRRLFDLYIDGSYEVSELDSMMNDIDAQINYYESQIEANEELKKNKKIQEDLADLATVDFDSLEFREKQRYLKSLINKIYIDGEQVTIEWL

SEQ ID NO: 3755 - protein, 452 aa, synthetic construct
MKAAIYIRVSTQEQVGNYSIQAQTEKLTALCRSKDWDVYDIFIDGGYSGSNMNRPALNEMLSKLHEIDAVVVYRLDRLSRSQRDTTTLIEEYFLKNNVEFVSLSETLDTSSPFGRAMIGILSVFAQLERETIRDRMVMGKIKRIEAGLPLTTAKGRTFGYDVIDTKLYINEEEAKQLQLIYDIFEEEQSITFLQKRLKKLGFKVRTYNRYNSWLTNDLYCGYVSYKDKVHVKGIHEPIISEEQFYRVQEIFTRMGKNPNMNRDGASLLNNLVVCSKCGLGFVHRSKDTMSRGKKYHYRYYSCKTYKHTHELEKCGNKTWRADKLEELVINRVSKYSFASRNVDKEDELDSLNEKLKIEHAKKKRLFDLYINGSYEVNELDSMMNDIDAQINYYESQIEANEELKRNKKIQENLANLATVDFNSLEFREKQLYLKSLINKIYIDGEQVTIEWL

SEQ ID NO: 3756 - protein, 452 aa, synthetic construct
MKAAIYIRVSTREQVENYSIQAQTERLTALCRSKDWDVYDIFIDGGYSGSNMNRPALNEMLSKLHEIDAVVVYRLDRLSRSQRDTITLIEEYFLKDNVEFVSLSETLDTSSPFGRAMIGILSVFAQLERETIRDRMVMGKIKRIEAGLPLTTAKGRTFGYDVIDTKLYINEEEAKQLQLIYDIFEEEQSITSLQKRLKKLGLKVRTYNRYNNWLTNDLYCGYVSYKDIVHVKGIHEPIISEEQFYRVQEIFARMGKNPNMNRDSASLLNNLVVCSKCGLGFVHRRKDTMSRGKKYHYRYYSCKTYKHTHELEKCGNKIWRADKLEELIINHVNNYSFASRDVDKEDELDSLNEKLKIEHAKKKRLFDLYINGSYEVSELDSMMNGIDAQISYYESQIEANKELKINKKIRENLADMATVDFDSLEFREKQLYLKSLINKIYIDGEQVTIEWL

SEQ ID NO: 3757 - protein, 469 aa, synthetic construct
MCYTTPVRAAVYLRISEDRSGEQLGVARQREDCLKLCDQRKWVPVEYLDNDVSASTGKRRPAYEQMLADITAGKIAAVVAWDLDRLHRRPIELEAFMSLADEKRLALATVAGDVDLATPQGRLVARLKGSVAAHETEHKKARQRRAARQKAERGHPNWSKAFGYLPGPNGPEPDPRTAPLVKQAYADILAGASLGDVCRQWNDAGAFTITGRPWTTTTLSKFLRKPRNAGLRAYKGARYGPVDRDAIVGKAQWSPLVDEATFWAAQAVLDAPGRAPGRKSVRRHLLTGLAGCGKCGNHLAGSYRTDGRVVYVCKACHGVAILADNIEPILYHIVAERLAMPDAVDLLRREIHDAAEAETIRLELETLYGELDRLAVERAEGLLTARQVKISTDIVNAKITKLQVRQLDQERLRVLDGIPLGTPQVAGMIAELSPDRFRAVLDVLAEVVVQPVGKSGRVFNPERVQVNWR

SEQ ID NO: 3758 - protein, 485 aa, synthetic construct
MTKKVAIYTRVSTTNQAEEGFSIDEQTDRLTKYAEAMGWQVSDTYTDAGFSGAKLERPAMQRLINDIENKAFDTVLVYKLDRLSRSVRDTLHLVKDVFTKNKIDFISLNESIDTSSAMGSLFLTILSAINEFERENIKERMTMGKLGRAKSGKSMMWTKTAFGYYHNRKTGILEIVPLQATIVEQIFTDYLSGISLTKLRDKLNESGHIGKDIPWSYRTLRQTLDNPVYCGYIKFKDSLFEGMHKPIIPYKTYLKVQKELEERQQQTYERNNNPRPFQAKYMLSGMARCGYCGAPLKIVLGHKRKDGSRTKKYHCANRFPRKTKGTTVYNDNKKCDSGTYDLSDLENTVIDNLIGFQEDNDSLLKIINCNNQPILDTSSFKKQISQIDKKIQKNSDLYLNDFITMDELKDRTDSLRAEKKLLKAKISENKFNDSTDVFERVKAQLGSIPINELSYDNKKKIVNNLVSKVDVTADNVDIIFKFQLA

SEQ ID NO: 3759 - protein, 452 aa, synthetic construct
MKAAIYIRVSTREQVENYSIQAQTEKLTALCRSKGWDVYDIFIDGGYSGSNMNRPALNEMLSKLHEIDAVVVYRLDRLSRSQRDTITLIEEYFLKNNVEFVSLSETLDTSSPFGRAMIGILSVFAQLERETIRDRMVMGKIKRIEAGLPLTTAKGRTFGYDVIDTKLYINEEEAKQLRLIYDIFEEEQSITFLQKRLKKLGFKVRTYNRYNNWLTNDLYCGYVSYKDKVHVKGIHEPIISEEQFYRVQEIFTRMGKNPNMSRGSASLLNNLVVCGKCGLGFVHRRKDAMSRDKKYHYRYYSCKTYKHIHELEKCGNKIWRADKLEELIINRVSNYSLASRNVDKEDELDSLNEKLKMEHAKKKRLFDLYINGSYEVSELDSMMSDIDAQISYYESQIEANEKLKKDKKIQENLAYLATVDFDSLEFREKQLYLKSLINKIYIDGEQVTIEWL

SEQ ID NO: 3760 - protein, 485 aa, synthetic construct
MTKKVAIYTRVSTTNQAEEGFSIDEQTDRLTKYAEAMGWQVSDTYTDAGFSGAKLERPAIQRLINDIENKAFDTVLVYKLDRLSRSVRDTLYLVKDVFTKNKIDFISLSESIDTSSAMGSLFLTILSAINEFERENIKERMTMGKLGRAKSGKSMMWTKTAFGYYHNRKTGILEIVPLQATIVEQIFTDYLSGISLTKLRDKLNESGHIGKDIPWSYRTLRQTLDNPVYCGYIKFKNSLFEGMHKPIISYETYLKVQKELEERQQQTYERNNNPRPFQAKYMLSGMARCGYCGAPLKIVLGHKRKDGSRTMKYHCANRFPRKTKGITVYNDNKKCDSGTYDLSNLETTVIDILIGFQENNDSLLEIINGNNQPILDTSSFKEQISQIDKKIQKNSDLYLNDFITMDELKDRTDSLQAEKKLLKAEICENKFNDSTDVFELVKTQLGSIPINELSYDNKKKVVNNLVSKVDVTADNVDIIFKFQLA

SEQ ID NO: 3761 - protein, 452 aa, synthetic construct
MKAAIYIRVSTREQVENYSIQAQTEKLTALCRSKDWDVYDIFIDGGYSGSNMNRPALNEMLSKLHEIDAVVVYRLDRLSRSQRDTITLIEEYFLKNNVEFVSLSETLDTSSPFGRAMIGILSVFAQLERETIRDRMVMGKIKRIEAGLPLTTAKGRTFGYDVIDTKLYINEEEAKQLQLIYDIFEEEQSITFLQKRLKKLGFKVRTYNRYNNWLTNDLYCGYVSYKDKVRVKGIHEPIISEEQFYRVQEIFTRMGKNPNMNRDSASLLNNLVVCSKCGLGFVHRRKDAMSRDKKYHYRYYSCKTYKHIHELEKCGNKIWRADKLEELIIDRVNNYSFASRNADKEDELGRLNEKLKIEHAKKKRLFDLYLNGSYEVSELDSMMNDIDAQIGYYEGQIKANEELKKNKKIQENLADLATVDFDSLEFREKQLYLKSLINKIYIDGEQVTIEWL

SEQ ID NO: 3762 - protein, 452 aa, synthetic construct
MKAAIYIRVSTREQVENYSIQAQTEKLTALCRSKDWDVYDIFIDGGYSGSNMNRPALNEMLSKLHEIDAVVVYRLDRLSRSQRDTITLIEEYFLKNNVEFVSLSETLDTSSPFGRAMIGILSVFAQLERETIRDRMVMGKIKRIEAGLPLTTAKGRTFGYDVIDTKLYINEEEAKQLQLIYDIFEEEQSITFLQKRLKKLGFKVRTYNRYNNWLTNDLYCGYVSYKDKVHVKGIHEPIISEEQFCRVQEIFTRMGKNPNMNRGSASLLNNLVVCGKCGLGFVHRRKGTMSHGKKYHYRYYSCKTYKHIHELEKCGNKIWRADKLEELIINRVNNYSLVSRNVDKEDELDSLNEKLNVEHAKKKRLFDLYINGSYEVSELDSMMNDIDAQINYYESQIEANEELKRNKKIQENLADLATVDFDSLEFREKQRYLKSLINKIYIDGEQVTIEWL

SEQ ID NO: 3763 - protein, 452 aa, synthetic construct
MKAAIYIRVSTQEQVGNYSIQAQTEKLTALCRSKDWDVYDIFIDGGYSGSNMSRPALNEMLSKLHEIDAVVVYRLDRLSRSQRDTTTLIEEYFLKNNVEFVSLSETLDTSSPFGRAMIGILSVFAQLERETIRDRMVMGKIKRIEAGLPLTTAKGRTFGYDVIDTKLYINEEEAKQLRLIYDIFEEEQSITSLQKRLKKLGLKVHTYNRYNNWLTNDLYCGYVSYKDKVHVKGIHEPIISEEQFYRVQEIFTRMGKNPNMNRDSASLLSNLVVCSKCGLGFVHRSKDTMSRGKKYHYRYYSCKTYKHTHELEKCGNKTWRADKLEELIINRVNNYSFASRNMDKDDELDSLNEKLKIEYAKKKRLFDLYINGSYEVSELDSMMNDIDARINYYESQIEANEELRKNKRIQENLADLAAVDFDSLEFREKQLYLKSLINKIYIDGEQVTIEWL

SEQ ID NO: 3764 - protein, 452 aa, synthetic construct
MKAAIYIRVSTREQVENYSIQAQTEKLTALCRSKDWDVYDIFIDGGYSGSNMNRPALNEMLSKLHEIDAVVVYRLDRLSRSQRDTITLIEEYFLKNNVEFVSLSETLDTSSPFGRAMIGILSVFAQLERETIRDRMVMGKIKRIEAGLPLTTAKGRTFGYDVIDTKLYINEEEAKQLQLIYDIFEEEQSITFLQKRLKKLGFKVRTYSRYSSWLTNDLYCGYVSYKDKVHVKGIHEPIISEEQFYRVQEIFTRMGKNPNMNRDSASLLNNLVVCSKCGLGFVHRRKDTMSRGKKYHYRYYSCKTYKHIHELEKCGNKIWRADKLEELIINRVNNYSFASRNVDKEDELDSLNEKLKIEHAKRKRLFDLYINGSYEVSELDSMMNDIDAQISYYESQIEANEELKKNKKIQENLANLATVDYDSLEFREKQLYLKSLISKIYIDGEQVTIEWL

SEQ ID NO: 3765 - protein, 485 aa, synthetic construct; identical to SEQ ID NO: 1608

SEQ ID NO: 3766 - protein, 452 aa, synthetic construct
MKAAIYIRVSTQEQVGNYSIQAQTEKLTALCRSKGWDVYDIFIDGGYSGSNMNRPALNEMLSKLHEIDAVVVYRLDRLSRSQRDTTTLIEEYFLKNNVEFVSLSETLDTSSPFGRAMIGILSVFAQLERETIRDRMVMGKIKRIEAGLPLTTAKGRTFGYDVIDTKLYINEEEAKQLRLIYDIFEEEQSITSLQKRLKKLGFKVRTYNRYNSWLTNDLYCGYVSYKDKVHVKGIHEPIISEEQFYRVQEIFTRMGKNPNTNRDSASLLNNLVVCSKCGLGFVHRSKDTTSRGKKYHYRYYSCKTYKHTHELEKCGNKTWRADRLEELIINRVNNYSFASRNADKEDELDSLNEKLKIERARKKRLFDLYINGSYEVSELDSMMNDIDAQINYYESQIEASEELKKNKKIQENLADLATVDFDSLEFREKQLYLKSLINKIYIDGEQVTIDWL

SEQ ID NO: 3767 - protein, 485 aa, synthetic construct
MIKKVAIYTRVSTTNQAEEGFSVDEQIDRLTKYAEAMGWQVSDTYTDAGLSGAKLERPAMQRLINDIETKAFDTVLVYKLDRLSRSVRDTLYLVKDVFTKNKIDFISLNESIDTSSATGSLFLTILSAINEFERENIKERMTMGKLGRAKSGKSMMWTKTAFGYYHNRKTGILEIVPLQATIVEQIFTDYLSGISLTKLRDKLNESGHIGKDIPWSYRTLRQTLDNPVYCGYIKFKDRLFEGMHKPIVPYETYLKVQKELEERQQQTYERNNNPRPFQAKYMLSGIARCGYCGAPLKIVLGHKRKDGSRTMKYHCANRFPRKTKGVTVYNDNKKCDSGTYELSNLENTVIDNLIGFQENSDSLLKIINGNDQPILDTSSFKKQISQIDKKIQKNSDLYLNDFITMDELKVRTDSLQAEKKLLKAKISENKFNDGTDVFELVKTQLGGIPINELSYDNKKKIVNSLVSKVDVTADDVDIIFKFQLA

SEQ ID NO: 3768 - protein, 452 aa, synthetic construct
MKAAIYIRVSTREQVENYSIQAQTEKLTALCRSKDWDVYDIFIDGGYSGSNMNRPALNEMLSKLHEIDAVVVYRLDRLSRSQRDTITLIEEYFLKNNVEFVSLSETLDTSSPFGRAMIGILSVFAQLERETIRDRMVMGKIKRIEAGLPLTTAKGRTFGYDVIDTKLYINEEEAKQLQLIYDIFEEERSITFLQKRLKKLGFKVHTYNRYNNWLTNDLYCGYVSYKDKVHVKGIHEPIISEEQFYRVQEIFTRMGKSPNMNRDSASLLNNLVVCSKCGLGFVHRRKDIMSRGKKYHYRYYSCKTYKHIHELEKCGNKIWRADKLEELIINRVNNYSLASRNMGKEDELDSLNEKLKIEHAKKKRLFELYINGSYEVSELDSMMNDIDAQISYYESQIEANEELKKNKKIQESLADLATVDFDSLEFREKQLYLKSLISKIYIDGEQVTIEWL

SEQ ID NO: 3769 - protein, 469 aa, synthetic construct
MCYTTPVRAAVYLRISEDRSGEQLGVARQREDCLKLCGQRKWVPVEYLDNDVSASTGKRRPAYEQMLADITAGKIAAVVAWDLDRLHRRPMELEAFMSLADEKRLALATVAGDVDLATPQGRLVARLKGSVAAHETEHKKARQRRAARQKAERGYPNWSKAFGYLPGPNGPEPDPRTAPLVKQAYADILAGASLGDVCRQWNGAGAFTTTGRPWTTTALSKFLRKPRNAGLRAYKGARYGPVDRDAIVGKARWSPLVDEATFWAAQAVLDAPGRAPGRKSVRRHLLTGLAGCGKCGNHLAGSYRTDGRVVYVCKACHGVAILADNIEPILYHVVAERLAMPDAADLLRREIHDAAEAETIRLELETLYGELDRLAVERAEGLLTARQVKISTDIVNAKITKLQARQLDQERLRVLDGIPLGTPQVASVIAELSPDRFRAVLDVLAEVVVQPVGKSGRIFSPERVRVNWR

SEQ ID NO: 3770 - protein, 485 aa, synthetic construct
MTKKVAIYTRVSTASQAEEGFSIDEQIDRLTKYAEAMGWQVSDTYTDAGSSGAKLERPAMQRLINDIENKAFDTVLVYKLDRLSRSVRDTLYLVKDVFTKNKIDFISLSESIDTSSAMGSLFLTILSAINEFERENIKERMTMGKLGRAKSGKSMMWTKTAFGYYHNRKTGILEIVPLQATIVEQIFTDYLSGISLTKLRDKLNESGHIGKDIPWSYRTLRQTLDNPVYCGYIKFKGSLFEGMHKPIIPYETYLKVQKELEERQQQTYERNNNPRPFQAKYMLSGMARCGYCGAPLRIVLGHKRKDGSRTMKYHCANRFPRKTKGVTVYNDNKKCDSGTYDLSNLENTVIDILIGFQEDNDSLLKIINGNNQPILDTSSFKKQISQIDKKIQKNSDLYLNDFITMDELRDRTGSLQAEKKLLKAKIGENKFNDSTEVFELVKTQLGSIPINELSYDNKRKIVNNLVSKVDVTADNVDIIFKFQLA

SEQ ID NO: 3771 - protein, 452 aa, synthetic construct
MKAAIYIRVSTREQVENYSIQAQTEKLTALCRSKDWDVYDIFIDGGYSGSNMNRPALNEMLSKLHEIDAVVVYRLDRLSRSQRDTITLIEEYFLKNNVEFVSLSETLDTSSPFGRAMIGILSVFAQLERETIRDRMVMGKIKRIEAGLPLTTAKGRTFGYDVIDTKLYINEEEAKQLQLIYDIFEEEQSITFLQKRLKKLGFKVRSYNRYSNWLTNDLYCGYVSYKDKVHVKGIHEPIISEEQFYRVQEIFTRMGKNPNMNRDSASLLNNLVVCGKCGLGFVHRRKDIMSRGKKYHYRYYSCKTYKHIHELEKCGNKIWRADRLEELIISRVNNYSLASRNVDKEDELDSLNEKLKIEHAKKKRLFELYINGSYEVSELDSMMNDIDAQINYYEGQIEANEELRKNKKIQENLANLATVDFDSLEFREKQLYLKSLINKIYIDGEQVTIEWL

SEQ ID NO: 3772 - protein, 469 aa, synthetic construct
MSYTTPVRAAVYLRISEDRSGEQLGVARQREDCLKLCDQRKWEPVEYLDNDVSASTGKRRPAYEQMLADITAGKIAAVVAWDLDRLHRRPIELEAFMSLADEKRLALATVAGDVDLATPQGRLVARLKGCVAAHETEHKKARQRRAARQKAERGHPNWSKAFGYLPGPNGPEPDPRTAPLVKQAYADILAGASLGDVCRQWNGAGAFTITRRPWTTTTLSKFLRKPRNAGLRAYKGARYGPVDRDAIVGKAQWSPLVDEATFWAAQAVLDAPGRAPGRKSVRRHLLTGLAGCGKCGNHLAGSYRTDGRVVYVCKACHGVSILADNIEPILYRIVAERLAMPDAVDLLRCEIHDAAEAEAIRLELEILYGELDRLAVERAEGLLTARQVKISTDIVNAKITKLRARQLDQERLRVFDGIPLGTPQVAGVIAELSPDRFRAVLDVLAEVVVQPVGKSGRIFNPERVQVNWR

SEQ ID NO: 3773 - protein, 452 aa, synthetic construct
MKAAIYIRVSTREQVENYSIQAQTEKLTALCRSKDWDVYDIFIDGGYSGSNMNRPALNEMLSKLHEIDAVVVYRLDRLSRSQRDTITLIEEYFLKNNVEFVSLSETLDTSSPFGRAMIGILSVFAQLERETIRDRMVMGKIKRVEAGLPPTTAKGRTFGYDVIDTKLYINEEEAKQLQLIYDIFEEEQSITSLQKRLKKLGFKVRTYNRYNSWLTNDLYCGYVSYKDKVHVKGIHEPIISEEQFYRVQEIFTRMGKNPNMNRNSASLLNNLVVCSKCGLGFVHRRKDTVSRGKKYHYRYYSCKTYKHIHELEKCGNKIWRADKLEELIINRVNDYSFACRNVDKEDELDSLNEKLRIEHAKKKRLFDLYIDGSYGVSELDSMMNDIDAQINYYESQIEANEELKKSKKIQENLADLASVDYDSLEFREKQLYLKSLINKIYIDGEQVTIEWL

SEQ ID NO: 3774 - protein, 485 aa, synthetic construct
MTKKVAIYTRVSTTNQAEEGFSIDEQIDRLTKYAEAMGWQVSDTYTDAGYSGAKLGRPAMQRLINDTETKAFDTVLVYKLDRLSRSVRDTLYLVKDVFTKNKIDFISLNECIDTSSAMGSLFLTILSAINEFERENIKERMTMGKLGRAKSGKSMMWTKTAFGYCHNRKTGILDIVPLQATIVEQIFTDYLSGISLTKLRDKLNESGHIGKDIPWSYRTLRQTLDNPVYCGYIKFKDSLFEGMHKPIIPYETYLKVQKELEERQQQTYKRNNNPRPFQAKYMLSGMARCGYCGAPLRIVLGHKRKDGCRTMKYHCANRFPRKTRGVTVYNDNKKCDSGTYDLRNLENTVIDSLVGFQENIDSLLKIINGNNQPILDASSFKEQISQIDKKIQKNSDLYLNDFITMDELKDRTDSLQAEKKLLKAKISENKFNDSTDVFELVKTQLGSIPINELSYDNKKKIVNNLVSKVDVTADNVDIIFKFQLA

SEQ ID NO: 3775 - protein, 452 aa, synthetic construct
MKAAIYIRVSTQEQVENYSIQAQTEKLTALCRSKDWDVYDIFIDGGYSGSNMNRPALSEMLSKLHEIDAVVVYRLDRLSRSQRDTITLIEEYFLKNNVEFVSLSETLDTSSPFGRAMIGILSVFAQLERETIRDRMVMGKIKRVEAGLPLTTAKGRTFGYDVIDTKLYINEEEAKQLQLIYDIFEEEQSIALLQKRLKKLGFKVRTYSRYNNWLTNDLYCGYVSYKDKVHVKGIHEPIISEEQFYRVQEIFTRMGKNPNMNRDSASLLNSLVVCSKCGLGFVHRRKDTMSRGKRYHYRYYSCKTYKHIHELEKCGNKIWRADKLEELIINRVNNYSLASRNVDKEDELDSLNEKLKIERAKRKRLFDLYINGSYEVSELDSMMNDIDAQINYYESQIEANEEQKKDKKIQENLANLATVDYDSLEFREKQLYLKSLINKIYIDGEQVTIEWL

SEQ ID NO: 3776 - protein, 452 aa, synthetic construct
MKAAIYIRVSTREQVENYSIQAQTEKLTALCRSKDWDVYDIFIDGGYSGSNMNRPALNEMLSKLHEIDAVVVYRLDRLSRSQRDTITLIEEYFLKNNVEFVSLSETLDTSSPFGRAMIGILSVFAQLERETIRDRMVMGKIKRIEAGLPLTTAKGRTFGYDVIDTKLYINEEEAKQLRLIYDIFEEEQSITFLQKRLKKLGFKVRTYNRYSNWLTNDLYCGYVSYKDKVHVKGIHEPIISEEQFYRVQEIFTRMGKNPNMNRDSASLLNNLVVCSKCGLGFVHRRKDTVSRGKKYHYRYYSCKTYKHTHELEKCGNKIWRADKLEELIINRVNNYSFASRNVDKEDELDSLNEKLKIEHAKKRRLFDLYINGSYEVSELDSLMNDIDAQINYYESQIEANEELKKNKKIQENLADLATVDYDSLEFREKQLYLKSLINKIYIDGEQVTIEWL

SEQ ID NO: 3777 - protein, 452 aa, synthetic construct
MKAAIYIRVSTQEQVENYSIQAQTERLTALCRSKDWDVYDIFIDGGYSGSNMNRPALNEMLSKLHEIDAVVVYRLDRLSRNQRDTTTLIEEYFLKNNVEFVSLSETLDTSSPFGRAMIGILSVFAQLERETIRDRMVMGKIKRIEAGLPLTTAKGRTFGYDVIDTKLYINEEEAKQLRLIYDIFEEEQSITSLQKRLKKLGFKVRTYNRYSSWLTNDLYCGYVSYKDQVHVKGIHEPIISEEQFYRVQEIFTRMGKNPNMNRDSASLLNGLVVCSKCGLSFVHRSKDTVSRGKKYHYRYYSCKTYKHTHELEKCGNKTWRADKLEELIINRVNNYSFASRNVDKEDELDSLNEKLKIEHAKKKRLFDLYINGSYEVSKLDSMMNDIDAQINYYESQIKANEELNKNKKIQENLADLATVDFDSLEFREKQLYLKSLINKIYIDGEQVTIDWL

SEQ ID NO: 3778 - protein, 485 aa, synthetic construct
MTKKVAIYTRVSTTNQAEEGFSIDEQIDRLTKYAEAMGWQVSDTYTDAGFSGAKLERPAMQRLINDIENKAFDTVLVYKLDRLSRSVRDTLYLVKDVFTKNKIDFISLNESINTSSAMGSLFLTILSAINEFERENIKERMTMGKLGRAKSGKSMMWTKTAFGYYHNRKTGILEIVPLQATIVEQIFTDYLSGISLTKLRDKLNESGHIGKDIPWSYRTLRQTLDNPVYCGYIKFKDSLFEGMHEPIIPYETYLKVQEELEERQRQTYERNNNPRPFQAKYMLSGMARCGYCGAPLKIVLGHKRKDGSRTMKYHCANRFPRKTKGVTVYNDNKKCDSGTYDMSNLENTVIDNLIGFQENNDSLLKIINGNNQPILDTSSLKKQISQIDKKIQKNSDLYLNDFITMDELKDRTDSLQAEKKLLKAKISENKSNDSTDVFELVKTQLGSIPINELSYDNKKKIVNNLVSKVDVTADNVDIIFKFQLA

SEQ ID NO: 3779 - protein, 485 aa, synthetic construct
MTKKVAIYTRVSTTNQAEEGFSIDEQIDRLTKYAEAMGWQVSDTYTDAGLSGAKLERPAMQRLINDIENKTFDTVLVYKLDRLSRSVRDTLYLVKDVFTKNKIDFISLNESIDTSSAMGSLFLTILSAINEFERENIKERMAMGKLGRAKSGKSMMWTKTAFGYYHNRKTGILEIVPLQATIVKQIFTDYLSGISLTKLRDKLNESGHIGKDIPWSYRTLRQTLDNPVYCGYIKFKDSLFEGMHKPIIPYETYLKVQRELEERQQQAYERNNNPRPFQAKYMLSGMARCGYCGAPLRIVLGHKRKDGSRTLKYHCANRFPRKTRGVTVYNDNKKCDSGTYDLSSLENTVIDNLIGFQESNDSLLKIINGNNQPILDTSSFKEQISQIDKKIQKNSDLYLNDFITMDELKDRTDSLQAEKKLLKAKISENKFNDSTDVLELVKTQLGSIPINELSYDNKKKIVNNLVSRVDVTADSVDIIFKFQLA

SEQ ID NO: 3780 - protein, 485 aa, synthetic construct
MTKKVAIYTRVSTTNQAEEGFSIDEQTDRLTKYAEAMGWRVSDTYTDAGFSGAKLERPAMQRLINDIENKAFDTVLVYKLDRLSRNVRDTLYLVKDVFTKNKIDFISLNESIDTSSAMGSLFLTILSAINEFERENIKERMTMGKLGRAKSGKSMMWTKTAFGYYHNRKTGILEIVPLQAAIVEQIFTDYLSGISLTKLRDKLNESGHIGKDIPWSYRTLRQTLDNPVYCGYIKFKDSLFEGMHKPIISYETYLKVQKELEERQQQTYERNNNPRPFQAKYMLSGMARCGYCGAPLKIVLGHKRRDGGRTMKYHCANRFPRKTKGITEYNDNKKCDSGTYDLSNLENTVIDNLIGFQENNDSLLKIINGSYQPILDTSSFKKQISQIDKKIQKNSDLYLNDFITMDELKARTDSLQAEKKLLKAKISENKFNDSTDVFELVKTQLGSIPINELSYDNKKKIVNNLVSKVDVTADNVDIIFKFQLA

SEQ ID NO: 3781 - protein, 452 aa, synthetic construct
MKAAIYIRVSTQEQVGNYSIQAQTEKLTALCRSKDWDVYDIFIDGGYSGSNMNRPALNEMLSKLHEIDAVVVYRLDRLSRSQRDTTTLIEEYFLKNNVEFVSLSETLDTSSPFGRAMIGILSVFAQLERETIRDRMVMGKIKRIEAGLPLTTAKGRTFGYDVIDTKLYINEEEAKQLQLIYDIFEEEQSITSLQKRLKKLGFKVRTYNRYNNWLTNDLYCGYVSYKDKVHVKGIHEPIISEEQFYRVQEIFTRMGKSPNMNRDSASLLNNLVVCSKCGLGFVHRSKDTMSRGKKYHYRYYSCKTYKHTHELEKCGNKTWRADKLEELIINRVNDYSSASRNVDKEDELDSLNEKLKIEHAKKKRLFDLYINGSFEVSELDNMMNDIDAQINYYESQIGASEELRRNKKIQENLADLATVGFDSLEFREKQLYLKSLINKIYIDGEQVTIEWL

SEQ ID NO: 3782 - protein, 452 aa, synthetic construct
MKAAIYIRVSTQEQVENYSIQAQTEKLTALCRSKDWDVYDIFIDGGYSGSNMNRPALNEMLSKLHEIDAVVVYRLDRLSRSQRDTTTLIEEYFLKNNVEFVSLSETLDTSSPFGRAMIGILSVFAQLERETIRDRMVMGKIKRIEAGLPLTTAKGRTFGYDVIDTRLYINEEEAKQLRLIYDIFEEEQSITSLQKRLKKLGFKVRTYNRYNNWLTNDLYCGYVSYKDKVHVKGIHEPIISEEQFYRVQEIFTRMGKSPNMNRDSASLLSNLVVCSKCGLSFVHRSKDTVSRGKKYHYRYYSCKTYKHTHELEKCGNKIWRADKLEELIINRVSNYSFVSRSVDKEDELDSLNEKLRIEHAKKKRLFDLYINGSYEVSELDSMMDDIDAQINYYESQIEANEGLKKDKKIQENLAGLATVDFDSLEFREKQLYLKSLINKIYIDGEQVTIEWL

SEQ ID NO: 3783 - protein, 452 aa, synthetic construct
MKAAIYIRVSTREQVENYSIQAQTEKLTALCRSKDWDVYDIFIDGGYSGSNMNRPALNEMLSRLHEIDAVVVYRLDRLSRSQRDTITLIEEYFLKNNVEFVSLSETLDTSSPFGRAMIGILSVFAQLERETIRDRMVMGKIKRIEAGLPLTTAKGRTFGYDVIDTKLYINEEEAKQLRLIYDIFEEERSITFLQKRLKRLGFKVRTYNRYYNWLTNDLYCGYVSYKDKVHVKGVHEPIISEEQFYRVQEIFTRMGKNPNMNRDSASLLNGLVVCSKCGLGFVHRRKDTMSRGKKYHYRYYSCKTYKHIHELEKCGNKIWRADKLEELIINRVNNYSFASRNADKEDELDSLNEKLKIEHAKKKRLFDLYINGSYEVSEPDSMMNDIDAQISYYESQIGANEELKRNKKIQENLANLATVDYDSLEFREKQLYLRSLINKIYIDGEQVTIEWL

SEQ ID NO: 3784 - protein, 485 aa, synthetic construct
MTKKVAIYTRVSTTSQAEEGFSIDEQTNRLTKYAEAMGWQVSGTYTDAGFSGAKLERPAMQRLINDIENKAFDTVLVYKLDRLSRSVRDTLYLVKDVFTKNKIDFISLNESIDTSSAMGSLFLTILSAINEFERENIKERMTMGKLGRAKSGKSMMWTKTAFGYYHNRKTGILEIVPLQATIVEQIFTDYLSGISLTKLRDKLNESGHIGKDIPWSYRTLRQTLDNPVYCGYIKFKGSLFEGMHKPIIPYETYLRVQKELEERQQQTYERNNNPRPFQAKYMLSGMARCGYCGAPLKIVLGHKRKDGSRTMKYHCANRFPRRTKGVTVYNDNKKCDSGTYDLSNLENTVIDNLIGFQENNDSLLKIINGNNRPTLDTSSFKKQISQIDKKIQKNSDLYLNDFITMAELKVRTDSLQAEKKLLKAKINENKSNDSTDVFELVRTQLGSIPINELSYDNKKKIVNNLVSKVDVTADNVDIIFKFQLA

SEQ ID NO: 3785 - protein, 452 aa, synthetic construct
MKAAIYIRVSTREQVENYSIQAQTERLTALCRSKDWDVYDIFIDGGYSGSNMNRPALNEMLSKLHEIDAVVVYRLDRLSRSQRDTITLIEEYFLKNNVEFVSLSETLDTSSPFGRAMIGILSVFAQLERETIRDRMVMGKIKRIEAGLPLTTAKGRTFGYDVIDTKLYINEEEAKQLQLIYDIFEEEQSITFLQKRLKKLGFKVRTYNRYNSWLTNDLYCGYVSYKDKVHVKGIHEPIISEEQFYRVQEIFTRMGKNPNMNRDSASLLNSLVVCSKCGLGFVHRRKDTMSRGKKYQYRYYSCKTYKHTHELEKCGNKIWRADRLEELIVNRVNNYSFASRNVDKEDELDSLNEKLKIEHAKKKRLFDLYINGSYGVSELDSMMNDIDAQINYYESQIEANEELKRNKKIQENLAYLASVDYDSLEFREKQLYLKSLINKIYIDGEQVTIEWL

SEQ ID NO: 3786 - protein, 485 aa, synthetic construct
MTRKVAIYTRVSTTNQAEEGFSIDEQIDRLTKYAEAMGWQVSDTYTDAGLSGAKLERPAMQRLINDIENKAFDTVLVYKLDRLSRSVRDTLYLVKDVFTKNKIDFISLNESIDTSSAMGSLFLTILSAINEFERENIKERMTMGKLGRAKSGKSMMWTKTAFGYYHNRKTGILEIVPLQATIVEQIFTDYLSGISLTKLRDKLNESGHIGKDIPWSYRTLRQTLDNPVYCGYIKFKDSLFEGMHKPIIPYETYLKVQKELEERQQQTYERNNNPRPFQAKYMLSGMARCGYCGAPLKIVLGHKRKDGSRTMKYHCANRFPRKTKGVTVYNDNKKCDSGTYDLSNLENTVIDNLVGFQENNDGLLKIINGNNQPILDTSSFKKQISQIDKKIQKNSDLYLNDFITMDELKARTDSLQAEKKLLKAKISENKFNDSTDVFELVKTRLGSIPINELSYDSKKKIVNNLVSKVDVTADNVVIIFKFQLA

SEQ ID NO: 3787 - protein, 452 aa, synthetic construct
MKAAIYIRVSTREQVENYSIQAQTEKLTALCRSKDWDVYDIFIDGGYSGSNMNRPALNEMLSKLHEIDAVVVYRLDRLSRSQRDTITLIEEYFLKNNVEFVSLSETLDTSSPFGRAMIGILSVFAQLERETIRDRTVMGKIRRIEAGLPLTTAKGRTFGYDVIDTKLYINEEEAKQLQLIYDIFEEVQSITFLQKRLKKLGLKVRTYNCYNNWLTNDLYCGYVSYKDKVHVKGIHEPIISEEQYYRVQEIFTRMGKNPNMNRDSASLLNNLVVCSKCGLGFVHRRKDAMSRDKKYHYRYYSCKTYKHIHELEKCGNKIWRADKLEELIIDRVNNYSLASRNVDKEDELDSLNEKLKIEHAKKKRLFDLYINGSYEVSELDSMMSDIDAQINYYESQIEANEELKKNKKIQENLAHLATVDFDSLEFREKQLYLKSLINKIYIDGEQVTIEWL

SEQ ID NO: 3788 - protein, 452 aa, synthetic construct
MKAAIYIRVSTREQVENYSIQAQTEKLTALCRSKDWDVYDIFIDGGYSGSNMNRPALNEMLGKLHEIDAVVVYRLDRLSRSQRDTITLIEEYFLRNNVEFVSLSETLDTSSPFGRAMIGILSVFAQLERETIRDRMVMGKIKRIEAGLPLTTAKGRTFGYDVIDTKLYINEEEAKQLQLIYDIFEEEQSITFLQKRLKKQGFKVHTYNRYNNWLTNDLYCGYVSYKDKVHVKGIHEPIISEEQFYRVQEIFTRMGKNPNMNRDSASLLNNLVVCSKCGLGFVHRRKDTMSRGKKYHYRYYSCKTYKHIHELEKCGNKIWRADKLEELIINRVNNYSFASRNVDKEDELDSLNEKLKIEHAKKRRLFDLYINGSYEVSELDSMMNVIDAQINYYESQIGANEELKRNKKIQENLADLASVDYDSLEFREKQLYLKSLINKIYIDGEQVTIEWL

SEQ ID NO: 3789 - protein, 485 aa, synthetic construct
MTKKVAIYTRVSTTNQAEEGFSIDEQVDRLTKYAEAMGWQVSDTYTDAGFSGAKLERPAMLRLINDIETKAFDTVLVYKLDRLSRSVRDTLYLVKDVFTKNKIDFISLNESIDTSSAMGSLFLTILSAINEFERENIKERMTMGKLGRAKSGKSMMWTKTAFGYYHNRKTGILEIVPLQATIVEQIFTDYLSGISLTKLRDKLNESGHIGKDIPWSYRTLRQTLDNPVYCGYIKFKDSLFEGMHKPIIPYETYLKVQKELEKRQQQTYERNNNPRPFQAKYMLSGMARCGYCGAPLRIVLGHKRKDGSRTMKYHCANRFPRKTKGVAVYNDNKKCDSGTYDLSNLENTVIDNLIGFQENNDSLLKIINGNNQPIRDTSCFKKQISQIDKKIRKNSDLYLNDFITMDELKERTDSLQAEKELLKAKISENKFNDSTDVFELVKTQLGNIPINELSYDNKKKIVNSLVSKVDVTADNVVVIFKFQLA

SEQ ID NO: 3790 - protein, 452 aa, synthetic construct
MKAAIYIRVSTREQVENYSIQAQTEKLTALCRSKDWDVYDIFIDGGYSGSNMNRPALNEMLSKLHEIDAVVVYRLDRLSRSQRDTITLIEEYFLKNNVEFVSLSETLDTSSPFGRAMIGILSVFAQLERETIRDRMAMGKVKRVEAGLPLTTAKGRTFGYDVIDTKLYINEEEAKQLQLIYDIFEEEQSITFLQKRLKELGFKVRTYNRYNSWLTNDLYCGYVSYKDKVHVKGIHEPIISEEQFYRVQEIFTRMGKNPNMNRDSASLLNNLVVCSKCGLGFVHRRKDTTSRGKKYHYRYYSCKTYKHTHELEKCGNKIWRADKLEELIINRVNNYSFVSRNVDKDDELDSLNEKLKIEHAKRKRLLDLYINGSYEVSELDSMMNDIDAQINYYESQIETNEELKKNKKIQENLAVLATVDYDSLEFREKQLYLRSLINKIYIDGEQVTIEWL

SEQ ID NO: 3791 - protein, 469 aa, synthetic construct
MSYTTPVRAAVYLRISEDRSGEQLGVARQREDCLKLCDQRKWVPVEYLDNDVSASTGKRRPAYEQMLADITAGKIAAVVAWDLDRLHRRPIELEAFMSLADEKRLALATVAGDVDLATPQGRLVARLKGSVAAHETEHKKARQRRAARQKAERGHPNWSKAFGYLPGPNGPEPDPRTAPLVKQAYADILAGASLGDVCRQWNNAGAYTITGRPWTTTTLSKFLRKPRNAGLRAYKGARYGPVDRDAIVGKAQWSPLVDEATFWAAQTVLDAPGRAPGRKSVRRHLLTGLAGCGKCGNHLAGSYRTDGRVVYVCKACHGVAILADNIEPILYHIVAERLAMPGAADLLRREIHDVAEAETMRLELETLYGELDRLAVERAEGLLTARQVKISTDIVNAKITKLQARQLDQERLRVLDGIPLGTPQVAGVIAELSPDRFRAVLDVLVEVVVQPVGKSGRIFNPERVQVNWR

SEQ ID NO: 3792 - protein, 485 aa, synthetic construct
MTKKVAIYTRVSTTNQAEEGFSIDEQIDRLTKYAEAMGWQVSDTYTDAGLSGAKLERPAMQRLINDIENKAFDTVLVYKLDRLSRSVRDTLYLVKDVFTKNKIDFISLSESIDTSSAMGSLFLTILSAINEFERENIKERMTMGKLGRAKSGKSMMWTKTAFGYHHNRKTGILEIVPLQATIVEQIFTDYLSGISLTKLRDKLNESGHIGKDIPWSYRTLRQTLDNPVYCGYIKFKDSLFEGMHKPIIPYETYLKVQKELEVRQQRTYERNNNPRPFQAKYMLSGTARCGYCGAPLRIVLGHKRKDGSRTMKYHCANRFPRKTKGVTVYNDNKKCDSGTYDLSNLENTVVDSLIGFQENNDSLLKIINGNNQPILDTSSFKEQISQIDKKIQKNSDLYLNDFITMDELRDRTDSLQAEKKLLKAKISENKFNDSTDVFELVKTQLGSIPINELSYDNKKKIVNNLVSKVDVTADNVDIIFKFQLA

SEQ ID NO: 3793 - protein, 485 aa, synthetic construct
MTKKVAIYTRVSTTNQAEEGFSIDEQIDRLTKYAEAMGWQVSDTYTDAGFSGAKLERPAMQRLINDIESKAFDTVLVYKLDRLSRSVRDTLYLVKDVLTKNKIDFISLSESIDTSSAMGSLFLTILSAINEFERENIKERMTMGKLGRAKSGKSMMWTKTAFGYYHNRETGILEIVPLQATIVEQIFTDYLSGISLTKLRDKLNESGHVGKDIPWSYRTLRQTLDNPVYCGYIKFKDSLFEGMHKPIIPYETYLKVQKELEERQQQTYERNNNPRPFQAKYMLSGMARCGYCGAPLRIVLGHKRRDGSRTMKYHCANRFPRKTKGVTVYNGNKKCDSGTYDLSNLENTVIDNLIGFQENNDSLLRIISGNNQPILDTSCFKKQISRIDKKIRKNSDLYLNGFITMDELKDRTDSLRAEKKLLEAKISENKFNDSTDVFELVKTQLGSIPINELSYDNKKKIVNNLVSKVDVTADNVDIIFKFQLA

SEQ ID NO: 3794 - protein, 485 aa, synthetic construct
MTKKVAIYTRVSTTNQAEEGFSIDEQTDRLTKYAEAMGWQVSDTYTDAGFSGAKLERPAMQRLINDIENKAFDTVLVYKLDRLSRSVRDTLYLVKDVFTKNKIDFISLNESIDTSSAMGSLFLTILSAINEFERENIKERMTMGKLGRAKSGKSMMWTKTAFGYYHNRKTGILEVVPQQATIVEQIFTDYLSGISLTKLRDKLNESGHIGKDIPWSYRTLRQTLDNPVYCGYIKFKDSLFVGMHKPIIPYETFLKVQKELEERQQQTYERNNNPRPFQAKYMLSGMARCGYCGAPLRIVLGHKRKDGSRTMKYHCANRFPRKTKGVTVYNDNKKCDSGTYDLSSLENTVIDNLIGFQENNDSLLKIINGNSQPILDTSSFEKQISQIDKKIQKNSDLYLNDFITMDELKDRTDSLQAEKKLLKAKISENKFNDSTDVFELVKTQLGGIPINELSYGNKKKIVNNLVSKVDVTADNVDIIFKFQLA

SEQ ID NO: 3795 - protein, 470 aa, synthetic construct
MSYTTPVRAAVYLRISEDRSGEQLGVARQREDCLKLCGQRKWEPVEYLDNDVSASTGKRRPAYEQMLADITAGKIAAVVAWDLDRLHRRPIELEAFMSLADEKRLALATVAGDVDLATPQGRLVARLKGSVAAHETEHKRARQRRAARQKAERGHPNWSKAFGYLPGPNGPEPDPRAAPLVKQAYADILAGASLGDVCRQWNDAGAFTITGRPWTTTTLSKFLRKPRNAGLRAYKGACCGPVDRDAIVGKAQWSPLVDEATFWAAQAVLDAPGRAPGRKSVRRHLLTGLVSCGKCGNHLAGSYRTDGRVVYVCKACHGVVILADNIEPILYHIVAERLAMPDAVGLLRREIHDAAEAETIRLKLEALYGELDRLAVERAEGLLTARQVKISTDIVNAKITKLQARQLDQERLRVFDGIPLGTPQVAGVIAELSPNRFRAVLDVLAEVVVQPVGKSGRIFNPGRVQVNWRK

SEQ ID NO: 3796 - protein, 452 aa, synthetic construct
MKAAIYIRVSTQEQVGNYSIQAQTEKLTALCRSKDWDVYDIFIDGGYSGSNMNRPALNEMLSKLHEIDAVVVYRLDRLSRSQRDTTTLIEEYFLKNNVEFVSLSETLDTSSPFGRAMIGILSVFAQLERETIRDRMVMGKIKRIEAGLPLTTAKGRTFGYDVIDTKLYINEEEAKQLQLIYDIFEEVQSITFLQKRLKKLGFKVRTYSRYNNWLTNDLYCGYVSYKDKVHVKGIHEPIISEEQFYRVQEIFTRMGKNPNMNRDSASLLSNLVVCSKCGLGFVHRSKDTMSRGKKYHYRYYSCKTYKHTHELEKCGNKIWRADKLEELIINRVNNYSFESRNVDKEDELDSLNEKLKIEHAKKKRLFDLYINGSYEVGELDSMMNDIDAQINYYESQIEANEELRKNKKIQENLADLATVDFDSLEFREKRLYLKSLINKIYIDGEQVTIEWL

SEQ ID NO: 3797 - protein, 452 aa, synthetic construct
MKAAIYIRVSTREQVENYSIQAQTEKLTALCRSKDWDVYDIFIDGGYSGGDMNRPALNEMLSKLHEIDAVVVYRLDRLSRSQRDTITLIEEYFLKNNVEFVSLSETLDTSSPFGRAMIGILSVFAQLERETIRDRMVMGKIKRIEAGLPLTTAKGRTFGYGVIDTKLYINEEEAKQLQLIYDIFEEEQSITFLQKRLKKLGFKVRTYSCYNNWLTNDLYCGYVSYKDKVHVKGIHEPIISEEQFYRVQEIFTRMGKNPNMNRDSASLLNNLVVCSKCGLGFVHRRKDTTSRGKKYHYRYYSCKTYKHIHELEKCGNKIWRADKLEELIINRVNNYSLASRSVDREGELDSLSEKLKVEHAKKKRLFELYINGSYEMGELDSMMNDVDAQINYYESQIEANEELKKNKKIQENLANLATVDYDSLEFREKQLYLKSLINKIYIDGERVTIEWL

SEQ ID NO: 3798 - protein, 469 aa, synthetic construct
MSYTTPVRAAVYLRISEDRSGEQLGVARQREDCLKLCGQHKWVPVEYLDNDVSASTGKRRPAYEQMLADITAGKIAAVVAWDLDRLHRRPVELEAFMSLADEKRLALATVAGDVDLATPQGRLVARLKGCVAAHETEHKKARQRRAARQKAERGHPNWSKAFGYLPGPSGPEPDPRTAPLVKQAYADILAGASLGDVCRQWNDAGAFTITGRPWTTTTLSKFLRKPRNAGLRAYKGARYGPVDRDAIVGKAQWSPLVDEATFWAAQAVLDAPGRAPGRKSVRRHLLTGLAGCGKCGSHLAGSYRTDGQVVYVCKACHGVSILAVNIVPILYRIVAEHLAMPDAVDLLRRDIHDAAEAETIRLELETLYGELDRLAVERAEGLLTARQVKISTDVVNAKITKLQARQLDQERLRVFDGIPLGTPQVTGVIAELSPDRFRAVLDVLAEVVVQPVGKSGRIFNPERVQVNWR

SEQ ID NO: 3799 - protein, 452 aa, synthetic construct
MKAAIYIRVSTREQVENYSIQAQTEKLTALCRSKDWDVYDIFIDGGYSGSNMNRPALNEMLSKLHEIDAVVVYRLDRLSRSQRDTITLIEEYFLKNNVEFVSLSETLDTSSPFGRAMIGILSVFAQLERETIRDRMVMGKIKRIEAGLPLTTAKGRTFGYDVIDTKLYINEEEAKQLQLIYDIFEEEQSITFLQKRLKELGFKVRTYNRYNNWLTNDLYCGYVSYKDKVHVKGIHEPIISEEQFYRVQEIFARMGKNPNMNRDSASLLNNLVVCSKCGLGFVHRRKDAMSRDKKYHYRYYSCKTYKHIHELEKCGNKIWRADKLEELIINRVNNYSLASRNVDKEDELDSLNEKLKIEHAKKKRLFDLYINGRYEVSELDSMMNDIDAQINYYESQIEANEELKKNKQIQENLANLATVDFDSLEFREKQRYLKSLINKIYIDGEQVTIEWL

SEQ ID NO: 3800 - protein, 485 aa, synthetic construct
MTKKVAIYTRVSTTNQAEEGFSIDEQIDRLTKYAEAMGWQVSDTYTDAGFSGAKLERPAVQRLINDIENKAFDTVLVYKLDRLSRSVRDTLHLVKDVFTKNKIDFISLNESIDTSSAMGSLFLTILSAINEFERENIKERMTMGKLGRAKSGKSMMWTKTAFGYHHNRKTGILEIVPLQATIVEQIFTDYLSGISLTKLRDKLNESGHIGKDIPWSYRTLRQTLDNPVYCGYTKFKDSLFEGMHKPIIPYETYLKVQKELEERQQQTYERNNNPRPFQAKYMLSGMARCGYCGAPLKIVLGHKRKDGSRTTKYHCANRFPRKTKGVTVYNDNKKCDSGTYDLSSLENTVIDYLIGFQENNDSLLKIINGNNQPTLDTSSFKEQISQIDKKIQKNSDLYLNDFITMDELKDRTDSLQAEKKLLKAKISGNKFNDSTDVFERVKTQLGSIPINELSYDSKKKIVNNLVSKVDVTADNVDIIFKFQLA

SEQ ID NO: 3801 - protein, 452 aa, synthetic construct
MKAAIYIRVSTQEQVGNYSIQAQTEKLTALCRSKDWDVYDIFIDGGYSGSNMNRPALNEMLSKLHEIDAVVVYRLDRLSRSQRDTTTLIEEHFLKNNVEFVSLSETLDTSSPFGRAMIGILSVFAQLERETIRDRMVMGKIKRIEAGLPLTTAKGRTFGYDVVDTKLYINEEEAKQLQLIYDIFEEEQSITSLQKRLKKLGFKVRTYNRYNNWLTNDLYCGYVSYKDKVHVKGIHEPIISEEQFYRVQEIFTRMSKNPNMNRDSASLLNNLVVCSKCGLGFVHRSKDTMSRGKKYHYRYYSCKTYKHTHELEKCGNKTWRADKLEELVISRVNNYSFASRNVDKGDEQDSLNEKLEIEHAKKKRLFDLYINGSYEASELDSMMNDIDARINYYESQIEANEELRKNKKVRENLAGLATVDFDSLEFREKQLYLKSLINKIYIDGEQVTIEWL

SEQ ID NO: 3802 - protein, 485 aa, synthetic construct
MTKKVAIYTRVSTTNQAEEGFSIDEQIDRLTKYAEAMGWQVSDTYTDAGFSGAKLERPAMQRLISDIGNKAFDTVLVYKLDRLSRSVRDTLYLVKDVFTKNKIDFISLNESINTSSAMGSLFLTILSAINEFERENIKERMTMGKLGRAKSGKSMMWTKTAFGYYHNHKTGVLEIVPLQATIVEQIFADYLSGISLTKLRDKLNESGHIGKDIPWSYRTLRQTLDNPVYCGYIKFKDSLFEGMHKPIIPYETYLKVQKELEERQQQTYERNNNPRPFQAKYMLSGMARCGYCGAPLRIVLGHKRKDGSRTMKYHCANRFPRKTKGITAYNDNKKCDSGTYDLSNLENTVIDSLIGFQENNDSLLKIISGNNQPILDTSSFEKQISQIDKKIQKNSDLYLNDFITMDELKDRTDSLQAEKKLLKAKISENKLNDSTDVFELVKTQLGSIPINELSYDNKKKIVNNLVSKVDVTADNVDIIFKFQLA

SEQ ID NO: 3803 - protein, 452 aa, synthetic construct
MKAAIYIRVSTQEQVGNYSIQAQTEKLTALCRSKDWDVYDIFIDGGYSGSNMNRPALNEMLSKLHEIDAVVVYRLDRLSRSQRDTTTLIEEYFLKNNVEFVSLSETLDTSSPFGRAMIGILSVFAQLERETIRDRMVMGKIKRIESGLPLTTAKGRTFGYDVIDTKLYVNEEEAKQLQLIYDIFEEEQSITFLQKRLKKLGFKVRTYNRYNNWLTNDLYCGYVSYKDKVHVKGIHEPIISEEQFYRVQEIFTRMGKNPNMNRDSASLLSNLVVCSKCGLGFVHRSKDTMSRGKKYHYRYYSCKTYKHTHELEKCGNKTWRADKLEELVINRVNNYSFASRDVDKEDELDGLNEKLKIEYAKKKRLFDLYINGSYEVSELDSMMNDIDAQINYYESQIGANEELKKTKKIQENLADLATVDFDSLEFREKQLYLKSLINKIYIDGEQVTIEWL

SEQ ID NO: 3804 - protein, 452 aa, synthetic construct
MKAAIYIRVSTREQVENYSIQAQTEKLTALCRSKDWDVYDIFIDGGYSGSNMNRPALNEMLSKLHEIDAVVVYRLDRLSRSQRDTITLIEEYFLKNNVEFVSLSETLDTSSPFGRAMIGILSVFAQLERETIRDRMVMGKIKRIEAGLPLTTAKGRTFGYDVIDTKLYINEEEAKQLRLIYDIFEEEQSITFLQKRLKKLGLKVRTYNRYSNWLTNDLYCGYVSYKDKVHVKGIHEPIISEEQFYRVQEIFTRMGKNPNMNRDSASLLNNLVVCSKCGLGFVHRRKDIMSRGKKYHYRYYSCKTYKHIHELEKCGNKIWRADKLEELIINRVNNYSLASRNVAKEDELDSLNEKLKVEHARKKRLFDLYINGSYEVSELDSMMNGINAQINYYESQIEANEELKRNKKIQGNLAYLATVDFDGLEFREKQLYLKSLINKVYIDGEQVTIEWL

SEQ ID NO: 3805 - protein, 469 aa, synthetic construct
MCYTTPVCAAVYLRISEDRSGEQLGVARQREDCLKLCGQRKWVPVEYLDNDVSASTGRRRPAYEQMLADITAGKIAAVVAWDLDRLHRRPIELEAFMSLADEKRLALATVAGDVDLATPQGRLVARLKGSVAAHETEHKKARQRRAARQKAERGHPNWSKAFGYLPGPNGPEPDPRTAPLVKQAYAAILAGASLGDVCRQWNDAGAFTITGRPWTTTALSKFLRKPRNAGLRVYKGARYGPVDRDAIVGKAQWSPLVDEATFWAAQAVLDAPGRAPGRKSVRRHLLTGLAGCGKCGNHLAGSCRTDGRVVYVCKACHGVAILADNIVPILYHIVAERLAMPDAVGLLRRETHDAAEAEAIRLELETLYGELDRLAVERAEGLLTARQVKISTDIVNAKVTKLQARQLDQERLRVFGGIPLGTPQVAGVIAELSPDRFRAVLDVLAEVVVRPVGKGGRIFNPERVQVNWR

SEQ ID NO: 3806 - protein, 485 aa, synthetic construct
MTKKVAIYTRVSTTNQAEEGFSIDEQIDRLTEYAEAMGWQVSDTYTDAGFSGAKLGRPAMQRLINDIENKAFDTVLVYKLDRLSRSVRDTLYLVKDVFTKNKIDFISLNESIDTSSAMGSLFLTILSAINEFERENIKERMTMGKLGRAKSGKSMMWTKTAFGYYHNRKTGILEIVPLQATIVEQIFTDYLSGISLTKLRDKLNESGHIGKDIPWSYRTLRQTLDNPVYCGYIKFKNSLFEGMHKPIIPYETYLKVQKELEERQQQTYERNNNPRPFQAKYMLSGMARCGYCGAPLKIVLGHKRKDGSRTMKYHCANRFPRKTKGVTVYNDNKKCDSGTYDLSNLENTVIDNLIGFQENNDSLLKIINGNNQPILDTSSFKEQISQIDKKIQKNSDLYLNDFITMDELKDRTDSLRAEKKLLEAKISEDKFNDSTDVFELVKTQLGSIPINELSYDNKKKIVNNLVSKVDVTADNVDIIFKFQLA

SEQ ID NO: 3807 - protein, 469 aa, synthetic construct
MSYTTPVRAAVYLRISEDRSGEQLGVARQREDCLKLCDQRKWVPVEYLDNDVSASTGKRRPAYEQMLADITADKIAAVVAWDLDRLHRRPVELEAFMSLADERRLALATVAGDVDLATPQGRLVARLKGSVAAHETEHKKARQRRAARQKAERGLPNWSKAFGYLPGPNGPEPDPRTAPLVRQAYADILAGASLGDVCRQWNDAGAYTITGRPWTTTTLSKFLRKPRNAGLRAYKGARYGPVDRDAIVGKAQWSPLVDEATFWAAQAVLDAPGRAPGRKSVRRHLLTGLAGCGKCGNHLAGSYRTDGRVVYVCKACYGIAILADNIEPILYHIVAERLAMPDAVDLLCREIHDAAEAETIHLELETLCGELDRLAVERAEGLLTARQVKISTDIVNAKITKLRARQLDQERLRVLDGIPLGTPQVAGIIAELSPDRFRAVLDVLAEVVVQPVGKRGGISDPERVQVNWR

SEQ ID NO: 3808 - protein, 485 aa, synthetic construct
MTKKVAIYTRVSTTNQAEEGFSIDEQVDRLTKYAEAMGWQVSDTYTDAGLSGAKLGRPAMQRLINDIENKAFDTVLVYKLDRLSRSVRDTLYLVKDVFTKNKIDFISLNESIDTSSAMGSLFLTILSAINEFERENIKERMTMGKLGRAKSGRSMMWTKTAFGYYHNRKTGILEIVPLQATIVEQIFTDYLSGISLTKLRDKLNESGHIGKDIPWSYRTLRQTLDNPVYCGYIKFKDSLFEGMHKPIIPYETYLKVQKELEERQQQTYERNNNPRPFQAKYMLSGMARCGYCGAPLKIVLGHKRKDGSRTMKYHCANRFPRKTKGVTVYNDNKRCDSGTYDLSNLENTVIDNLIGFQENNDSLLKIINGNNQPIPDTSSFKKQISQIDKKIQKNSDLYLNDFITMDELKVRTDSLQAEKKLLKAKISENKFNNSTDVFELVKTQLGSIPISELSYDDKKKIVNNLVSKVDVTADNVDIIFKFQLA

SEQ ID NO: 3809 - protein, 485 aa, synthetic construct
MTKKVAIYTRVSTTNQVEEGFSIDEQIDRLTKYAEAMGWQVSDTYTDAGFSGAKLERPAMQRLINDIENKAFDTVLVYKLDRLSRSVRDTLYLVKEVFTKNKIDFISLNESIDTSSAMGSLFLTILSAINEFERENIKERMTMGKLGRAKSGKSMMWTKTAFGYYHNRKTGILEIVPLQATIVEQIFTDYLSGISLTKLRDKLNESGHIGKDIPWSYRTLRQTLDNPVYCGYIKFKDSLFEGMHKPIIPYETYLKVQKELEERQQQTYERNNNPRPFQAKYMLSGMARCGYCGAPLRIVLGHKRKDGSRTMKYHCANRFPRKTRGVTVYNDNKKCDSSTYDLSNLENTVIDNLIGFQENSDSLLKIINGNNQPILDTSSFKKQISQIDKKIQKNSDLYLNDFITMDELKDRTDSLQAEKKLLKAKISENRFNDSTGVFELVKTQLGSIPINELSYDNKKKIVNNLVSKVDVTADNVDIIFKFQLA

SEQ ID NO: 3810 - protein, 469 aa, synthetic construct
MSYTTPVRAAVYLRISEDRSGEQLGVARQREDCLELCGQRNWVPVEYLDNDVSASTGKRRPAYEQMLADITAGKIAAVVAWDLDRLHRRPIELEAFMSLADEKRLALATVAGDVDLATPQGRLVARLKGCVAAHETEHKKARQRRAARQKAERGHPNWSKAFGYLPGPNGPEPDPRTAPLVKQAYADILAGASLGDVCRQWNDAGAFTITGRPWTTTTLSKFLRKPRNAGLRAYKGARYGPVDRDAIVGKAQWSPLVDEATFWAAQAVLDAPGRAPGRKSVRRHLLTGLAGCGKCGNHLAGSYRTDGRVVYVCKACHGVSILAVNIEPILYHVVAERLAMPGAADLLRRETHDAAEAETIRLELETLYGELDRLAVERAEGLLTARQVKISTDIVNAKITKLQARQLDQERLRVFDGIPLGTPQVAGMIAELSPDRFRAVLDVLAEVVVQPVGKSGRISNPERVQVSWR

SEQ ID NO: 3811 - protein, 452 aa, synthetic construct
MKAAIYIRVSTREQVENYSIQAQTEKLTALCRSKDWDVYDIFIDGGYSGSNMNRPALNEMLSKLREIDAVVVYRLDRLSRSQRDTITLIEEYFLKNNVEFVSLSETLDTSSPFGRAMIGILSVFAQLERETIRDRMVMGKIKRIEAGLPLTTAKGRTFGYDVIDTKLYINEEEAKQLQLIYDIFEEEQSITFLQKRLKKLGFKVRTYNRYSNWLTNDLYCGYVSYKDKVHVKGIHEPIISEEQFYRVQEIFTRMGKSPNMNRGSASLLNNLVVCGKCGLGFVHRRKDAMSRDKKYHYRYYSCKTYKHIHELEKCGNKIWRADELEELVINRVNSYSVASRNVDKEDELDSLNEKLKIEHAKKKRLFDLYINGSYEVSELDSMMNDINAQISYYESQIEANEELRKNKKIQENLADLATVDFDSLEFREKQLYLKSLINKIYIDGEQVTIEWL

SEQ ID NO: 3812 - protein, 452 aa, synthetic construct
MKAAIYIRVSTREQVENYSIQAQTEKLTALCRSKDWDVYDIFIDGGYSGSNMNRPALNEMLSKLHEIDAVVVYRLDRLSRSQRDTITLIEEYFLKNNVEFVSLSETLDTSSPFGRAMIGILSVFAQLERETIRDRMVMGKIKRIEAGLPLTTAKGRTFGYDVIDTKLYINEEEARQLQLIYDIFEEEQSITFLQKRLKELGFKVRTYNRYNNWLTNDLYCGYVSYKDKVHVKGIHEPIISEEQFYRVQEIFARMGKNPNMNRDSASLLNNLVVCSKCGLGFVHRRKDATSRDKKYHYRYYSCKSYKHIHELEKCGNKIWRADKLEELIINCVNDYSLASRNVDKEDELDSLNEKLKIEHAKKKRLFDLYINGCYDVSELDSMMCDIDAQIDYYESQIKANEELKKSKRIQENLAYLATVDFDSLEFREKQLYLKSLINKIYIDGEQVTIEWL

SEQ ID NO: 3813 - protein, 469 aa, synthetic construct
MSYTTPMRAAVYLRISEDRSGEQLGVARQREDCLELCGQHKWVPVEYLDNDVSASTGKRRPAYEQMLADIAAGKIAAVVAWDLDRLHRRPIELEAFMSLADEKRLALATVAGDVDLATPQGRLVARLKGSVAAHETEHKKARQRRAARQKAERGHPNWSKAFGYLPGPNGPEPDPRTAPLVKQAYADILAGASLGDVCRRWNAAGAFTITGRPWTTTTLSKFLRKPRNAGLRTYRGARCGPVDRDAIVGKAQWSPLVDEATFWAAQAVLDAPGRAPGRKSVRRHLLTGLAGCGKCGNHLAGSYRTDGKVVYVCKACHGVAILADNIEPILYRIVAERLAMPDAVDLLRREIHDAAEAETIRLELETLYGELDRLAVERAEGLLTARQVKISTDIVNAKITKLQARQLDQERLRVFDGIPLGTPQVAGMVAKLSPDRFRAVLDVLAEVVVQPVGKSGRIFNPERVQVNWR

SEQ ID NO: 3814 - protein, 452 aa, synthetic construct
MKAAVYIRVSTREQVENYSIQAQTEKLTALCRSKGWDVYDIFIDGGYSGSNMNRPALNEMLSKLHEIDAVVVYRLDRLSRSQRDTITLIEEYFLKNNVEFVSLSETLDTSSPFGRAMIGILSVFAQLERETIRDRMVMGKIKRIEAGLPLTTAKGRTFGYDVIDTKLYINEEEAKQLQLIYDIFEEEQSITFLQKRLKKLGFKVRTYNRYNNWLTNDLYCGYVSYKDKVHVKGIHEPIISEEQFYRVQEIFTRMGKNPNMNRDSASLLNSLVVCSKCGLGFVHRRKDATSRDKKYHYRYYSCKTYKHIHELEKCGNKIWRADKLEELIINRVNDYSLASRNVDKEDELDSLNEKLKTEHAKKRRLFDLYINGSYEVSELDSMMNGIDAQINYYESQIEANEELKKNKKIQENLAHLATVDFDSLEFREKQLYLKSLINKIYIDGEQVTIEWL

SEQ ID NO: 3815 - protein, 452 aa, synthetic construct
MKAAIYIRVSTREQVENYSIQAQTEKLTALCRSKDWDVYDIFIDGGYSGSNMNRPALNEMLGKLHEIDAVVVYRLDRLSRSQRDTITLIEEYFLKNNVEFVSLSETLDTSSPFGRAMIGILSVFAQLERETIRDRMVMGKIKRIEAGLPLTTAKGRTFGYDVIDTKLYINEEEAKQLRLIYDIFEEEQSITFLQKRLKKLGFKVRTYNRYNNWLTNDLYCGYVSYKDKVHVKGIHEPIISEEQFYRVQEIFTRMGKNPNMNRDSASLLNNLVVCSKCGLGFVHRRKDTVSRGKKYHYRYYSCKTYKHIHELEKCGNKIWRADKLEELIINRVSNYSFASRNVAKEDELDGLNEKLKIEHAKKKRLFDLYINGSYEVSELDSMMNDIDAQIDYYESLIEANEELRKNKKIQESLANLATVDYDSLEFREKQLYLKSLINKIYIDGEQVTVEWL

SEQ ID NO: 3816 - protein, 452 aa, synthetic construct
MKAAIYIRVSTQEQVGNYSIQAQTEKLTALCRSKDWDVYDIFIDGGYSGSNMNRPALNEMLSKLHEIDAVVVYRLDRLSRSQRDTTTLIEEYFLKNNVEFVSLSETLDTSSPFGRAMIGILSVFAQLERETIRDRMVMGKIKRIEAGLPLTTAKGRTFGYDVIDTKLYVNEEEAKQLQLIYDIFEEEQSITSLQKRLKKLGFKVRTYNRYHNWLTNDLYCGYVSYKDKVHVKGIHEPIISEEQFYRVQEIFTRMGKNPNMNRASASLLSNLVVCSKCGLGFVHRSKDTKSRGKKYHYRYYSCKTYKHTHELEKCGNKTWRADKLEELIINRVNNYSFAGRNVGKEDELDSLNEKLKIEHAKKKRLFDLYINGSYEVSELDSMMNDIDAQINYYESQIEANEELKKNKKIQENLADLATVDFDSLEFREKQLYLKGLISKIYIDGEQVTIEWL

SEQ ID NO: 3817 - protein, 469 aa, synthetic construct
MSYTTPVRAAVYLRISEDRSGEQLGVTRQREDCLKLCDQRNWVPVEYLDNDVSASTGKRRPAYEQMLADIAAGKIAAVVAWDLDRLHRRPIELEAFMSLADEKRLALATVAGDVDLATPQGRLVARLKGSVAAHETEHKKARQRRAARQKAERGYPNWSKAFGYLPGPNGPEPDPQTAPLVKQAYVDILAGASLGDVCRRWNDAGALTITGRPWTTTTLSKFLRKPRNAGLRAYKGARYGPVDRDAIVGKAQWSPLVDEATFWAAQAVLDAPGRAPGRKSVRRHLLTGLAGCGKCGNHLAGSYRTDGRVVYVCKACHGVAILADNIEPILYHIVAERLAMPDAVDLLRREIHGAAEAEAIRLELETLYGELDHLAVERAEGLLTARQVKISTDIVNAKITKLRARQLDQERLRVFDGIPLGTPQVAGAIAVLSPDRFRAVLGVLAEVVVQPVGKGGRIFNPERVQVNWR

SEQ ID NO: 3818 - protein, 485 aa, synthetic construct
MTKKVAIYTRVSTTNQAEEGFSIDEQIGRLTKYAEAMGWQVSDTYTDAGSSGAKLERPAMQRLINDIENKAFDTVLVYKLDRLSRSVRDTLYLVKDVFTKNKIDFISLNESIDTSSAMGSLFLTILSAINEFERENIKERMTMGKLGRAKSGKSMMWTKTAFGYYHNRKTGILEIVPLQATIVEQIFTDYLSGISLTKLRDKLNESGHIGKDIPWSYRTLRQTLDNPVYCGYIKFKGSLFEGMHKPIIPYETYLKVQKELEERQQQTYERNNNPRPFQAKYMLSGMARCGYCGAPLKIVLGRKRKDGSRTMKYHCANRFPRKTKGVTVYNDNKKCDSGTYDLGNLENTVIDNLIGFQENNDSLLKIINGNSQPILDTSSFKKQISQIDKKIQKNSDLYLNDFITMDELKDRTDSLQAEKKLLEAKISENRFNDSTDVLELVKTQLGSIPINELNYDNKKKIVNNLVSKVDVTADNVDIIFKFQLA

SEQ ID NO: 3819 - protein, 452 aa, synthetic construct
MKAAIYIRVSTREQVENYSIQAQTEKLTALCRSKDWDVYDIFIDGGYSGSNMNRPALNEMLSKLHEIDAVVVYRLDRLSRSQRDTITLIEEYFLKNNVEFVSLSETLDTSSPFGRAMIGILSVFAQLERETIRDRMAMGKIKRVEAGLPLTTAKGRTFGYDVIDTKLYINEEEAKQLQLIYDIFEEERSITFLQKRLKKLGYKVRTYNRYNSWLTNDLYCGYVSYKDKVHVKGIHEPIISEEQFYRVQEIFTRMSKNPNMNRDSASLLNNLVVCSKCGLGFVHRRKDTLSRGKKYHYRYYSCKTYKHTHELEKCGNKIWRADKLEELIINRVNNYSFASRNVSKEDELDSLNEKLKIEHAKRKRLFDLYINGSYEVSELDSMMNDIDAQINYYESQIEANEELKKNKKIQENLADLATVDYDSLEFREKQLYLKSLINKIYIDGEQVTIEWL

SEQ ID NO: 3820 - protein, 452 aa, synthetic construct
MKAAIYIRVSTREQVENYSIQAQAEKLTALCRSKDWDVYDIFIDGGYSGSNMNRPALNEMLSKLHEIDAVVVYRLDRLSRSQRDTITLIEEYFLKNNVEFVSLSETLDTSSPFGRAMIGVLSVFAQLERETIRDRMVMGKIKRIEAGLPLTTARGRTFGYDVIDTRLYINEEEAKQLQLIYDIFEEEQSITFLQKRLKKLGFKVRTYSCYNNWLTNDLYCGYVSYKDKVHVKGIHEPIISEEQFYRVQEIFTRMGKNPNMNRGSASLLNNLVVCSKCGLGFVHRRKDTTSRGKKYHYRYYSCKTYKHTHELEKCGNKIWRADKLEELIINRVNNYSLASRNVGKEGELDGLNEKLKIEHAKRKRLFDLYINGSYEVSELDSMMSDVDAQINYYESQIEANEELKRNKKIQENLANLATVDYDSLEFREKQLYLKSLINKIYIDGEQVTIEWL

SEQ ID NO: 3821 - protein, 469 aa, synthetic construct
MCYTTPVRAAVYLRISEDRSGEQLGVARQREDCLKLCDQRKWVPVEYLDNDVSASTGKRRPAYEQMLADITAGKIAAVVAWDLDRLHRRPIELEAFMSLADEKRLALATVAGDVDLATPQGRLVARLKGSVAAHETEHKKARQRRAARQKAERGHPNWSKAFGYLPGPNGPEPDPRTAPLVKQAYADILAGASLGDVCRQWNGAGAFTITGRPWTTTTLSKFLRKPRNAGLRAYKGARYGPVDRDAIVGNAQWSPLVDEVTFWAAQAVLDAPGRAPGRKSVRRHLLTGLAGCGKCGNHLAGSYRTDGRVVYVCKACHGVAILADNIEPILYHIVAERLAMPDAVDLLRREILDAAEAEAIRLELETLYSELDRLAVERAEGLLTARQVKISTDIVNAKITKLQARQLDQERLRVFDGIPLGTPQVAGMIAKLSPDRFRAVLDVLAEVVVQPVGKGGRIFNPERVQVNWR

SEQ ID NO: 3822 - protein, 452 aa, synthetic construct
MKAAIYIRVSTQEQVGNYSIQAQTEKLTALCRSKDWDVYDIFVDGGYSGSNMNRPALNEMLSKLHEIDAVVVYRLDRLSRSQRDTTTLIEEYFLKNNVEFVSLSETLDTSSPFGRAMIGILSVFAQLERETIRDRMVMGKIKRIEAGLPLTTAKGRTFGYNVIDTKLYINEEEAKQLQLIYDIFEEEQSIASLQKRLKKLGFKVRTYNRYNNWLTNDLYCGYVSYKDKVHVKGIHEPIISEEQFYRVQEIFTRMGKNPNMNRDSASLLSNLVVCSKCGLGFVHRSKDTMSRGKKYHYRYYSCKTYKHTHELEKCGNKTWRADKLEELIISRVNNYSFASRSVDEEDELDSLNEKLKIEHAKKKRLFDLYINGSYEVSELDSMMNDINAQINYYESQIEANEELKENKKIQENLAELATVDFDSLEFREKQLYLKSLINKIYIDGEQVTIEWL

SEQ ID NO: 3823 - protein, 452 aa, synthetic construct
MKAAIYIRVSTREQVENYSIQAQTEKLTALCRSRDWDVYDIFIDGGYSGSNMNRPALNEMLSKLHEIDAVVVYRLDRLSRSQRDTITLIEEYFLKNNVEFVSLSETLDTSSPFGRAMIGILSVFAQLERETIRDRMVMGKIKRIEAGLPLTTAKGRTFGYDVIDTKLHINEEEAKQLQLIYDIFEEERSITFLQKRLKKLGFKVHSYNRYNNWLTNDLYCGYVSYKDKVHVKGIHEPIISEEQFYRVQEIFTRMGKNPNMNRDSASLLNNLVVCGKCGLGFVHRRKDAMSRDKKYHYRYYSCKTYKHIHELEKCGNKIWRADKLEELIINRVSNYSLASRNVGKEDELESLNEKLTIEHAKKKRLFDLYINGSYEVSELDSMMNDIDAQINYYESQIEANVELKKNKKIQENLAHLATVDFDSLEFREKQLYLKSLINKIYIDGEQVTIEWL

SEQ ID NO: 3824 - protein, 485 aa, synthetic construct
MTKKVAIYTRVSTTNQAEEGFSIDEQTDRLTKYAEAMGWQVSDTYTDAGFSGAKLERPAMQRLINDIENKAFDTVLVYKLDRLSRSVRDTLHLVKDVFTKNKIDFISLNESIDTSSAMGSLFLTILSAINEFERENIKERMTMGKLGRAKSGKSMMWTKTAFGYHHNRKTGILEIVPLQATIVEQIFTDYLSGTSLTKLRDKLNESGHIGKDIPWSYRTLRQTLGNPVYCGYIKFKDSLFEGMHKPIITYETYLKVQKELEERQQQTYERNNNPRPFQAKYMLSGMARCGYCGAPLRIVLGHKRKDGSRTMKYHCANRFPRKTKGITVYNDNKKCDSGTYDLSNLENTVIDNLIGFQENNDRLLKIINGNNQPILDTSSFKKQISQIDKKIQKNSDLYLNDFITMDELKDRTDSLQTEKKLLKAKISENKFNDGADVFELVKTQLGSVPINELSYDNKKKIVNNLVSKVDVTADNVDIIFKFQLA

SEQ ID NO: 3825 - protein, 469 aa, synthetic construct
MSYTTPVRAAVYLRISEDRSGEQLGVARQREDCLKLCGQRKWVPVEYLDNDVSASTGKRRPAYEQMLADITAGKIAAVVAWDLDRLHRRPIELEAFMSLADEKRLALATVAGDVDLATPQGRLVARLKGCVAAHETEHKKARQRRAARQKAERGLPNWSKAFGYLPGPNGPEPDPRTAPLVKQAYADILAGASLGDVCRQWNDAGAFTITGRPWTTTALSKFLRKPRNAGLRAYKGARYGPVDRDAIVGKAQWSPLVDEATFWAAQAVLDAPGRAPGRKSVRRHLLTGLAGCGKCGNHLAGSYRTDGQVVYVCKVCHGVSILAVNIVPILYHIVAERLAMPDAVDLLCREIHDAAGAETIRLELEALYGELDRLAVERAEGLLTARQVKISTDIVNAKITKLQARQLDQERLRVFDGIPLGTPQVAGMIAELSPDRFRAVLDVLAEVVVQPVGKSGRIFNPERVQVNWR

SEQ ID NO: 3826 - protein, 485 aa, synthetic construct
MTKKVAIYTRVSTTNQAEEGFSIDEQIDRLTKYAEARGWQVSDTYTDAGSSGAKLERPAMQRLINDIENKAFDTVLVYKLDRLSRSVRDTLYLVKDVFTKNKIDFISLSESIDTSSAMGSLFLTILSAINEFERENIKERMTMGKLGRAKSGKSMMWTKTAFGYYHNRKTGILEIVPLQATIVEQIFTDYLSGISLTKLRDKLNESGHIGKDIPWSYRTLRQTLDNPVYCGYIKFKDSLFEGMHKPIIPYETYLKAQEELEKRQQQTYERNNNPRPFQAKYMLSGMARCGYCGAPLKIVLGHKRKDGSRTMKYHCANRFPRRTKGVTVYNDNKKCDSGAYDLSDLENTVIDNLIGFQENNDSLLKVINGNNQPILDTSSFKKQISQIDKKIQKNSDLYLNDFITMDELKERTDSLQAEKKLLKAKISETKFNDSTDVFELVKTQLGSIPINELSYDNKKKIVNNLVSKVDVTADNVDIIFKFQLA

SEQ ID NO: 3827 - protein, 452 aa, synthetic construct
MKAAIYIRVSTREQVENYSIQAQTEKLTALCRSKDWDVYDTFIDGGYSGSNMNRPALNEMLSKLHEIDAVVVYRLDRLSRSQRDTITLIEEYFLKNNVEFVSLSETLDTSSPFGRAMIGILSVFAQLERETIRDRMVMGKIKRIEAGLPLTTAKGRTFGYDVIDTKLYINEEEAKQLQLIYDIFEEEQSITLLQKRLKELGFKVRTYNRYNNWLTNDLYCGYVSYKDKVHVKGIHEPIISEEQFYRVQEIFTRMGKNPNMNRDSASLLNNLVVCGKCGLGFVHRRKDAMSRDKKYHYRYYSCKTYKHIHELEKCGNKIWRADKLEELIINYVNNYSLASRNADKEDELDSLNEKLKIEHAKKKRLFDLYINGSYEVSELDSMMNDINAQINHYESQVKANEELRKNKKIQENLAHLATVDFDSLEFREKQLYLKSLINKIYIDGEQVTIEWL

SEQ ID NO: 3828 - protein, 485 aa, synthetic construct
MTKKVAIYTRVSTTNQAEEGFSIDEQTDRLTKYAEAMGWQVSDTYTDAGLSGAKLERPAMQRLINDIENKAFDTVLVYKLDRLSRSVRDTLYLVKDVFTKNKIDFISLNESIDTSSAMGSLFLTILSAINEFERENIKERMTMGKLGRAKSGKSMMWTKTAFGYYHNRKTGILEIVPPQATIVEQIFTDYLSGISLTKLRDKLNESGHIGKDIPWSYRTLRQTLGNPVYCGYIKFKDSLFEGMHKPIIPYETYLKVQKELEERQQQTYERNNNPRPFQAKYMLSGMARCGYCGAPLRIVLGRRRKDGSRTMKYHCANRFPRKTRGVTVYNDNKKCDSGTYDLSNLENTVIDILIGFQENNDSLLKIINGNNQPILDTSSFKKQISQIDEKIQKNSDLYLNGFITMDELKDRTDSLQAEKRLLKAKISENKFNDSTDVFELVKTQLGSIPINELSYDNKRKIVNNLVSKVDVTADNVDIIFKFQLA

SEQ ID NO: 3829 - protein, 452 aa, synthetic construct
MKAAIYIRVSTREQVENYSIRAQTEKLTALCRSKDWDVYDIFIDGGYSGSNMNRPALNEMLSKLHEIDAVVVYRLDRLSRSQRDTITLIEEYFLKNNVEFVSLSETLDTSSPFGRAMIGILSVFAQLERETIRDRMVMGKIKRIEAGLPLTTAKGRTFGYDVIDTKLYINEEEAKQLQLIYDIFEEEQSITFLQKRLKKLGFKVRTYNRYNNWLTNDLYCGYVSYKDKVHVKGIHEPIISEEQFYRVQEIFTRMGKSPNMNRDSASLLSSLVVCSKCGLGFVHRRKDIMSRDKRYHYRYYSCKTYKHIHELEKCGNKIWRADKLEELIINRVNNYSLASRNVGKEDVLDSLNEKLKIEHAKKKRLFDLYINGSYEVGELDSMMKDIDAQINYYESLIEANEELKKNKKIQENLAELATVDFDSLEFREKQLYLKSLINKIYIDGEQVTIEWL

SEQ ID NO: 3830 - protein, 469 aa, synthetic construct
MSYTTPVRAAVYLRISEDRSGEQLGVARQREDCLKLCGQRKWVPVEYLDNDVSASTGKRRPAYEQMLADIAAGKIAAVVAWDLDRLHRRPIELEAFMSLADEKHLALATVAGDVDLATPQGRLVARLKGSVAAHETEHKRARQRRAARQKAERGHPNWSKAFGYLPGPNGPEPDPRTAPLVKQAYADILAGASLGDVCRQWDAAGAFTITGRPWTTTALSKFLRKPRNAGLRAYKGARYGPVDRDAIVGKAQWSPLVDEATFWAAQAVLDAPGRAPGRKSVRRHLLTGLAGCGKCGNHLSGSYRTDGRVVYVCKACHGVAILADNIEPILYHIVAERLAMPDAVDLLRREIHDVAEAETIRLELETLYGELDRLAVERAEGLLTARQVKISTDIVNAKITKLQAHQLDQERLRVFDGIPLGTPQVAGMIAELSPDRFRAVLDVLAEVVVQPVGKSGRVFNPERVQVNWR

SEQ ID NO: 3831 - protein, 452 aa, synthetic construct
MKAAIYIRVSTQEQVENYSIQAQTERLTALCRSKDWDVYDIFIDGGYSGSNMNRPALNEMLSKLHEIDAVVVYRLDRLSRSQRDTTTLIEEYFLKNNVEFVSLSETLDTSSPFGRAMIGILSVFAQLERETIRDRMVMGKIKRIEAGLPLTTAKGRTFGYDVIDTKLYINEEEAKQLQLIYDIFEEEQSITLLQKRLKELGFKVRTYNRYNSWLTNDLYCGYVSYKDKVHVKGIHEPIISEEQFYRVQEIFTRMGKNPNMNRDSASLLNSLVVCSKCGLGFVHRSKDTMSRGKKYHYRYYSCKTYKHTHELEKCGNKTWRADKLEELIINRVNNYSFASRNVGKEDELDSLNEKLKIEHAKKKRLFDLYINGSYEVSELDSMMDDIDAQINCYESQIEANGELKENRKIQENLADLATVDFDSLEFREKQLYLKSLINKIYIDGEQVTIEWL

SEQ ID NO: 3832 - protein, 485 aa, synthetic construct
MTKKVAIYTRVSTTNQAEEGFSIDEQIDRLTKYAEAMGWQVSGTYTDAGLSGAKLERPAMQRLINDIENKAFDTVLVYKLDRLSRSVRDTLYLVKEVFTKNKIDFISLNESIDTSSAMGSLFLTILSAINEFERENIKERMTMGKLGRAKSGKSMMWTRTAFGYYHNRKTGILEIVPLQATIVEQIFTDYLSGISLTKLRDKLNESGHIGKDIPWSYRTLRQTLDNPVYCGYIKFKDSLFEGMHKPIIPYETYLKVQKELEERQRQTYERNNNPRPFQAKYMLSGMARCGYCGAPLKIVLGHKRKDGSRTMKYHCANRFPRKTKGITVYNDNRKCDSGTYDLSILENTVIDNLIGFQENNDNLLKIINGNNQPILDTSSFKKQISQIDKKIQKNSDLYLNDFITMDELKDRTDSLQAEKKLLKAKISENKFNDSTDVFELVKTQLGSIPINELSYDNKKKIVNNLVSKVDVTADNVDIIFKFQLA

SEQ ID NO: 3833 - protein, 452 aa, synthetic construct
MKAAIYIRVSTREQVENYSIQAQTEKLTALCRSKDWDVYDIFIDGGYSGSNMNRPALNEMLSKLHEVDAVVVYRLDRLSRSQRDTITLIEEYFLKNNVEFVSLSETLDTSSPFGRAMIGILSVFAQLERETIRDRMVMGKIKRVEAGLPLTTAKGRTFGYDVIDTKLYINEEEAKQLQLIYDIFEEEQSITSLQRRLKKLGFRVRTYNRYNSWLTNDLYCGYVRYKDKVHVKGIHEPIISEEQFYRVQEIFARMGKNPNMNRDSASLLNNLVVCSKCGLGFVHRRKDTTSRGKKYHYRYYSCKTYKHTHELEKCGNKIWRADRLEELIINRVNNYSFASRNVDKEDELDSLNEKLKIEHAKRKRLFDLYINGSYEVSELDSMMNDIDAQINYYESQVEANEELKRNKKIQENLAYLATVDFDGLEFREKQLYLKSLINKIYIDGEQVTIEWL

SEQ ID NO: 3834 - protein, 485 aa, synthetic construct; identical to SEQ ID NO: 1279

SEQ ID NO: 3835 - protein, 469 aa, synthetic construct
MSYTTPVRAAVYLRISEDRSGEQLGVARQREDCLKLCDQRKWVPVEYLDNDVSASTGKRRPAYEQMLADITAGKIAAVVAWDLDRLHRRPIELEAFMSLADEKRLALATVAGDVDLATPQGRLVARLKASVAAHETEHKKARQRRAARQKAERGHPNWSKAFGYLPGPNGPEPDPRTAPLVKQAYADILAGESLGDVCRQWNDAGAFTITGRPWTTTTLSKFLRKPRNAGLRAYKGARYGPVDRDAIVGKAQWSPLVDEATFWAAQAVLDAPGRPPGRKSVRRHLLTGLAGCGKCGNHLAGSYRTDGRVVYVCKACHGVAILADNIEPILYHIVAERLAMPDAVDLLRREIHDAAEAETIRLELETLYDELDRLAVERAEGLLTARQVKISTDIVNAKIAKLQARQLGQGRLRVLDGIPLGTPQVAGVIAGLSPDRFRAVLDVLAEVVVQPVGQGGRIFSPERVQVNWR

SEQ ID NO: 3836 - protein, 469 aa, synthetic construct
MSYTTLVRAAVYLRISEDRSGEQLGVARQREDCLKLCDQRKWVPVEYLDNDVSASTGKRRPAYEQMLADITAGKIAAVVAWDLDRLHRRPIELEAFMSLADEKRLALATVAGDVDLATPQGRLVARLKGCVAAHETEHKKARQRRAARQKAERGCPNWSKAFGYLPGPNGPEPDPRTAPLVKQAYADILAGASLGDVCRRWNDAGAFTITGRPWTTTTLSKFLRKPRNAGLRAYKGARYGPVDRDAIVGKAQWSPLVDEATFWAAQAVLDAPGRAPGRKSVRRHLLTGLAGCGKCGNHLAGSYRTDGRVVYVCKACHGVAILADNIEPVLYHIVAERLAMPGAVDLLRRGIHDAAEAETIRLELETLYGELDRLAVERAEGLLTARQVKISTDIVNAKITKLQARQLDQERLRVFDGIPLGTPQVVGVIAELSPDRFRAVLDVLAEVVVLPVGKSGRTFNPERVQVNWR

SEQ ID NO: 3837 - protein, 452 aa, synthetic construct
MKAAIYIRVSTQEQVGNYSIQAQTEKLTALCRSKDWDVYDIFIDGGYSGSNMNRPALNEMLSKLHEIDAVVVYRLDRLSRSQRDTTTLIEEYFLKNNVEFVSLSETLDTSSPFGRAMIGILSVFAQLERETIRDRMVMGKIKRIEAGLPLTTAKGRTFGYDVIDTRLYINEEEAKQLQLIYDIFEEEQSITSLQKRLKKLGFKVRTYNRYNSWLTNDLYCGYVSYKDKVHVKGIHEPIISEEQFYRVQEIFTRMGKNPNMNRDSASLLSNLVVCSKCGLGFVHRSKDTMSRGKKYHYRYYSCKTYKHTHELEKCGNKTWRADKLEELIISRVNNYSFASRSVDKEDELESLNEKLKIEHAKRKRLFDLYINGSYEVSELDSMMNDIDAQINYYESQIEANEKLKENKKIQENLAELATVDFDSLEFREKQLYLKSLINKIYIDGVQVTIEWL

SEQ ID NO: 3838 - protein, 452 aa, synthetic construct
MKAAIYIRVSTREQVENYSIQAQTEKLTALCRSKDWDVYDIFVDGGYSGSNMNRPALNEMLSKLHEIDAVVVYRLDRLSRSQRDTITLIEEYFLKNNVEFVSLSETLDTSSPFGRAMIGILSVFAQLERETIRDRMVMGKIKRIEAGLPLTTAKGRTFGYDVIDTKLYINEEEAKQLQLIYDIFEEEQSITFLQKRLKKLGFKVRTYNRYNNWLTNDLYCGYVSYKDKVHVKGIHEPIISEEQFYRVQEIFTRMGKNPNMNRDSASLLNSLVVCSKCGLGFVHRRKDAMSRDKKYHYRYYSCKTYKHIHELEKCGNKIWRADKLEELIINRVNNYSLASRNAVKEDELGSLNEKLKIEHAKKKRLFDLYINGSYEVSELDSMMNDIEAQINYYESQIKANEELKKNKQIQENLADLATVDFDSLEFREKQLYLKSLINKIYIDGELVTIEWL

SEQ ID NO: 3839 - protein, 452 aa, synthetic construct
MKAAIYIRVSTREQVENYSIQAQTEKLTALCRSKDWDVYDIFIDGGYSGSNMNRPALNEMLSKLHEIDAVVVYRLDRLSRSQRDTITLIEEYFLKNNVEFVSLSETLDTSSPFGRAMIGILSVFAQLERETIRDRMVMGKIKRIEAGLPLTTAKGRTFGYDVIDTKLYINEEEAKQLQLIYDIFEEEQSITFLQKRLKKLGFKVRTYNRYNNWLTNDLYCGYVSYKDKVHVRGIHEPIISEEQFYRVQEIFTRMGKNPNMNRDSASLLNNLVVCSKCGLGFVHRRKDAMSRDKKYHYRYYSCKTYKHIHELEKCGNKIWRADKLEELIINRVSDYSLASRNVDKEGELDSLNEKLKIEHAKKKRLFDLYLNGSYEVSELDSMMNDIDAQISYYESQMEANEALVKNKKIQENLANLATVDFDSLEFREKQLYLKSLINKIYIDGEQVTIEWL

SEQ ID NO: 3840 - protein, 452 aa, synthetic construct
MKAAIYIRVSTQEQVGNYSIQAQTEKLTALCRSKGWDVYDIFIDGGYSGSNMNRPALNEMLSKLHEIDAVVVYRLDRLSRSQRDTTTLIEEYFLKNNVEFVSLSETLDTSSPFGRAMIGILSVFAQLERETIRDRMVMGKIKRIEAGLPLTTAKGRTFGYDVIDTKLYINEEEAKQLQLIYDIFEEEQSITFLQKRLKKLGFKVRTYNRYSNWLTNDLYCGYVSYKDKVHVKGIHEPIISEEQFYRVQEIFARMGKNPNMNRASASLLSNLVVCSKCGLGFVHRSKDTMSRGKKYHYRYYSCKTYKHTHELEKCGNKTWRADKLEGLIINRVINYSFASRNVDKEDELDSLNEKLKIEHAKRKRLFDLYISGSYEVSELDSMMNDIDAQINYYESQIEANEELKKNKKIQENLADLATVDFDSLEFREKQLYLKSLINKIYIDGEQVTIEWL

SEQ ID NO: 3841 - protein, 469 aa, synthetic construct
MSYTTPVRAAVYLRISEDRSGEQLGVARQREDCLKLCGQRKWEPVEYLDNDVSASTGKRRPAYEQMLADITAGKIAAVVAWDLDRLHRRPIELEAFMCLADEKRLALATVAGDVDLATPQGRLVARLKGSVAAHETEHKKARQRRAARQKAERGHPNWSKAFGYLPGPNGPEPDPRTAPLVKQAYADILAGASLGDVCRQWNSAGAFTITGRPWTTTTLSKFLRKPRNAGLRAYKGARYGPVDRDAIVGKAQWSPLVDEATFWAAQAVLDAPGRAPGRKSVRRHLLTGLAGCGKCGNHLAGSYRTDGKVVYVCKACHGIAILADNIEPILYHIVAERLAMPDAVDLLRREIHDAAEAEAIRLELETLYGELDRLAVERAEGLLTARQVKISTDIVNAKITKLQARQLDQERLRVFDGIPLGTPQVAGMIAELSPDRFRAVLDVLAEVIVQPVGKSGRTFNPERVRVNWR

SEQ ID NO: 3842 - protein, 452 aa, synthetic construct
MKAAIYIRVSTREQVENYSIQAQTEKLTALCRSKDWDVYDIFIDGGYSGSNMNRPALNEMLSKLHEVDAVVVYRLDRLSRSQRDTITLIEEYFLKNNVEFVSLSETLDTSSPFGRAMISILSVFAQLERETIRDRMVMGKIKRIEAGLPLTTAKGRTFGYDVIDTKLYINEEEAKQLRLIYDIFEEEQSITFLQKRLKKLGFKVRTYNRYNSWLTNDLYCGYVSYKDKVHVKGIHEPIISEEQFYRVQEIFTRMGKNPNMNRDSASLLNNLVVCSKCGLGFVHRRKDTTSRGKKYHYRYYSCKTYKHIHELEKCGNKIWRADKLEELVINRVNNYSFASRNVDKEDELDSLNEKLKIEHAKKKRLFDLYINGSYEVSELDSMMVDIDAQINYYESQIEANEELRKNKKIQENLADLATVDFDSLEFREKQLYLKSLINKIYIDDEQVTIEWL

SEQ ID NO: 3843 - protein, 485 aa, synthetic construct
MTKKVAIYTRVSTTNQAEEGFSIDEQIDRLTKYAEAKGWQVSDTYTDAGISGAKLERPAMRRLVNDIENKAFDTVLVYKLDRLSRSVRDTLYLVKDVFTKNKIDFISLNESIDTSSAMGSLFLTILSAINEFERENIKERMTMGKLGRAKSGKSMMWTKTAFGYYHNRKTGILEIVPLQATIVEQIFTDYLSGISLTKLRDKLNESGHIGKDIPWSYRTLRQTLDNPVYCGYIKFKDNLYEGMHKPIIPYETYLKAQKELKERQQQTYERNNNPRPFQAKYMLSGMARCGYCGAPLKIVLGHKRKDGSRTMKYHCTNRFPRKTKGVTVYNDNKKCDSGTYDLSDLENTVIDSLIGFQENNDSLLKIINGNNQPILDTSSLKKQISLIDKKIQKNSDLYLNDFITMDELKDRTDSLQAEKKLLKAKISESKFNDSADVFELVKTQLGSIPINELSYDNKKKIVNNLVSKVDVTADNVDIIFKFQLA

SEQ ID NO: 3844 - protein, 469 aa, synthetic construct; identical to SEQ ID NO: 2358

SEQ ID NO: 3845 - protein, 452 aa, synthetic construct
MKAAIYIRVSTREQVENYSIQAQTEKLTALCRSKDWDVYDIFIDGGYSGSNMNRPALNEMLSRLHEIDAVVVYRLDRLSRSQRDTITLIEEYFLKNNVEFVSLSETLDTSSPFGRAMIGILSVFAQLERETIRDRMVMGKIKRVEAGLPLTTAKGRTFGYDVIDTKLYINEEEAKQLQLIYDIFEEEQSITFLQKRLKKLGFKVRTYSCYNNWLTNDLYCGYVSYKDKVHVKGIHEPIISEEQFYRVQEIFTRMGKNLNMNRDSASLLNGLVVCSKCGQGFVHRRKDTISRGKKYHYRYYSCKTYKHTHELEKCGNKIWRADKLEELIINRVNNYSFASRNVDKEDDLDSLNEKLKIEHAKKRRLFDLYINGSYEVSELDSMMNDIDAQIDYYESQIEANEELKKNKKIQENLADLATVDFDSLEFREKQRYLKSLINKIHIDGEQVTIEWL

SEQ ID NO: 3846 - protein, 470 aa, synthetic construct
MSYTTPVRAAVYLRISEDRSGEQLGVARQREDCLKLCDQRKWVPVEYLDNDVSASTGKHRPAYEQMLADITAGKIAAVVAWDLDRLHRRPIELEAFMSLADERRLALATVAGDIDLATPQGRLVARLKGSVAAHETEHKKARQRRAARQKAEHGLPNWSKAFGYLPGPNGPEPDPRTAPLVKQAYAGILAGASLGDVCRQWNDAGAFTITGRPWTTTTLSKFLRKPRNAGLRAYKGARYGPVDRDAIVGKAQWSPLVDEATFWAAQAVLDAPGRAPGRKSVRRHLLTGLAGCGKCGNHLAGSYRTDGRVVYVCKACHGVAILADNIEPILYHVVAERLAMPDAVDLLRREIHDAAEAEAIRLELETLYGELDRLAVERAEGLLTARQVKISTDIVNAKITKLQARQLDQERLRVFDGIPLGTPQVAGMIAELSPDRFRAVLDVLAEVVVQPVGKSGRIFNPERVQVNWRQ

SEQ ID NO: 3847 - protein, 452 aa, synthetic construct
MKAAIYIRVSTREQVENYSIQAQTEKLTALCRSKDWDVYDTFIDGGYSGSNMNRPALNEMLSKLHEIDAVVVYRLDRLSRSQRDTITLIEEYFLKNNVEFVSLSETLDTSSPFGRAMIGILSVFAQLERETIRDRMVMGKIKRIEAGLPLTTAKGRTFGYDVIDTKLYINEEEAKQLQLIYDIFEEEQSITFLQKRLKKLGFKVHTYNRYNNWLTNDLYCGYVSYKDKVHVKGIHEPIISEEQFYRVQEIFTRMGKNPNTNRDSASLLNNLVVCSKCGLGFVHRRKDTMSRGKKYHYRYYSCKTYKHTHELEKCGNKIWRADKLEELIINRVNNYSFASRNVDKEDELDSLNEKLKVERAKKRRLFDLYINGSYEASELDSMMNDIDAQINYYESQIEVNEELEKSKRIQENLANLATVDFDSLEFREKQLYLKSLINKIYIDGEQVTIEWL

SEQ ID NO: 3848 - protein, 485 aa, synthetic construct
MTKKVAIYTRVSTTHQAEEGFSIDEQIDRLTKYAEAMGWQVSDTYTDAGFSGAKLERPAMQRLINDIENKAFDTVLVYKLDRLSRSVRDTLYLVKDVFTKNKIDFISLNECIDTSSAMGSLFLTILSAINEFERENIKERMTMGKLGRAKSGKSMMWTKTAFGYYHNRKTGILEIVPLQATIVEQIFTDYLSGISLTKLRDKLNESGHVGKDIPWSYRTLRQTLDNPVYCGYIKFKDSLFEGMHKPIIPYETHQKVQKELEERQQQTYVRNNNPRPFQAKYMLSGVARCGYCGAPLRIVLGRKRKDGSRTMKYHCANRFPRKTRGITVYNDNKKCDSGTYDLSNLENTVINNLIGLQENNDSLLKIINGNNQPILDTSSFKKQISQIDKKIQKNSDLYLNDFITMAELKDRTDSLQAEKKLLKAKISENKFNNSTDVFELVKTQLGSIPINELSYDNKKKIVNNLVSKVDVTADNVDIIFKFQLA

SEQ ID NO: 3849 - protein, 452 aa, synthetic construct
MKAAIYIRVSTREQVENYSIQAQTEKLTALCRSKDWDVYDIFIDGGYSGSNMNRPALNEMLSKLHEIDAVVVYRLDRLSRSQRDTITLIEEYFLKNNVEFVSLSETLDTSSPFGRAMIGILSVFAQLERETIRDRMVMGKIKRIEAGLPLTTAKGRTFGYDVIDTKLYINEEEAKQLQLIYDIFEEEQSITFLQKRLKELGFKVRTYNRYNNWLTNDLYCGYVSYKDKVHVKGIHEPIISEEQFYRVQEIFTRMGKNPNMNRDSASLLSGLVVCSKCGLGYVHRRKDTTSRGKKYHYRYYSCKTYKHTHELEKCGNKIWRADKLEELIINRVNNYSFASRNADKEDELDSLSEKLKIEHAKRKRLFDLYINGSYEVSELDSMMNDIDAQINYYESQIEVNEELKKDKKIQEGLANLATVDYDSLEFREKQLYLKSLINKIYIDGEQVTIEWL

SEQ ID NO: 3850 - protein, 452 aa, synthetic construct
MKAAIYIRVSTQEQVGNYSIQAQTEKLTALCRSKDWDVYDIFIDGGYSGSNMNRPALNEMLSKLHEIDAVVVYRLDRLSRSQRDTTTLIEEYFLKNNVEFVSLSETLDTSSPFGRAMIGILSVFAQLERETIRDRMVMGKIKRIEAGLPLTTAKGRTFGYDVIDTKLYINEEEAKQLQLIYDIFEEVQSITFLQKRLKKLGFKVRAYNRYNNWLTNDLYCGYVSYKDKVHVKGIHEPIISEEQFYRVQEIFTRMGKSPNMNRDSASLLNNLVVCSKCGLSFVHRRKDTMSGGKKYHYRYYSCKTYKHAHELEKCGNKTWRADKLEELIINRVNNYSFASRNADKEDELDSLSEKLKIEHAKKKRLFDLYINGSYEVSELDSMMNDVNAQINYYESQIEANEKLRKNKKIQENLADLAAVDFDSLEFREKQLYLKGLINKIYIDGEQVTIEWL

SEQ ID NO: 3851 - protein, 485 aa, synthetic construct
MTKKVAIYTRVSTTNQAEEGFSIDEQIDRLTKYAEAMGWQVSDTYTDAGLSGAKLERPAMQRLINDIENKAFDTVLVYKLDRLSRSVRDTLYLVKDVFTKNKIDFISLNESIDTSSAMGSLFLTILSAINEFERENIKERMTMGKLGRAKSGKSMMWTKTAFGYYHNRKTGILEIVPLQATIVEQIFTDYLSGISLTKLRDKLNESGHIGKDIPWSYRTLRQTLDNPVYCGYIKFKDSLFEGMHRPIIPYETYLKVQKELEERQQQTYERNNNPRPFQAKYMLSGMARCGYCGAPLRIVLGHKRKDGSRTMKYHCANRFPRKTKGVTVYNDNKKCDSGTYDLSYLENTVIDNLIGFQENNDSLLKIINGNNQPILDTSSLKEQISLIDKKIQKNSDLYLNDFITMDELRDRTDSLQVEKKLLKAKIGENKFNDSTDVFERVKTQLGSIPINELSYDNKKRIVNNLVSKVDVTADNVDIIFKFQLA

SEQ ID NO: 3852 - protein, 452 aa, synthetic construct
MKAAIYIRVSTREQVENYSIQAQAEKLTALCRSKDWDVYDIFIDGGYSGSNLNRPALNEMLSKLHEIDAVVVYRLDRLSRSQRDTITLIEEYFLKNNVEFVSLSETLDTSSPFGRAMIGILSVFAQLERETIRDRMVMGKIKRIEAGLPLTTAKGRTFGYDVIDTKLYINEEEAKQLQLIYDIFEEEQSITFLQKRLKKLGFEVRTYNRYNNWLTNDLYCGYVSYKDKVHVKGIHEPIISEEQFYRVQEIFTRMGKNPNMNRDSASLLNNLVVCSRCGLGFVHRRKDTTSRGKKYHYRYYSCKTYKHTHELEKCGNKIWRADKLEELIINRVNNYSFASRSADKEDELDSLNEKLKIEHAKRKRLFDLYINGSYEVSELDSMMNDIDAQINYYESQIEANEGLKRNKKIQENLAELATVDFDSLEFREKQLYLKSLINKIYIDGEQVTIEWL

SEQ ID NO: 3853 - protein, 469 aa, synthetic construct
MSYTTPVRAAVYLRISEDRSGEQLGVARQREDCLKLCDQRKWVPVEYLDNDVSASTGKRRPAYEQMLADITAGKIAAVVAWDLDRLHRRPIELEAFMSLADEKRLALATVAGDVDLATPQGRLVARLKGSVAAHETEHKRARQRRAARQKAERGYPNWSKAFGYLPGPNGPEPDPRTAPLVKQAYADILAGASLGDVCRQWNDAGAFTITGRPWTTTTLSKFLRKPRNAGLRAYKGARYGPVDRNAIVGKAQWSPLVDEATFWAAQAVLDAPGRAPGRKSVRRHLLTGLAGCGKCGNHLAGSYRTDGRVVYVCKVCHGVAILADNVEPILYHIVAERLTMPDAVGLLRREIHDAAEAETIRLELETLYGELDRLAVERAEGLLTARQVKISTDIVNAKITKLQARQLDQERLRVFDGIPLGTPQVAGMIAELSPNRFRAVLDVLAEVVVQPVGKSGRIFNPERVQVNWR

SEQ ID NO: 3854 - protein, 452 aa, synthetic construct
MKAAIYIRVSTQEQVGNYSIQAQTEKLIALCRSKDWDVYDIFIDGGYSGSNMNRPALNEMLSKLHEIDAVVVYRLDRLSRSQRDTTTLIEEYFLKNNVEFVSLSETLDTSSPFGRAMIGILSVFAQLERETIRDRMVMGKIKRIEAGLPLTTAKGRTFGYNVIDTKLYINEEEANQLRLIYDIFEEEQSITFLQKRLKKLGFKVRTYNRYNNWLTNDLYCGYVSYKDKVHVKGIHEPIISEEQFYRVQEIFTRMGKNPNMNRDSASLLSNLVVCSKCGLGFVHRSKDTMSRGKKYHYRYYSCKTYKHTHELEKCGNKTWRADKLEELIINRVNNYSFASRNVDKEGELDSLNEKLKIEHAKKKRLFDLYINGSYEVSELDSMMNDIDARIDYYESQIEANEELKKNKKIQENLANPATVDFDSLEFREKQLYLKSLINKIYIDGEQVTIEWL

SEQ ID NO: 3855 - protein, 469 aa, synthetic construct
MNYTTPVRAAVYLRISEDRSGEQLGVARQREDCLKLCGQRKWVPVEYLDNDVSASTGKRRPAYEQMLADITAGKIAAVVAWDLDRLHRRPVELEAFMSLADEKRLALATVAGDVDLATPQGRLVARLKGSVAAHETEHKKERQRRAARQKAERGYPNWSKAFGYLPGPNGPEPDPRTAPLVKQAYADILAGASLGDVCRQWNDAGAFTITGRPWTTTTLSKFLRKPRNAGLRAYKGASYGPVDRDAIVGKAQWSPLVDEATFWAAQAVLDAPGRAPGRKSVRRHLLTGLAGCGKCGNHLAGSYRTDGRVVYVCKACHGVAILADNIEPILYRIVAERLAMPDAVDLLRREIHDAVEAETIRLELETLYGELDCLAVERAEGLLTARQVKISTDIVNAKITKLRARQQDQERLRVLDGIPLGTPQVAGMIAELSPDRFRAVLDVLAEVVVRPVGKSGRIFNPERVQVNWR

SEQ ID NO: 3856 - protein, 452 aa, synthetic construct
MKAAIYIRVSTREQVENYSIQAQTEKLTALCRSKDWDVYDVFIDGGYSGSNMNRPALNEMLSKLHEIDAVVVYRLDRLSRSQRDTITLIEEYFLKNNVEFVSLSETLDTSSPFGRAMIGILSVFAQLERETIRDRMVMGKIKRIEAGLPLTTAKGRTFGYDVIDTKLYINEEEAKQLRLIYDIFEEEQSITFLQKRLKKLGFKVRTYNRYNNWLTNDLYCGYVSYKDKVHVKGIHEPIISEEQFYRVQEIFTRMGKNPNMNRDSASLLNNLVVCSKCGLSFVHRRKDIVSHGKKYHYRYYSCKTYKHIHELEKCGNKIWRADKLEELIINRVNNYSIASRNADKEDELDSLNEKLKIEHAKKKRLFELYINGSYEVSELDSMMNDIDAQINYYESQIEANKELKKNRKIQENLADLATVDFGSLEFREKQLYLKSLISKIYIDGEQVTIEWL

SEQ ID NO: 3857 - protein, 469 aa, synthetic construct
MSYTTPVRAAVYLRISEDRSGEQLGVARQREDCLKLCGQRKWVPVEYLDNDVSASTGKRRPAYEQMLADITAGKIAAVVAWDLDRLHRRPIELEAFMSLADEKRLALATVAGDVDLATPQGRLVARLKGCVAAHETEHKKARQRRAARQKAERGLPNWSRAFGYLPGPNGPEPDPRTAPLVKQAYADILAGASLGDVCRQWNDAGALTITGRPWATTTLSKFLRKPRNAGLRAYKGARYGPVDRDAIVGKAQWSPLVDEATFWAAQAVLDAPGRAPGRKSVRRHLLTGLAGCGKCGNHLAGSYRTDGRVVYVCKACHGVAILADNIEPVLYHIVAERLAMPGAVDLLHREIHDAAEAETIRLELETLHGELDRLAVERAEGLLTARQVKISTDIVSAKITRLQARRLDQERLRVFNGIPLGTPQVAGMIAELSPDRFRAVLDVLAEVVVQPVGKSGRIFNPERVQVNWR

SEQ ID NO: 3858 - protein, 452 aa, synthetic construct
MKAAIYIRVSTREQVENYSIQAQTEKLTALCRSKDWDVYDIFIDGGYSGSNMSRPALNEMLSKLHEIDAVVVYRLDRLSRSQRDTITLIEEYFLKNNVEFVSLSETLDTSSPFGRAMIGILSVFAQLERETIRDRMVMGKIKRIEAGLPLTTAKGRTFGYDVIDTKLYINEEEAKQLQLIYDIFEEEQSITYLQKRLKKLGFKVRTYNRYNNWLTNDLYCGYVSYKDKVHVKGIHEPIISEEQFYRVQEIFTRMGKNPNMNRDSASLLNNLVVCSKCGLGFVHRRKDAMSRDKKYHYRYYSCKTYKHIHELEKCGNKIWRADKLEELIINRVNNYSLASRNVDKEDELDSLNEKLKIEHAKKKRLFDLYINGSYEVSELDSMMNDIDAQINCYESQIEANEELKKNKEIQENLAYLATVDFDSLEFREKQLYLKSLINKIYIDGEQVTIEWL

SEQ ID NO: 3859 - protein, 485 aa, synthetic construct
MTRKVAIYTRVSTTNQAEEGFSIDEQIDRLTKYAEAMGWQVSDTYTDAGFSGAKLERPAMQRLINDIESKAFDTVLVYKLDRLSRSVRDTLYLVKDVFTKNKIDFISLNESIDTSSAMGSLFLTILSAINEFERENIKERMTMGKLGRAKSGKSMMWTKTAFGYYHNRKTGILEIVPLQATIVEQIFTDYLSGISLTKLRDKLNESGHIGKDIPWSYRTLRQTLGNPVYCGYIKFKDSLFEGMHKPIIPYETYLKVQKELEERQQQTYERNNNPRPFQAKYMLSGMARCGYCGAPLRIVLGHKRKDGSRTMKYHCANRFPRKTKGVAVYNDNKKCDSGTYDLSNLENTVIDNLIGLQENNDNLLKIINGNNQPILDTSSFKKQISQIDKKIQKNSDLYLNDFITMDELRDRTDSLQAEKKLLKAKISENKFNDSTDVFELVKTQLGSIPINELSYDNKKKIVNNLVGKVDVTADNVDIIFKFQLA

SEQ ID NO: 3860 - protein, 469 aa, synthetic construct
MSYTTPVRAAVYLRISEDRSGEQLGVARQREDCLKLCGQRKWVPVEYLDNDVSASTGKRRPAYEQMLADITAGKIAAVVAWDLDRLHRRPIELEAFMSLADEKRLALATVAGDVDLATPQGRLVARLKGCVAAHETEHKKARQRRAARQKAERGHPNWSKAFGYLPGPNGPEPDPRTAPLVKQAYADVLAGASLGDVCRQWNDAGAFTITGRPWTTTTLSKFLRKPRNAGLRAYKGARYGPVDRDAIVGKAQWSPLVDEATFWAAQAVLDAPGRAPGRKSVRRHLLTGLAGCGKCGNHLAGSYRTDGRVVYVCKACHGVAILADNIEPILYHIVAERLAMPDAVDLLRREIHDVTEAETIRLELETLYGELDRLAVERAEGLLTARQVKISTDIVNAKITKLQARQLNQERLRVFDGIPLGTPQVAGMIAELSPDRFRAVLDVLAEVVVQPVGKSGRIFNPERVQVNWR

SEQ ID NO: 3861 - protein, 452 aa, synthetic construct
MKAAIYIRVSTREQVENYSIQAQTEKLTALCRSKDWDVYDIFIDGGYSGSNMNRPALNEMLSKLHEIDAVVVYRLDRLSRSQRDTITLIEEYFLKNNVEFVSLSETLDTSSPFGRAMIGILSVFAQLERETIRDRMVMGKIKRIEAGLPLTTAKGRTFGYDVIDTKLYINEEEAKQLQLIYDIFEEERSITLLQKRLKKLGFKVRTYNRYNSWLTNDLYCGYVSYKDKVHVKGIHEPIISEEQFYRVQEIFTRMGKNPNMNRDSASLLNNLVVCSKCGLGFVHRRKDIVSHGKKYHYRYYSCKTYKHIHELEKCGNKIWRADKLEELIINRVSNYSLASRNADKGDELDSLNEKLKTEHAKKKRLFDLYINGSYKVSELDSMMNDIDAQINYYESQIGANEELRKNRKVQENLAYLATVDFDSLEFREKQLYLKSLINKIYIDGEQVTIEWL

SEQ ID NO: 3862 - protein, 452 aa, synthetic construct
MRAAIYIRVSTREQVENYSIQAQTEKLTALCHSKDWDVYDIFIDGGYSGSNMNRPALNEMLSKLHEIDAVVVYRLDRLSRSQRDTITLIEEYFLKNNVEFVSLSETLDTSSPFGRAMIGILSVFAQLERETIRDRMVMGKIKRIEAGLPLTTAKGRTFGYDVIDTKLYVNEEEARQLQLIYDIFEEEQSITFLQKRLKKLGFKVRSYNRYSNWLTNDLYCGYVSYKDKVHVKGIHEPIISEEQFYRVQEIFARMGKNPNMNRDSASLLNNLVVCSKCGLGFVHRRKDAMSRDKKYHYRYYSCKTYKHIHELEKCGNKIWRADKLEELIINRVNNYSFASRNADKEGELDSLNEKLKIEHAKKKRLFDLYINGSYEVSELDSMMSDIDAQISYYESQIEANVELKKNKRIQGNLADLATVDFDSLEFREKQLYLKSLINKIYIDGEQVTIEWL

SEQ ID NO: 3863 - protein, 469 aa, synthetic construct
MCYTTPVRAAVYLRISEDRSGEQLGVARQREDCLKLCGQRKWEPVEYLDNDVSASTGKRRPAYEQMLADITAGKIAAVVAWDLDRLHRRPIELEAFMSLADEKRLALATVAGDVDLATPQGRLVARLKGSVAAHETEHKKARQRRAARQKAERGHPNWSRAFGYLPGPNGPEPDPRTAPLVKQAYADILAGASLGDVCRQWNDAGAFTITGRPWTTPTLSKFLRKPRNAGLRAYKGARFGPVDRDAIVGKAQWSPLVDEATFWAAQAVLDAPGRAPGRKSVRRHLLTGLAGCGKCGSHLAGSYRTDGRVVYVCKACHGVAILADNIEPILYHTVAERLAMPDAVDLLRREIHDAAEAETIRLELEALYGELDRLAVERAEGLLTARQVKISTDIVNAKITKLQVCQQDQERLRVLDGIPLGTPQVAGMIAELSPDRFRAVLDVLAEVVVQPVGKGGRIFNPERVQVNWR

SEQ ID NO: 3864 - protein, 452 aa, synthetic construct
MKAAIYIRVSTQEQVGNYSIQAQTEKLTALCRSKDWDVYDIFVDGGYSGSNMNRPALNEMLSKLHEIDAVVVYRLDRLSRSQRDTTTLIEEYFLKNNVEFVSLSETLDTSSPFGRAMIGILSVFAQLERETIRDRMVMGKIKRIEAGLPLTTAKGRTFGYDVIDTKLYINEEEAKQLQLIYDIFEEEQSITSLQKRLKKLGFKVRTYNRYNNWLTNDLYCGYVSYKDKVHVKGIHEPIISEEQFYRVQEIFTRMGKNPNMNRDSASLLSNLVVCSKCGLGFVHRSKDTMSRGKKYHYRYYSCKTYKHTHELEKCGNKIWRADKLEELIINRVNNYSFVSRNVDKEDELDNLNEKLRIEHAKKKRLFDLYINGSYEVSELDGMMSDIDAQISYYESRIEANEELKRNKKIQENLADLATVGFDSLEFREKQLYLKSLINKIYIDGEQVTIEWL

SEQ ID NO: 3865 - protein, 452 aa, synthetic construct
MKAAIYIRVSTQEQVENYSIQAQTEKLTALCRSKDWDVYDIFIDGGYSGSNMNRPALNEMLSKLHEIDAVVVYRLDRLSRSQRDTTTLIEEYFLKNNVEFVSLSETLDTSSPFGRAMIGILSVFAQLERETIRDRMVMGKIKRIEAGLPLTTARGRTFGYDVIDTKLYINEEEAKQLQLIYDIFEEEQSITSLQKRLKRLGFKVRTYNRYNNWLTNDLYCGYVSYKDKVHVKGIHEPIISEEQFYRVQEIFTRMGKNPNMNRGSASLLNNLVVCSKCGLGFVHRSKDTMSRGKRYHYRYYSCKTYKHTHELEKCGNKTWRADKLEELIINRVNNYSIASRNVDKEDELDGLNEKLKIEHAKKKRLFDLYINGSYEVSELDSMMNDIDAQINYYESQIEANEELKKNKKIQENLVNLATVDFDSLEFREKQLYLKSLISKIYIDGEQVTIEWL

SEQ ID NO: 3866 - protein, 485 aa, synthetic construct
MTKKVAIYTRVSTTNQAEEGFSIDEQIDRLTKYAEAMGWRVSDTYTDAGFSGAKLERPAMQRLINDIENKAFDTVLVYKLDRLSRSVRDTLYLVKEVFTKNKIDFISLNESIDTSSATGSLFLTILSAINEFERENIKERMTMGKLGRARSGKSMMWTKTAFGYYHNRKTGILEIVPLQATIVEQIFADYLSGISLTKLRDKLNESGHIGKDIPWSYRTLRQTLDNPVYCGYIKFKDSLFEGMHKPIIPYETYLKVQKELEERQQQTYERNNNPRPFQAKYMLSGMARCGYCGAPLRIVLGHKRKDGSRTMKYHCANRFPRKTKGVTVYNDDKKCDSGTYDLSNLENTVIDNLIGFQENNDSLLKIINGNNQPILDTSSFKNQISQIDKKIQKNSDLYLNDFITMDELKDRTDSLQAEKKLLKAKISENKFNDSTDVLELVKSQLGSIPINELSYDNKKKIVNNLVSKVDVTADNVDIIFKFQLA

SEQ ID NO: 3867 - protein, 469 aa, synthetic construct
MSYTTPVRAAVYLRISEDRSGEQLGVARQREDCLKLCDQRKWVPVEYLDNDVSASTGKRRPAYEQMLADITAGKIAAVVAWDLDRLHRRPVELEAFMSLADEKRLALATVAGDVDLATPQGRLVARLKASVAAHETEHKKARQRRAARQKAERGLPNWSKAFGYLPGPNGPEPDPRTAPLVKQAYAGILAGASLGDVCRQWNDAGAFTITGRPWTTTTLSKFLRKPRNAGLRAYKGTRYGPVDRDAIVGKARWSPLVDEATFWAAQAVLDAPGRAPGRKSVRRHLLTGLAGCGKCGNHLAGSYRTDGRVVYVCKACHGVAILADNIEPFLYRIVTERLAMPHAVDLLRREIHDAAEAETIRLELETLYGELDRLAVERAEGLLTARQVKISTDIVNAKITKLQARQLDQERLRVFDGIPLGTPQVAGVIAELSPDRFRAVLDVLAEVVVQPVGKCGSIFNPERVQVNWR

SEQ ID NO: 3868 - protein, 469 aa, synthetic construct
MSYTTPVRAAVYLRISEDRSGEQLGVARQREDCLKLCDLRKWVPVEYLDNDVSASTGKRRPAYEQMLADITAGKIAAVVAWDLDRLHRRPIELEAFMSLADEKRLALATVAGDVDLATPQGRLVARLKGCVAAHETEHKKARQRRAARQKAERGHPNWSIAFGYLPGPNGPEPDPRTAPLVKQAYADILAGVSLGDVCRQWNDAGAFTITGRPWTTTTLSKFLRKPRNAGLRAYKGARYGPVDRDAIVGKAQWSPLVDEATFWAAQAVLDAPGRAPGRKSVRRHLLTGLAGCGKCGNYLAGSYRADGQVVYVCKACHGVSILAVNIVPILYHTVAERLAMPDAVDLLRREIHDAAEAETIRLELETLYGELDRLAVERAEGLLTARQVKISTDIVNAKISKLQARQLDQERLRVLDGIPLGTPQVAGMIAELSPNRFRAVLDVLAEVVVQPVGKSGGIFNPERVQVNWR

SEQ ID NO: 3869 - protein, 469 aa, synthetic construct
MSYTTPVRAAVYLRVSEDRSGEQLGVARQREDCLKLCDQRNWVPVEYLDNDVSASTGKRRPAYEQMLADIAAGKIAAVVAWDLDRLHRRPTELEAFMSLADEKRLALATVAGDVDLATPQGRLVARLKGSVAAHETEHKKARQRRAARQKAERGYPNWSKAFGYLSGPNGPEPDPRTAPLVKQAYADILAGASLGDVCRRWNDAGAFTITGRPWTTTTLSKFLRKPRNAGLCAYKGARYGPVDRDAIVGKAQWSPLVDEATFWAAQAVLDAPGRAPGRKSVRRHLLTGLAGCGKCGNRLAGSYRTDGRVVYVCKACHGVAILADNIEPILYHIVAERLAMPDAVDLLRREIHDAAEAETIRLELESLYGELDRLAVERAEGLLTARQVKISTDIVNAKIIKLQARQLDQERLRVFDGIPLGTPQVAGMIAELSPDRFRAVLDVLAEVVVQPVGKGGRIFNPERVQVTWR

SEQ ID NO: 3870 - protein, 485 aa, synthetic construct
MTKKVAIYTRVSTTNQAEEGFSIDEQIDRLTKYAEAMGWQVSDTYTDAGYSGAKLERPAMQRLINDIENRAFDTVLVYKLDRLSRSVRDTLYLVKDVFTKNKIDFISLNECIDTSSAMGSLFLTILGAINEFERENIRERMTMGKLGRAKSGKSMMWTKTAFGYCHNRKTGILEIVPLQATIVEQIFTDYLSGISLTKLRDKLNESGHIGKDIPWSYRTLRQTLDNPVYCGYIKFKDSLFEGMHKPIIPYETYLKVQKELKERQQQTYERNNNPRPFQAKYMLSGMARCGYCGAPLRIVLGHKRKDGGRTMKYHCANRFPRKTKGVTVYNDNEKCDSGTYDLSNLENTVIDNLISFQENDDSLLKIINGNNQPILDTSSFKKQISQIDKKIQKNSDLYLNDFITMDELKVRTDSLQAEKKLLIAKISENKFNDSTDVLELVKTQLGSIPINELSYDNKKKIVNNLVSKVDVTADNVDIIFKFQLE

SEQ ID NO: 3871 - protein, 452 aa, synthetic construct
MKAAIYIRVSTREQVENYSIQAQTEKLTALCRSKDWDVYDIFIDGGYSGSNMNRPALNEMLSKLHEVDAVVVYRLDRLSRSQRDTITLIEEYFLKNNVEFVSLSETLDTSSPFGRAMIGILSVFAQLERETIRDRMVMGKIKRIEAGLPLTTAKGRTFGYDVIDARLYINEEEAKQLQLIYDIFEEVQSITFLQKRLKELGFKVRTYNSYNNWLTNDLYCGYVSYKDKVHVKGIHEPIISEEQFYRVQEIFARMGKNPNMNRDSASLLNNLVVCSKCGLGFVHRRKDAMSRDKKYHYRYYSCKTYKHIHELEKCGNKIWRADKLEELIINRVNSYSLASRNVDKEDELDSLNEKLKIEHAKKKRLFDLYINGSYEVSELDSMMSDIDAQISYYESQIEANEGLKKNKKIQENLADLATVDFDSLEFREKQLYLKSLINKIYIDGEQVTIEWL

SEQ ID NO: 3872 - protein, 452 aa, synthetic construct
MKAAIYIRVSTREQVENYSIQAQTEKLTALCRSKDWDVYDIFIDGGYSGSNMSRPALNEMLSKLHEIDAVVVYRLDRLSRSQRDTITLIEEYFLKNNVEFVSLSETLDTSSPFGRAMIGILSVFAQLERETIRDRMVMGKIKRIEAGLPLTTAKGRTFGYDVIDTKLYINEEEAKQLQLVYDIFEEEQSITSLQKRLKKLGFKVRTYNRYNNWLTNDLYCGYVSYKDKVHVKGIHEPIISEEQFYRVQEIFTRMGKNPNMNRDSASLLNNLVVCSKCGLGFVHRRKDIMSRGKKYHYRYYSCKTYKHIHELEKCGNKIWRADKLEELIINRVNNYSLAGRNVDKEGELDSLNEKLKIEHAKKKRLFDLYINGSYEVSELDSMMNDIDAQINYYENQIEANEELRKTKKIQENLANLATVDFDSLEFREKQLYLKGLINKIYIDGEQVTIEWL

SEQ ID NO: 3873 - protein, 452 aa, synthetic construct
MKAAIYIRVSTREQVENYSIQAQTEKLTALCRSKDWDVYDIFIDGGYSGSNMNRPALNEMLSKLHEIDAVVVYRLDRLSRSQRDTITLIEEYFLKNNVEFVSLSETLDTSSPFGRAMIGILSVFAQLERETIRDRMVMGKIKRIEAGLPLTTAKGRTFGYDVVDTKLYINEEEARQLRLIYDIFEEEQSITFLQKRLKKLGFKVHTYNRYNNWLTNDLYCGYVSYKDKVHVKGIHEPIISEEQFYRVQEIFARMGKNPNMNRESASLLNNLVVCSKCGLGFVHRRKDAMSRDKKYHYRYYSCKTYKHIHELEKCGNKIWRADKLEELIINRVNNYSLASRNVDKEDELDSLNGKLKIEHAKKKRLFDLYINGSYEMSELDSMMNDIDAQINYYESQIEANEELKKNKKIQENLAYLATVDFDSLEFREKQLYLKSLINKIYIDGEQVTIEWL

SEQ ID NO: 3874 - protein, 485 aa, synthetic construct
MTKKVAIYTRVSTTNQAEEGFSIDEQIDRLTKYAEAMGWQVSDTYTDAGFSGAKLERPAMQRLINDIENKAFDTVLVYKLDRLSRSVRDTLYLVKDVFTKNKIDFISLNESIDTGSAMGSLFLTILSAINEFERENIKERMTMGKLGRAKSGKSMMWTKTAFGYYHNRKTGILEIVPLQATIVEQIFTDYLSGISLTKLRDKLNESGHIGKDIPWSYRTLRQTLDNPVYCGYIKFKGSLFEGMHKPIIPYGTYLKVQKELEERQRQTYERNNNPRPFQAKYMLSGMARCGYCGAPLKIVLGHRRKDGSRTMKYHCANRFPRKTKGVTVYNDNKKCDSGTYDLSNLENTVIDNLIGFQENDDSLLKIINGNNQPILGTSSLKKQISQIDKKIQKNSDLYLNDFITMDELKDRTDSLQAEKRLLKAKISENKFNDSTDVFELVKTQLGSIPINELSYDNKKKIVNNLVSKVDVTADSVDIIFKFRLS

SEQ ID NO: 3875 - protein, 469 aa, synthetic construct
MSYTTPVRAAVYLRISEDRSGEQLGVARQREDCLKLCDQRKWVPVEYLDNDVSASTGKRRPAYEQMLADITAGKIAAVVAWDLDRLHRRPIELEAFMSLADEKRLALATVAGDVDLATPQGRLVARLKGSVAAHETEHKKARQRRAARQKAERGHPNWSKAFGYLPGPNGPEPDPRTAPLVKQAYADILAGASLGDVCRQWNDAGAFTITGRPWTTTTLSKFLRKPRNAGLRAYKGARYGPVDRNAIVGKAQWSPLVDEATFWAAQAVLDAPGRAPGRKSVRRHLLTGLAGCGKCGNHLAGSYRTDGRVVYVCKACHGVAILADNIEPILYHIVAERLAMPDAVGLLRREIHDAAEAETIRLELEALYGELDHLAVERAEGLLTARQVKIITDIVNAKITKLQARQLDQERLRVFDGIPLGTPQAAGIIAELSPDRFRAVLDVLAEVVVQPVGKSGRIFNPERVQVNWR

SEQ ID NO: 3876 - protein, 452 aa, synthetic construct
MKAAIYIRVSTREQVENYSIQAQTEKLTALCRSKDWDVYDIFIDGGYSGSNMNRPALNEMLSKLHEIDAVVVYRLDRLSRSQRDTVTLIEEYFLKNNVEFVSLSETLDTSSPFGRAMIGILSVFAQLERETIRDRMVMGKIKRIEAGLPLTTAKGRTFGYDVIDTKLYINEEEAKQLRLIYDIFEEEQSITFLQKRLKKLGFKVRTYNRYNNWLTNDLYCGYVSYKDKVHVKGIHEPIISEEQFYRVQEIFARMGKNPNMNRDSASLLNNLVVCSKCGLGFVHRRKDIMSHGKRYHYRYYSCKTYKHIHELEKCGNKIWRADKLEELIINRVNNYSLASRNTDKEDELDSLNEKLKIEHAKKKRLFDLYINGSYEVSELDSMMNDIDAQINYYESQIEANEELKKNKKIQENLAHLATVDFDSLEFREKQLYLKSLINKIYIDGEQVTIEWL

SEQ ID NO: 3877 - protein, 452 aa, synthetic construct
MKAAIYIRVSTREQVENYSIQAQTEKLTALCRSKDWDVYDVFIDGGYSGSNMNRPALNEMLSKLHEIDAVVVYRLDRLSRSQRDTITLIEEYFLKNNVEFVSLSETLDTSSPFGRAMIGILSVFAQLERETIRDRMVMGKIKRIEAGLPLTTAKGRTFGYDVIDTKLYINEEEAKQLRLIYDIFEEEQSITFLQKRLKKLGFKVRTYNRYNNWLTNDLYCGYVSYKDKVHVKGIHEPIISEEQFHRVQEIFTRMGKNPNMNRDSASLLNNLVVCSRCGLGFVHRRKDAMSRGKKYHYRYYSCKTYKHIHELEKCGNKIWRADKLEELIINRVNNYSLAGRNVDKEDELDSLNEKLRIEHAKKKRLFDLYINGNYEVSELDSMMNDIDAQINYYESQIEANEELKKNKQIQENLADLATVDFDSLEFREKQLYLKSLINKIYIDGEQVTIEWL

SEQ ID NO: 3878 - protein, 452 aa, synthetic construct
MKAAIYIRVSTREQVENYSIQAQTEKLTALCRSKDWDVYDTFIDGGYSGSNMNRPALNEMLSKLHEIDAVVVYRLDRLSRSQRDTITLIEEYFLKNNVEFVSLSETLDTSSPFGRAMIGILSVFAQLERETIRDRMVMGKIKRIEAGLPLTTAKGRTFGYDVIDTKLYINEEEAKQLQLIYDIFEEEQSITFLQKRLKKLGFKVHTYNRYNNWLTNDLYCGYVSYKDKVHVKGIHEPIISEEQFYRVQEIFARMGKNPNMNRDSMSLLNNLVVCGRCGLGFVHRRKDIMSRGKEYHYRYYSCKTYKHIHELEKCGNKIWRADKLEELIINRVNNYSLANRNVGKEDELDSLYEKLKIEHAKKKRLFDLYINGSFEVSELDSMMNDIDAQINYYESQIEANVELKKNKKIQENLAHLATVDFDSLEFREKQLYLKSLINKIHIDGEQVTIEWL

SEQ ID NO: 3879 - protein, 469 aa, synthetic construct
MSYTTPVRAAVYLRISEDRSGEQLGVARQREDCLKLCGQRKWVPVEYLDNDVSASTGKRRPAYEQMLADITAGKIAAVVAWDLDRLHRRPVELEAFMSLADEKRLALATVAGDVDLATPQGRLVARLKGCVAAHETEHKKARQRRAARQKAERGHPNWSKAFGYLPGPNGPEPDPRTAPLVKQAYADILAGASLGDVCRQWNGAGAFTITGRPWTTTTLSKFLRKPRNAGLRAYKGARYGPVDRDAIVGKAQWSPLVDEATFWAAQAVLDAPGRAPGRKSVRRHLLTGLAGCGKCGNHLAGSYRTDGQIVYVCKACHGVSILAVNIEPILYHIVAERLAMPDAVDLLRREIHDAAEAETIRLELETLYGELDSLAVERAEGLLTARQVKISTDIVNAKITKLQAHQLDQERLRVLDGIPLGTPQVAGVIAGLSPDRFRAVLDVLAEVVVQPAGKSGRIFNPERVQVNWR

SEQ ID NO: 3880 - protein, 485 aa, synthetic construct
MTKKVAIYTRVSTTNQAEEGFSIDEQIDRLTKCAEAMGWQVSDTYTDAGFSGAKLERPAMQRLINDIGNKAFDTVLVYKLDRLSRSVRDTLHLVKDVFTKNKIDFISLNESIDTSSAMGSLFLTILSAINEFERENIKERMTMGKLGRAKSGKSMMWTKTAFGYYHNRKTGILEIVPLQATIVKQIFTDYLSGISLTKLRDKLNESGHIGKDIPWSYRTLRQTLDNPVYCGYIRFKDSLFEGMHKPIIPYETYLKVQKELEERQQQTYERNNNPRPFQAKYMLSGMARCGYCGAPLRIVLGHKRKDGSRTMKYHCANRFPRKTKGVTMYNDNKKCDSGTYDLRNLENAVIGSLVGFQENNDSLLKIINGNNQPILDTSSFKKQISQIDKKIQKHSDLYLNDFITMDELRDRTDSLQAEKKLLEAKISENKLNDSTDVFELVKTQLGSIPINELSYDNKKKIVNNLVSKVDVTADNVDIIFKFQLA

SEQ ID NO: 3881 - protein, 452 aa, synthetic construct
MKAAIYIRVSTREQVENYSIQTQTEKLTALCRSKDWDVYDIFTDGGYSGSNMNRPALNEMLNKLHEIDAVVVYRLDRLSRSQRDTITLIEEYFLKNNVEFVSLSETLDTSSPFGRAMIGILSVFAQLERETIRDRMVMGKIKRIEAGLPLTTAKGRTFGYDVIDTKLYINEEEAKQLQLIYDIFEEEQSITLLQKRLKKLGFKVRTYNRYNSWLTNDLYCGYVSYRDKVHVKGIHEPIISEEQFHRVQEIFTRMGKNPNMNRDSASLLNSLVVCSKCGLGFVHRRKDTMSRGKKYHYRYYSCKTYKHTHELEKCGNKIWRADKLEELIINRVNNYSFASRNVEKEDELDSLNEKLKIEHAKRKRLFDLYINGSYEVSELDSMMSDIDAQINYYESQIEANEELKKNKKIQENLANLATVDYDSLEFREKQLYLRSLINKIYIDGEQVTIEWL

SEQ ID NO: 3882 - protein, 469 aa, synthetic construct
MSYTTPVRAAVYLRISEDRSGEQLGVARQREDCLKLCDQRKWVPVEYLDNDVSASTGKRRPAYEQMLTDITAGKIAAVVAWDLDRLHRRPIELEAFMSLADEKRLALATVAGDVDLATPQGRLVARLKASVAAHETEHKKARQRRAARQKAERGHPNWSKAFGYLPGPNGPEPDPRTAPLVKQAYADILAGASLGDVCRQWNDAGAFTITGRPWTTTTLSKFLRKPRNAGLRAYKGARYGPVDRDAIVGKAQWSPLVDEATFWAAQAVLDAPGRAPGRKSVRRHLLTGLAGCGKCGSHLVGSYRTDGRVVYVCKACHGVAILADNIVPILYRIVAERLAMPDAVDLLRREIHDAAEAETIRLELETLHGELDRLAVERAEGLLTARQVKISTDIVNAKIAKLQARQLDQGRLRVLDGIPLGTPQVAGVIAGLSPDRFRAVLDVLAEVVVQPVGKSGRMFNPERVQVNWR

SEQ ID NO: 3883 - protein, 452 aa, synthetic construct
MKAAIYIRVSTREQVENYSIQAQTEKLTALCRSKDWDVYDIFIDGGYSGSNMNRPALNEMLSKLHEIDAVVVYRLDRLSRSQRDTITLIEEYFLKNNVEFVSLSETLDTSSPFGRAMIGILSVFAQLERETIRDRMVMGKIKRIEAGLPLTTAKGRTFGYDVIDTKLYINEEEAKQLQLIYDIFEEEQSITFLQKRLKKLGFKVRTYNRYSNWLTNDLYCGYVSYKDKVHVKGIHEPIISEEQFYRVQEIFTRMGKNPNMNRGSASLLNNLVVCSRCGLGFVHRRKDIMSRDKKYHYRYYSCKTYKHIHELEKCGNKIWRADKLEELIINRVSNYSFASRNVDKEDELDSLNEKLKIEHAKKKRLFDLYISGSYEVSELDSMMSDVDAQISYYESQIEANEALIKNKKIQENLANLATVDFDSLEFREKQLYLKSLINKIYIDGEQVTIEWL

SEQ ID NO: 3884 - protein, 469 aa, synthetic construct
MSYTTPVRAAVYLRISEDRSGEQLGVARQREDCLELCDQRKWVPVEYLDNDVSASTGKRRPAYEQMLADIAAGKIAAVVAWDLDRLHRRPIELEAFMSLADEKRLALATVAGDVDLATPQGRLVARLKGSVAAHETEHKRARQRRAARQKAERGHPNWSKAFGYLPGPNGPEPDPRTAPLVERAYADILAGASLGDVCRQWNDAGAFTITGRPWTTTTLSKFLRKPRNAGLRAYKGARYGPVDRDAIVGKAQWSPLVDEATFWAAQAVLDAPGRAPGRKSVRRHLLTGLAGCGKCGNHLAGSYRTDGQIVYVCKACHGVSILAVNIEPILYRIVAERLAMPDAVDLLRREIHDAAEAGAIRLELETLYGELDCLAVERAEGLLTARQVKISTDVVNAKITKLQARQLDQERLRVLDGIPLGTPQVAGMIAELSPDRFRAVLDVLAEVVVQPVGKRGRVFNPERVQVSWR

SEQ ID NO: 3885 - protein, 469 aa, synthetic construct
MSYTTPVRAAVYLRISEDRSGEQLGVARQREDCLKLCDQRKWVPVEYLDNDVSASTGKRRPAYEQMLADITAGKIAAVVAWDLDRLHRRPIELEAFMSLADEKRLALATVAGDVDLATPQGRLVARLKGSVAAHETEHKKARQRRAARQKAERGYPNWSKAFGYLPGPNGPEPDPRTAPLVKRAYADILAGASLGDVCRQWNDAGAFTVTGRPWTTTTLSKFLRKPRNAGLRTYKGARYGPVDREAIVGKAQWSPLVDEATFWAAQAVLDAPGRAPGRKSVRRHLLTGLAGCGKCGNHLAGSYRTDGRVVYVCKACHGVAILADNIEPILCRTVAERLAMPDAVDLLRREIHDAAEAEAIRLELETLYGELDHLAVERAEGLLTARQVKISTDIVNAKITKLQTRQLDQERLRVFDGIPLGTPQVAGMIAELSPDRFRAVLDVLAEVVVQPVGKSGRVFNPERVQVNWR

SEQ ID NO: 3886 - protein, 469 aa, synthetic construct
MSYTTPVRAAVYLRISEDRSGEQLGVARQREDCLKLCDQRKWVPVEYLDNDVSASTGKRRPAYDQMLADITAGKIAAVVAWDLDRLHRRPIELEAFMSLADEKRLALATVAGDVDLATPQGRLVARLKGSVAAHETEHKKARQRRAARQKAERGHPNWSKAFGYLPGPNGPEPDPRTAPLVKQAYADILAGASLGDVCRQWNDAGAFTITGRPWATTTLSKFLRKPRNAGLRAYKGARYGPVDRDAIVGKAQWSPLVDEATFWAAQAVLDAPGRAPGRKSVRRHLLTGLAGCGKCGNHLAGSYRTDGRVVYVCKACHGVAILADNIEPILYHIVAERLAMPDAVDLLRREIHDAAEAETIRLGLETLYGELDRLAVERAEGLLTARQVKISTDIVNAKITKLRARQLDQERLRVLDGIPLGTPQVAGMIAELSPDRFRAVLNVLAEVVVRPVGKGGRILNPERVQVNWR

SEQ ID NO: 3887 - protein, 452 aa, synthetic construct
MKAAIYIRVSTREQVENYSIQAQTEKLTALCRSKDWDVYDIFIDGGYSGSNMNRPALNEMLSKLHEIDAVVVYRLDRLSRSQRDTITLIEEYFLKNNVEFVSLSETLDTSSPFGRAMIGILSVFAQLERETIRDRMAMGKIKRIEAGLPLTTAKGRTFGYDVIDTKLYINEEEAKQLQLIYDIFEEERSITFLQKRLKKLGFKVRTYNRYHNWLTNDLYCGYVSYKDKVHVKGIHEPIISEEQFYRVQEIFTRMGKSPNMNRDSASLLNNLVVCGKCGLGFVHRRKDAMSRDKKYHYRYYSCKTYKHIHELEKCGNKIWRADKLEELIINRVNNYSLASRNVDKEDELDSLNEKLKIEHAKKKRLFDLYINGSYEVSELDSMMNDIDAQINYYESQIEANEELKRNKKIQENLADLATVDFDSLEFREKQRYLRSLINKIYIDGEQVTIEWL

SEQ ID NO: 3888 - protein, 452 aa, synthetic construct
MKAAIYIRVSTREQVENYSIQAQTEKLTALCRSKDWDVYDIFIDGGYSGSNMNRPALNEMLSKLHEIDVVVVYRLDRLSRSQRDTITLIEEYFLKNNVEFVSLSETLDTSSPFGRAMIGILSVFAQLERETIRDRMVMGKIKRVEAGLPLTTAKGRTFGYDVIDTKLYINEEEAKQLRLIYDIFEEEQSITFLQKRLRKLGFKVRPYNRYNNWLTNDLYCGYVSYKDKVHVKGIHEPIISEEQFYRVQEIFTRMGKNPNMNRDSASLLNSLVVCSKCGLGFVHRRKDTTSRGKKYHYRYYSCKTYKHTHELEKCGNKIWRADKLEELIINRVNNYSFASRNVDKEGELDSLNEKLKIERAKRRRLFDLYLHGSYEVSELNSMMNDIDAQINYYESQVEANEELKKNKKIQETLADLATVDFDSLEFREKQLYLKSLISKIYIDGEQVTIEWL

SEQ ID NO: 3889 - protein, 452 aa, synthetic construct
MKAAIYIRVSTQEQVENYSIQAQTEKLTALCRSKDWDVYDIFIDGGYSGSNMNRPALNEMLSKLHEIDAVVVYRLDRLSRSQRDTATLIEEYFLKNNVEFVSLSETLDTSSPFGRAMIGILGAFAQLERETIRDRMMMGKIKRVEAGLPLTTAKGRTFGYDVIDTRLYINEEEAKQLQLIYDIFEEEQSITSLQKRLKKLGFKVRTYNRYNNWLTNDLYCGYVSYKDKVHVKGIHEPIISEEQFYRVQEIFTRMGKNPNMNRDSASLLNNLVVCSKCGLGFVHRSKDTMSRGKKYHYRYYSCKTYKHTHELEKCGNKTWRADKLEELIINRVNNYSFASRDVGREDELDSLHEKLKIEHAKKKRLFDLYINGSYEVSELDSRMSDIDAQINYYGSQIEANEELKKHKKTQENLAELAAVDFDSLEFREKQLYLKSLINKIYIDGEQVTIEWL

SEQ ID NO: 3890 - protein, 452 aa, synthetic construct
MKAAIYIRVSTREQVENYSIQAQTEKLTALCRSKDWDVYDIFIDGGYSGSNMNRPALNEMLSKLHEIDAVVVYRLDRLSRSQRDTITLIEEYFLKNNVEFVSLSETLDTSSPFGRAMIGILSVFAQLERETIRERMVMGKIKRIEAGLPLTTAKGRTFGYDVIDTKLYINEEEAKQLQLIYDIFEEEQSITFLQKRLKKLGFKVRTYNCYNNWLTNDLYCGYVSYKDKVHVKGIHEPIISEEQFYRVQEIFTRMGKNPNMNRDSASLLNNLVVCSKCGLGFVHRRKDTTGRGKKYHYRYYSCKTYKHIHELEKCGNKIWRADKLEELIINRVNNYSLASRNVVKEDELDSLNEKLKIEHAKKKRLFDLYINGSYDVSVLDSMMNDIDAQINYYESQIEANEGLKKNKKIQENLANLATVDFDSLEFREKQLYLKSLISKIYIDGEQVTIEWL

SEQ ID NO: 3891 - protein, 469 aa, synthetic construct
MSYTTPVRAAVYLRISEDRSGEQLGVARQREDCLKLCDQRRWVPVEYLDNDVSASTGRRRPAYEQMLADITAGKIAAVVAWDLDRLHRRPIELEAFMSLADEKRLALATVAGDVDLATPQGRLVARLKGSVAAHETEHKRARQRRAARQKAERGYPNWSKAFGYLPGPNGPEPDPRTAPLVKQAYADILAGASLGDVCRRWNDAGAPTITGRPWTTTTLSKFLRKPRNAGLRAYKGARYGPVDRNAIVGKAQWSPLVDEATFWAAQAVLDAPGRAPGRKSVRRHLLTGLAGCGKCGNRLAGSYRTDGRVVYVCKACHGVAILADNIEPILYHIVAGRLAMPDAVDLLRCEIHDAAEAETIRLGLETLYGELDRLAVERAEGLLTARQVKISTDIVNAKITKLQARQLDQERLRVFVGIPLGTPQVAGMIAGLSPDRFRAVLDVLAEVVVQPVGKSGRIFNPERVQVNWR

SEQ ID NO: 3892 - protein, 485 aa, synthetic construct
MTKKVAIYTRVSTTNQAEEGFSIDEQIDRLTKYAEAMGWQVSDTYTDAGLSGAKLERPAMRRLINDIENKAFDTVLVYKLDRLSRSVRDTLYLVKDVFTKNKIDFVSLNESIDTSSAMGSLFLTILSAINEFERENIKERMTMGKLGRAKSGKSMMWTKTAFGYHHNRKTGILEIVPLQATIVEQIFTDYLSGISLTKLRDKLNESGHIGKDIPWSYRTLRQTLDNPVYCGYIKFKDSLFEGMHKPIIPYETYLKVQKELEERQQQTYERNNNPRPFQAKYMLSGMARCGYCGAPLKIVLGHKRKDGSRTMKYHCANRFPRKTKGVTVYNDNKKCDSGTYDLSNLENTVIDNLIGFQENNDSLLKIINGNNQPILDTSSFEKQISQIDKKIQKNSDLYLNDFITVDELKDRTDSLQAEKKLLKAKISENKFNDGTDVFELVKTQLGSIPINELSYDNKKRIVNNLVSKVDVTADNVDIIFKFQLA

SEQ ID NO: 3893 - protein, 485 aa, synthetic construct
MTKKVAIYTRVSTTNQAEEGFSIDEQIDRLTKYAEAMGWQVSDTYTDAGFSGAKLERPAMQRLINDIEDKAFGTVLVYKLDRLSRSVRDTLYLVKEVFTKNKIDFISLSESIDTSSAMGSLFLTILSAINEFERENIKERMTMGKLGRAKSGKSMMWTKTAFGYYHNRKTGILEIVPLQATIVEQIFTDYLSGISLTKLRDKLNESGHIGKDIPWSYRTLRQTLDNPVYCGYIRFKDSLFEGMHKPIIPYETYLKVQKELEVRQQQTYKRNNNPRPFQAKYMLSGMARCGYCGAPLKIVLGHKRKDGSRSMKYHCANRFPRKTKGVTVYNDNKKCDSGTYDLSNLENTVIDSLIGFQENNDSLLEAINGNNQPILDTSSFKERISQIDKKIQKNSDLYLNDFITMDELRDRTDSLQAEKKLLKAKISENKFNDSTDVFELVKTQLGSIPINELSYDNKKKIVNNLVSKVDVTADNVDIIFKFQPA

SEQ ID NO: 3894 - protein, 452 aa, synthetic construct
MKAAIYIRVSTREQVENYSIQAQTEKLTALCRSKDWDVYDIFVDGGYSGSNMNRPALNEMLSKLHEIDAVVVYRLDRLSRSQRDTITLIEEYFLKNNVEFVSLSETLDTSSPFGRAMIGILSVFAQLERETIRDRMVMGKIKRIEAGLPLTTAKGRTFGYDVIDTKLYINEEEARQLQLIYDIFEEEQSITSLQKRLKELGFKVRTYNRYNNWLTNDLYCGYVSYKDKVHVKGIHEPIISEEQFYRVQEIFTRMGKNPNMNRDSASLLNNLVVCSKCGLGFVHRRKDAMSRDKKYHYRYYSCKTYKHIHELEKCGNKIWRADKLEELVIDRVNNYSLASRNVDKEDELDSLNEKLKIEHAKKKRLFDLYINGSYEVSELDSMMNDIDAQISYYESQIEANEELKKNKKIQENLADLATVDFDSLEFREKQLYLKSLINKIYIDGEQVTIEWL

SEQ ID NO: 3895 - protein, 485 aa, synthetic construct
MTKKVAIYTRVSTTNQAEEGFSIDEQVDRLTKYAEAMGWQVSDTYTDAGFSGAKLERPAMQRLINDIENKAFDTVLVYKLDRLSRSVRDTLYLVKDVFTINKIDFISLSESIDTSSAMGSLFLTILSAINEFERENIKERMTMGKLGRAKSGKSMMWTKTAFGYYHNRKTGILEIVPLQATIVEQIFTDYLSGISLTKLRDKLNEGGHIGKDIPWSYRTLRQTLDNPVYCGYIKFKGSLFEGMHKPIIPYETYLTVQKELEERQQQTYERNNNPRPFQAKYMLSGMARCGYCGAPLRVVLGHKRKDGSRTMKYHCANRFPRKTKGVTVYNDNKKCDSGTYDLSNLENTVIDNLIGLQESDDSLLKIINGNNQPILDTSSFKEQISLIDKKIQKNSDLYLNDFITMDELKDRTDSLQAEKKLLKAKISENKFNDSTDVFELVKTQLGSIPINELSYDNKKKIVNNLVSKVDVTAGNVDIIFKFQLA

SEQ ID NO: 3896 - protein, 452 aa, synthetic construct
MKAAIYIRVSTREQVENYSIQAQTEKLTALCRSKDWDVYDIFIDGGYSGSNMNRPALNEMLSKLHEIDAVVVYRLDRLSRSQRDTITLIEEYFLKNNVEFVSLSETLDTSSPFGRAMIGILSVFAQLERETIRDRMVMGKIKRIEAGLPLTTAKGRTFGYDVIDTKLYINEEEARQLQLIYDIFEEEQSITFLQKRLKKLGFKVRTYNRYNNWLTNDLYCGYVSYKDKVHVKGIHEPIISEEQFYRVQEIFARMGKNPNMNRDSASLLNNLVVCSRCGLGFVHRRKDTTSRDKKYHYRYYSCKTYKHIHELEKCGNKIWRADKLEELVIKRVNNYSLASRNVDKEDDLDSLSEKLKIEHAKKKRLFDLYINGSYEVSELDSMMNDINAQINYYESQIEANEELKKNKKIQENLANLATVDFDSLEFREKQLYLKSLINKIYIDGEQVTIEWL

SEQ ID NO: 3897 - protein, 469 aa, synthetic construct
MSYTTPVRAAVYLRISEDRSGEQLGVARQREDCLKLCDQRNWVPVEYLDNDVSASTGKRRPAYEQMLADITAGKIAAVVAWDLDRLHRRPIELEAFMSLADEKRLALATVAGDVDLATPQGRLVARLKGSVAAHETEHKKARQRRAARQKAERGHPNWSKAFGYLPGPNGPEPDPRTAPLVKQAYADILAGASLGDVCRRWNDAGAFTITGRPWTTTTLSKFLRKPRNAGLRAYKGARYGPVDRDAIVGKAQWSPLVDEATFWATQAVLDAPGRAPGRKSVRRHLLTGLAGCGKCGNHLAGSYRTDGRVVYVCKACHGVAILADNIEPILYHIVAERLATPDAVDLLRREIHDAAEAETIRLELETLYGELDRLAVERAEGLLTARQVKISTDIVSAKITKLQAHQLDQERLRVLEGIPLGTPQVAGMIAELSPDRFRAVLDVLAEVVVQPVGKSGRIFNPERVQVSWR

SEQ ID NO: 3898 - protein, 485 aa, synthetic construct
MTKKVAIYTRVSTTNQAEEGFSIDEQIDRLTKYAEAMGWQVSDTYTDAGYSGAKLERPAMQRLINDIENKAFDTVLVYKLDRLSRSVRDTLYLVKDVFTKNRVDFISLNESINTSSAMGSLFLTILSAINEFERENIKERMTMGKLGRAKSGKSMMWTKTAFGYYHNRKTGILEIVPLQATIVEQIFTDYLSGISLTKLRDKLNESGHIGKDIPWSYRTLRQTLDNPVYCGYIKFKDSLFEGMHKPIIPIETYLKVQKELEERQQQTYERNNNPRPFQAKYMLSGMARCGYCGAPLRIVLGHKRRDGSRTMKYHCANRFPRKTKGITVYNDNKKCDSGTYDLSNLENAVINSLIGLQENNDSLLKIINGNNQPIPDTSSFKKQISQIDKKIQKNSDLYLNDFITMDELKDRTDSLQAEKKLLEAKISENKFNDSTDVFELVKTQLGSIPINELSYDNKKKIVNNLVGKVDVTADNMDIIFKFQLA

SEQ ID NO: 3899 - protein, 469 aa, synthetic construct
MSYTTPVRAAVYLRISEDRSGEQLGVARQREDCLKLCGQRKWVPVEYLDNDVSASTGKRRPAYEQMLADIAAGKIAAVVAWDLDRLHRRPIELEAFMSLADEKRLALATVAGDVDLATPQGRLVARLKGSVAAHETEHKRARQRRAARQKAERGHPNWSKAFGYLPGPNGPEPDPRTAPLVKQAYADILAGASLGDVCRQWNDAGAFTITGRPWTTTTLSKFLRKPRNAGLRAYKGARYGPVDRDAIVGKAQWSPLVDEATFWAAQAVLDAPGRAPGRKSVRRHLLTGLAGCGRCGNHLAGSYRTDGKVVYVCKACHGVSILADNIEPILYHIVAERLAMPGAVDLLRREIHDAAEAETIRPELETLYGELDHLAVERAEGLLTARQVKISTDIVNAKITKLQARQLDQERLRVFDGIPLGTPQVAGVIAELSPDRFRAVLDVLAEVVVQPVGKGGRIFNPERVQVNWR

SEQ ID NO: 3900 - protein, 469 aa, synthetic construct
MSYTTPVRAAVYLRISEDRSGEQLGVARQREDCLKLCDQRKWVPVEYLDNDVSASTGKRRPAYEQMLADITAGKIAAVVAWDLDRLHRRPIELEAFMSLADEKRLALATVAGDVDLATPQGRLVARLKGSVAAHETEHKRARQRRAARQKAERGHPNWSKAFGYLPGPNGPEPDPRTAPLVKQAYADILAGASLGDVRRQWNDAGAFTITGRPWTTTTLSKFLRKPRNAGLRAYKGARYGPVDRDAIVGKAQWSPLVDEATFWAAQAVLDAPGRAPGRKSVRRHLLTGLAGCGKCGNHLAGSYRTDGRVVYVCKACHGVAILADNIEPILYHIVAERLAMPDAVDLLRRVIHDAAEAETIRLELETLYGELDRLAVERAEGLLTARQVKISTDIVHAKITKLQVRQLDQERLRVLDGIPLGTPQVAGVIAELSPDRFRAVLDVLAEVVVQPVGKSGRIFNPERVQVNWR

SEQ ID NO: 3901 - protein, 452 aa, synthetic construct
MKAAIYIRVSTREQVENYSIQAQTEKLTALCRSKDWDVYDIFIDGGYSGSDMNRPALNEMLSKLHEIDAVVVYRLDRLSRSQRDTITLIEEYFLKNNVEFVSLSETLDTSSPFGRAMIGILSVFAQLERETIRDRMVMGKIKRIEAGLPLTTAKGRTFGYDVIDTKLYINEEEAKQLRLIYDIFEEEQSITSLQKRLKKLGFKVHTYNRYNNWLTNDLYCGYVSYKDKVHVKGIHEAIISEEQFYRVQEIFARMGKNPNVNRDSASLLNNLVVCSKCGLGFVHRRKDTTSRGKKYHYRYYSCKTYKHTHELEKCGNKIWRADKLEELIINRVNNYSFASRNVDKEDELDSLNEKLKIEHAKRKRLFDLYTNGSYEVSELDSMMNDIDAQINYYESQIEANEELRKNKKTQENLANLVTVDYDSLEFREKQLYLKSLINKIYIDGEQVTIEWL

SEQ ID NO: 3902 - protein, 452 aa, synthetic construct
MKAAIYIRVSTREQVENYSIQAQTEKLTALCRSKDWDVYDIFIDGGYSGSNMNRPALSEMLSKLHEIDAVVVYRLDRLSRSQRDTITLIEEYFLKNNVEFVSLSETLDTSSPFGRAMIGILSVFAQLERETIRDRMVMGKIKRIEAGLPLTTAKGRTFGYDVIDTKLYINEEEAKQLQLIYDIFEEEQSITFLQKRLKKLGFKVRTYNRYNNWLTNDLYCGYVSYKDKVHVKGIHEPIISEEQFYRVQEIFARMGKNPNMNRESASLLNNLVVCSKCGLGFVHRRKDAMSRDKKYHYRYYSCKTYKHIHELEKCGNKIWRADKLEELIINRVNNYSLASRNVDKEDELDSLNEKLKIEHAKKKRLFDLYINGSYEMSELDSMMSDIDAQINYYESQIEANEELRKNKKIQETLADLATVDFDSLEFREKQLYLKSLINKIYIDGEQVTIEWL

SEQ ID NO: 3903 - protein, 485 aa, synthetic construct
MTKKVAIYTRVSTTNQAEEGFSIDEQIDRLTKYAEAMGWQVSDTYTDAGFSGARLERPAMQRLINDIENKAFDTVLVYKLDRLSRSVRDTLYLVKDVFTKNKIDFISLNESIDTSSAMGSLFLTILSAINEFERENIKERMTMGKLGRAKSGKSMMWTKTAFGYYHNRKTGILEIVPLQATIVEQIFTDYLSGISLTKLRDKLNESGHIGKDIPWSYRALRQTLDNPVYCGYIKFKDSLFEGMHKPIIPYETYLKVQKELEERQQQTYERNNNPRPFQAKYMLSGMARCGYCGAPLRIVLGHKRKDGSRTMKYHCANRFPRKTKGVTVYNDNKKCDSGTYDLSNLENTVIDNLIGFQEDNDSLLKIINGNNQPILDTSSFEKQISQIDKKIQKNSDLYLNDFITMDELKDRTDSLQAEKKLLEAKISENKFNDSTDVFELVKTQLGSIPINELSYDNKKKIVNNLVSKVDVTADNVDIIFKFQLA

SEQ ID NO: 3904 - protein, 452 aa, synthetic construct
MKAAIYIRVSTQEQVGNYSIQAQTEKLTALCRSKDWDVYDIFIDGGYSGSNMNRPALNEMLSKLHEIDAVVVYRLDRLSRSQRDTTTLIEEYFLKNNVEFVSLSETLDTSSPFGRAMIGILSVFAQLERETIRDRMVMGKIKRIEAGLPLTTARGRTFGYDVIDTKLYINEEEARQLQLIYDIFEEEQSITSLQKRLKKLGFKVRTYNRYNNWLTNDLYCGYVSYKDKVHVKGIHEPIISEEQFYRVQEIFTRMGKNPNMNRDSASLLSNLVVCSKCGLGFVHRSKDTMSRGKKYHYRYYSCKTYKHAHELEKCGNKTWRADKLEELIINRVNNYSFASRNADKEDELDSLNEKLKIEHARKKRLFDLYINGSYEVSELDSMMNDIDAQINYYESQIEANEELKRNKKIQENLADLATVDFDSLEFREKQLYLKSLINKIYIDGEQVTIEWL

SEQ ID NO: 3905 - protein, 469 aa, synthetic construct
MSNTTPVRAAVYLRISEDRSGEQLGVARQREDCLKLCDQRKWVPVEYLDNDVSASTGKRRPAYEQMLADITAGRIAAVVAWDLDRLHRRPIELEAFMSLADEKRLALATVAGDVDLATPQGRLVARLKGSVAAHETEHKKARQRRAARQKAERGYPNWSKAFGYLPGPNGPEPDPRTAPLVKQAYADILAGASLGDVRRQWNGAGAFTITGRPWTTTTLSKFLRKPRNAGLRAYKGARYGPVDRDAIVGKARWSPLVDEATFWAAQAVLDAPGRAPGRKSVRRHLLTGLAGCGKCGNHLAGSYRTDGRVVYVCKACHGVTILADNIEPILYHIVAERLAMPDAVDLLRSEIHDVAEAETIRLELETLHDELDRLAVERAEGLLTARQVKISTDIVNAKITKLQACQLDQERLRVLDGIPLGTPQVAGMIAELSPDRFRAVLDVLAEVVVQPVGKSGRIFNPERVQVNWR

SEQ ID NO: 3906 - protein, 452 aa, synthetic construct
MKAAIYIRVSTREQVENYSIQAQTEKLTALCRSKDWDVYDIFIDGGYSGSNMNRPALNEMLSKLREIDAVVVYRLDRLSRSQRDTITLIEEYFLKNNVEFVSLSETLDTSSPFGRAMIGILSVFAQLERETIRDRMVMGKIKRVEAGLPLTTAKGRTFGYDVIDTKLYINEEEAKQLQLIYDIFEEEQSITFLQKRLKKLGFKVRTYNCYNNWLTNDLYCGYVSYKDKVHVKGIHEPIISEEQFYRVQEIFTRMGKNPNMNRDSASLLNNLVVCSKCGLGFVHRRKDASSRDKKYHYRYYSCKTYKHIHELEKCGNKIWRADKLEELIINRVNDYSLVSRNVDKGDELDSLSEKLKIEHAKKKRLFDLYINGSFEVSELDSMMSDIDAQIDYYESQIEANEELKRNKKIQENLAYLATVDFDSLEFREKQLYLKSLINKIYIDGEQVTIEWL

SEQ ID NO: 3907 - protein, 452 aa, synthetic construct
MKAAIYIRVSTREQVENYSIQAQTEKLTALCRSKDWDVYDIFIDGGYSGSNMNRPALNEMLSKLHEIDAVVVYRLDRLSRSQRDTITLIEEYFLKNNVEFVSLSETLDTSSPFGRAMIGILSVFAQLERETIRDRMVMGKIKRIEAGLPLTTAKGRTFGYDVIDTKLYINEEEAKQLQLIYDIFEEEQSITSLQKRLKKLGFKVHTYNRYNNWLTNDLYCGYVSYKDKVHVKGIHEPIISEEQFYRVQEIFTRMGKNPNMNRDSASLLNNLVVCSKCGLGFVHRRKDAMSRDKKYHYRYYSCKTYKHVHELEKCGNKIWRADKLEELIINRVNSYSLAGRNVGKEDELDSLNGKLNIEHAKKKRLFDLYINGSYEVSELDSMMNDIDAQINYYESLIEANEGLKKDKKIQESLANLATVDFDSLEFREKQLYLKSLINKIYIDGEQVTIEWL

SEQ ID NO: 3908 - protein, 485 aa, synthetic construct
MTKKVAIYTRVSTTSQAEEGFSIDEQIDRLTKYAEAMGWQVSDTYTDAGFSGAKLERPAMQRLINDIENKAFDTVLVYKLDRLSRSVRDTLYLVKDVFTKNKIDFISLNESINTSSAMGSLFLTILSAINEFERENIKERMTMGKLGRAKSGKSMMWTKTAFGYYHNRKTGILEIVPLQATIVKQIFTDYLSGISLTKLRDKLNESGHIGKGIPWSYRTLRQTLDNPVYCGYIKFKDSLFEGMHKPIIPYETYLKVQKELEVRQQQAYERNNNPRPFQAKYMLSGMARCGYCGAPLRIVLGHKRKDGSRTMKYHCANRFPRKTKGVTVYNDNKKCDSGTYDLSNLENIVIDNLIGFQENNDSLLKVINGNNQPILDTSSFKKQISQIDKKIQKNGDLYLNDFITMDELKDRTDSLQAEKKLLKAKISKSKFNDSTDVFELVKTQLGSTPVNELSYDDKKRIVNNLVSKVDVTADNVDIIFKFQLA

SEQ ID NO: 3909 - protein, 485 aa, synthetic construct
MTKKVAIYTRVSTTSQAGEGFSIDEQIDRLTKYAEAMGWQVSDTYTDAGFSGAKLERPAMQRLINDIENKAFDTVLVYKLDRLSRSVRDTLYLVKDVFTKNKIDFISLNESINTSSAMGSLFLTILSAINEFERENIKERMTMGKLGRAKSGKSMMWTKTAFGYYHNRKTGILEIVPLQATIVEQIFTDYLSGISLTKLRDKLNESGHVGKDIPWSYRTLRQTLDNPVYCGYIKFKDSLFEGMHKPIIPYETYLKVQKELEERQQQTYERNNNPRPFQAKYMLSGMARCGYCGAPLRIVLGHKRKDGSRTMKYHCANRFPRKTKGVTVYNDNKKCDSGTYDLSNLENTVIENLIGLQENNDSLLKIINGNNQPVLDTSSLKKQISQIDKKIQKISDLYLNDFITMDELRDRTDSLQAEKKLLKAKISENKFNDSTDVFELVKTQLGSIPINELSYDDKKKIVNNLVSKVDVTADNVDIIFKFQLT

SEQ ID NO: 3910 - protein, 452 aa, synthetic construct
MKAAIYIRVSTQEQVENYSIQAQTEKLTALCRSKDWDVYDIFIDGGYSGSNMNRPALNEMLSKLHEIDAVVVYRLDRLSRSQRDTTTLIEEYFLKNNVEFVSLSETLDTSSPFGRAMIGILSVFAQLERETIRDRMVMGKIKRIEAGLPLTTAKGRTFGYDVIDTKLYINEEEAKQLRLIYDIFEEEQSITSLQKRLKKLGFKVRTYNRYNNWLTNDLYCGYVSYKDKVHVKGIHEPIISEEQFYRVQEIFTRMGKSPNMNRDSASLLNNLVVCSKCGLGFVHRSKDTMSGGKKYHYRYYSCKTYKHTHELEKCGNKTWRADKLEELIINRVNNYSFASRSMVKEDELDSLNEKLKIEHAKKKRLFDLYINGSYEVSELDSMMNDIDAQINYYESQIEANEELKKNRKIQENLADLATVDFDSLEFREKQLYLKSLINKIYIDGEQVTIEWL

SEQ ID NO: 3911 - protein, 469 aa, synthetic construct
MSYTTPVRAAVYLRISEDRSGEQLGAARQREDCLKLCDQRKWVPVEYLDNDVSASTGKRRPAYEQMLADITAGKIAAVVAWDLDRLHRRPIELEAFMCLADERRLALATVAGDVDLATPQGRLVARLKGSVAAHETEHKKARQRRAARQKAERGYPNWSKAFGYLPGPNGPEPDPRTAPLVKQAYADILAGASLGDVCRQWNDTSAFTITGRPWTTTALSKFLRKPRNAGLRAYKGARYGPVDRDAIVGKAQWSPLVDEATFWAAQAVLDAPGRAPGRKSVRRHLLTGLAGCGKCGYHLAGSYRTDGRVVYVCKACHGVAILADDIVPILYRIVAERLAMPNAVDLLRREVHDTAEAETTRLELETLYGELDRLAVERAEGLLTARQVKISTDIVNAKITKLQARQLDQERLRVFDGIPLGTPQVAGMIAELSPDRFRAVLDVLAEVVVQPVGKSGRIFNPERVQVNWR

SEQ ID NO: 3912 - protein, 485 aa, synthetic construct
MTKKVAIYTRVSTTNQAEEGFSIDEQIDRLTKYAEAMGWQVSDTYTDAGISGAKLERPAMQRLINDIENKAFDTVLVYKLDRLSRSVRDTLYLVKDVFTKNKIDFISLNESIDTSSAMGSLFLTILSAINEFERENIKERMTMGKLGRAKSGKSMMWTKTAFGYYHNRKTGILEIVPLQATIVEQIFTDYLSGISLTKLRDKLNESGHIGKDIPWSYRTLRQTLDNPVYCGYIKFKDNLFEGMHKPIIPYETYLKVQKELEERQQQTYERNNNPRPFQAKYMLSGMARCGYCGAPLKIVLGHKRKDGSRTMKYHCANRFPRKTKGVTVYNDNKKCDSGTYDLSNLENTVIDNLIGFQENNDSLLKIINGNNQPILDTSSFERQISQIDKKIQKNSDLYLNDFITMDELKDRTDTLQAEKKLLKAKISENKFNDSTDVFELVKTQLGSIPINELSYDNKKKIVNNLVSKVDVTADNVGIIFKFQLA

SEQ ID NO: 3913 - protein, 452 aa, synthetic construct
MKAAIYIRVSTREQVENYSIQAQTEKLTALCRSKDWDVYDIFIDGGYSGSNMNRPALNEMLSKLHEIDAVVVYRLDRLSRSQRDTITLIEEYFLKNNVEFVSLSETLDTSSPFGRAMIGILSVFAQLERETIRDRMVMGKIKRVEAGLPLTTAKGRTFGYDVIDTRLYINEEEAKQLRLIYDIFEEEQSITFLQKRLKKLGFKVRTYNRYNNWLTNDLYCGYVSYKDKVHVKGIHEPIISKEQFYRVQEIFTRMSKNPNMNRDSASLLNNLVVCSKCGLGFVHRRKDAMSRDKKYHYRYYSCKTYKHIHELEKCGNKIWRADKLEELIINRVNNYSLASRNVDKEDELDSLNEKLKTEHAKKKRLFDLYINGSYEVSELDSMMKDIDAQINYYESQIEANEELKKNKKIQENLANLATVDFDSLEFREKQLYLKSLISKIYIDGEQVTIEWL

SEQ ID NO: 3914 - protein, 452 aa, synthetic construct
MKAAIYIRVSTREQVENYSIQAQTEKLTALCRSKDWDVYDIFIDGGYSGSNMNRPALNEMLSKLHEIDAVVVYRLDRLSRSQRDTITLIEEYFLKNNVEFVSLSETLDTSSPFGRAMTGILSVFAQLERETIRDRMVMGKIKRVEAGLPLTTAKGRTFGYDVIDTKLYINEEEAKQLQLIYDIFEEEQSITFLQKRLKKLGFKVHTYNRYNNWLTNDLYCGYVSYKDKVHVKGIHEPIISEEQFYRVQEIFTHMGKNPNMNRDSASLLNNLVVCSKCGLGFVHRRKDTMRRGKKYHYRYYSCKTYKHIHELDKCGNKIWRADKLEELIINRVNNYSLASRNVDKEDELDSLNEKLKIEHAKKKRLFDLYINGSYEVSELDSMMNDIDAQINYYEGQIEANEELKKNKKIQENLANLATVDYDSLEFREKQLYLKSLINKIYIDGEQVTIEWL

SEQ ID NO: 3915 - protein, 469 aa, synthetic construct
MSYTTPVRAAVYLRISEDRSGEQLGVARQREDCLKLCDQRRWVPVEYLDNDVSASTGKRRPAYEQMLADIAAGSIAAVVAWDLDRLHRRPIELEAFMSLADEKRLALATVAGDIDLATPQGRLVARLKGSVAAHETEHKKARQRRAARQKAERGHPNWSKAFGYLPGPNGPEPDPRTAPLVKQAYADILAGASLGDVCRQWNAAGAVTITGRPWTTTTLSKFLRKPRNAGLRAYRGARYGPVDRDAIVGKALWSPLVDEATFWAAQAVLDAPGRAPGRKSVRRHLLTGLAGCGKCGNHLAGSYRTDGKVVYVCKACHGVAILADNIEPILYHIVAERLAVPGAVDLLRREIHDAAEAEAIRLELEALYGELDRLAVERAEGLLTARQVKISTDIVNAKIIKLQARQLDQERLRVLDGIPLGTPQVAGMIAELSPDRFRAVLDVLAEVAVLPVGKSGRISNPERVQVNWR

SEQ ID NO: 3916 - protein, 452 aa, synthetic construct
MKAAIYIRVSTQEQVGNYSIQAQTEKLTALCRSKDWDVYDIFIDGGYSGSNMNRPALNEMLSKLHEIDAVVVYRLDRLSRSQRDTTTLIEEYFLKNNVEFVSLSETLDTSSPFGRAMIGILSVFAQLERETIRDRMVMGKIKRIEAGLPLTTAKGRTFGYNVIDTKLYINEEEAKQLQLIYDIFEEEQSITSLQKRLKKLGFKVRTYNRYSNWLTNDLYCGYVSYKDKVHVKGIHEPIISEEQFYRVQEIFTRMGKNPNVNRDSASLLNNLVVCSKCGLGFVHRSKDTMSRGKKYHYRYYSCKTYKHTHELEKCGNKTWRADKLEELIINRVNNYSFASRNVDKEDELDSLNEKLKIEHAKKKRLFDLYINGSYEVSELDSMMNDIDAQINYYESQIEASEELKKNKKVRENLVDLATVDFDSLEFREKQLYLKSLISKIYIDGEQVTIEWL

SEQ ID NO: 3917 - protein, 485 aa, synthetic construct
MTKKVAIYTRVSTTNQAEEGFSIDEQIGRLTKYAEAMGWQVSDTYTDAGSSGAKLERPAMQRLINDIENKAFDTVLVYKLDRLSRSVRDTLYLVKDVFTKNKIDFISLNESIDTSSAMGSLFLTILSAINEFERENIKERMTMGKLGRAKSGKSMMWTKTAFGYYHNHKTGILEIVPLQATVVEQIFTDYLSGISLTKLRDKLNESGHIGKDIPWSYRTLRQTLDNPVYCGYIKFKDSLFEGMHKPIIPYETYLKVQKELEERQQQAYKRNNNPRPFQAKYMLSGVARCGYCGAPLRIVLGRKRKDGSRTMKYHCANRFPRKTKGITVYNDNKKCDSGTYDLSNLENTVIDSLIGFQENNDSLLKIISGNNQPILGTSSFKKQISQIDKKIQKNSDLYLNDFITMDELKDRTDSLQAEKKLLKAKISENKLNDSTDVFELVKTQLGSIPINELSYDNKKKIVNNLVSKVDVTADNVGIIFKFQLA

SEQ ID NO: 3918 - protein, 469 aa, synthetic construct
MCYTTPVRAAVYLRISEDRSGEQLGAARQREDCLKLCDQRKWVPVEYLDNDVSASTGKRRPAYEQMLADITAGKIAAVVAWDLDRLHRRPIELEAFMSLADEKRLALATVAGDVDLATPQGRLVARLKGCVAAHETEHKKARQRRAARQKAERGHPNWSKAFGYLPGPNGPEPDPRTAPLVKQAYADILAGASLGDVCRQWNDAGAFTITGRPWTTTALSKFLRKPRNAGLRAYKGARYGPVDRDAIVGKAQWSPLVDEATFWAAQAVLDAPGRAPGRKSVRRHLLTGLAGCGKCGNHLAGSYRTDGQVVYVCKACHGVSILAVNIEPILHHIVAERLAMPDAVDLLRREIHDAAEAETIRLELETLYGELDRLAVERAEGLLTARQVKISTDIVNAKITKLQARQLDQERLRVLDGIPLGTPQVAGVVAELSPDRFRAVLDVLAEVVVQPVGKSGRISNPERVQVNWR

SEQ ID NO: 3919 - protein, 452 aa, synthetic construct
MKAAIYIRVSTQEQVENYSIQAQTEKLTALCRSKDWDVYDIFIDGGYSGSNMNRPALNEMLSKLHEIDAVVVYRLDRLSRSQRDTTTLIEEYFLKNNVEFVSLSETLDTSSPFGRAMIGILSVFAQLERETIRDRMVMGKIKRIEAGLPLTTAKGRTFGYDVIDTKLYINEEEAKQLRLIYDIFEEEQSITSLQKRLKKLGFKVRTYNRYNNWLTNDLYCGYVSYKDKVHVKGIHEPIISEEQFYRVQEIFARMGKNPNMNRDSASLLSNLVVCSKCGLSFVHRRKDTMSRGKKYHYRYYSCKTYKHTHELEKCGNKTWRADKLEELIINRVNNYSFASRNADKEDELDSLNEKLKIEHAKKRRLFDLYINGSYEVSELDSMMNDIDAQIDYYESLIEANEELKKNKKIQENLADLATVDFDSLEFREKQLYLRSLINKIYIDGEQVTIEWL

SEQ ID NO: 3920 - protein, 469 aa, synthetic construct
MCYTTPVRAAVYLRISEDRSGEQLGVARQREDCLKLCDQRKWVPVEYLDNDVSASTGKRRPAYEQMLADIAAGKIAAVVAWDLDRLHRRPIELEAFMSLADEKRLALATVAGDVDLATPQGRLVARLKGSVAAHETEHKRARQRRAARQKAERGHPNWSKAFGYLPGPNGPEPDPRTAPLVKQAYADILAGASLGDVCRQWNDAGASTITGRPWTTTTLSKFLRKPRNAGLRAYKGARYGPVDRDAIVGKAQWSPLVDEATFWAAQAVLDAPGRAPGRKSVRRHLLTGLAGCGKCGYHLAGSYRTDGRVVYVCKACHGVAILADNIEPILYHTVAERLAMPDAVDLLRREIHDAAEAETLRLELETLYGELDRLAVERAEGLLTARQVKISTDIVSAKITKLQARQLDQERLRVFDGIPLGTPQVAGVIAELSPNRFRAVLDVLAEVVVQPVGKSGRIFNPERVQVNWR

SEQ ID NO: 3921 - protein, 485 aa, synthetic construct
MTRKVAIYTRVSTTNQAEEGFSIDEQIDRLTKYAEAMGWQVSDTYTDAGFSGAKLERPAMQRLINDIENKAFDTVLVYKLDRLSRSVRDTLYLVKDVFTKNKIDFISLSESINTSSAMGSLFLTILSAINEFERENIKERMTMGKLGRAKSGKSMMWTRTAFGYHHNRKTGILEIAPLQATIVEQIFTDYLSGTSLTKLRDKLNESGHIGKDIPWSYRTLRQTLDNPVYCGYIKFKDSLFEGMHKPIIPYETYLKVQKELGERQQQTYDRNNNPRPFQAKYMLSGMARCGYCGAPQRIVLGRKRKDGSRTMKYHCANRFPRKTKGVTVYNDNKKCDSGTYDLSYLENTVIDTLTGFQENNDSLLKIINGSNQPILDTSSFKKQISQIDKKIQKNSDLYLNDFITMDELKARTDSLQAEKKLLEAKISENKFSDSTDVFELVKTQLGSIPINELSYDNKKKIVNNLVSKVDVTADNVDIIFKFQLA

SEQ ID NO: 3922 - protein, 469 aa, synthetic construct
MSYTTPVRAAVYLRISEDRSGEQLGVARQREDCLKLCGQRKWAPVEYLDNDVSASTGKRRPAYEQMLADITAGKIAAVVAWDLDRLHRRPIELEAFMSLADEKRLALATVAGDVDLATPQGRLVARLKGSVAAHETEHKKARQRRAARQKAERGHPNWSKAFGYLPGPNGPEPDPRTAPLVKQAYADILAGASLGDVCRQWNAAGAFTITGRPWTTTALSKFLRKPRNAGLRAYKGTRYGPVDRDAIVGKAQWSPLVDEATFWAAQAVLDAPGRAPGRKSVRRHLLTGLAGCGKCGNHLAGSYRTDGRVVYVCKACHGVAILADNIEPILYHIVAERLAMPDAVGLLRREIHDAAEAETIRLELETLYGELDRLAVERAEGLLTARQVKISTDIVNAKIAKLQARQLDQERLRVFDGIPLGTPQVAGMIAELSPDRFRAVLDVLAEVVVQPVGKSGGISNPERVQVNWR

SEQ ID NO: 3923 - protein, 452 aa, synthetic construct
MKAAIYIRVSTREQVENYSIQAQTEKLTALCRSKDWDVYDIFIDGGYSGSNMNRPALNEMLSKLHEIDAVVVYRLDRLSRSQRDTITLIEEYFLKNNVEFVSLSETLDTSSPFGRAMIGILSVFAQLERETIRDRMVMGKIKRIEAGLPLTTAKGRTFGYDVIDTKLYINEEEAKQLQLIYDIFEEERSITFLQKRLKKLGFKVRTYNRYNNWLTNDLYCGYVSYKDKVHVKGIHEPIISEEQFYRVQEIFTRMGKSPNMNRGSASLLNNLVVCGKCGLGFVHRRKDIMSRGKKYHYRYYSCKTYKHIHELEKCGNKVWRADKLEELIINRVNNYSLASRDVDKEDELDSLNERLKIEHAKKKRLFDLYINGSYEVSELDSMMNDIDAQISYYESQIEANEELKKDKKIQENLAYLATVDFDSLEFREKQLYLKSLINKIYIDGEQVTIEWL

SEQ ID NO: 3924 - protein, 485 aa, synthetic construct
MTKKVAIYTRVSTTNQAEEGFSIDEQIDRLTKYAEAMGWQVSDTYTDAGISGAKLERPAMQRLINDIENKAFDTVLVYKLDRLSRSVRDTLYLVKDVFTKNKIDFISLNESIDTSSAMGSLFLTILSAINEFERENIRERMTMGKLGRAKSGKSMMWTKTAFGYYHNRETGILEIVPLQATIVEQIFTDYLSGISLTKLRDKLNESGHIGKDIPWSYRTLRQTLDNPVYCGYIKFKDSLFEGMHEPIIPYETYLKVQKELEERQQQTYVRNNNPRPFQAKYMLSGMARCGYCGAPLRIVLGHKRRDGSRTMRYHCANRFPRKTKGVTVYNDNKKCDSGTYDLSILENTVIDNLIGFQENNDSLLKTINGDNQPILDTSSFKEQISQIDKKIQKNSDLYLNDFITMDELKDRTDSLQAEKKLLEAKISENKFNDSTDVFELVKTQLGSIPINELSYDNKKKIVNNLVSKVDVTADNVDIIFKFQLA

SEQ ID NO: 3925 - protein, 452 aa, synthetic construct
MKAAIYIRVSTREQVENYSIQAQTEKLTALCRSKDWDVYDTFIDGGYSGSNMNRPALSEMLSKLHEIDAVVVYRLDRLSRSQRDTITLIEEYFLKNNVEFVSLSETLDTSSPFGRAMIGILSVFAQLERETIRDRMVMGKIKRIEAGLPLTTAKGRTFGYDVIDTKLYINEEEARQLRLIYDIFEEEQSITFLQKRLKKLGFKVRTYNRYNNWLTNDLYCGYVSYKDKVHVKGIHEPIISEEQFYRVQEIFTRMGKNPNMNRDSASLLNNLVVCSKCGLGFVHRRKDITSRGKKYHYRYYSCKTYKHIHELEKCGNKIWRADKLEELIINRVNNYSIASRNADKEDELDSLNEKLKIEHAKKKRLFDLYINGSYEVSELDSMMNDIDAQISYYESQIEANGELKKNKKIQERLANLATVDFDSLEFREKQLYLKSLVNKIYIDGEQVTIEWL

SEQ ID NO: 3926 - protein, 452 aa, synthetic construct
MKAAIYIRVSTQEQVGNYSIQAQTEKLTALCRSKGWDVYDIFIDGGYSGSNMNRPALNEMLSKLHEIDAVVVYRLDRLSRSQRDTTTLIEEHFLKNNVEFVSLSETLDTSSPFGRAMIGILSVFAQLERETIRDRMVMGKIKRIEAGLPLTTAKGRTFGYDVIDTKLYINEEEAKQLQLIYDIFEEEQSITSLQKRLKKLGFKVRTYNRYNNWLTNDLYCGYVSYKDKVHVKGIHEPIISEEQFYRVQEIFTRMGKNPNMNRDSASLLSNLVVCSKCGLGFVHRSKDTMSRGKKYHYRYYSCKTYKHTHELEKCGNKTWRADKLEELIINRVNNYSFASRNADKEDELDSLNEKLKIEHAKKRRLFDLYINGSYEVSELDSMMNDIDAQINYYESQIEANEELKKNKKIQENLADLATVDFDSLEFREKQLYLKSLISKIYIDGEQVTIEWL

SEQ ID NO: 3927 - protein, 452 aa, synthetic construct
MKAAIYIRVSTREQVENYSIQAQTEKLTALCRSRDWDVYDIFIDGGYSGSNMNRPALNEMLSKLHEIDAVVVYRLDRLSRSQRDTITLIEEYFLKNNVEFVSLSETLDTSSPFGRAMIGILSVFAQLERETIRDRMVMGKIKRIEAGLPLTTAKGRTFGYDVIDTKLYINEEEAKQLQLIYDIFEEEQSITFLQKRLKKLGFKVHTYNRYNNWLTNDLYCGYVSYKDRVHVKGIHEPIISEEQFYRVQEIFTRTGKNPNMNRDSASLLNNLVVCSKCGQGFVHRRKDAVGRDKKYHYRYYSCKTYKHIHELEKCGNKIWRADKLEELIINRVNDYSLAGRNVDKEDGLDSLNEKLKIEHAKKRRLFDLYINGSYEVSELDSMMNDIDAQINYYESQIEANEELKKNKKIQENLAYLATVDFDSLEFREKQLYLKSLINKIYIDGELVTIEWL

SEQ ID NO: 3928 - protein, 469 aa, synthetic construct
MCYTTPVRAAVYLRISEDRSGEQLGVARQREDCLKLCGLRRWVPVEYLDNDVSASTGKRRPAYEQMLADITAGKIAAVVAWDLDRLHRRPIELEAFMCLADEKRLALATVAGDVDLATPQGRLVARLKGSVAAHETEHKKARQRRAARQKAERGHPNWSKAFGYLPGPNGPEPDPRTAPLVKQAYADILAGASLGDVCRQWNDAGAFTITGRLWTTTTLSKFLRKPRNAGLRAYKGARYGPVDRDAIVGKAQWSPLVDEATFWAAQAVLDAPGRAPGRKSVRRHLLTGLAGCGKCGNHLAGSYRTDGRVVYVCKACHGVAILADNIEPILYHIVAERLAMPDAVDLLRREIHDAAEAETIRLELETLYGELDCLAVERAEGLLTARQVKISTDIVNAKITKLQARQQDQERLRVLDSIPLGTPQVAGMIAELSPDRFRAVLDVLAEVVVQPVGKGGRIFNTERVQVNWR

SEQ ID NO: 3929 - protein, 469 aa, synthetic construct
MCYTTPVRAAVYLRISEDRSGEQLGVARQREDCLKLCDQRKWVPVEYLDNDVSASTGKRRPAYEQMLADITAGRIAAVVAWDLDRLHRRPIELEAFMCLADEKRLALATVAGDVDLATPQGRLVARLKGSVAAHETEHKKARQRRAARQKAERGHPNWSKAFGYLPGPNGPEPDPRTAPLVKQAYTDILAGASLGDVCRRWNDAGAFTITGRPWTSTTLSKFLRKPRNAGLRAYKGARYGPVDRDAIVGKAQWSPLVDEATFWAAQAVLDAPGRAPGRKSVRRHLLTGLAGCGKCGNHLAGSYRTDGRVVYVCKACHGVAILADNIEPILYHIVVERLAMPDAVDLLRREIHDAAEAETIRLELETLYDELDRLAVERAEGLLTARQVKISTDIVNAKITKLRARQQDRERLRVLDGIPLGTPQVAGMIAELSPNRFRAVLDVLAEVVVQPVGKSGRIFNPERVQVNWR

SEQ ID NO: 3930 - protein, 452 aa, synthetic construct
MKAAIYIRVSTREQVENYSIQAQTEKLTALCRSKDWDVYDIFIDGGYSGSNMNRPALNEMLSKLHEIDAVVVYRLDRLSRSQRDTITLIEEYFLKNNVDFVSLSETLDTSSPFGRAMIGILSVFAQLERETIRDRMVMGKIKRIEAGLPLTTAKGRTFGYDVIDTKLYINEEEAKQLQLIYDIFEEERSITFLQKRLKKLGFKVRTYNRYSNWLTNDLYCGYVSYKDKVHVKGIHEPIISEEQFYRVQEIFTRMGKNPNMNRDSASLLNNLVVCGKCGLGFVHRRKDAMSRDKKYHYRYYSCKTYKHIHELEKCGNKIWRADKLEELIINRVNDYSVASRNVDKEDELVSLNEKLKIEHAKKRRLFDLYINGSYEVSELDGMMNDIDAQINYYESQIEANEELKKNKKIQENLAYLATVDFDSLEFREKRLYLKSLINKIYIDGEQVTIEWL

SEQ ID NO: 3931 - protein, 485 aa, synthetic construct
MTKKVAIYTRVSTTNQAEEGFSIDEQIDRLTKYAEVMGWQVSDTYTDAGFSGAKLERPAMRRLINDIENKAFDTVLVYKLDRLSRSVRDTLYLVKDVFTKNKIDFISLNESIDTSSAMGSLFLTILSAINEFERENIKERMTMGKLGRAKSGKSMMWTKTAFGYHHNRKTGILEIVPLQATIVEQIFTDYLSGISLTKLRDKLNESGHIGKDIPWSYRTLRQTLDNPVYCGYIKFKDSLFEGMHKPIIPYETYLKVQKELEERQQQTYERNNNPRPFQAKYMLSGMARCGYCGAPLRIVLGHKRKDGSRTMKYHCANRFPRKTKGVTVYNDNKKCDSGTYDLSNLENTVIDNLIGFQENDDSLLKVINGDNRPILDASSFKEQISQIDKKIQKNSDLYLNDFITMDELKGRTDSLQAEKKLLGARISENKSSDSTDVFELVKTQLGSIPINELSYDNKKKIVNNLVSKVDVTADNVDIIFKFQLA

SEQ ID NO: 3932 - protein, 453 aa, synthetic construct
MKAAIYIRVSTQEQVGNYSIQAQTEKLTALCRSKDWDVYDIFVDGGYSGSNMNRPALNEMLSKLHEIDAVVVYRLDRLSRSQRDTTTLIEEYFLKNNVEFVSLSETLDTSSPFGRAMIGILSVFAQLERETIRDRMVMGKIKRIEAGLPLTTAKGRTFGYDVIDTKLYINEEEAKQLQLIYDIFEEEQSITSLQKRLKKLGFKVRTYNRYNNWLTNDLYCGYVSYKDKVHVKGIHEPIISEEQFYRVQEIFTRMGKNPNINRDSASLLNNLVVCSKCGLGFVHRSKDTMSRGKKYHYRYYSCKTYKHTHELEKCGNKTWRADKLEELIINRVNNYSFASRNVDKEGELDSLNEKLKIEHAKKRRLFDLYINGSYEVSELDSMMNDIDAQISYYESQIEANEELKKNKKIQENLADLATVDFDSLEFREKQLYLKSLINKIYIDGEQVTIEWLQ

SEQ ID NO: 3933 - protein, 452 aa, synthetic construct
MKAAIYIRVSTREQVENYSIQAQAEKLTALCRSKDWDVYDIFIDGGYSGSNMNRPALNEMLSKLHEIDAVVVYRLDRLSRSQRDTITLIEEYFLKNNVEFVSLSETLDTSSPFGRAMIGILSVFAQLERETIRDRMVMGKIKRIEAGLPLTTAKGRTFGYDVIDAKLYINEEEAKQLQLIYDIFEEEQSITFLQRRLKKLGFKVHTYSRYNNWLTNDLYCGYVSYKDKVHVKGIHEPIISEEQFHRVQEIFTRMGKSPNMNRDSASLLNNLVVCSKCGLGFVHRRKDTMSRGKKYHYRYYSCKTYKHIHELEKCGNKIWRADKLEELIINRVNNYSFASRNADKEGELDSLNEKLKIEHAKKRRLFDLYINGSYEVSELDSMMNDIDAQINYYESQIEANEEQKKNKKIQENLADLATVDFDSLEFREKQLYLKSLINKIYIDGEQVTIEWL

SEQ ID NO: 3934 - protein, 469 aa, synthetic construct
MSYTTPVRAAVYLRISEDRSGEQLGVARQREDCLKLCGQRKWVPVEYLDNDVSASTGKRRPAYEQMLADITAGKIAAVVAWDLDRLHRRPIELEAFMSLADEKRLALATVAGDVDLATPQGRLVARLKGSVAAHETEHKKARQRRAARQKAERGYPNWSKAFGYLPGPNGPEPDPRTAPLVKQAYADILAGASLGDVCRQWNNAGAFTITGRPWITTTLSKFLRKPRNAGLRAYKGARYGPVDRDAIVGKAQWSPLVDEATFWAAQAVLDAPGRAPGRKSVRRHLLTGLACCGKCGNHLAGSYRTDGRVVYVCKACHGVAILADNIEPILYHIVAARLAMPDAMDLLRREIHDAAEAETICLELETLYGELDRLAVERAEGLLTARQVKISTDIVNAKITKLQARQLDQERLRVFDGIPLGTPQVAGVIAELSPDRFRAVLDVLAEVVVQPVGKSGRISNPERVQVNWR

SEQ ID NO: 3935 - protein, 452 aa, synthetic construct
MKAAIYIRVSTREQVENYSIQAQTEKLTALCRSKDWDVYDIFIDGGYSGSNMNRPALNEMLSKLHEIDAVVVYRLDRLSRSQRDTITLIEEYFLKNNVEFVSLSETLDTSSPFGRAMIGILSVFAQLERETIRDRMVMGKIKRIEAGLPLTTAKGRTFGYDVIDTKLYINEAEAKQLQLIYDIFEEEQSITFLQKRLKRLGLKVRTYNCYNNWLTNDLYCGYVSYKDKVHVKGIHEPIISEEQFHRVQEIFTRMGKNPNMNRDSASLLNNLVVCSKCGLGFVHRRKDAMSHGKKYHYRYYCCKTYKHIHELEKCGNKIWRADKLEELVINRVNSYSLASRNVVKEDELDSLNKKLKIEYAKKKRLFDLYINGSYEVSELDSMMNGIDAQINCYESQIEANEELRKNKKIQENLADLATVDFDSLEFREKQLYLKSLISKIYIDGDQVTVEWQ

SEQ ID NO: 3936 - protein, 485 aa, synthetic construct
MTKKVAIYTRVSTTNQAEEGFSIDEQIDRLTKYAEAMGWQVSDTYTDAGLSGAKLERPAMQRLINDIENKAFDTVLVYKLDRLSRSVRDTLYLVKDVFTKNKIDFISLNESIDTSSAMGSLFLTILSAINEFERENIKERMTMGKLGRAKSGKSMMWTKTAFGYYHNRKTGILEIVPLQATIVEQIFTDYLSGISLTKLRDKLNESGHIGKDIPWSYRTLRQTLDNPVYCGYIKFKDSLFEGMHKPIIPYETYLKVQKELEERQQQTYERNNNPRPFQAKYMLSGTARCGYCGAPLKIVLGHKRKDGSRTVKYHCANRFPRKTKGVTAYNDNKKCDSGTYDLSNLENTVIDNLIGFQENNDSLLKIINGGNQPILDTSSFKKRISQIDKEIQKNSDLYLNDFITMDELKGRTDSLQAEKKLLKAKISENKFNDSTDVFELVKTQLGSIPINELSYDNKKKIVNNLVSKVDVTADNVDIIFKFQLT

SEQ ID NO: 3937 - protein, 469 aa, synthetic construct
MSYTTPVRAAVYLRISEDRSGEQLGVARQREDCLKLCGQRKWVPVEYLDNDVSASTGKRRPAYEQMLADITAGKIAAVVAWDLDRLHRRPVELEAFMSLADEKRLALATVAGDVDLATPQGRLVARLKGCVAAHETEHKKARQRRAARQKAERGHPNWSKAFGYLPGPNGPEPDPRTAPLVKQAYADILAGASLGDVCRQWNDAGAFTITGRPWTTTTLSKFLRKPRNAGLRAYKGARYGPVDRDAIVGKAQWSPLVDEATFWAAQAVLDAPGRAPGRKSVRRHLLTGLAGCGKCGNHLAGSYRTDGQVVYVCKACHGVSILAVNIEPILYHIVAERLAMPDAVDLLRREIHDAAEAETIRLELGTLYGELDRLAVERAEGLLTARQVKISTDIVNAEITKLQARQLDQERLRVFDGIPLGTPQVASMIAELSPDRFRAVLDVLAEVVVRPVGKSGRIFSPERVQVNWR

SEQ ID NO: 3938 - protein, 452 aa, synthetic construct
MKAAIYIRVSTREQVENYSIQAQTEKLTALCRSKGWDVYDIFIDGGFSGSNMNRPALNEMLSKLHEIDAVVVYRLDRLSRSQRDTITLIEEYFLKNNVEFVSLSETLDTSSPFGRAMIGILSVFAQLERETIRDRMVMGKIKRIEAGLPLTTAKGRTFGYDVIDTKLYINEEEAKQLQLIYDIFEEEQSITFLQKRLKKLGFKVRTYNRYSNWLTNDLYCGYVSYKDKVHVKGIHEPIISEEQFNRVQEIFTRMGKNPNMNRDSASLLNNLVVCSKCGLGFVHRRKDTTSRGKKYHYRYYSCKTYKHTHELEKCGNKIWRADKLEELIINRVNDYSFARRNVDKEDELDGLNEKLKIEHAKRKRLFELYINGSYEVSELDSMMNDIDAQINYYESQIEASEELKKRKKIQENLANLATVDFDSLEFREKQLYLKSLINKIYIDGEQVTIEWL

SEQ ID NO: 3939 - protein, 469 aa, synthetic construct
MSYTTPVRAAVYLRISEDRSGEQLGVARQREDCLKLCGQRKWVPVEYLDNDVSASTGKRRPAYEQMLADITAGKIAAVVAWDLDRLHRRPIELEAFMSLADERRLALATVAGDVDLATPQGRLVARLKGCVAAHETEHKKARQRRAARQKAERGLPNWSKAFGYLPGPNGPEPDPRTAPLVKQAYADILAGASLGDVCRQWNDAGAFTITGRPWTTTALSKFLRKPRNAGLRAYKGARYGPVDRDAIVGKARWSPLVDEATFWAAQAVLDAPGRAPGRKSVRRHLLTGLAGCGKCGNHLAGSYRTDGRVVYVCKACHGVAILADNIEPILYHIVAERLAKPDAVDLLRREIHDAAEAETIRLELETLYGELDRLAVERAEGLLTARQVKISTDIVNAKVTKLQARQLDQERLRVFDGIPLGTPQVAGMIAELSPDRFRAVLDVLAEVVVQPVGKSGRTFSPERVQVNWR

SEQ ID NO: 3940 - protein, 469 aa, synthetic construct
MSYTTPVRAAVYLRISEDRSGEQLGVARQREDCLKLCDQRKWVPVEYLDNDVSASTGKRRPAYEQMLADITAGKIAAVVAWDLDRLHRRPIELEAFMSLADEKRLALATVAGDVDLATPQGRLVARLKGCVAAHETEHKKARQRRAARQKAERGYPNWSKAFGYLPGPNGPEPDPRTAPLVKQAYADILAGASLGDVCRQWNDAGAFTITGRPWTTTALSKFLRKPRNAGLRAYKGARYGPVDRDAIVGKAQWSPLVDEATFWAAQAVLDAPGRAPGRKSVRRHLLTGLAGCGKCGNHLAGSYRTDGRVVYVCKACHGVAILADNIEPILYHIVAERLAMPGAVDLLRREIHDATEAETIRLELETLYGELDRLAVERAEGLLTARQVKISTDIVNAKITRLQARQQDQERLRVLDGIPLGTPQVAGVIAELSPDRFRAVLDVLAEVVVQPVGKSGRIFNPERVQVNWR

SEQ ID NO: 3941 - protein, 469 aa, synthetic construct
MSYTTPVHAAVYLRISEDRSGEQLGVARQREDCLKLCDQRKWVPVEYLDNDVSASTGKRRPAYEQMLADITAGKIAAVVAWDLDRLHRRPIELEAFMSLADEKRLALATVAGDVDLATPQGRLVARLKGCVAAHETEHKKARQRRAARQKAERGLPNWSKAFGYLPGPNGPEPDPRTAPLVKQAYADILAGASLGDVCRQWNDSGAFTITGRPWTTTTLSKFLRKPRNAGLRAYKGARYGPVDRDAIVGKAQWSPLVDEATFWAAQAVLDAPGRAPGRKSVRRHLLTGLAGCGKCGNHLAGSYRTDGRVVYVCKACHGVAILADNIEPILYHVVAERLAMPDAVDLLRHEIHDAAEAEAIRLELETLYGELDRLAVERAEGLLTARQVKISTDIVNAKITKLQARQLDQERLRVFDGIPLGTPQVAGMIAELSPDRFRAVLDVLAEVVVQPAGKSGRIFNPERVQVNWR

SEQ ID NO: 3942 - protein, 485 aa, synthetic construct
MTKKVAIYTRVSTTNQAEEGFSIDEQIDRLTKYAEAMGWQVSDTYTDAGLSGAKLERPAMQRLINDIENKAFDTVLVYKLDRLSRSVRDTLYLVKDVFTKNKIDFISLNESIDTSSAMGSLFLTILSAINEFERENIKERMTMGKLGRAKSGKSMMWTKTAFGYYHNRKTGILEIVPPQATIVEQIFTDYLSGISLTKLRDKLNESGHIGKDIPWSYRTLRQTLDNPVYCGYIKFKDSLFEGMHKPIIPYETYLKVQKELGERQQQTYERNNNPRPFQAKYMLSGMARCGYCGAPLRIVLGHKRKDGSRTMKYHCANRFPRKTKGVTVYNDNKKCDSGTYDLSNLEGTVIDNLIAFQENNDSLLKIINGNNQPILDTSSFKEQISQIDKKIQKNSDLYLNDFITMDELKDRTDSLQAEKKLLKAKISENNFNDSTDVLELVKTQLGSIPINELSYDNKRKIVNNLVSKVDVTADNVVIIFKFQLA

SEQ ID NO: 3943 - protein, 452 aa, synthetic construct
MKAAIYIRVSTQEQVGNYSIQAQTEKLTALCRSKDWDVYDIFIDGGYSGSNMNRPALNEILSKLHEIDAVVVYRLDRLSRSQRDTATLIEEYFLKNNVEFVSLSETLDTSSPFGRAMIGILSVFAQLERETIRDRMVMGKIKRIEAGLPLTTAKGRTFGYDVIDTKLYINEEEAKQLQLIYDIFEEEQSITSLQKRLKKLGFKVRTYNRYNSWLTNDLYCGYVSYKDKVHVKGIHEPIISEEQFYRVQEIFTRMGKNPNMNRDSASLLNNLVVCSKCGLGFVHRSKDTMCRGKKYHYRYYSCKTYKHTHELEKCGNKTWRADKLEELIINRVSNYSFASRNVDKEDELDSLNEKLKIEHAKKKRLFDLYINGSYEVSELDSMMNDIDAQIDYYESQIEANEELKKNKRIQENLADLATVDFDSLEFREKQLYLKSLINKIYIDGEQVTIEWL

SEQ ID NO: 3944 - protein, 485 aa, synthetic construct
MTKKVAIYTRVSTTNQAEEGFSIDEQIDRLTRYAEAMGWQVSDTYTDAGVSGAKLERPALQRLINDIENKAFDTVLVYKLDRLSRSVRDTLYLVKDVFTKNKIDFISLNECIDTSSAMGSLFLTILSAINEFERENIKERMTMGKLGRAKSGKSMMWTKTAFGYYHNRKTGILEIVPLQATIVEQIFTDYLSGISLTKLRDKLNESGHIGKDIPWSYRTLRQTLDNPVYCGYIKFKDGLFEGMHKPIIPYETYLKVQKELEERQQRAYERNNNPRPFQAKYMLSGMARCGYCGAPLRIVLGHKRKDGSRTMKYHCANRFPRKTKGVTVYNDNKKCDSGTYDLSDLENTVIDNLIGLQENNDSLLKIINGNNQPILDTSSFEEQISQIDRKIQKNSDLYLNDFITMDELKDRTDSLQAEKKLLKAKISENKFNDSTDVFELVKTQLGSIPINELSYDNKKKIVNDLVSKVDVTADNVDIIFKFQLA

SEQ ID NO: 3945 - protein, 452 aa, synthetic construct
MKAAIYIRVSTREQVENYSIQAQTEKLTALCRSKDWDVYDIFIDGGYSGSNMNRPALNEMLSKLHEIDAVVVYRLDRLSRSQRDTITLIEEHFLKNNVEFVSLSETLDTSSPFGRAMIGILSVFAQLERETIRDRMVMGKIKRIEAGLPLTTAKGRTFGYDVIDAKLYINEEEAKQLQLIYDIFEEEQSITSLQKRLKKLGFKVRTYNRYNNWLTNDLYCGYVSYKDKVHVKGIHEPIISEEQFYRVQEIFTRMGKNPNMNRESASLLNNLVVCSKCGLGFVHRRKDITSRDKKYHYRYYSCKTYKHIHELEKCGNKIWRADKLEELIINRVNNYSFASRNADKEDELDSLNEKLKIEHAKKRRLFDLYINGSFEVSELDSMMSDIDAQISYYESRIEASEELKKNRKIQENLAHLATVDFDSLEFREKQLYLKSLINKIYIDGEQVTIEWL

SEQ ID NO: 3946 - protein, 469 aa, synthetic construct
MSYTTPVRAAVYLRISEDRSGEQLGVARQREDCLKLCDQRKWVPVEYLDNDVSASTGKRRPAYEQMLADITAGKIAAVVAWDLDRLHRRPIELEAFMSLADEKRLALATVAGDVDLATPQGRLVARLKGSVAAHETEHKKARQRRAARQKAERGYPNWSKAFGYLPGPNGPEPDPRTAPLVKQAYANILAGASLGDVCRQWNDAGAFTITGRPWTTATLSKFLRKPRNAGLRAYKGAPYGPVDRDAIVGKAQWSPLVDEATFWAAQAVLDAPGRAPGRKSVRRHLLTGLAGCGKCGNHLAGSYRTDGRVVYVCKACHGVAILADNIEPILYHIVTERLARPDAVDLLRREIHDAVEAETIRLELETLYGELDHLAVERAEGLLTARQVKICTDIVNAKITKLQARQQDQERLRVLDGIPLGTPQVAGTIAELSPDRFRAVLDVLAEVVVQPVGKGGRIFNPERVQVNWR

SEQ ID NO: 3947 - protein, 452 aa, synthetic construct
MKAAIYIRVSTREQVENYSIQAQTEKLTALCRSKDWDVYDIFIDGGYSGSNMNRPALNEMLSKLHEVDAVVVYRLDRLSRSQRDTITLIEEYFLKNNVEFVSLSETLDTSSPFGRAMIGILSVFAQLERETIRDRMVMGKIKRIEAGLPLTTAKGRTFGYDVIDTKLYINEEEAKQLQLIYDIFEEEQSITFLQKRLKKLGFKVRTYSCYNNWLTNDLYCGYVSYKDKVRVKGIHEPIISEEQFYRVQEIFTRTGKNPNINRDSASLLNNLVVCSKCGLGFVHRRKDTMSRGKKYHYRYYSCKTYKHTHELEKCGNKIWRADKLEELIINRVNNYSFASRNMDKEDELDSLNEKLKIEHAKKKRLFDLYINGSYEVSELDSMMNDIDAQINYYESQIEANEELRKNKKIQENLADLATVDFGSLEFREKQLYLKSLINKIYIDGEQVTIEWL

SEQ ID NO: 3948 - protein, 485 aa, synthetic construct
MTKKVAIYTRVSTTNQAEEGFSIDEQIDRLTKYAEAMGWQVSDTYTDAGLSGAKLERPAMQRLINDIENKAFDTVLVYKLDRLSRSVRDTLYLVKDVFTKNKIDFISLSESIDTSSTMGSLFLTILSAINEFERENIKERMTMGKLGRAKSGKSMMWTKTAFGYYHNRKTGILEIVPLQATIVEQIFTDYLSGISLTKLRDKLNESGHIGKDIPWSYRTLRQTLDNPVYCGYIRFKDSLFEGMHKPIIPYETYLEVQKELEERQQQTYERNNNPRPFQAKYMLSGMARCGYCGAPLRIVLGHKRKDGSRTMKYHCANRFPRKTKGVTVYNDNKKCDSGTYDLSNLENTVIDILIGFQENNDSLLKIINGNNQPILDTSSLKKRISQIDKKIQKNSDLYLNDFITMDELKDRTDSLQAEKKLLKAKISENKFNDSTDVFELVKTQLGSIPINELSYDDKKKIVNSLVGKVDVTADNVDIIFKFQLA

SEQ ID NO: 3949 - protein, 452 aa, synthetic construct
MKAAIYIRVSTREQVENYSIQAQTEKLTALCRSKDWDVYDVFIDGGYSGSNMNRPALNEMLSKLHEIDAVVVYRLDRLSRSQRDTITLIEEYFLKNNVEFVSLSETLDTSSPFGRAMIGILSVFAQLERETIRDRMVMGKIKRIEAGLPLTTAKGRTFGYDVIDAKLYINEEEAKQLQLIYDIFEEEQSITFLQKRLKKLGFKVRTYNRYSSWLTNDLYCGYVSYKDKVHVKGIHKPIISEEQFYRVQEIFARMGKNPNMNRDSASLLNNLVVCGKCGLGFVHRRKDAMSRDKKYHYRYYSCKTYKHIHELEKCGNKIWRADKLEELIINRVSNYSLASRNVDKEDELDSLNEKLKIEHAKKKRLFDLYINGSYEVSELDSVMNDIDAQINYYESQIEANEELRKNKEIQENLAYLATVDFDSLEFREKQLYLKSLINKIYIDGELVTIEWL

SEQ ID NO: 3950 - protein, 485 aa, synthetic construct
MTKKVAIYTRVSTTNQAEEGFSIDEQIDRLTKYAEAMGWQVSDTYTDAGFSGAKLERPAMQRLINDIENKAFDTVLVYKLDRLSRSVRDTLYLVKDVFTKNKIDFISLSESIDTSSAMGSLFLTILSAINEFERENIKERMTMGKLGRAKSGKSMMWTKTAFGYHHNRKTGILEIVPLQATVVEQIFTDYLSGISLTKLRDKLNESGHIGKDIPWSYRTLRQTLDNPVYCGYIKFKDSLFEGMHKPIIPYETYLKVQKELEERQQQTYERNNNPRPFQAKYMLSGMARCGYCGAPLRIVLGHKRKDGSRTMKYHCANRFTRKTKGVTVYNDNKKCDSGTYDLSNLENTVIDNLIGFQESNDSLLKIINGNNQPILDTSSFKKQISQIDKKIQKNSDLYLNDFITMDELKDRTDSLQAEKKLLKAKISENKFNDSTDVFELVKTQLGSIPINELSYEDKKKIVNNLVSKVDVTADSVDIIFKFQLA

SEQ ID NO: 3951 - protein, 452 aa, synthetic construct
MKAAIYIRVSTREQVENYSIQAQTEKLTALCCSKDWDVYDIFIDGGYSGSNMNRPALNEMLSKLHEIDAVVVYRLDRLSRSQRDTITLIEEYFLKNNVEFVSLSETLDTSSPFGRAMIGILSVFAQLERETIRDRMVMGKIKRIEAGLPLTTAKGRTFGYDVIDTKLYINEEEAKQLQLIYDIFEEEQSITFLQKRLKKLGFKVRTYNRYNNWLTNDLYCGYVSYKDKVHVKGIHEPIISEEQFYRVQEIFTRMGKNPNMNRDSASLLNNLVVCSKCGRGFVHRRKDAKSRDKKYHYRYYSCKTYKHIHELEKCGNKIWRADKLEELIINRVSNYSLASRNADKEDELDSLNEKLKIEHAKKKRLFDLYINGSYEVSELDSMMNDIDAQINYYESQIEANEELRKNKKIQENLAGLATVNFDSLEFREKQLYLKSLINKIYIDGEQVTIEWL

SEQ ID NO: 3952 - protein, 452 aa, synthetic construct
MKAAIYIRVSTREQVENYSIQAQTEKLTALCRSKDWDVYDIFIDGGYSGSNMNRPALNEMLSKLREIDAVVVYRLDRLSRSQRDTITLIEEHFLKNNVEFVSLSETLDTSSPFGRAMIGILSVFAQLERETIRDRMVMGKIKRIEAGLPLTTAKGRTFGYDVIDTKLYINEEEAKQLQLIYDIFEEEQSITLLQKRLKKLGFRVRTYSRYNSWLTNDLYCGYVSYKDKVHVRGIHEPIISEEQFNRVQEIFTRMGKNPNMNRDSASLLSNLVVCSKCGLGFVHRRKDTTSRGKKYHYRYYSCKTYKHIHELEKCGNKIWRADELEELIINRVNNYSFASRNADKEDELDSLNEKLKIEHAKKKRLFDLYINGSYDVNELDSMMNDIDAQINYYESQIGANEELKKNKKTQENLAALATVDYDSLEFREKQLYLKSLINKIYIDGEQVTIEWL

SEQ ID NO: 3953 - protein, 469 aa, synthetic construct
MCYTTPVRAAVYLRISEDRSGEQLGVARQREDCLKLCDQRKWVPVEYLDNDVSASTGKRRPAYEQMLADITAGKIAAVVAWDLDRLHRRPIELEAFMSLADEKRLALATVAGDVDLATPQGRLVARLKGSVAAHETEHKKARQRRAARQKAERGYPNWSKAFGYLPGPNGPEPDPRTAPLVKQAYADILAGASLGDVCRQWNDAGAFTITGRPWTATTLSKFLRKPRNAGLRAYRGARYGPVDRDAIVGKAQWSPLVDEATFWAAQAVLDAPGRAPGRKSVRRHLLTGLAGCGKCGSHLAGSYRTDGRVVYVCKTCHGVAILADNIEPILYHIVAERLAMPDAVDLLRREIHDAAGAEAIHLELETLYGELDRLAVERAEGLLTARQVKISTDIVNAKITKLQAHQQDQERLRVLDGIPLGTPQVAGVIAELSPNRFRAVLDVLAEVVVQPVGKSGRIFNPERVQVNWR

SEQ ID NO: 3954 - protein, 452 aa, synthetic construct
MKAAIYIRVSTREQVENYSIQAQTEKLTALCRSKDWDVYDIFIDGGYSGSNVNRPALNEMLSKLHEIDAVVVYRLDRLSRSQRDTITLIEEHFLKNNVEFVSLSETLDTSSPFGRAMIGVLSVFAQLERETIRDRMVMGKIKRIEAGLPLTTAKGRTFGYDVIDTKLYINEEEAKQLQLIYDIFEEEQSITFLQKRLKKLGFRVRTYSCYNNWLTNDLYCGYVSYKDKVHVKGIHEPIISEEQFYRVQEIFARMGKNPNMNRDSASLLSNLVVCSKCGLGFVHRRKDTTSRGKKYHYRYYSCKTYKHTHELEKCGNKIWRADKLEELIINRVNNYSFASRNEDKEDELDSLYEKLTIERAKRKRLFDLYINGSYEVSELDSMMNDIDAQINYYESQIEANEELKKNKKIQENLADLATVDFDSLEFREKQRYLKSLINKIYIDGEQVTIEWL

SEQ ID NO: 3955 - protein, 469 aa, synthetic construct
MSYTTPVRAAVYLRISEDRSGEQLGVARQREDCLRLCDQRKWVPVEYLDNDVSASTGKRRPAYEQMLADITAGKIAAVVAWDLDRLHRRPIELEAFMSLADEKRLALATVAGDVDLATPQGRLVARLKGSVAAHETEHKKARQRRAARQKAERGHPNWSKAFGYLPGPNGPEPDPRTAPLVKQAYADILAGASLGDVCRQWNDAGAFTITGRLWSTTTLSKFLRKPRNAGLRAYKGARYGPVDRDAIVGKAQWSPLVDEATFWAAQAVLDAPGRAPGRKSVRRHLLTGLAGCGKCGNHLAGSYRTDGRVVYVCKACHGVAILADNIEPILYHIVAERLAMPDAVDLLRCEIHDAAEAEAIRLELETLYGELDRLAVERAEGLLTARQVKISTDIVNAKITKLQARQLDQERLRVLDGIPLGTPQVAGMIAELSPDRFRAVLDVLAEVVVQPVGKSGRISNPERVQVNWR

SEQ ID NO: 3956 - protein, 452 aa, synthetic construct
MKAAIYIRVSTQEQVGNYSIQAQTEKLTALCRSKDWDVYDIFIDGGYSGSNMNRPALNEMLSKLHEIDAVVVYRLDRLSRSQRDTTTLIEEYFLKNNVEFVSLSETLDTSSPFGRAMIGILSVFAQLERETIRDRMVMGKIKRIEAGLPLTTAKGRTFGYDVIDTKLYINEEEAKQLQLIYDIFEEEQSITSLQKRLKKLGFKVRTYNRYNNWLTNDLYCGYVSYKDKVHVKGIHEPIISEEQFHRVQEIFTRMGKGPNMNRDSASLLNNLVVCGKCGLSFVHRRKDTMSRGKKYHYRYYSCKTYKHTHELEKCGNKTWRADKLEELIINRVNNYSFASRNVDKEDELDSLNEKLKIEHAKKKRLFDLYINGSYEVSELDSMMNDIDAQINYYESLIEANEELKKNKKIQENLADLAAVDFDSLEFREKQLYLKSLINKIYIDGEQVTIEWL

SEQ ID NO: 3957 - protein, 452 aa, synthetic construct
MKAAIYIRVSTQEQVENYSIQAQTEKLTALCHSKGWDVYDIFIDGGYSGSNMDRPALNEMLSKLHEIDAVVVYRLDRLSRSQRDTITLIEEYFLKNNVEFVSLSETLDTSSPFGRAMIGILSVFAQLERETIRDRMVMGKIKRIEAGLPLTTAKGRTFGYDVIDSKLYINEEEAKQLQLIYDIFEEEQSITFLQKRLKELGFKVRTYSRYNNWLTNDLYCGYVSYKDKVHVKGIHEPIISEEQFYRVQEIFTRMGKNPNMNRDSASLLSSLVVCSKCGLGFVHRRKDTMSRGKKYHYRYYSCKTYKHIHELEKCGNKIWRADKLEELIINRVNNYSFTSRNVDKEDELDSLNEKLKIEHAKKRRLFDLYINGSYEVCELDSMMNDIDAQINYYESQIEANEELKKNKKIQENLAGLATVDFDSLEFREKQLYLKSLINKIYIDGEQVTIEWL

SEQ ID NO: 3958 - protein, 485 aa, synthetic construct
MTKKVAIYTRVSTTNQAEEGFSIDEQIDRLTKYAEAMGWQVSDTYTDAGSSGAKLERPAMQRLISDIENKAFDTVLVYKLDRLSRSVRDTLYLVKDVFTKNKIDFISLNESIDTSSAMGSLFLTILSAINEFERENIKERMTMGKLGRAKSGKSMMWTKTAFGYYHNRKTGILEIVPLQATIVEQIFTDYLSGISLTKLRDKLNESGHIGKDIPWSYRTLRQTLDNPVYCGYIKFKDSLFEGMHKPIIPYETYLKVQKELEERQQQTYERNNNPRPFQAKYMLSGMARCGYCGAPLRIVLGRKRKDGSRTMKYHCANRFPRKTKGVTVYNDNKKCDSGTYDLRYLENTVIDNLIGFQENNDNLLKIINGNNQPILDTSSFKKQISQIDKKIQKNSDLYLNDFISMNELKDRTDSLQAEKELLKAKISENKFNDSTDVFELVKTQLGSIPINELSYDNKKRIVNNLVSKVDVTADNVDVIFKFQLA

SEQ ID NO: 3959 - protein, 485 aa, synthetic construct
MTKKVAIYTRVSTTNQAEEGFSIDEQVDRLTKYAEAMGWQVSDTYTDAGVSGAKLERPAMQRLINDIENKAFDTVLVYKLDRLSRSVRDTLYLVKDVFTKNKIDFISLSESIDTSSAMGSLFLTILSAINEFERENIKERMTMGKLGRAKSGKSMMWTKAAFGYYHNRKTGILEIVPLQATIVEQIFTDYLSGISLTKLRDKLNESGHIGKDIPWSYRTLRQTLDNPVYCGYIKFKDSLFEGMHKPIIPYETYLKVQKELEERQRRAYERNNNPRPFQAKYMLSGMARCGYCGAPLRIVLGHRRKDGSRTMKYHCANRFPRKTKGITVYNDNKKCDSGTYDLSNLENTVIDTLIGFQENNDSLLKIINGNNQPILDTSSFKKQISQIDKKIQKNSDLYLNDFITMDELKDRTDSLQAEKELLKAKISENKFNGSTDVFELVKTQLGSIPINELSYDNKKKIVNNLVSKVDVTADNVDIIFKFQLA

SEQ ID NO: 3960 - protein, 469 aa, synthetic construct
MCYTTLVRAAVYLRISEDRSGEQLGVARQREDCLKLCDQHKWEPVEYLDNDVSASTGKRRPAYEQMLADITAGKIAAVVAWDLDRLHRRPIELEVFMSLADEKRLALATVAGDVDLATPQGRLVARLKGSVAAHETEHKKARQRRAARQKAERGYPNWSKAFGYLPGPNGPEPDPRTAPLVKQAYADILAGASLGDVCRQWNDAGAFTITGRPWTTTTLSKFLRKPRNAGLRAYKGARYGPVDRDAIVGKAQWSPLVDEATFWAAQAVLDAPGRAPGRKSVRRHLLTGLAGCGKCGNHLAGSYRTDGRVVYVCKACHGVAILADNIEPILCHIVAERLAMPNAVDLLRREIHDAAEAETIRLELETLYGELDHLAVERAEGLLTARQVKISTDIVNAKITKLQACQLDQERLRVLDGIPLGTPQVAGVIAELSPDRFRAVLDVLAEVVVQPVGKSGRIFNPERVQVNWR

SEQ ID NO: 3961 - protein, 452 aa, synthetic construct
MKAAIYIRVSTREQVENYSIQAQTEKLTALCRSKDWDVYDVFIDGGYSGSNMNRPALNEMLSKLHEIDAVVVYRLDRLSRSQRDTITLIEEYFLKNNVEFVSLSETLDTSSPFGRAMIGILSVFAQLERETIRDRMVMGKIKRIEAGLPLTTAKGRTFGYDVIDTKLYINEEEAKQLRLVYDIFEEERSITFLQKRLKKLGFKVRTYNCYNNWLTNDLYCGYVSYKDKVHVKGIHEPIISEEQFYRVQEIFTRMGTNPNMNRDSASLLNNLVVCGKCGLGFVHRRKDAMSRDKKYHYRYYSCKTYKHIHELEKCGNKIWRADKLEELIINRVNNYSLASRNVDKEDELDSLNEKLKIEHAKKRRLFGLYIDGRYEVSELDSMMNDIDAQINYYESRIEANEELKKNKKIQENLAHLAIVDFDSLEFREKQLYLKSLINKIYIDGEQVTIEWL

SEQ ID NO: 3962 - protein, 452 aa, synthetic construct
MKAAIYIRVSTREQVENYSIQAQTEKLTALCRSKDWDVYDVFIDGGYSGSNMNRPALNEMLSKLHEIDAVVVYRLDRLSRSQRDTITLIEEYFLKNNVEFVSLSETLDTSSPFGRAMIGILSVFAQLERETIRDRMVMGKIKRIEAGLPLTTAKGRTFGYDVIDSKLYINEEEAKQLQLIYDIFEEEQSITLLQKRLKKLGFKVRTYNRYNNWLTNDLYCGYVSYKDKVHVKGIHEPIISEEQFYRVQEIFTRMGKNPNMNRDSASLLSGLVVCSKCGLGFVHRRKDTTSRGKKYHYRYYSCKTYKHTHELEKCGNKIWRADKLEELVINRVNNYSFASRNVDKEDELDGLNEKLKIEHVKRKRLFDLYINGSYEVSELDSMMNDIDAQINYYESQIEANEELKKNKKIQENLAGLATVDFDSLEFREKQLYLKSLINKIYIDGEQVTIDWL

SEQ ID NO: 3963 - protein, 469 aa, synthetic construct
MNYTTPVRAAVYLRISEDRSGEQLGVARQREDCLKLCDQRRWVPVEYLDNDVSASTGKRRPAYEQMLADITAGKIAAVVAWDLDRLHRRPIELEAFMSLADEKRLALATVAGDVDLATPQGRLVARLKGCVAAHETEHKKARQRRAARQKAERGLPNWSKAFGYLPGPSGPEPDPRTAPLVKQAYADILAGASLGDVCRQWNDAGAFTITGRPWTTTTLSKFLRKPRNAGLRAYKGARYGPVDRNAIVGKAQWSPLVDEATFWAVQAVLDAPGRAPGRKSVRRHLLTGLAGCGKCGNHLAGSYRTDGRVVYVCKACHGVAILADNIEPILHHIVAERLAMPDAVDLLRREVHDAAEAETIRQELETLYGELDRLAVERAEGLLTARQVKISTDIVNAKITKLQARQLDQERLRVLDGIPLGTPQVASMIAELSPDRFRAVLDVLAEVVVRPVGKSGGIFNPERVQVNWR

SEQ ID NO: 3964 - protein, 485 aa, synthetic construct
MTKKVAIYTRVSTTNQAEEGFSIDEQIDRLTKYAEAMGWQVSDTYTDAGLSGAKLERPAMQRLINDIENKAFDTVLVYKLDRLSRSVRDTLYLVKDVFTKNKIDFISLNESIDTSSAMGSLFLTILSAINEFERENIKERMTMGKLGRAKSGKSMMWTKTAFGYYHNRKTGILEIVPMQATIVEQIFTDYLSGISLTKLRDKLNESGHVGKDIPWSYRTLRQTLDNPVYCGYIKFKDSLFEGMHKPIIPYETYLKVQKELEERQQQTYERNNNPRPFQAKYMLSGMARCGYCGAPLRIVLGHKRKDGSRTMKYHCANRFPRKTKGVTVYNDNKKCDSGTYDLSNLENTVIGILVGFQEDNDSLLKIINGNNQPTLDTSSFKKQISQIDKKIRKNSDLYLNDFITMDELKDRTDSLQAEKKLLEAKISETKFNDGTDVFELVKTQLGSIPINELSYDNKKKIVNNLVSKVDVTADNVDIIFKFQLA

SEQ ID NO: 3965 - protein, 452 aa, synthetic construct
MKAAIYIRVSTQEQVGNYSIQAQTEKLTALCRSKDWDVYDIFIDGGYSGSNMNRPALNEMLSKLHEIDAVVVYRLDRLSRSQRDTTTLIEEYFLKNNVEFVSLSETLDTSSPFGRAMIGILSVFAQLERETIRDRMVMGKIKRIEAGLPLTTAKGRTFGYDVIDTKLYINEEEAKQLRLIYDIFEEEQSITFLQKRLKKLGFRVRSYNRYNNWLTNDLYCGYVSYKDKVHVKGIHEPIISEEQFYRVQEIFTRMGKNPNMNRDSASLLNGLVVCSRCGLGFVHRSKDTMSRGKKYHYRYYSCKTYKHTHELEKCGNKTWRADKLEELIINRVNNYSFVSRNVDKEDELDGLNEKLKIEHAKKRRLFDLYINGSYEVSELDSMMSDIDAQINYYESQIEANEELKKNKKIQEDLADLATVDFDSLEFREKQLYLKSLINKIYIDGERVTIEWL

SEQ ID NO: 3966 - protein, 469 aa, synthetic construct
MSYTTPVRAAVYLRISEDRSGEQLGVARQREDCLKLCDQRKWVPVEYLDNDVSASTGKRRPAYEQMLADITAGKIAAVVAWDLDRLHRRPVELEAFMSLADEKHLALATVAGDVDLATPQGRLVARLKGCVAAHETEHKKARQRRAAKQKAERGLPNWSKAFGYLPGPNGPEPDPRTAPLVKQAYADILAGASLGDVCRQWNDAGALTITGRPWTATTLSKFLRKPRNAGLRAYKGARYGPVDRDAIVGKARWSPLVDEATFWAAQAVLDAPGRAPGRKSVRRHLLTGLAGCGKCGNHLAGSYRTDGRVVYVCKACHGVAILADNIEPILYHIVAERLAMPDAVDLLRREIHDAAEAETVRLELETLYGELDRLAVERAEGLLTARQVKISTDIVNAKITKLRAHQLDQERLRVFDGIPLGTPQVAGMIAELSPDRFRAVLDVLAEVVVQPVGKGGRIFNPERVQVNWR

SEQ ID NO: 3967 - protein, 485 aa, synthetic construct
MTKKVAIYTRVSTTNQAEEGFSIDEQIDRLTKYAEAMGWQVCDTYTDAGSSGAKLERPAMQRLINDIENKAFDTVLVYKLDRLSRSVRDTLHLVKDVFTKNKIDFISLNESIDTSSAMGSLFLTILSAINEFERENIKERMTMGKLGRAKSGKSMMWTKTAFGYYHNRKTGILEIVPPQAAIVEQIFTDYLSGISLTKLRDKLNESGHIGKDIPWSYRTLRQTLDNPVYCGYIKFKDSLFEGMHKPIIPYETYLRVQKELEERQQQTYERNNNPRPFQAKYMLSGMARCGYCGAPLRIVLGHKRKDGSRTMKYHCANRFPRKTKGVTVYNDNKKCDSGTYDLSNLENTVIDILVGFQENNDSLLKIINGNNQPILDTSSFKKQISRIDKKIQKNNDLYLNDFITMDELKDRTDSLQAEKKLLKAKISENKFNNSTDVSEQVKAQLGSIPINELSYDNKKKIVNNLVSKVDVTADNVDIIFKFQLA

SEQ ID NO: 3968 - protein, 452 aa, synthetic construct
MKAAIYIRVSTREQVENYSVQAQTEKLTALCRSKDWDVYDIFIDGGYSGSNMNRPALNEMLSKLHEIDAVVVYRLDRLSRSQRDTITLIEEYFLKNNVEFVSLSETLDTSSPFGRAMIGILSVFAQLERETIRDRMVMGKIKRIEAGLPLTTAKGRTFGYDVIDTKLYINEEEAKQLQLIYDIFEEEQSITFLQRRLKKLGFKVHTYNRYNNWLTNDLYCGYVSYKDKVHVKGIHEPIISEEQFYRVQEIFTRMGRNPNMNRDSASLLNNLVVCSKCGLGFVHRRKDTKSRGKKYHYRYYSCKTYKHIHELEKCGNKIWRADKLEELIINRVNNYSFASRNVDKEDELDSLNEKLKIEHAKKRRLFDLYINGSYEVSELDSMMNDIDAQINYYESQIEAYEELEKDEKIQERLAGLATVDFDSLEFREKQLYLKSLINKIYIDGEQVTIEWL

SEQ ID NO: 3969 - protein, 452 aa, synthetic construct
MKAAIYIRVSTQEQVGNYSIQAQTEKLTALCRSKDWDVYDIFIDGGYSGSNMNRPALNEMLSKLHEIDAVVVYRLDRLSRSQRDTTTLIEEYFLRNNVEFVSLSETLDTSSPFGRAMIGILSVFAQLERETIRDRMVMGKIKRIEAGLPLTTAKGRTFGYDVIDTKLYINEEEAKQLQLIYDIFEEEQSITFLQKRLKKLGFKVRTYNRYNSWLTNDLYCGYVSYKDKVHVKGIHEPIISEEQFHRVQEIFTRMGKNPNMNRDSASLLNNLVVCSKCGLGFVHRSKDTMSRGKKYHYRYYSCKTYKHTHELEKCGNKTWRADKLEELIINRVNKYSFASRNVDKEDELDSLNEKLKIEHAKKKRLFDLYVNGSYGVSELDSVMNDIDAQINYYESQIEANKELKKNKKIQENLADLATVDFDSLEFREKQQYLKSLINKIYIDGEQVTIEWL

SEQ ID NO: 3970 - protein, 485 aa, synthetic construct
MTKKVAIYTRVSTTNQAEEGFSIDEQIDRLTKYAEAMGWQVSDTYTDAGFSGAKLERPAMQRLINDIENKAFDTVLVYKLDRLSRSVRDTLHLVKDVFTKNKIDFISLTESIDTSSAMGSLFLTILSAINEFERENIKERMTMGKLGRAKSGKSMMWTKTAFGYYHNRKTGILEIVPLQATIVEQIFTDYLSGISLTKLRDKLNESGHIGKDIPWSYRTLRQTLDNPVYCGYIKFKGSLFEGMHKPIIPYETYLKVQKELEERQQQTYERNNNPRPFQAKYMLSGMARCGYCGAPLRIVLGHKRKDGSRTMKYHCANRFPRKTKGVTVYNDNKKCDSGTYDLSNLENTVIDNLIGFQENNDSLLKIINGNNQPILDSSSFKEQISQIDKKIQKNGDLYLNDFITMDELKDRTDSLQAEKKLLKAKISENKFNDSTDVFELVKTQLGSIPINELSYDNKKKIVNNLVSKVDVTADNVDIIFKFQLA

SEQ ID NO: 3971 - protein, 452 aa, synthetic construct
MKAAIYIRVSTREQVENYSIQAQTEKLTALCRSKDWDVYDIFIDGGYSGSNMNRPALNKMLSKLHEIDAVVVYRLDRLSRSQRDTITLIEEYFLRNNVEFVSLSETLDTSSPFGRAMIGILSVFAQLERETIRDRMVMGKIKRIEAGLPLTTAKGRTFGYDVIDSKLYINEEEAKQLQLIYDIFEEEQSITSLQKRLKKLGFKVRTYNRYSSWLTNDLYCGYVSYKDKVHVKGIHEPIISEEQFYRVQEIFARMGKNPNMNRDSASLLNNLVVCSKCGLGFVHRRKDTMSRGKKYHYRYYSCKTYKHIHELEKCGNKIWRADKLEELIINRVNNYSLASRNVDKEDELDSLNENLKIEHAKRERLFDLYINGSYEVSELDSMMNDIDAQINYYESQIEANEELKKNKKIQENLADLAAVDFDSLEFREKQLYLKSLINKIYVDGEQVIIEWL

SEQ ID NO: 3972 - protein, 452 aa, synthetic construct
MKAAIYIRVSTREQVENYSIQAQTEKLTALCRSKDWDVYDIFIDGGYSGSNMSRPALNEMLSKLHEIDAVVVYRLDRLSRSQRDTITLIEEYFLKNNVEFVSLSETLDTSSPFGRAMIGILSVFAQLERETIRDRMVMGKIKRIEAGLPLTTAKGRTFGYDVIDTKLYINEEEAKQLQLIYDIFEEEQSITFLQKRLKELGFKVHTYNRYNNWLTNDLYCGYVSYKDKVHVKGIHEPIISEEQFYRVQEIFTRMGKNPNMNRDSASLLNNLVVCSRCGLGFVHRRKDTTSRGKKYHYRYYSCKTYKHTHELEKCGNKIWRADKLEELIINRVNNYSLASRNVDKEDELDSLYEKLKIEHAKKKRLFDLYINGNYEVSELDSMMNDIDEQINYYESQIEANEELRKNKKIQENLAGLATVDYDNLGFREKQLYLKSLINKIYIDGEQVTIEWL

SEQ ID NO: 3973 - protein, 485 aa, synthetic construct
MTKKVAVYTRVSTTNQAEEGFSIDEQIDRLTKYAEAMGWQVSDTYTDAGFSGAKLVRPAMQRLINDIETKAFDTVLVYKLDRLSRSVRDTLYLVKDVFTKNKIDFISLSESIDTSSAMGSLFLTILSAINEFERENIKERMTMGKLGRAKSGKSMMWTKTAFGYYHNRKTGILEIVPLQAAIVEQIFTDYLSGISLTKLRDKLNESGHIGKDIPWSYRTLRQTLDNPVYCGYIKFKDSLFEGMHEPIIPYETYLKVQKELEERQQQTYERNNNPRPFQAKYMLSGMARCGYCGAPLRIVLGRKRKDGSRTMKYHCANRFPRKTKGVTVYNDNKKCDSGTYDLSNLENTVICNLIGFQENNDSLLKIINGNNQPILDTSSFKRQISQIDKKIQKNSDLYLNDFITMDELKDRTDSLQAEKKLLEAKISENKFNDSADVFELVKTQLGSIPINELSYDNKKKIVNDLVSKVDVTADNVDIVFKFQLA

SEQ ID NO: 3974 - protein, 469 aa, synthetic construct
MSYTTPVRAAVYLRISEDRSGEQLGVARQREDCLKLCGQRKWVPVEYLDNDVSASTGKRRPAYEQMLADITAGRIAAVVAWDLDRLHRRPIELEAFMSLADEKHLALATVAGDIDLATPQGRLVARLKGCVAAHETEHKKARQRRAARQKAERGLPNWSKAFGYLPGPNGPEPDPRTAPLVKQAYADILAGASLGDVCRQWNDAGAFTITGRPWTTTTLSKFLRKPRNAGLRAYKGARYGPVDRDAIVGKAQWSPLVDEATFWAAQAVLDAPGRAPGRKSVRRHLLTGLAGCGKCGNHLAGSYRTDGRVVYVCKACHGVAILADNIEPILYHIVAERLAMPGAVDLLRREIHDAAEAETIRLELETLYGELDRLAVERAEGLLTSRQVKISTDIVNAKITNLQARQLDQERLRVFDGIPLGTPQVAGMIAELSPDRFRAVLDVLAEVVVQPVGKGGRIFNPERVQVSWR

SEQ ID NO: 3975 - protein, 469 aa, synthetic construct
MSYTTPVRAAVYLRISEDRSGEQLGVARQREDCLKLCDQRKWVPVEYLDNDVSASTGKRRPAYEQMLADIAAGKIAAVVAWDLDRLHRRPIELEAFMSLADERRLALATVAGDVNLATPQGRLVARLKGCVAAHETEHKKARQRRAARQKAERGLPNWSNAFGYLPGPNGPEPDPRTAPLVKQAYADILAGASLGDVCRQWNDAGAFTITGRPWTSTTLSKFLRKPRNAGLRAYKGARYGPVDRDAIVGKAQWSPLVDETTFWAAQAVLDAPGRAPGRKSVRRHLLTGLAGCGKCGNHLAGSYRTDGRVVYVCKACHGVAILADNIEPILYHIVAERLAMPDAVDLLRREIHDAVEAETIRLELETLYGELDRLAVERAEGLLTARQVKISTDIVNAKITKLQARQLDQERLRVFDGIPLGTPQVAGMIAGLSPDRFRAVLGVLAEVVVQPVGKGGRMFNPERVQVNWR

SEQ ID NO: 3976 - protein, 485 aa, synthetic construct
MTKKVAIYTRVSTTNQAEEGFSIDEQIDRLTKYAEAMGWQVSDTYTDAGFSGAKLERPAMQRLINDIETKAFDTVLVYKLDRLSRSVRDTLYLVKDVFTKNKIDFISLNESIDTSSAMGSLFLTILSAINEFERENIKERMTMGKLGRAKSGKSMMWTKTAFGYYHNRKTGILEIVPLQATIVEQIFTDYLSGISLTKLRDKLNESGHIGKDIPWSYRTLRQTLDNPVYCGYIKFKGRLFEGMHKPIIPYETYLKVQKELEERQQQTYERNNNPRPFQAKYMLSGMARCGYCGAPLRIVLGHKRKDGSRTMKYHCANRFPRKTKGITVYNDNKKCDSGTYDLRNLENTVIDNLIGFQVNNDSLLKIINGNNQPILDTSSFKEQISQIDKKIQKNSDLYLNDFITMGELKDRTDSLQAEKKLLEAKISENKFNDSTDVLELVKTQLGSIPINELSYDNKKKIVNNLVSKVDVTADNVDIIFKFQLA

SEQ ID NO: 3977 - protein, 452 aa, synthetic construct
MKAAIYIRVSTREQVENYSIQAQTEKLTALCRSKDWDVYDIFIDGGYSGSNMNRPALNEMLSKLHEIDAVVVYRLDRLSRSQRDTITLIEEYFLKNNVEFVSLSETLDTSSPFGRAMIGILSVFAQLERETIRDRMVMGKIKRIEAGLPLTTAKGRTFGYDVIDTKLYINEEEAKQLQLIYDIFEEEQSITFLQKRLRKLGFKVRTYNRYNSWLTNDLYCGYVSYKDKVHVKGIHEPIISEEQFRRVQEIFTRTGKNPNMNRDSASLLNNLVVCSKCGLGFVHRRKDTTSRGKKYHYRYYSCKTYKHTHELEKCGNKIWRADKLEELIISRVNNYSLASRNVDKEDELDSLNEKLKIEHAKKKRLFDLYINGSYEVSELDSMMNDIDAQINYYESQIEANEGLKKNKKIQENLADLATVDFDSLEFREKQLYLKSLINKIYIDGEQVTIEWL

SEQ ID NO: 3978 - protein, 469 aa, synthetic construct
MSYTTPVRAAVYLRISEDRSGEQLGVARQREDCLKLCDQRKWVPVEYLDNDMSASTGKRRPAYEQMLADITAGKIAAVVAWDLDRLHRRPIELEAFMSLADERRLALATVAGDVDLSTPQGRLVARLKGSVAAHETEHKKARQRRAARQKAERGYPNWSKAFGYLPGPNGPEPDPRTAPLVKQAYADILAGASLGDVCRQWNDAGAFTITGRPWTTTTLSKFLRKPRNAGLRAYKGARYGPVDRDAIVGKAQWSPLVDEATFWAAQAVLDAPGRAPGRKSVRRHLLTGLAGCGKCGNHLAGSYRTDGRVVYVCKACYGVAILADNIEPILYHIVAERLAMPDAVGLLRREIHDAAEAETIRLELETLYGELDRLAVERAEGLLTARQVKISTDIVNAKITKLQARQLDQERLRVFDGIPLGTPQVAGMIAELSPDRFRAVLDVLAEVVVQPVGKSGRTFNPERVQVNWR

SEQ ID NO: 3979 - protein, 452 aa, synthetic construct
MKAAIYIRVSTQEQVENYSIQAQTEKLTALCRSKDWDVYDIFIDGGYSGSNMNRPALNEMLSKLHEIDAVVVYRLDRLSRSQRDTITLVEEYFLKNNVEFVSLSETLDTSSPFGRAMIGILSVFAQLERETIRDRMVMGKIKRIEAGLPLTTAKGRTFGYDVIDTKLYINEEEAKQLQLIYDIFEEEQSITFLQKRLKKLGFKVRSYSRYNSWLTNDLYCGYVSYKDKVHVKGIHEPIISEEQFYRVQEIFTRMGKNPNMNRDSASLLNNLVVCSKCGLGFVHRRKDTVSRGKKYHYRYYSCKTYKHIHELEKCGNKIWRADKLEELIINRVNDYSPASRNVDKAEELDSLNEKLKVEHAKKKRLFDLYINGSYNVSELDSMMNDIDAQVNYYESQIEANGELKKDKKIQENLANLATVDFNSLEFREKQLYLKSLINKIYIDGDQVTIEWL

SEQ ID NO: 3980 - protein, 452 aa, synthetic construct
MKAAIYIRVSTREQVENYSIQTQTEKLTALCHSKDWDVYDIFIDGGYSGSNMNRPALNEMLSKLHEIDAVVVYRLDRLSRSQRDTITLIEEYFLKNNVEFVSLSETLDTSSPFGRAMIGILSVFAQLERETIRDRMVMGKIKRIEAGLPLTTAKGRTFGYDVIDTKLYINEEEAKQLQLIYDIFEEEQSITFLQKRLKKLGFKVRTYSRYNSWLTNDLYCGYVSYKDKVHVKGIHEPIISEEQFRRVQEIFTRMGKNPNMNRDSASLLNNLVVCSKCGLGFVHRRKDTTSRGKKYHYRYYSCKTYKHTHELEKCGNKIWRADKLEELVINRVSDYSFASRNVDKDDELDSLNEKLKIEHAKKKRLFDLYINGSYEVSELDCMMSDIDAQINYYESQIEANEELKKNKKIQENLADLATVDFDSLEFREKQLYLKSLINKIYIDGEQVTIEWL

SEQ ID NO: 3981 - protein, 452 aa, synthetic construct
MRAAIYIRVSTREQVENYSIQAQTEKLTALCRSKDWDVYDIFIDGGYSGSNMNRPALNEMLSKLHEIDAVVVYRLDRLSRSQRDTITLIEEYFLKNNVEFVSLSETLDTSSPFGRAMIGILSVFAQLERETIRDRMVMGKIKRIEAGLPLTTAKGRTFGYDVIDSKLYINEEEAKQLQLIYDIFEEEQSITFLQKRLKKLGFKVHTYNRYNNWLTNDLYCGYVSYKDKVHVKGIHEPIISEEQFCRVQEIFTRMGKNPNMNRDSASLLSSLVVCSKCGLGFVHRRKDTMSRGKKYHYRYYSCKTYKHTHELEKCGNKIWRADKLEELIINRVNNYSFASRNVDKEDELDSLNEKLKIEYAKKKRLFDLYINGSYEVSELDSMMNDIDAQINYYESQIEANEELKKNKKIQENLANLATVDYDSLEFREKQLYLKSLINKIYIDGEQVTIEWQ

SEQ ID NO: 3982 - protein, 452 aa, synthetic construct
MKAAIYIRVSTREQVENYSIQAQTEKLTALCRSKGWDVYDIFIDGGYSGSNMNRPALNEMLNKLHEIDAVVVYRLDRLSRSQRDTITLIEEYFLKNNVEFVSLSETLDTSSPFGRAMIGILSVFAQLERETIRDRMVMGKIKRIEAGLPLTTAKGRTFGYDVIDTKLYINEEEAKQLQLIYDIFEEEQSITFLQKRLKKLGFKVCTYNRYSNWLTNDLYCGYVSYKDKVHVKGIHEPIISEEQFYRVQEIFTRMGKNPNMNRDSASLLSNLVVCSKCGLGFVHRRKDAMSRGKKYHYRYYSCKTYKHIHELEKCGNKIWRADKLEELIIDRVNNYSFASRNADKEDELDSLNEKLKIEHAKKKRLLDLYINGSYDVSELDSMMNDIDAQINHYESQIEANEELKKNKKIQENLANLATVDFDSLELREKQLYLKSLINKIYIDGEQVTIEWL

SEQ ID NO: 3983 - protein, 452 aa, synthetic construct
MKAAIYIRVSTQEQVENYSIQAQTEKLTALCRSKDWDVYDIFIDGGYSGSNMNRPALNEMLSKLREIDAVVVYRLDRLSRSQRDTITLIEEYFLKNNVEFVSLSETLDTSSPFGRAMIGILSVFAQLERETIRDRMVMGKIKRIEAGLPLTTAKGRTFGYDVIDTKLYINEEEAKQLQLIYDIFEEEQSITFLQKRLKKLGLKVRTYSRYYSWLTNDLYCGYVSYKDKVHVKGIHEPIISEEQFYRVQEIFTRMGKNPNMNRDSASLLNNLVVCSKCGLGFVHRRKDTMSRGKKYHYRYYSCKTYKHIHELEKCGNKIWRADKLEELIINRVNNYSFASRNVDKEDELDSLNEKLKIEHAKRKRLFDLYINGSYEVSELDSMMSDIDAQINYYESQIEANEELRKNKKIQKNLADLATVDYDSLEFREKQLYLKSLINKIYIDGEQVTIEWL

SEQ ID NO: 3984 - protein, 485 aa, synthetic construct
MTKKVAVYTRVSTTNQAEEGFSIDEQIDRLTKYAEAMGWQVSDTYTDAGFSGAKLERPAMQRLINDIENKAFDTVLVYKLDRLSRSVRDTLYLVKDVFAKNKIDFISLNESINTSSAMGSLFLTILSAINEFERENIKERMTMGKLGRAKSGKSMMWTKTAFGYYHNRKTGILEIVPLQATIVEQIFTDYLSGISLTKLRDKLNESGHIGKDIPWSYRTLRQTLDNPVYCGYIKFKDSLFEGMHKPIIPYETYLKVQKELEERQQQAYERNNNPRPFQAKYMLSGMARCGYCGAPLRIVLGHKRKDGSRTMKYHCANRFPRKTKGVTVYNDNKKCESGTYDLSNLENTVIDILIGFQENNDSLLRIINGNNQPILDTSSFKKQISQIDKKIQKNSDLYLNDFITMDELKDRTDSLQAEKKLLKAKISENKFNDRTDVFELVKTQLGNIPINELSYDNKKKIVNNLVGKVDVTADNVDIIFKFQLA

SEQ ID NO: 3985 - protein, 452 aa, synthetic construct
MKAAIYIRVSTREQVENYSIQAQTEKLTALCRSKDWDVYDIFVDGGYSGSNMNRPALNEMLSKLHEIDAVVVYRLDRLSRSQRDTITLIEEYFLKNNVEFVSLSETLDTSSPFGRAMIGILSVFAQLERETIRDRMVMGKIKRIEAGLPLTTAKGRTFGYDVIDTKLYINEEEAKQLQLIYDIFEEEQSITLLQKRLKKLGLKVRTYSRYNDWLTNDLYCGYVSYKDKVHVKGIHEPIISEEQFYRVQEIFTRMGKNPNMNRDSASLLNNLVVCSKCGLGFVHRRKDTMSRGKKYRYRYYSCKTYKHIHELEKCGNKIWRADKLEELIINRVNNYSFASRNVDKEDELDSLNEKLKIEHAKKKRLFDLYINGNYDVSELDSMMNDIDAQINYYESQIEANEELKKNKKIQENLADLATVDYDSLEFREKQLYLKSLINKIYIDGEQVTIEWL

SEQ ID NO: 3986 - protein, 485 aa, synthetic construct
MTKKVAIYTRVSTINQAEEGFSIDEQIDRLTKYAEAMGWQVSDTYTDAGFSGAKLERPAMQCLINDIENKAFDTVLVYKLDRLSRSVRDTLYLVKDVFTKNKIDFISLNESIDTSSAMGSLFLTILSAINEFERENIKERMTMGKLGRAKSGKSMMWTKTAFGYYHNRKTGILEIVPLQATIVEQIFTDYLSGISLTKLRDKLNESGHIGKDIPWSYRTLRQTLDNPVYCGYIKFKDSLFEGMHKPIIPYETYLKVQKELEERQQQTYERNNNPRPFQAKYMLSGMARCGYCGAPLKVVLGHKRKDSSRTMKYHCANRFPRKTRGVTVYNDNKKCDSGTYDLSDLENTVIDNLIGFQENNDSLLKIINGNNQPILDTSSFKKQISQIDEKIQKNSDLYLNDFITMDELKARTDSLQAEKKLLKAKISENKVNDSTDVYELVRTQLGSIPINELSYDNKKKIVNNLVSKVDVTADNVDITFKFQLA

SEQ ID NO: 3987 - protein, 452 aa, synthetic construct
MKAAIYIRVSTREQVENYSIQAQTEKLTALCRSKDWDVYDIFIDGGYSGSNMNRPALNEMLSKLHEIDAVVVYRLDRLSRSQRDTITLIEEYFLRNNVEFVSLSETLDTSSPFGRAMIGILSVFAQLERETIRDRMVMGKIKRIEAGLPQTTAKGRTFGYDVIDTKLYINEEEAKQLQLIYDIFEEEQSITFLQRRLKKLGFKVRTYSRYNNWLTNDLYCGYVSYKDKVHVKGIHEPIISEEQFYRVQEIFTRMGKNPNMNRDSASLLNNLVVCSKCGLSFVHRRKDTMSRGKKYHYRYYSCKTYKHTHELEKCGNKIWRADKLEELIINGVNNYSFASRNVDKEDELNSLNEKLKIEHAKKKRLFDLYINGSYNVSELDSMMNDIDAQINYYESQIEANEELKKNKKIQENLAELATVDFDSLGFREKQQYLKSLISKIYIDGEQVTIEWL

SEQ ID NO: 3988 - protein, 485 aa, synthetic construct
MTKKVAIYTRVSTTNQAEEGFSIDEQIDRLTKYAEAMGWQVSDTYTDAGLSGAKLERPAMQRLINDIENKAFDTVLVYKLDRLSRSVRDTLYLVKDVFTKNKIDFISLNESIDTSSAMGSLFLTILSAINEFERENIKERMTMGKLGRAKSGKSMMWTKTAFGYYHDRKTGILEIVPLQATIVEQIFTDYLSGISLTKLRDKLNESGHIGKDIPWSYRTLRQTLDNPVYCGYIKFKGSLFEGMHKPIIPYETYLKVQKELEERQRQTYERNNNPRPFQAKYMLSGMARCGYCGAPLRIVLGHKRKDGSRTMKYHCANRFPRKTKGVTVYNDNRKCDSGTYDLSDLENTVIDNLIGFQENNDSLLKIINGNDQPIPDTSSLEEQISQIDKKIQKNSDLYLNDFITMDELKVRTDSLQAEKKLLEAKISENKFNDSTDVFELVKTQLGSIPINELSYDNKKKIVNNLVSKVDVTADNVDIIFKFQLA

SEQ ID NO: 3989 - protein, 485 aa, synthetic construct
MTKRVAIYTRVSTTNQVEEGFSIDEQVDRLTKYAEAMGWQVSDTYTDAGFSGAKLERPAMQRLINDVENKAFDTVLVYKLDRLSRSVRDTLYLVKDVFTKNKIDFISLSESIDTSSAMGSLFLTILSAINEFERENIKERMTMGKLGRAKSGKSMMWTKTAFGYYHNRKTGILEIVPLQATIVEQIFTDYLSGISLTKLRDKLNESGHIGKDIPWSYRTLRQTLDNPVYCGYIKFKGSLFEGMHKPIIPYETYLKVQKELEERQQQTYERNNNPRPFQAKYMLSGMARCGYCGAPLRIVLGHKRKDGSRTMKYHCANRFPRKTKGVTEYNDNKKCDSGTYDLGNLENTVIDNLIGLQENNDSLLKIINGNNQPILDTSSFKKQISQIDRKIQKNSDLYLNDFITMDELKVRTDSLQAEKKLLKAKISENEFNDSTDAFELVKSQLGSIPINELGYDDKKKIVSNLVSKVDVTADNVDIIFKFQLA

SEQ ID NO: 3990 - protein, 469 aa, synthetic construct
MSNTTPVRAAVYLRISEDRSGEQLGVARQREDCLKLCGQRKWVPVEYLDNDVSASTGKRRPAYEQMLADITAGKIAAVVAWDLDRLHRRPIELEAFMSLADERRLALATVAGDVDLATPQGRLVARLKGCVAAHETEHKKARQRRAARQKAERGHPNWSKAFGYLPGPNGPEPDPRTAPLVKQAYADILAGASLGDVCRQWNDAGAFTITGRPWTTTTLSKFLRKPRNAGLRAYKGARYGPVDRDAIVGKAQWCPLVDEATFWAAQAVLDAPGRAPGRKSVRRHLLTGLAGCGKCGNHLAGSYRTDGRVVYVCKACHGVAILADNIEPILYHIVAERLAMPDAVDLLCREIHDAAEAGTIRLELETLYGELDRLAVERAEGLLTARQVKISTDIVNAKIAKLQARQLDQGRLRVLDGIPLGTPQVAGMIAELSPDRFRAVLDVLAEVVVQPVGKSGRIFNPERVQVNWR

SEQ ID NO: 3991 - protein, 485 aa, synthetic construct
MTKKVAIYTRVSTTNQAEEGFSIDEQIDRLTKYAEAMGWQVSDTYTDAGFSGAKLKRPAMQRLINDIENKAFDTVLVYKLDRLSRSVRDTLYLVKDVFTKNKIDFISLNESIDTSSAMGSLFLTILSAINEFERENIKERMTMGKLGRAKSGKSMMWTRTAFGYYHNRKTGILEIVPLQATIVEQIFTDYLSGISLTKLRDKLNESGHIGKDIPWSYRTLRQTLDNPVYCGYIKFKDSLFEGMHKPIIPYETYLKVQKELEERQQQTYERNNNPRPFQAKYMLSGMARCGYCGAPLRIVLGHKRKDGGRTMKYHCANRFPRKTKGVTVYNDNKKCDSGTYDLSNLENTVIDSLIGFQENNDSLLKIIDGNNQPILDTSSFKKQISQIDKKIQRNSDLYLNGFITMDELKDRTDSLQAEKKLLKAKISENKFNDSTDVFELVKTQLGSIPINELSYDNKKKIVNNLVSKVDVTADKVDIIFKFQLA

SEQ ID NO: 3992 - protein, 485 aa, synthetic construct
MTKKVAIYTRVSTTNQAEEGFSIDEQIDRLTKYAEAMGWQVSDTYTDAGSSGAKLERPAMQRLINDIENKAFDTVLVYKLDRLSRSVRDTLYLVKDVFTKNKIDFISLSESIDTSSAMGSLFLTILSAINEFERENIKERMTMGKLGRAKSGKSMMWTKTAFGYYHNRKTGILEIVPLQATIVEQIFTDYLSGISLTKLRDKLNESGHIGKDIPWSYRTLRQTLDNPVYCGYIKFKDSLFEGMHKPIIPYETYLKVQKELEERQRQTYERNNNPRPFQAKYMLSGMARCGYCGAPLRIVLGHKRKDGSRTMKYHCANRFPRKTKGVTVYNDNKRCDSGTYDLSNLENTVIDNLVGFQENNDSLLKIINGNIQPILDTSSFKKQISQIDKKIQKNSDLYLNDFITMDELKDRTDSLQAEKKLLKAKISENKFNGSTDVFELVKSQLGSIPINELSYDDKKKIVNNLVSKVDVTADNVDIIFKFQLA

SEQ ID NO: 3993 - protein, 452 aa, synthetic construct
MKAAIYIRVSTREQVENYSIQAQTEKLTALCRSKDWDVYDIFIDGGYSGSNMNRPALNEMLSKLHEIDAVVVYRLDRLSRSQRDTITLIEEYFLKNNVEFVSLSETLDTSSPFGRAMIGILSVFAQLERETIRDRMVMGKIKRIEAGLPLTTAKGRTFGYDVIDTKLYINEEEAKQLQLIYDIFEEEQSITFLQKRLKKLGFKVRTYNCYNNWLTNDLYCGYVSYKDKVRVKGIHEPIISEEQFYRVQEIFARMGKNPNMNRDSASLLNNLVVCSKCGLGFVHRRKDTMSRGKKYHYRYYSCKTYKHIHELEKCGNKIWRADKLEELIINRVNNYSIASRNVDKEDELDGLNEKLKIEHAKKKRLFDLYINGSYEVSELDSMMNDIDAQINYYESQIEANEELKKNKKIQENLANLATVDYDSLEFREKRLYLKSLINKIYIDGEQVTIEWL

SEQ ID NO: 3994 - protein, 452 aa, synthetic construct
MKAAIYIRVSTREQVENYSIQAQTEKLTALCRSKDWDVYDIFIDGGYSGSNMNRPALNEMLSKLHEIDAVVVYRLDRLSRSQRDTITLIEEYFLKNNVEFVSLCETLDTSSPFGRAMIGILSVFAQLERETIRDRMVMGKIKRIEAGLPLTTAKGRTFGYDVIDTKLYINEEEAKQLQLIYDIFEEERSITSLQKRLKKLGFKVRTYNRYNNWLTNDLYCGYVSYKDKVHVKGIHEPIISEEQFYRVQEIFTRMGKNPNMNRDSASLLNNLVVCSKCGLGFVHRRKDAMSRDKKYHYRYYSCKTYKHIHELEKCGNKIWRADKLEELIINRVNNYSFASRNADKEDELNSLNEKLKIERAKKKRLFELYINGSYEVSELDSMMNDIDAQINYYESQIEANEELKKSKKIQENLAKLATVDFDSLEFREKQLYLKSLINKIYIDGEQVTVEWL

SEQ ID NO: 3995 - protein, 485 aa, synthetic construct; identical to SEQ ID NO: 3779

SEQ ID NO: 3996 - protein, 452 aa, synthetic construct
MKAAIYIRVSTREQVENYSIQAQTEKLTALCRSKDWDVYDIFIDGGYSGSNMNRPALNEMLSKLHEIDAVVVYRLDRLSRSQRDTITLIEEYFLKNNVEFVSLSETLDTSSPFGRAMIGILSVFAQLERETIRDRMVMGKIKRIEAGLPLTTAKGRTFGYDVIDTKLYINEEEAKQLQLIYDIFEEEQSITSLQKRLKELGFKVRTYNRYNNWLTNDLYCGYVSYKDKVHVKGIHEPIISEEQFYRVQEIFTRMGKNPNMNRDSASLLNNLVVCSKCGLGFVHRRKDAMSRDKKYHYRYYSCKTYKHIHELEKCGNKIWRADKLEELIINRVNDYSVASRNVDKEDELDSLNEKLKIEHAKKKRLFDLYINGSYEVSELDSMMNDIDAQINYYESQIEANEELKKNKKIQENLAYLATVDFDSLEFREKQLYLKSLINKIYIDGEQVTIEWL

SEQ ID NO: 3997 - protein, 469 aa, synthetic construct
MCYTTPVRAAVYLRISEDRSGEQLGVARQREDCLKLCGQRKWEPVEYLDNDVSASTGKRRPAYEQMLADITAGKIAAVVAWDLDRLHRRPIELEAFMSLADEKRLALATVAGDVDLATPQGRLVARLKGSVAAHETEHKKARQRRAARQKAERGHPNWSKAFGYLPGPNGPEPDPRTAPLVKQAYADILAGASLGDVCRQWNDAGAFTITGRPWTTTTLSKFLRKPRNAGLRAYKGARYGPVDRDAIVGKAQWSPLVDEATFWAAQAVLDAPGRAPGRKSVRRHLLTGLAGCGKCGNHLAGSYRTDGRVVYVCKACHGVAILADNIEPILHHIVAERLAMPDAVDLLRREIHDAAEAETIRLELDTLYGELDRLAVERAEGLLTARQVKISTGIVNAKITKLQARQLDQERLRVFEGIPLGTPQVAGAIAELSPDRFRAVLDVLAEVVVQPVGKGGRISNPERVQVNWR

SEQ ID NO: 3998 - protein, 452 aa, synthetic construct
MKAAIYIRVSTQEQVENYSIQAQTEKLTALCRSKDWDVYDIFVDGGYSGSNMNRPALNEMLSKLHEIDAVVVYRLDRLSRSQRDTSTLIEEYFLKNNVEFVSLSEALDTSSPFGRAMIGILSVFAQLERETIRDRMVMGKIKRVEAGLPLTTAKGRTFGYDVIDTKLYINEEEAKQLQLIYDIFEEEQSITSLQKRLKKLGFKVRAYNRYNNWLTNDLYCGYVSYKDKVHVKGIHEPIISEEQFYRVQEIFTRMGKNPNMNRDSASLLNSLVVCSKCGLGFVHRRKDVMSRGKKYHYRYYSCKTYKHTHELEKCGNKTWRADKLEELIINRVNNYSFVSRNVDKEDELDSLNEKLKIEHAKKKRLFDLYINGSYEVSELDSMMNDIDAQINYYESQIEANEELKKDKKIQEDLADLATVDFDSLEFREKQLYLKSLINKIYIDGEQVTIEWL

SEQ ID NO: 3999 - protein, 469 aa, synthetic construct
MSYTTPVRAAVYLRISEDRSGEQLGVARQREDCLKLCDQRKWVPVEYLDNDVSASTGKRRPAYEQMLADITAGKIAAVVAWDLDRLHRRPVELEAFMSLADEKRLALATVAGDVDLATPQGRLVARLKGCVAAHETEHKKARQRRAARQKAERGLPNWSKAFGYLPGPNGPEPDPRTAPLVKQAYADILAGASLGDVCRQWNDAGAFTITGRPWTTTALSKFLRKPRNAGLRAYKGARYGPVDRDAIVGKAQWSPLVDEATFWAAQAVLDAPGRAPGRKSVRRHLLTGLAGCGKCGNHLAGSYRTDGRVVYVCKACHGVAILADNIEPILYHTVAERLAMPDAADLLRCEIHDAAEAETIRLELGALYGELDRLAVERAEGLLTARQVKISTDIVNAKITKLQARQLDQERLRVFDGIPLGTPQVAGMIAELSPDRFRAVLDVLAEVVVQPVGKSGRIFNPERVQVNWR

SEQ ID NO: 4000 - protein, 469 aa, synthetic construct
MSYTTPVRAAVYLRISEDRSGEQLGVARQREDCLKLCGQRKWVPVEYLDNDVSASTGKRRPAYEQMLADITAGKIAAVVAWDLDRLHRRPVELEAFMSLADEKRLALATVAGDVDLATPQGRLVARLKASVAAHETEHKKARQRRAARQKAERGYPNWSKAFGYLPGPNGPEPDPRTAPLVKQAYADILAGASLGDVCRQWNDAGAFTITGRPWTTTTLSKFLRKPRNAGLRAYKGARYGPVDRDAIVGKAQWSPLVDEATFWAAQAVLDAPGRAPGRKSVRRHLLTGLAGCGKCGNHLAGSYRTDGRVVYVCKACHGVAILADNIEPILYHIVAERLAMPDAADLLRREIHDAAEAETIRLKLETLYGELDRLAVERAEGLLTARQVKIGTDIVNAKITKLQARQLDQERLRVFDGIPLGTPQVAGMIAELSPDRFRAVLGVLAEVVVQPVGKSGRIFSPERVQVNWR

SEQ ID NO: 4001 - protein, 452 aa, synthetic construct
MKAAIYIRVSTREQVENYSIQAQTEKLTALCRSKDWDVYDIFIDGGYSGSNMNRPALNEMLSKLHEIDAVVVYRLDRLSRSQRDTITLIEEYFLKNNVEFVSLSETLDTSSPFGRAMIGILSVFAQLERETIRDRMVMGKIKRIEAGLPLITAKGRTFGYDVIDTKLYINEEEAKHLQLIYDIFEEEQSITFLQRRLKKLGFKVCTYNRYNSWLTNDLYCGYVSYKDKVHVKGIHEPIISEEQFYRVQEIFTRMGKDPNMNRDSASLLNNLVVCSKCGLGFVHRRKDTMSRGKKYHYRYYSCKTYKHTHELEKCGNKIWRADKLEELIINRVNNYSFASRNADKEDELDSLYEKLKIEHARKKRLFDLYINGSYEVSELDSMMNGIDAQINYYESQIEANKELKKNKKIQENLAVLATVDFDSLEFREKQRYLKSLINKIYIDGEQVTIEWL

SEQ ID NO: 4002 - protein, 452 aa, synthetic construct
MKAAIYIRVSTQEQVENYSIQAQTEKLTALCRSKDWDVYDIFVDGGYSGSNMNRPALNEMLSKLHEIDAVVVYRLDRLSRSQRDTTTLIEEYFLKNNVEFVSLSETLDTSSPFGRAMIGILSVFAQLERETIRDRMVMGKIKRIEAGLPLTTAKGRTFGYDVIDTKLYINEEEAKQLQLIYDIFEEEQSITSLQKRLKKLGFKVRAYNRYNNWLTNDLYCGYVSYKDKVHVKGIHEPIISEEQFYRVQGIFTRMGKNPNMNRDSASLLSNLVVCSKCGLGFVHRSKDTMSRGKKYHYRYYSCKTYKHTHELEKCGNKIWRADKLEELIIDRVNNYSFVSRSVDKEDELDCLNEKLKIEHAKKERLFNLYINGSYEVSELDSMMNDIDAQINYYESQIEANEELKKNKKIQENLANLATVDFDSLGFREKQLYLKSLINKIYIDGEQVTIEWL

SEQ ID NO: 4003 - protein, 452 aa, synthetic construct
MKAAIYIRVSTQEQVGNYSIQAQTEKLTALCRSKDWDVYDIFIDGGYSGSNMNRPALNEMLSKLHEIDAVVVYRLDRLSRSQRDTTTLIEEHFLKNNVEFVSLSETLDTSSPFGRAMIGILSVFAQLERETIRDRMVMGKIKRIEAGLPLTTAKGRTFGYDVIDTKLYINEEEAKQLQLIYDIFEEEQSITSLQKRLKKLGFKVRTYNRYNNWLTNDLYCGYVSYKDKVHVKGIHEPIISEEQFYRVQEIFTRMGKNPNMNRDSASLLNNLVVCSKCGLGFVHRSKDTMSRGKKYHYRYYSCKTYKHTHELEKCGNKTWRADKLEELIINRVNNYSLASRNADKEDELDSLNEKLKIEHARKKRLFDLYINGGYEASELDSMMNDIDAQINYYESQIEASEELKKNKRIQENLADLATVDFDSLEFREKQLYLKSLINKIYIDGEQVTIEWL

SEQ ID NO: 4004 - protein, 452 aa, synthetic construct
MKAAIYIRVSTREQVENYSIQAQTEKLTALCRSKDWDVYDIFIDGGYSGSNMNRPALNEMLSRLHEIDAVVVYRLDRLSRSQRDTITLIEEYFLKNNVEFVSLSETLDTSSPFGRAMIGILSVFAQLERETIRDRMVMGKIKRIEAGLPLTTAKGRTFGYDVIDTKLYINEEEARQLQLIYDIFEEEQSITSLQKRLKELGFKVRTYNRYNNWLTNDLYCGYVSYKDKVRVKGIHEPIISEEQFYRVQEIFTRMGKNPNMNRDSASLLNNLVVCSKCGLGFVHRRKDTVSRDKKYHYRYYSCKTYKHIHELEKCGNKIWRADKLEELIINRVNNYSFAGRNADKEDELDSLNEKLKIEHAKKRRLFDLYINGNYEVSELDSMMSDIDAQINYYESQIEANEELKKNKKIQENLAYLATVDYDCLEFREKQLYLKSLINKIYIDGEQVTIEWL

SEQ ID NO: 4005 - protein, 452 aa, synthetic construct
MKAAIYIRVSTREQVENYSIQAQTEKLTALCRSKDWDVYDIFIDGGYSGSNMNRPALNEMLSKLHEIDAVVVYRLDRLSRSQRDTITLIEEYFLKNNVEFVSLSETLDTSSPFGRAMIGILSVFAQLERETIRDRMVMGKIKRIEAGLPLTTAKGRTFGYDVIDTKLYINEEEAKQLQLIYDIFEEEQSITFLQKRLKKLGFKVRTYSCYNNWLSNDLYCGYVSYKDKVHVKGIHEPIISEEQFYRVQEIFTRMGKNPNMNRDSASLLNNLVVCSKCGLGFVHRRKDTTSRGKKYHYRYYSCKTYKHIHELEKCGNKIWRADKLEELIINRVSNYSFASRNVDKEDELDSLNEKLKIEHAKRRRLFDLYINGSYNVSELDSMMNDIDAQIDYYESQIGANEELKKNKKIQENLAGLATVDFDSLEFREKQLYLKSLINKIYIDGEQVAIEWL

SEQ ID NO: 4006 - protein, 485 aa, synthetic construct
MNKKVAIYTRVSTTNQAEEGFSIDEQVDRLTKYAEVMGWQVSDTYTDAGFSGAKLGRPAMQRLINDIENKAFDAVLVYKLDRLSRSVRDTLYLVKDVFTKNKIDFISLSESIDTSSAMGSLFLTILSAINEFERENIKERMSMGKLGRAKSGKSMMWTKTAFGYYHNRKTGILEIVPLQATIVRQIFTDYLSGISLTKLRDKLNESGHIGKDIPWSYRTLRQTLDNPVYCGYIKFKDSLFEGMHKPIIPYETYLKVQKELEERQQQTYERNNNPRPFQAKYMLSGMARCGYCGAPLRVVLGHKRKDGSRTMKYHCANRFPRKTKGVTVYNDNKKCDSGTYDLGNLENTVIDNLIGFQESSDSLLKIINGNNQPVLDTSSFEEQISQIDKKIQKNSDLYLNDFITMDELKDRTDSLQAEKKLLKAKISENKFNDSTDVFELVKTQLGSIPINELSYDNKKKIVNNLVSKVDVTADNVDIIFKFQLA

SEQ ID NO: 4007 - protein, 469 aa, synthetic construct
MSYTTPVRAAVYLRISEDRSGEQLGVARQREDCLKLCDQRKWVPVEYLDNDVSASTGKRRPAYEQMLADITAGKIAAVVAWDLDRLHRRPVELEAFMSLADEKRLALATVAGDVDLATPQGRLVARLKGCVAAHETEHKKARQRRAARQKAERGLPNWSKAFGYLPGPNGPEPDPRTAPLVKQAYADILAGASLGDVCRQWNGAGAFTITGRPWTTTTLSKFLRKPRNAGLRAYKGARYGPVDRNAIVGKAQWSPLVDEATFWAAQAVLDAPGRAPGRKGVRRHLLTGLAGCGKCGNHLAGSYRTDGRVVYVCKACHGVAILADNIEPILHHIVAERLAMPDAVDLLRREIHDAAEAETIRLELETLCGELDRLAVERAEGLLTARQVKISTDIVNAKITKLQTRQLDQERLRVFDGIPLGTPQVAGTIAELSPDRFRAVLDVLAEVVVQPVGKSGRIFNPERVQVNWR

SEQ ID NO: 4008 - protein, 485 aa, synthetic construct
MTKKVAIYTRVSTTNQAEEGFSIDEQIDRLTKYAEAMGWQVSDTYTDAGFSGAKLERPAMQRLINDIENKAFDTVLVYKLDRLSRSVRDTLYLVKDVFTKNKIDFISLNESINTSSAMGSLFLTILSAINEFERENIKERMTMGKLGRAKSGKSMMWTKTAFGYYHNRKTGILEIVPLQATIVEQIFTDYLSGISLTKLRDKLNESGHIGKDIPWSYRTLRQTLDNPVYCGYIKFKDSLFEGMHKPIIPYETYLKVQKELEERQQQTYERNSNPRPFQAKYMLSGMARCGYCGAPLRIVLGRKRKDGSRTMKYHCANRFPRKTKGVTVYNDNKKCDSGTYDLSDLENTVIDTLIGLQENNDSLLEIINGNSQPILDTSSFKRQISQIDKKIQKNSDLYLNDFITMDELKDRTDSLQAEKKLLKAKISENKFNDSTDVFELVKTQLGGIPINELSYDNRKKIVNNLVSKVDVTADSVDIIFKFQLA

SEQ ID NO: 4009 - protein, 452 aa, synthetic construct
MKAAIYIRVSTREQVENYSIQAQTEKLTALCRSKDWDVYDIFIDGGYSGSNMNRPALNEMLSKLHEIDAVVVYRLDRLSRSQRDTITLIEEHFLKNNVEFVSLSETLDTSSPFGRAMIGILSVFAQLERETIRDRMVMGKIKRIEAGLPLTTAKGRTFGYDVIDTKLYINEEEAKQLQLIYDIFEEEQSITFLQKRLKKLGFKVHTYNRYSNWLTNDLYCGYVSYKDKVHVKGIHEPIISEEQFYRVQEIFTRMGKNPNMNRDSASLLSNLVVCSKCGLGFVHRRKDTMSRGKKYHYRYYSCKTYKHTHELEKCGNKIWRADKLEELIINRVSNYSLASRDVDKEDELDSLNEKLKIEHAKKKRLFNLYINGSYEVSELDSMMDDIDAQINYYESQIEANEELKKTKKIQENLADLATVDFDSLEFREKQLYLKSLINKIYIDGEQVTIEWL

SEQ ID NO: 4010 - protein, 469 aa, synthetic construct
MSYTTPVRAAVYLRISEDRSGEQLGVARQREDCLKLCDQRKWVPVEYLDNDVSASTGKRRPAYEQMLADITAGKIAAVVAWDLDRLHRRPIELEAFMCLADEKRLALATVAGDVDLATPQGRLVARLKGSVAAHETEHKKARQRRAARQKAERGHPNWSKAFGYLPGPNGPEPDPRTAPLVKQAYADILAGASLGDVCRQWNDAGAFTITGRPWTTTALSKFLRKPRNAGLRAYKGARYGPVDRDAIVGKAQWSPLVDEATFWAAQAVLDAPGRAPGRKSVRRHLLTGLAGCGKCGNHLAGSYRTDGRVVYVCKACHGVAILADNIEPILYHAVAERLAMPGAVDLLRREIHDAAEAETIRLELETLYGELDCLAVERAEGLLTARQVKISTDIVNAKITRLQAHQLDQERLRVFDGIPLGTPQVAGMIAELSPDRFRAVLDVLAEVVVQPVGKGGRILNPERVQVNWR

SEQ ID NO: 4011 - protein, 452 aa, synthetic construct
MKAAIYIRVSTQEQVENYSIQAQTEKLTALCRSKDWDVYDIFVDGGYSGSNMNRPALNEMLSKLHEIDAVVVYRLDRLSRSQRDTITLIEEYFLKNNVEFVSLSETLDTSSPFGRAMIGILSVFAQLERETIRDRMVMGKIKRIEAGLPLTTAKGRTFGYDVIDTKLYINEEEAKQLQLIYDIFEEEQSITFLQKRLKKLGFKVHTYNRYNNWLTNDLYCGYVSYKDKVHVKGVHEPIISEEQFYRVQEIFTRMGKNPNMNRDSASLLNNLVVCSKCGLGFVHRRKDTTSRGKKYHYRYYSCKTYKHTHELEKCGNKIWRADKLEELIINRVNNYSFASRNVDKEDELDSLNEKLKIEHAKRKRLFDLYINGSYEVSELDSMMNDIDAQINYYESQIEANEELKKSKKIQESLADLATVDFDSLEFREKQLYLKSLISKIYIDGEQVTIEWL

SEQ ID NO: 4012 - protein, 469 aa, synthetic construct
MSYTTPVRAAVYLRISEDRSGEQLGVARQREDCLKLCDQRKWVPVEYLDNDVSASTGKRRPAYEQMLADITAGKIAAVVAWDLDRLHRRPIELEAFMSLADEKRLALATVAGDVDLATPQGRLVARLKGSVAAHETEHKKARQRRAARQKAELGHSNWSKAFGYLPGPNGPEPDPRTAPLVKQAYTDILAGASLGDVCRRWNDAGALTITGRPWTTTALSKFLRKPRNAGLRTYKGARYGPVDRDAIVGKAQWSPLVDEATFWAAQAVLDAPGRAPGRKSVRRHLLTGLAGCGKCGNHLAGSYRTDGRVVYVCKACHGVAILADNIEPILYRIVAERLAMPDAVGLLRREIHDAAEAETIRLELETLDGELDRLAVERAEGLLTARQVKISTDIVNAKIAKLLARQLDQERLRVLDGIPLGTPRVAGMIAELSPDRFRAVLDVLAEVVVQPVGKSGRTFNPERVQVNWR

SEQ ID NO: 4013 - protein, 452 aa, synthetic construct
MKAAIYIRVSTREQVENYSIQAQTEKLTALCRSKDWDVYDIFIDGGYSGSNTNRPALNEMLSKLHEIDAVVVYRLDRLSRSQRDTITLIEEYFLKNNVEFVSLSETLDTSSPFGRAMIGILSVFAQLERETIRDRMVMGKIKRIEAGLPLTTAKGRTFGYDVIDTKLYINEEEAKQLQLIYDIFEEEQSITSLQKRLKKLGFKVRTYNRYNNWLTNDLYCGYVSYKDKVHVKGIHEPIISEEQFCRVQEIFARMGKNPNMNRDSASLLNNLVVCSKCGLGFVHRRKDTMSRGKKYHYRYYSCKTYKHTHELEKCGNKIWRADKLEELIIDRVNNYSFASRNVDKAEELDSLDEKLKVEHAKKKRLFDLYINGSYNVSELDSMMNDIDAQINYYESQIEANEELKKDKKIQENLAGLTTVDFDSLEFREKQLYLKSLINKIYIDGEQVTIEWL

SEQ ID NO: 4014 - protein, 485 aa, synthetic construct
MTKKVAIYTRVSTTNQAEEGFSIDEQTDRLTKYAEAMGWQVSDTYTDAGCSGAKLERPAMQRLINDIENKAFDTVLVYKLDRLSRSVRDTLYLVKDVFTKNKIDFISLNESIDTSSAMGSLFLTILSAINEFERENIKERMTMGKLGRAKSGKSMMWTKTAFGYYHNRKTGILEIVPLQASIVEQIFTDYLSGISLTKLRDKLNESGHIGKDIPWSYRTLRQTLGNPVYCGYIKFKDSLFEGMHKPIIPYETYLKVQKELEERQQQTYERNNNPRPFQAKYMLSGMARCGYCGAPLRIVLGHKRKDGGRTKKYHCANRFPRKTKGITVYNDNKKCDSGTYDLSNLENTVIDNLIGFQENNDSLLKMINSNNQPIPDTSSFKKQISQIDKKIQKNSDLYLNDFITMDELKDRTDSLQAEKRLLKAKISENKFNDSTDVFELVKTQLGNIPINELSYDNKKKIVNNLVSKVGVTADNVDIIFKFQLA

SEQ ID NO: 4015 - protein, 469 aa, synthetic construct
MSYTTPVRAAVYLRISEDRSGEQLGVARQREDCLKLCDQRKWVPVEYLDNDVSASTGKRRPAYEQMLADITASKIAAVVAWDLDRLHRRPIELEAFMSLADEKRLALATVAGDVDLATPQGRLVARLKGSVAAHETEHKKARQRRAARQKAERGLPNWSKAFGYLPGPNGPEPDPRTAPLVKQAYADILAGASLGDVCRQWNDAGAFTITGRRWTTTTLSKFLRKPRNAGLRAYKGARYGPVDRDAIVGKARWSPLVDEATFWAAQAVLDAPGRAPGRKSVRRHLLTGLAGCGKCGNHLAGSYRTDGRVVYVCKACHGVAILADNIEPILYHIVAERLAMPDAVDLLRREIHDAAEAETIRLELETLCDELDRLAVERAEGLLTARQVKVCTDIVNARITELQVRQQDQERLRVLGGIPLGTPQVAGTIAELSPDRFRAVLDVLAEVVVQPVGKSGRMFNPERVQVNWR

SEQ ID NO: 4016 - protein, 452 aa, synthetic construct
MKAAIYIRVSTREQVENYSIQAQTEKLTALCRSKDWDVYDIFIDGGYSGSNMNRPALNEMLSKLHEIDAVVVYRLDRLSRSQRDTITLIEEYFLKNNVEFVSLSETLDTSSPFGRAMIGILSVFAQLERETIRDRMVMGKIKRIEAGLPLTTAKGRTFGYDVIDTKLYINEEEAKQLQLIYDIFEEEQSITFLQKRLKKLGFKVHTYNRYNNWLTNDLYCGYVSYKDKVHVKGIHEPIISEEQFYRVQEIFTRMGKNPNMNRDSASLLNNLVVCGKCGLGFVHRRKDAMSRDRKYHYRYYSCKTYKHIHELEKCGNKIWRADKLEELIINRVNDYSVASRNVDKEDELDSLNEKLRIEHAKKKRLFDLYINGSYEMSELDSMMNDIDAQINYYESQIEANEELKKNKKIQENLAYLATVDFDSLEFREKQLYLKSLINKIYIDGEQVTIEWL

SEQ ID NO: 4017 - protein, 452 aa, synthetic construct
MKAAIYIRVSTQEQVGNYSIQAQTEKLTALCRSKDWDVYDIFVDGGYSGSNMNRPALNEMLSKLHEIDAVVVYRLDRLSRSQRDTTTLIEEYFLKNNVEFVSLSETLDTSSPFGRAMIGILSVFAQLERETIRDRMVMGKIKRIEAGLPLTTAKGRTFGYDVIDTKLYINEEEAKQLQLIYDIFEEEQSITSLQKRLKKLGFKVRAYNRYNNWLTNDLYCGYVSYKDKVHVKGIHEPIISEEQFYRVQEIFTRMGKNPNTNRDSASLLNNLVVCSKCGLSFVHRSKDTMSRGKKYHYRYYSCKTYKHTHELEKCGNRTWRADKLEELIINRVNNYSFASRNVDKGDELDSLNEKLRVEHAKKKRLFDLYINGSYEVSELDSMMSDIDAQINHYESQIEASEELKKNKKIQENLADLATVDFDSLEFREKQLYLKSLINKIYIDGEQVTIDWL

SEQ ID NO: 4018 - protein, 485 aa, synthetic construct
MTKKVAIYTRVSTTNQAEEGFSIDEQIDRLTKYAEAVGWQVSDTYTDAGFSGAKLERPAMQRLINDIETKAFDTVLVYKLDRLSRSVRDTLYLVKDVFTKNKIDFISLNESINTSSAMGSLFLTILSAINEFERENIKERMTMGKLGRAKSGKSMMWTKTAFGYHHNRKTGILEIVPLQATIVEQIFTDYLSGISLTKLRDKLNESGHIGKDIPWSYRTLRQTLDNPVYCGYIKFKDSLFEGMHKPIIPYETYLKVQKELEERQQQTYERNNNPRPFQAKYMLSGMARCGYCGAPLRIVLGHKRKDGSRTMKYHCANRFPRKTKGVTVYNDNKKCDSGTYDLSNLENTVIDNLIGFQENNDSLLKIINGNNQPIPDTSSFKKQISQIDKKIRKNSDLYLNDFITMDELKDRTDSLQAEKKLLKARISENKFNDNTDVFELVKTQLGSIPINELSYDDKKKIVNSLVSKVDVTADNVDIIFKFQLA

SEQ ID NO: 4019 - protein, 485 aa, synthetic construct
MTKKVAIYTRVSTTNQAEEGFSIDEQIDRLTKYAEAMGWQVSDTYTDAGFSGAKLERPAMQRLINDIENKAFDTVLVYKLDRLSRSVRDTLCLVKDVFAKNKIDFISLNESIDTSSAMGSLFLTILSAINEFERENIKERMTMGKLGRARSGKSMMWTKTAFGYYHNRKTGILEIVPLQATIVEQIFTDYLGGISLTKLRDKLNESGHIGKDIPWSYRTLRQTLDNPVYCGYIKFKDSLFEGMHKPIIPYETYLKVQKELEKRQQQTYERNNNPRPFQAKYMLSGITRCGYCGAPLKIVLGHKRKDGSRTMKYHCANRFPRKTRGVTVYNDNKKCDSGTYDLSNLENTVIDNLIGFQENNDSLLKIINGNNQPILDTSSFKKQISQIDRKIQKNSDLYLNDFITMDELKDRTDSLQAEKKLLKAKISENKFNDSTDVFELVKTQLGSIPINELSYDNKKKIVNNLVSKVDVTADNVDIIFKFQLA

SEQ ID NO: 4020 - protein, 469 aa, synthetic construct
MSYTTPVRAAVYLRISEDRSGEQLGVARQREDCLKLCDQRKWVPVEYLDNDVSASTGKRRPAYEQMLADITAGKIAAVVAWDLDRLHRRPIELEAFMSLADEKRLALATVAGDVDLATPQGRLVARLKGSVAAHETEHKKARQRRAARQKAERGHPNWSKAFGYLPGPNGPEPDPRTASLVKQAYADILAGASLGDVCRRWNDAGAFTITGRPWTTTTLSKFLRKPRNAGLRAYKGARYGPVDRDAIVGKAQWSPLVDEATFWAAQAVLDAPGRAPGRKSVRRHLLTGLAGCGKCGNHLAGSYRTDGRVVYVCKACHGVAILADNIEPILYHIVAERLAMPDAVGLLRREIHDAAEAETVRLELETLYGELDSLAVERAEGLLTARQVKICTDIVNAKITKLQARQLDQERLRVFDGIPLGTPQVAGMITELSPDRFRAVLDVLAEVVVQPVGKSGRIFNPERVQVNWR

SEQ ID NO: 4021 - protein, 452 aa, synthetic construct
MKAAIYIRVSTQEQVGNYSIQAQTEKLTALCRSKDWDVYDIFIDGGYSGSNMNRPALNEMLSKLHEIDAVVVYRLDRLSRSQRDTTTLIEEYFLKNNVEFVSLSETLDTSSPFGRAMIGILSVFAQLERETIRDRMVMGKIKRIEAGLPLTTAKGRTFGYDVIDTKLYINEEEAKQLRLIYDIFEEEQSITFLQKRLKKLGFKVRTYNRYNNWLTNDLYCGYVSYKDKVHVKGIHEPIIGEEQFYRVQEIFTRMGKNPNMNRDSASLLSNLVVCSKCGLSFVHRSKDTMSRGKKYHYRYYSCKTYKHTHELEKCGNKTWRADKLEELVINRVNNYSFASRNVDKEDELDSLNEKLKIEHAKRKRLFDLYINGSYEVSELDSMMNDIDAQINYYESQIEASEELKKSKKIQEDLANLATVDFDSLEFREKQLYLKSLINKIYIDGEQVTIEWL

SEQ ID NO: 4022 - protein, 485 aa, synthetic construct
MTKKVAIYTRVSTTNQAEEGFSIDEQIDRLTKYVEAMGWQVSDTYTDAGFSGAKLERPAMQRLINDIENKAFDTVLVYKLDRLSRSVRDTLYLVKDVFTKNKIDFISLNESINTSSAMGSLFLTILSAINEFERENIKERMTMGKLGRAKSGKSMMWTKTAFGYYHNRKTGILEIVPLQATIVEQIFTDYLSGISLTKLRDKLNESGHIGKDIPWSYRTLRQTLGNPVYCGYIKFKDSLFEGLHKPIIPYETYQKVQKELEERQQQTYERNNNPRPFQAKYMLSGMARCGYCGAPLKIVLGHKRKDGSRTMKYHCANRFPRKTKGVTVYNDNKKCDSGTYDLSNLENTVIDNLIGFQENNDSLLKIINGNNQPILDTSSFKKQISQIDKKIQKNSDLYLNDFITMDELKARTDSLQAEKKLLKAKISENKFNDSTDEFELVKTQLGSIPINELSYDNKKKIVNNLVSKVDVTADNVDIIFKFQLA

SEQ ID NO: 4023 - protein, 485 aa, synthetic construct
MTKKVAIYTRVSTTNQAEEGFSIDEQIDRLTKYAEAMGWQVCDTYTDAGFSGAKLERPAMQRLINDIENKAFDTVLVYKLDRLSRSVRDTLYLVKDVFTKNKIDFISLNESIDTSSAMGSLFLTILSAINEFERENIKERMTMGKLGRAKSGKSMMWTKTAFGYYHNRKTGILEIVPLQAAIVEQIFTDYLSGISLTKLRDKLNESGHIGKDTPWSYRTLRQTLDNPVYCGYIKFKGSLFEGMHKPIIPYETYLKVQKELEERQQQTYERNNNPRPFQAKYMLSGMARCGYCGAPLRIVLGHKRKDGSRTMKYHCANRFPRKTKGVTVYNDNKKCDSGTYDLSNLEDTVIDNLIGFQENNDSLLKIINGNNQPILDTSSFKKQISQIDKKIQKNNDLYLNDFITIDELKDRTDSLQAEKKLLKAKISENKLNDSTDVFELVKTQLGSIPINELSYDNKKKIVNNLVSKVDVTADNVDIIFKFQLA

SEQ ID NO: 4024 - protein, 452 aa, synthetic construct
MKAAIYIRVSTREQVENYSIQAQTEKLTALCRSKDWDVYDIFIDGGYSGSNMNRPALNEMLSKLHEIDAVVVYRLDRLSRSQRDTITLIEEYFLKNNVEFVSLSETLDTSSPFGRAMIGILSVFAQLERETIRDRMVMGKIKRIEAGLPLTTAKGRTFGYDVIDTKLYINEGEAKQLQLIYDIFEEEQSITLLQKRLKKLGYKVRTYSRYNNWLTNDLYCGYVSYKDKVHVKGIHEPIISEEQFYRVQEIFTRVGKNPNMNRDSASLLNNLVVCGKCGLGFVHRRKDAMSRDKKYHYRYYSCKTYKHIHELEKCGNKIWRADKLEELIINRVNDYSLASRNVDKEDELDSLSEKLRIEHAKKKRLFDLYINGRYGVSELDSMMNDIDAQINYYESQIEANEGLKKNKRIQEKLADLATVDFDSLEFREKQLYLKGLINKIYIDGEQVTIEWL

SEQ ID NO: 4025 - protein, 485 aa, synthetic construct
MTKKVAIYTRVSTTNQAEEGFSIDEQIGRLTKYAEAMGWQVSDTYTDAGFSGAKLERPAMQRLINDIENKAFDTVLVYKLDRLSRSVRDTLHLVKDVFTKNKIDFISLNESIDTSSAMGSLFLTILSAINEFERENIRERMTMGKLGRAKSGKSMMWTKTAFGYYHNRKTGILEVVPLQATIVEQIFTDYLSGISLTKLRDKLNESGHIGKDIPWSYRTLRQTLDNPVYCGYIKFKGSLFEGMHKPIIPYETYLKVQKELEERQQQTYERNNNPRPFQAKYMLSGMARCGYCGAPLRIVLGRKRKDGSRTMKYHCANRFPRKTKGVTVYNDNKKCDSGTYDLSNLENTVIDRLIGFQENNDSLLKIIDGNNQPILDTSSFEKQISQIDKKIQKNSDLYLNDFITMDELKDRTNSLQAEKKLLKAKISENKFNDRTDVFELVKTQLGSIPVNELSYDDKKKIVNNLVSKVDVTADNVDIIFKFQLA

SEQ ID NO: 4026 - protein, 452 aa, synthetic construct
MKAAIYIRVSTQEQVENYSIQAQTEKLTALCRSKDWDVYDIFIDGGYSGSNMNRPALNEMLSKLHEIDAVVVYRLDRLSRSQRDTITLIEEYFLKNNVEFVSLSETLDTSSPFGRAMIGILSVFAQLERETIRDRMVLGKIKRVEAGLPLTTAKGRTFGYDVIDTKLYINEEEAKQLQLIYDIFEEERSITFLQKRLKKLGLKVRTYNRYNNWLTNDLYCGYVSYKDKVHVKGIHEPIISEEQFYRVQEIFTRMGKNPNANRGSASLLNNLVVCGKCGLGYVHRRKDTTSRGKKYHYRYYSCKTYKHIHELEKCGNKIWRADKLEELVINRVNNYSLASRNVDKEDGLDSLNEKLKVEHAKKRRLFDLYINGSYEVSELDSMMNDTDAQINYYESQIEANEELKKNKKIQENLANLATVDYDSLEFREKQLYLKSLINKIYIDGEQVTIEWL

SEQ ID NO: 4027 - protein, 485 aa, synthetic construct
MTKKVAIYTRVSTTNQAEEGFSIDEQIDRLTKYAEAMGWQVSGTYTDAGLSGAKLERPAMQRLINDVENKAFDTVLVYKLDRLSRSVRDTLYLVKDVFTKNKIDFISLNESIDTSSAMGSLFLTILSAINEFERENIKERMTMGKLGRAKSGKSMMWTKTAFGYYHNRKTGILEIVPLQATIVEQIFTDYLSGISLTKLRDKLNESGHIGKDIPWSYRTLRQTLDNPVYCGYIKFKDSLFEGMHKPIIPYETYLKVQKELEERQQQTYERNNNPRPFQAKYMLSGMARCGYCGAPLRIVLGRKRKDGSRTMKYHCANRFPRKTKGVTVYNDNKKCDSGTYDLSDLENTVIDNLVGFQENNDSLLRIINGNNQPILDTSSFKKQISQIDKKIQKNSDLYLNDFITMDELKDRTDSLQAEKKLLEAKISENKFNDSTDVFELVKTQLGSIPINELSYDNKKKIVNNLVSKVDVTADNVDIIFKFRLA

SEQ ID NO: 4028 - protein, 485 aa, synthetic construct
MTKKVAIYTRVSTANQAEEGFSIDEQIDRLTKYAEAMGWQVSDTYTDAGLSGAKLERPAMQRLINDIENKAFDTVLVYKLDRLSRSVRDTLYLVKDVFTKNKIDFISLNESIDTGSAMGSLFLTILSAINEFERENIKERMTMGKLGRAKSGKSMMWTKTAFGYYHNRRTGILEIVPLQAAIVEQIFTDYLSGISLTKLRDKLNESGHIGKDIPWSYRTLRQTLDNPVYCGYIKFKDCLFEGMHKPIIPYETYLKVQKELEERQQQTYERNNNPRPFQAKYMLSGVARCGYCGAPLRIVLGHKRKDGSRTMKYHCANRFPRKTKGITVYDDNKKCDSGTYDLSNLENTVIDNLIGLQENNDSLLKIINGNNQPILDTSSIKKQISQIDKKIQKNSDLYLNDFITMDGLKARTDSLQAEKKLLKAKISENKFNDSTDVLELVKTQLGSIPINELSYDNKKKIVNNLVSKVDVTADNVDIIFKFQLA

SEQ ID NO: 4029 - protein, 485 aa, synthetic construct
MTKKVAIYTRVSTTNQAEEGFSIDEQIDRLTKYAEAMGWQVSDTYTDAGFSGAKLERPAMQRLINDIENKAFDTVLVYKLDRLSRSVRDTLYLVKDVFTKNKIDFISLNESINTSSAMGSLFLTILSAINEFERENIKERMTMGKLGRAKSGKSMMWTKTAFGYYHNRKTGILEIVPLQATIVEQIFTDYLSGISLTKLRDKLNESGHIGKDIPWSYRTLRRTLDNPVYCGYIKFKDSLFEGMHKPIIPYETYLKVQRELEERQQQTYERNNNPRPFQAKYMLSGMARCGYCGAPLRIALGHKRKDGSRTMKYHCANRYPRKTKGVTVYNDNKKCDSGTYDLSNLENTVIDNLIGFQENNDSLLKIINGNNQPILDTSSFKKQISQIDKKIQKNSDLYLNDFITMDELKNRTDSLQAEKKQLKAKISENKFNNSTDVFELVRTQLGSIPINELSYDDKKKIVNSLVSKVDVTADNVDIIFKFQLA

SEQ ID NO: 4030 - protein, 485 aa, synthetic construct
MTKKVAIYTRVSTTNQAEEGFSIDEQIDRLTKYAEAMGWQVSDTYTDAGLSGAKLERPAMQRLINDIENRAFDTVLVYKLDRLSRSVRDTLYLVKDVFTKNKIDFISLNESIDTSSAMGSLFLTILSAINEFERENIKERMTMGKLGRAKSGKSMMWTKTAFGYYHNRKTGILEIVPLQATIVEQIFTDYLSGISLTKLRDKLNESGHIGKDIPWSYRTLRQTLDNPVYCGYIRFKDSLFEGMHKPIVPYETYLKVQKELEERQQQTYERNNNPRPFQAKYMLSGVARCGYCGAPLKIVLGHKRKDGSRTMKYHCANRSPSKTKGVTVYNDNKKCDSGTYDLSNLENTVIDNLTGLQEDNDSLLKIINGNNQPILDTSSFKEQISLIDKKIRKNSDLYLNDFITMDELKDRTDSLQAEKKLLKAKISENRFNDSTNVFELVKTQLGCIPINELSYDNKKKVVNNLVSKVDVTADNVDIIFKFQLA

SEQ ID NO: 4031 - protein, 452 aa, synthetic construct
MKAAIYIRVSTREQVENYSIQAQTEKLTALCRSKDWDVYDIFIDGGYSGSNMNRPALNEMLSKLHEIDAVVVYRLDRLSRSQRDTITLIEEYFLKNNVEFVSLSETLDTSSPFGRAMIGILSVFAQLERETIRDRMVMGKIKRIEAGLPLTTAKGRTFGYDVIDTKLYINKEEAKQLQLIYDIFEEERSITFLQKRLKKLGFKVCTYSRYNSWLTNDLYCGYVSYKDKVHVKGIHEPIISEEQFYRVQEIFTRMGKNPNMNRDSASLLNGLVVCSKCGLGFVHRRKDTTSRGKKYHYRYYSCKTYKHTHELEKCGNKIWRADKLEELIINRVNNYSFASRNVDKEDELDSLNEKLKIEHAEKKRLFDLYINGSYEVSELNSMMNDIDAQINYYESQIEANEELKKDKKIQENLAYLATVDYDSLEFREKQLYLKSLINKIYIDGEQVTIEWL

SEQ ID NO: 4032 - protein, 485 aa, synthetic construct
MTKKVAIYTRVSTTNQAEEGFSIDEQIDRLTKYAEAMGWQVSDTYTDAGFSGAKLERPAMQRLINDIANKAFDTVLVYKLDRLSRSVRDTLYLVNDVFTKNKIDFISLNESIDTSSAMGSLFLTILSAINEFERENIKERMTMGKLGRAKSGKSMMWTKTAFGYYHNRKTGILEIVPLQATIVEQIFTDYLSGISLTKLRDKLNESGHIGKDIPWSYRTLRQTLDNPVYCGYIKFKDSLFEGMHKPIIPYETYLKVQKELEERQQQTYERNNNPRPFQAKYMLSGVARCGYCGAPLRIVLGHKRKDGSRTMKYHCANRFPRKTKGVTVYNDNKKCDSGTYDLCNLENTVIDNLIGFQENNDSLLKIISGNNQPILDTSSFEEQISQIDKKIQKNSDLYLNDFITMDELKDRTDSLQAEKKLLKAKISENKFNDSTDVFELVKTQLGSIPINELSYENKKKIVNNLVSKVDVTADNVDIIFKFQLA

SEQ ID NO: 4033 - protein, 485 aa, synthetic construct
MTKKVAIYTRVSTTNQAEEGFSIDEQIDRLTKYAEAMGWQVSDTYTDAGFSGAKLERPAMQRLINDIENKAFDTVLVYKLDRLSRSVRDTLYLVKDVFTKNRIDFISLNESIDTSSAMGSLFLTILSAINEFERENIKERMTMGKLGRAKSGKSMMWTKTAFGYYHNRKTGILEIVPLQATIVEQIFTDYLSGISLTKLRDKLNESGHIGKDIPWSYRTLRQTLDNPVYCGYIKFKDSLFKGMHKPIIPYETYLKVQKELEERQQQTYERNNNPRPFQAKYMLSGMARCGYCGAPLRIVLGHKRKDGSRTMRYHCANRFPRRTKGVTVYNDNKKCDSGTYDLSNLENTVIDNLIGFQENNDSLLKIINGDNQLILDTSSFKEQISQIDKKIQKNSDLYLNDFITMDELKDRTDSLQAEKKLLKAKISENKFNDSTDVFELVRTQLGSIPINELSYDNKKKIVNNLVSKVDVTADNVDIIFKFQLA

SEQ ID NO: 4034 - protein, 452 aa, synthetic construct
MKAAIYIRVSTQEQVENYSIQAQTEKLTALCRSKGWDVYDIFIDGGYSGSNMNRPALNEMLSKLHEIDAVVVYRLDRLSRSQRDTITLIEEYFLKNNVEFVSLSETLDTSSPFGRAMIGILSVFAQLERETIRDRMVMGKIKRIEAGLPLTTAKGRTFGYDVIDTKLYINEEEAKQLQLIYDIFEEEQSITFLQKRLKKLGFKVRTYSCYNNWLTNDLYCGYVSYKDKVHVKGIHEPIISEEQFYRVQEIFARMGKNPNMNRDSASLLNNLVVCSKCGLGFVHRRKDTMSRGKKYHYRYYSCKTYKHTHELEKCGNKIWRADKLEELIINRVNNYSLAGRNVDKEDELDSLNEKLRIEHAKKKRLFDLYINGSYEVSELDSMMNDIDAQINYYESQIEANEELKKSKKIQENLANLATVDYDSLEFREKQLYLKSLINKIYIDGELVIIEWL

SEQ ID NO: 4035 - protein, 452 aa, synthetic construct
MKAAIYIRVSTREQVENYSIQAQTEKLTALCRSKDWDVYDIFIDGGYSGSNMNRPALNEMLSKLHEIDAVVVYRLDRLSRSQRDTITLIEEYFLKNNVEFVSLSETLDTSSPFGRAMIGILSVFAQLERETIRDRMVMGKIKRIEAGLPLTTAKGRTFGYDVIDTKLYINEEEAKQLRLIYDIFEEEQSITFLQKRLKKLGFKVRTYNRYNNWLTNDLYCGYVSYKDKVHVKGIHEPIISEEQFYRVQEIFTRMGKNPNMNRDSASLLNNLVVCSKCGLGFVHRRKDAMGRDKKYHYRYYSCKTYKHIHELEKCGNKIWRADKLEELIINRVNSYSLASRDMDKEDELDSLNEKLKIEHAKKKRLFDLYINGNYEVSELDSMMNDIDAQINYYESQIEANEELKKNKKIQENLAYLATVDFNSLEFREKQLYLKSLINKIYIDGEQVTIEWL

SEQ ID NO: 4036 - protein, 469 aa, synthetic construct
MSYTTPVRAAVYLRISEDRSGEQLGVARQREDCLKLCGQRKWVPVEYLDNDVSASTGKRRPAYEQMLADITAGKIAAVVAWDLDRLHRRPVELEAFMSLADEKRLALATVAGDVDLATPQGRLVARLKGCVAAHETEHKKARQRRAARQKAERGLPNWSKAFGYLPGPNGPEPDPRTAPLVKQAYADILAGASLGDVCRQWNDAGAFTITGRPWTTTTLSKFLRKPRNAGLRAYKGARYGPVDRNAIVGKARWSPLVDEATFWAAQAVLDAPGRAPGRKSVRRHLLTGLAGCGKCGNHLAGSYRTDGRVVYVCKACHGVAILADNIEPILYHIVAERLAMPDAVDLLCRETHDATEAEIIRLELETLYGELDRLAVERAEGLLTARQVKISTDIVSAKITKLQAHQLDQERLRVLDGIPLGTPQVAGVIAELSPDRFRAVLDVLAEVVVQPVGRSGRISNPERVQVNWR

SEQ ID NO: 4037 - protein, 469 aa, synthetic construct
MSYTTPVRAAVYLRISEDRSGEQLGVARQREDCLKLCGQRRWVPVEYLDNDVSASTGKRRPAYEQMLADIAAGKIAAVVAWDLDRLHRRPVELEAFMGLADEKRLALATVAGDVDLATPQGRLVARLKGCVAAHETEHKKARQRRAARQKAERGHPNWSKAFGYLPGPNGPEPDPRTAPLVKQAYADILAGESLGYVCRQWNDAGASTITGRPWTTTTLSKFLRKPRNAGLRAYKGARYGPVDRDAIVGKAQWSPLVDEATFWAAQAVLDAPGRAPGRKSVRRHLLTGLAGCGKCGNHLAGSYRTDGRVVYVCKACHGVAILADNIEPILYHVVAERLATPDAVDLLRREIHDAAEAETIRLELETLYGELDRLAVERAEGLLTARQVKISTDIVNAKIAKLQARQLDQGRLRVLDGIPLGTPQVAGVIAGLSPDRFRAVLDVLAEVVVQPAGKGGRIFNPERVQVNWR

SEQ ID NO: 4038 - protein, 452 aa, synthetic construct
MKAAIYIRVSTQEQVENYSIQAQTEKLTALCRSKDWDVYDTFIDGGYSGSNMNRPALNEMLSKLHEIDAVVVYRLDRLSRSQRDTITLIEEYFLRNNVEFVSLSETLDTSSPFGRAMIGILSVFAQLERETIRDRMVMGKIKRVEAGLPLTTAKGRTFGYDVIDTRLYINEEEARQLQLIYDIFEEEQSITFLQKRLKELGFKVRTYDRYNSWLTNDLYCGYVSYKDKVHVKGIHEPIISEEQFYRVQEIFTRMGRNPNMNRDSASLLNNLVVCSQCGLSFVHRRKDTTSRGKKYHYRYYSCKTYKHTHELEKCGNKIWRADKLEELIINRVNNYSLASRNVDKEDELDSLNEKLRIEHAKKKRLFDLYINGSYEASELDSMVNDIDAQINYYESQIEANEELKKNKKIQENLANLATVDYDSLEFREKQLYLKSLINKIYIDGEQVTIEWL

SEQ ID NO: 4039 - protein, 452 aa, synthetic construct
MKAAIYIRVSTREQVENYSIQAQTEKLTALCRSKDWDVYDIFIDGGYSGSNMNRPALNEMLSKLHEIDAVVVYRLDRLSRSQRDTITLIEEYFLKNNVEFVSLSETLDTSSPFGRAMIGILSVFAQLERETIRDRMVMGKIKRIEAGLPLTTAKGRTFGYDVIDTKLYINEEEAKQLRLIYDIFEEEQSITFLQKRLKKLGFKVRTYNRYNNWLTNDLYCGYVSYKDKVHVKGIHEPIISEEQFHRVQEIFTRMGKNPNMNRNSASLLNGLVVCSKCGLGFVHRRKDIMSRGKKYHYRYYSCKTYKHIHELEKCGNKIWRADRLEELIISRVNSYSLASRNVDKEDELDSLNEKLKTEHAKKKRLFDLYINGSFEVSELDGMMNDIDAQISYYESQIEANEELKKSKRIQENLANLATVDFDSLEFREKQLYLKSLINKIYIDGEQVTIEWL

SEQ ID NO: 4040 - protein, 469 aa, synthetic construct
MCYTTPVRAAVYLRISEDRSGEQLGVARQREDCLKLCGQRKWEPVEYLDNDVSASTGKRRPAYEQMLADITAGKIAAVVAWDLDRLHRRPIELEAFMSLADEKRLALATVAGDVDLATPQGRLVARLKGSVAAHETEHKRARQRRAARQKAERGYPNWSKAFGYLPGPSGPEPDPRTAPLVKQAYADILAGASLGDVCRQWNDAGAFTITGRPWTTTTLSKFLRKPRNAGLRAYKGARYGPVDRDAIVGKARWSPLVDEATFWAAQAVLDAPGRAPGRKSVRRHLLTGLAGCGKCGNHLAGSYRTDGRVVYVCKACHGVAILADNIEPILYHIVAERLAMPDAVDLSRREIHDVAEAETIRLELETLYGELDRLAVERAEGLLTARQVKICTDIVNAKITKLRAHQQDLERSRVLDSIPLGTPQVAGVIAELSPDRFRAVLDVLAEVVVQPVGKSGRIFSPERVQVNWR

SEQ ID NO: 4041 - protein, 452 aa, synthetic construct
MKAAIYIRVSTREQVENYSIQAQTEKLTALCRSKDWDVYDIFIDGGYSGSNMNRPALNEMLSKLHEIDAVVVYRLDRLSRSQRDTITLIEEYFLKNNVEFVSLSETLDTSSPFGRAMIGILSVFAQLERETIRDRMVMGKIKRIEAGLPLTTAKGRTFGYDVIDTKLYINEEEAKQLQLIYDIFEEEQSITFLQKRLKKLGFKVRTYNCYNNWLTNDLYCGYVSYKDKVHVKGIHEPIISEEQFYRVQEIFTRMGKNPNMNRDSASLLNNLVVCSKCGLGFVHRRKDAMSRDKKYHYRYYSCKTYKHIHELEKCGNKTWRADKLEELIINRVNNYSLAGRNVDKEDELDGLNEKLKIEHAKKKRLFDLYINGSYEVSELDSMMNDIDAQINYYESQIEANEELKRNKKVQENLADLATVDFDSLEFREKQLYLKSLINKIYIDGEQVTIEWL

SEQ ID NO: 4042 - protein, 485 aa, synthetic construct
MTKKVAIYTRVSTTNQAEEGFSIDEQVDRLTKYAEAMGWQVSDTYTDAGFSGAKLERPAMQRLISDIESKAFDTVLVYKLDRLSRSVRDTLYLVKDVLTKNKIDFISLNESIDTSSAMGSLFLTILSAINEFERENIRERMTMGKLGRAKSGKSMMWTKTAFGYCHNRRTGVLEIVPLQATIVEQIFTDYLSGISLTKLRDKLNESGHIGKDIPWSYRTLRQTLDNPVYCGYIKFKDSLFEGMHIPIIPYETYLKVQKELEERQQQAYERNNNPRPFQAKYMLSGMARCGYCGAPLKIVLGHKRKDGSRTMKYHCANRFPRKTKGVTVYNDNKKCDSGTYDLSNLENTVIDNLIGFQENNDSLLKIINGSDQPILDTSSFKKQISQIDKKIQKNSDLYLNDFITMDELKARTDSLQAEKKLLKAKISESKFNDSTDVFELVKTQLGSIPISELSYDNKKKIVNNLVSKVDVTADNVDIIFKFQLA

SEQ ID NO: 4043 - protein, 485 aa, synthetic construct
MTRKVAIYTRVSTTNQAEEGFSIDEQIDRLTKYAEAMGWQVSDTYTDAGFSGAKLERPAMQRLINDIENKAFDTVLVYKLDRLSRSVRDTLHLVKDVFTKNKIDFISLNESIDTSSAMGSLFLTILSAINEFERENIKERMTMGKLGRAKSGKSMMWTKTAFGYYHNRKTGILEIVPLQATIVEQIFTDYLSGISLTKLRDKLNESGHIGKDIPWSYRTLRQTLDNPVYCGYIRFKGSLFEGMHKPIIPYETYLNVQKELEERQRQTYERNNNPRPFQAKYMLSGMARCGYCGAPLRIVLGHKRKDGSRTMKYHCANRFPRKTKGVTVYNDNKKCDSGTYDLSNLENTVIDNLVGFQENNGSLLKIINGNNQPILDTSSLKKQISQIDKKIQKNSDLYLNGFITMDELKDRTDSLQAEKRLLKAKISENKFNDSTDVFELVKTQLGSIPINELSYDNKKKIVNNLVSKVDVTADNVDIIFKFQLA

SEQ ID NO: 4044 - protein, 452 aa, synthetic construct
MKAAIYIRVSTQEQVGNYSIQAQTEKLTALCRSKDWDVYDIFIDGGYSGSNMNRPALNEMLSKLHEIDAVVVYRLDRLSRSQRDTTTLIEEYFLKNNVEFVSLSETLDTSSPFGRAMIGILSVFAQLERETIRDRMVMGKIKRIEAGLPLTTAKGRTFGYDVIDTKLYINEEEAKQLQLIYDIFEEEQSITSLQKRLKKLGFKVRTYNRYNNWLTNDLYCGYVSYKDKVHVKGIHEPIISEEQFYRVQEIFARMGKNPNMNRDSASLLSNLVVCSKCGLSFVHRSKDTMSRGKKYHYRYYSCKTYKHTHELEKCGNKTWRADKLEELIINRVNNYSFASRNADKEDELDSLNEKLKVEHARKKRLFDLYINGSYEVSELDSMMNDIDAQINNYESQIEANEELKKNKKIQENLADLATVDFDSLEFREKQLYLKSLINKIYIDGEQVTIEWL

SEQ ID NO: 4045 - protein, 452 aa, synthetic construct
MKAAIYIRVSTREQVENYSIQAQTEKLTALCRSKDWDVYDIFIDGGYSGSNMNRPALNEMLSKLHEIDAVVVYRLDRLSRSQRDTITLIEEYFLKNNVEFVSLSETLDTSSPFGRAMIGILSVFAQLERETTRDRMVMGKIKRIEAGLPLTTAKGRTFGYDVIDTKLYINEEEAKQLQLIYDIFEEEQSITFLQKRLKKLGFKVRTYNRYNSWLTNDLYCGYVSYKDKVHVKGIHEPIISEEQFYRVQEIFTRMGKNPNVNRGSASLLNGLVVCSKCGLGFVHRRKDTMSRGKKYHYRYYSCKTYKHIHELEKCGNKIWRADKLEELIINRVNNYSLASRNVGKEDELDSLNEKLKIEHAKKKRLFDLYINGSYEVSELDSMMSDIDAQISYYESQIEANEELKKNKKIQENLADLATVDYDSLECREKQLYLKSLINKIYIDGEQVTIEWL

SEQ ID NO: 4046 - protein, 452 aa, synthetic construct
MKAAIYIRVSTREQVENYSIQAQTEKLTALCRSKDWDVYDIFIDGGYSGSNMNRPALNEMLSRLHEIDAVVVYRLDRLSRSQRDTITLIEEYFLKNNVEFVSLSETLDTSSPFGRAMIGILSVFAQLERETIRDRMVMGKIKRIEAGLPLTTAKGRTFGYDVIDTKLYINEEEARQLQLIYDIFEEEQSITFLQKRLKKLGFKVHTYNRYSNWLTNDLYCGYVSYKDKVHVKGIHEPIISEEQFYRVQEIFTRMGKNPNMNRDSASLLNNLVVCSKCGLGFVHRRKDAMSRDKKYHYRYYSCKTYKHIHELEKCGNKIWRADKLEELIINRVNNYSLASRNVDKEDELDSLNGKLQIEHAKKKRLFDLYINGSYEASELDSMMSDIDAQINYYESQIEANEELKRNKKIQENLAGLATVDFDSLEFREKQLYLKSLINKIYIDGEQVTIEWL

SEQ ID NO: 4047 - protein, 452 aa, synthetic construct
MKAAIYIRVSTREQVENYSIQAQTEKLTALCRSKDWDVYDIFVDGGYSGSNMNRPALNEMLSKLHEIDAVVVYRLDRLSRSQRDTITLIEEYFLKNNVEFVSLSETLDTSSPFGRAMIGILSVFAQLERETIRDRMVMGKIKRVEAGLPLTTAKGRTFGYDVIDTKLYTNEEEAKQLQLIYDIFEEEQSITFLQKRLKKLGFKVCTYSRYNNWLTNDLYCGYVSYKDKVHVKGIHEPIISEEQFYRVQEIFARMGKSPNMNRDSASLLNNLVVCSKCGLGFVHRRKDTVSRGKKYHYRYYSCKTYKHIHELEKCGNKIWRADKLEELIINRVNNYSLTSRNVDKEDELDSLNEKLKIEHAKKKRLFDLYINGGYEVSELDSMMNDIDAQINYYESQIEANEELKKNKKIQENLANLATVDYDSLEFREKQLYLKSLINKIYIDGEQVTIEWL

SEQ ID NO: 4048 - protein, 469 aa, synthetic construct
MSYTTPVRAAVYLRISEDRSGEQLGVARQREDCLKLCGQRKWMPVEYLDNDVSASTGRRRPAYEQMLADITAGKIAAVVAWDLDRLHRRPVELEAFMSLADEKRLALATVAGDVDLATPQGRLVARLKGCVAAHETEHKKARQRRAARQKAERGLPNWSKAFGYLPGPNGPEPDPRTAPLVKQAYADILAGASLGDVCRQWNDAGAFTITGRPWTTTTLSKFLRKPRNAGLREYKGACYGPVDRDAIVGKAQWSPLVDEATFWAAQAVLDAPGRAPGRKSVRRHLLTGLAGCGKCGNHLAGSYRTDGRVVYVCKACHGVSILADIIEPILYRIVAERLAMPDVVDLLRREIHDAAEAETIRLELEILYGELDRLAVERAEGLLTARQVKISTDIVNAKITKLQARQLDQERLRVLDGIPLGTPRVAGMIAELSPDRFRAVLDALAKVVVQPVGKRGRIFNQERVQVNWR

SEQ ID NO: 4049 - protein, 485 aa, synthetic construct
MTKKVAIYTRVSTTNQAEEGFSIDEQIDRLTKYAEAMGWQVSDTYTDAGFSGTKLERPAMQRLINDIENKAFDTVLVYKLDRLSRSVRDTLHLVKDVFTKNKIDFISLNESIDTSSAMGSLFLTILSAINEFERENIKERMTMGKLGRAKSGKSMMWTKTAFGYYHNRKTGILEIVPLQATIVEQIFTDYLSGISLTKLRDKLNESGHIGKDIPWSYRTLRQTLDNPVYCGYIKFKDSLFEGMHKPIIPYETYLKVQKELEERQQQTYERNNNPRPFQAKYMLSGMARCGYCGAPLKIVLGHKRKDGSRTMKYHCANRFPRKTKGVTVYNDNKKCDSGTYDLSNLENTVIDNLIGFQENNDSLLKIINGNNQPILDTRSLKKQISQIDKKIQKNSDLYLNDFITMDELRDRTDSLQAEKKLLRAKISENKFNDSTDVFELVKTQLGSIPINELSYDNKKKIVNNLVSKVDVTADNVDIIFKFQLA

SEQ ID NO: 4050 - protein, 485 aa, synthetic construct
MTKKVAIYTRVSTTNQAEEGFSIDEQIDRLTKYAEAMGWQVSGTYTDAGFSGAKLERPAMQRLINDIENKAFDTVLVYKLDRLSRSVRDTLYLVKDVLTKNKVDFISLNESINTSSAMGSLFLTILSAINEFERENIKERMTMGKLGRAKSGKSMMWTKTAFGYYHNRKTGILEIVPLQATIVEQIFTDYLSGISLTRLRDKLNESGHIGKDIPWSYRTLRQTLDNPVYCGYIKFKDSLFEGMHKPIIPYETYLRVQKELEERQQQAYERNNNPRPFQAKYMLSGMARCGYCGAPLKIVLGHKRKDGSRTMKYHCANRFPRKTKGVTVYNDNKKCDSGTYDLSNLESTVIDNLIGFQEDNDSLLKIINGSNQPILDTSSFKRQISQIDKKIQKNSDLYLNDFITMDELKDRTESLQAEKKLLKAKISENKFNDGTDVFELVKTQLGSIPINELSYDNKKKIVNNLVSKVDVTADNVDIIFKFQLA

SEQ ID NO: 4051 - protein, 469 aa, synthetic construct
MSYTTPVRAAVYLRISEDRSGEQLGVARQREDCLKLCDQRKWVPVEYLDNDVSASTGKRRPAYEQMLADITAGKIAAVVAWDLDRLHRRPIELEAFMSLADEKRLALATVAGDIDLATPQGRLVARLKGSVAAHETEHKKARQRRAARQKAERGHPNWSKAFGYLPGPNGPEPDPRTAPLVEQAYADILAGASLGDVCRQWNDAGAFTVTGRPWTTTTLSKFLRKPRNAGLRAYKGARYGPVDRDAIVGKAQWSPLVDEATFWAAQAVLDAPGRAPGRKSVRRHLLTGLASCGKCGNHLAGSYRTDGRVVYVCKACHGVAILADNIEPILYHIVAERLAMPDAVDLLRREIHDAAEAETIRLELGTLYGELDRLAVERAEGLLTARQVKISTDIVDAKITKLQARQLDQERLRVFDGVPLGTPQVAGVIAKLSPDRFRAVLDVLAEVVVQPVGKGGKIFNPKRVQVNWR

SEQ ID NO: 4052 - protein, 452 aa, synthetic construct
MKAAIYIRVSTREQVENYSIQAQTEKLTALCRSKDWEVYDIFIDGGYSGSNMNRPALNEMLSKLHEIDAVVVYRLDRLSRSQRDTITLIEEYFLKNNVEFVSLSETLDTSSPFGRAMIGILSVFAQLERETIRDRMVMGKIKRIEAGLPLTTAKGRTFGYDVIDTKLYINEEEAKQLQLIYDIFEEEQSITFLQKRLKKLGFKVRAYNRYNNWLTNDLYCGYVSYKDKVHVKGIHEPIISEEQFYRVQEIFTRMGKNPNMNRDSASLLNGLVVCSKCGLGFVHRRKDAMSRDKKYHYRYYSCKTYKHIHELEKCGNKIWRADKLEELIINRVNNYSVASRNVDKEDELDSLNEKLKIEHAKRKRLFDLYVNGSYEVSELDRMMSDIDAQINYYESQIEANEKLKKNKKIQENLAYLATVDFDSLEFREKQLYLKSLINKIYIDGEQVTIEWL

SEQ ID NO: 4053 - protein, 452 aa, synthetic construct
MKAAIYIRVSTREQVENYSIRAQTEKLTALCRSKGWDVYDIFIDGGYSGSNMNRPALIEMLSKLHEIDAVVVYRLDRLSRSQRDTITLIEEYFLKNNVEFVSLSETLDTSSPFGRAMIGILSVFAQLERETIRDRMVMGKIKRIEAGLPLTTAKGRTFGYDVVDTKLYINEEEAKQLQLIYDIFEEEQSITFLQKRLKKLGFKVRSYNRYSSWLTNDLYCGYVSYKDKVHVKGIHEPIISEEQFYRVQEIFARMGKNPNMNRGSASLLNNLVVCSKCGLGFVHRRKDTMSRGKKYHYRYYSCKTYKHTHELEKCGNKIWRADKLEELIINRVNNYSLASRNVDKEDELDSLNEKLKIEHAKKKRLFDLYIDGSYEVSELDSMMDDIDAQINYYESQIEANEGLKRNKKIQENLADLASVDYDSLEFREKQLYLKSLINKIYIDGEQVTIEWL

SEQ ID NO: 4054 - protein, 485 aa, synthetic construct
MTRKVAIYTRVSTTNQAEEGFSIDEQIDRLTKYAEAMGWQVSDTYTDAGVSGAKLERPAMQRLVNDIENKAFDTVLVYKLDRLSRSVRDTLYLVKDVFTKNKIDFISLNESINTSSAMGSLFLTILSAINEFERENIKERMTMGKLGRAKSGKSMMWTKTAFGYYHNRKTGILEIVPLQATIVEQIFTDYLSGISLTKLRDKLNESGHIGKDIPWSYRTLRQTLDNPVYCGYIKFKGSLFEGMHKPIIPYETYLKVQKELEDRQQQTYERNNNPRPFQAKYMLSGMARCGYCGAPLKIVLGHKRKDGSRTMKYHCANRFPRKAKGVTVYNDNKKCDSGTYDLSNLENTVIDNLIGFQENDDSLLKIINGNNQPIPETSSFKKQISQIDKKIQKNSDLYLNDFITLGELKDRTNSLQAEKKLLKAKISENKFNDSTDVFELVKTQLGSIPINELSYDNKKKIVNNLVSKVDVTADNVDIIFKFQLA

SEQ ID NO: 4055 - protein, 485 aa, synthetic construct
MTKKVAIYTRVSTTNQAEEGFSIDEQIDRLAKYAEAMGWQVSDTYTDAGFSGAKLERPAMQRLINDIENKAFDTVLVYKLDRLSRSVRDTLYLVKDVFTKNKIDFISLNESINTSSAMGSLFLTILSAINEFERENIKERMTMGKLGRAKSGKSMMWTKTAFGYYHNRKTGILEIVPPQATIVEQIFTDYLSGISLTKLRDKLNESGHIGKDIPWSYRTLRQTLDNPVYCGYIKFKDSLFEGMHKPIIPYETYLRVQKELEERQQQTYERNNNPRPFQAKYMLSGMARCGYCGAPLKIVLGHKRKDGSRTMKYHCANRFPRKTKGVTVYNDNKKCDSGTYDLSNLENTVIDNLVGFQENNDSLLKIINGNNQPILDTSSLKKQISQIDKKIQKNSDLYLNDFITMDELKDRTDSLQAEKKLLKAKISENKFNDNTDVFELVKAQLGSIPINELSYDNKKKIVNNLVSKVDVTADNVDIIFKFQLA

SEQ ID NO: 4056 - protein, 452 aa, synthetic construct
MKAAIYIRVSTREQVENYSIQAQTEKLTALCRSKDWDVYDVFIDGGYSGSNMNRPALNEMLSKLHEIDAVVVYRLDRLSRSQRDTITLIEEYFLKNNVEFVSLSETLDTSSPFGRAMIGILSVFAQLERETIRDRMVMGKIKRIEAGLPLTTAKGRTFGYDVIDTRLYINEEEARQLQLIYDIFEEEQSITFLQRRLKKLGFKVRTYSCYNNWLTNDLYCGYVSYKDKVHVKGIHEPIISEEQFYRVQEIFTRMGKNPNMNRDSASLLNNLVVCSKCGLGFVHRRKDAMSRDKKYRYRYYSCKTYKHIHELEKCGNKIWRADKLEELIINRVNNYSLASRNVDKEDELDSLNEKLKIEHAKKKRLFDLYINGSYEVSELDSMMKDIDAQINYYESQIEANEELKKNKKIQANLAYLATVDFDSLEFREKQLYLKSLINKIYIDGEQVTIEWL

SEQ ID NO: 4057 - protein, 452 aa, synthetic construct
MKAAIYIRVSTREQVENYSIQAQTEKLTALCRSKDWDVYDIFIDGGYSGSNMNRPALNEMLSKLHEIDAVVVYRLDRLSRSQRDTITLIEEYFLKNNVEFVSLSETLDTSSPFGRAMIGILSVFAQLERETIRDRMVMGKIKRIEAGLPLTTAKGRTFGYDVIDTKLYINEDEAKQLRLIYDIFEEEQSITFLQKRLKKLGFKVRTYNRYNSWLTNDLYCGYVSYKDKVHVKGIHEPIISEEQFYRVQEIFTRMGKNPNMNRDSASLLNNLVVCSKCGLGFVHRRKDTTSRGKKYHYRYYSCKTYKHIHELEKCGNKIWRADKLEELIINRVNNYSSASRNADKEDELDSLNEELKIEHAKKKRLFDLYINGSYEVSELDSMMNDIDAQINYYESQIEANEELRKNKKIQENLANLATVDYDSLEFREKQLYLKSLINKIYIDGEQVTIEWL

SEQ ID NO: 4058 - protein, 485 aa, synthetic construct; identical to SEQ ID NO: 3219

SEQ ID NO: 4059 - protein, 452 aa, synthetic construct; identical to SEQ ID NO: 3849

SEQ ID NO: 4060 - protein, 452 aa, synthetic construct
MKAAIYIRVSTREQVENYSIQAQTEKLTALCRSKDWDVYDIFIDGGYSGSNMNRPALNEMLSKLHEIDAVVVYRLDRLSRSQRDTITLIEEYFLKNNVEFVSLSETLDTSSPFGRAMIGILSVFAQLERETIRDRMVMGKIKRIEAGLPLTTAKGRTFGYDVIDTKLYINEEEAKQLQLIYDIFEEEQSITFLQKRLKRLGFKVRTYNRYNNWLTNDLYCGYVSYKDKVHVKGIHEPIISEEQFYRVQEIFARMGKNPNMNRDSASLLNNLVVCSKCGLGFVHRRKDIMSHGKKYHYRYYSCKTYKHIHELEKCGNKIWRADELEELVINRVNNYSLASRNVDKEDELVSLNEKLKIEHAKKRRLFDLYINGSYEMSELDSMMNDIDAQINYYESQIEANEGLKRNKKIQENLADLATVDFDSLEFREKQLYLKSLINKIYIDGEQVTIEWL

SEQ ID NO: 4061 - protein, 452 aa, synthetic construct
MKAAIYIRVSTREQVENYSIQAQTEKLTALCRSKDWDVYDIFIDGGYSGSNMNRPALSEMLSKLHEIDAVVVYRLDRLSRSQRDTVTLIEEYFLKNNVEFVSLSETLDTSSPFGRAMIGILGVFAQLERETIRDRMVMGKIKRIEAGLPLTTAKGRTFGYDVIDTKLYINEEEAKQLQLIYDIFEEEQSITLLQKRLKKLGFKVRTYNRYNNWLTNDLYCGYVSYKDKVHVKGIHEPIISEEQFYRVQEIFTRMGKNPNMNRDSASLLNNLVVCSKCGLGFVHRRKDTMSRGKKYHYRYYSCKTYKHTHELEKCGNKIWRADKLEELIINRVNNYSFASRNADKEDGLDSLNEKLKIEHAKKKRLFDLYINGSYEVSELDSMMNDIDAQINYYESQIEANEELKKNKKIQESLANLATVDYDSLEFREKQLYLKSLINKIYIDGEQVTIEWL

SEQ ID NO: 4062 - protein, 485 aa, synthetic construct
MTKKVAIYTRVSTTNQAEEGFSIDEQIDRLTKYAEAMGWQVSDTYTDAGLSGAKLERPAMQRLINDIENKAFDTVLVYKLDRLSRSVRDTLYLVKDVFTKNKIDFISLNESIDTSSAMGSLFLTILSAINEFERENIKERMTMGKLGRARSGKSMMWTKTAFGYYHNRKTGILEIVPLQATIVEQIFTDYLSGISLTKLRDKLNESGHIGKDIPWSYRTLRQTLNNPVYCGYIKFKDSLFEGMHKPIIPYETYLKVQKELEERQQQTYERNNNPRPFQAKYMLSGMARCGYCGAPLRIVLGHKRKDGSRTMKYHCANRFPRKTKGVTVYNDNKKCGSGAYDLSNLENTVIDNLIGFQEDNDSLLKIINGNNQPSLDTSSFEKQISQIDKKIQKNSDLYLNDFITMDELKDRTDSLQAEKKLLNAKISENKFDDSTDVFELVKTQLGSIPISELSYDNKKKIVNNLVSKVDVTADNVDIIFKFQLV

SEQ ID NO: 4063 - protein, 485 aa, synthetic construct; identical to SEQ ID NO: 3959

SEQ ID NO: 4064 - protein, 469 aa, synthetic construct
MSYTTPVRAAVYLRISEDRSGEQLGVARQREDCLKLCGQRKWVPVEYLDNDVSASTGKRRPAYEQMLADITAGKIAAVVAWDLDRLHRRPVELEAFMSLADEKRLALATVAGDVDLATPQGRLVARLKGCVAAHETEHKKARQRRAARQKAERGYPNWSKAFGYLPGPNGPEPDPRTAPLVKQAYADILAGASLGDVCRQWNGAGAFTITGRPWTTTTLSKFLRKPRNAGLRAYKGARYGPVDRDAIVGNAQWSPLVDEATFWAAQAVLDAPGRAPGRKSVRRHLLTGLAGCGKCGNHLAGSYRTDGRVVYVCKACHGVAILADNIEPILYHIVAERLAMPDAVDLLRREVHDAAEAEAVRLELETLYGELDRLAVERAEGLLTARQVKISTDIVNAKITKLQARQLDQERLRVFDGIPLGTPQAAGMIAGLSPSRFRAVLDVLAEVVVQPMGKGGRIFNPERVRVNWR

SEQ ID NO: 4065 - protein, 485 aa, synthetic construct
MTKKVAIYTRVSTTNQAEEGFSIDEQVDRLTKYAEAMGWQVSDTYTDAGFSGAKLERPAMQRLINDIENKAFDTVLVYKLDRLSRSVRDTLYLVKDVFTKNKIDFISLNESINTSSAMGSLFLTILSAINEFERENIKERMTMGKLGRAKSGKSMMWTKTAFGYYHNRKTGILETVPLQATIVEQIFTDYLSGISLTKLRDKLNESGHIGKDIPWSYRTLRQTLDNPVYCGYIKFKDSLFEGMHKPIIPYETFLKVQKELEERQQQTYERNNNPRPFQAKYMLSGMARCGYCGAPLKIVLGHKRKDGSRTMKYHCANRFPRRTKGVTVYNDNKKCDSGTYDLSDLENTVIDNLVGFQENNDSLLRIINGNSRPILDTSSFKEQISQIDKKIQKNSDLYLNDFITMDELKDRTDSLQAEKKLLQAKISENKFNNSTDVFELVKAQLGSIPINELSYDNKKKIVSNLVSKVDVTADNVDIIFKFQLA

SEQ ID NO: 4066 - protein, 485 aa, synthetic construct
MTKKVAIYTRVSTTNQAEEGFSIDEQIDRLTKYAEAMGWQVSDTYTDAGFSGAKLERPAMQRLVNDIENKAFDTVLVYKLDRLSRSVRDTLYLVKDVFTKNKIDFISLSESIDTSSAMGSLFLTILSAINEFERENIKERTTMGKLGRAKSGKSMMWTKTAFGYYHNRKTGILEIVPQQATIVEQIFTDYLSGISLTKLRDKLNESGHIGKDIPWSYRTLRQTLDNPVYCGYIKFKDSLFEGMHKPIIPYETYLKVQKELEERQQQTYERNNNPRPFQAKYMLSGMARCGYCGAPLRIVLGHKRKDGSRTMKYHCANRFPRKTKGVTVYNDNKKCDSGTYDLSNLENTVIDNLIGFQEDNDSLLKIITGNNQPILDTSSFEKQISQIDRKIQKNSDLYLNDFITMDELKERTDSLQAEKELLKAKISENKFNDRSEVFELVKTQLGSIPINELSYGDKKKIVNNLVSKVDVTADNVDIIFKFQLA

SEQ ID NO: 4067 - protein, 469 aa, synthetic construct
MSYTTLVRAAVYLRVSEDRSGEQLGVARQREDCLKLCDQRKWVPVEYLDNDVSASTGKRRPAYEQMLADITAGKIAAVVAWDLDRLHRRPIELEAFMSLADEKRLALATVAGDVDLATPQGRLVARLKGSVAAHETEHKKARQRRAARQKAERGHPNWSKAFGYLPGPNGPGPDPRTAPLVKQAYADILAGASLGDVCRQWNDAGAFTITGRPWTTTTLSKFLRKPRNAGLRAYKGARYGPVDRDAIVGKAQWSPLVDEATFWAAQAVLDAPGRAPGRKSVRRHLLTGLAGCGKCGNHLAGSYRTDGRVVYVCKACHGVAILADNIEPILYHIVAERLAMPDAVDLLRREIHDAAEAETIRLELETLYGELDRLAVERAEGLLTARQVKICTDIVNAKITKLRARQLDQERLRVFEGIPLGTPQVAGMIAELSPDRFRAVLDVLAEVVVQPVGKSGRIFNPERVQVNWR

SEQ ID NO: 4068 - protein, 486 aa, synthetic construct
MTKKVAIYTRVSTTNQAEEGFSIDEQIDRLTKYAGAMGWQVSDTYTDAGFSGAKLERPAMQRLINDIENKAFDTVLVYKLDRLSRSVRDTLYLVKDVFTKNKIDFISLSESIDTSSAMGSLFLTILSAINEFERENIKERMTMGKLGRAKSGKSMMWTKTAFGYYHNRKTGILETVPLQATIVEQIFTDYLSGISLTKLRDKLNESGHIGKDIPWSYRTLRQTLDNPVYCGYIKFKDSLFEGMHKPIIPYETYLKVQKELKERQQQTYERNNNPRPFQAKYMLSGMARCGYCGAPLKIVLGHKRKDGSRTMKYHCANRFPRKTKGVTAYNDNKKCDSGTYDLSDLENTVIDNLIGFQENDDSLLKIINGNNQPILDTSSFKKQISQIDKKIQKNSDLYLNDFITMDELKNRTDGLQAEKRLLEAKISENKSNDSTDVFELVKTQLGSIPINELSYDNKKKIVNNLVSKVDVTADNVDIIFKFQLAQ

SEQ ID NO: 4069 - protein, 485 aa, synthetic construct
MTKKVAIYTRVSTTNQAEEGFSIDEQIDRLTKYAEAMGWQVSDTYTDAGLSGAKLERPAMQRLINDIENEAFDTVLVYKLDRLSRSVRDTLYLVKDVFTKNKIDFISLNESIDTSSAMGSLFLTILSAINEFERENIKERMTMGKLGRARSGKSMMWTKTAFGYYHNRKTGILEIVPRQAAIVEQIFTDYLSGISLTKLRDKLNESGHIGKDIPWSYRTLRQTLDNPVYCGYIKFKDSLFEGMHKPIIPYETYLKVQKELEERQQQTYERNNNPRPFQAKYMLSGMARCGYCGAPLRIVLGHKRKDGSRTRKYHCANRFPRKTRGITVYNDNKKCDSGTYDLSNLENTVIDNLIGFQENDDSLLKIINGNNQPILDTSSFKKQISQIDKKIQKNSDLYLNDFITMDELKDRTDSLQAEKKLLKAKISENKFNDSADVFELVKAQLGSIPINELSYDNKKKIVNNLVSKVDVTADNVDIIFKFQLA

SEQ ID NO: 4070 - protein, 469 aa, synthetic construct
MSYTTPVRAAVYLRISEDRSGEQLGVARQREDCLKLCDQRKWVPVEYLDNDVSASTGKRRPAYEQMLADITAGKIAAVVAWDLDRLHRRPIELEAFMSLADEKRLALATVAGDVDLATPQGRLVARLKGCVAAHETEHKKARQRRAARQKAERGHPNWSKAFGYLPGPNGPEPDPRTAPLVEQAYADILAGASLGDVCRRWNDAGAFTITGRPWVTTALSKFLRKPRNAGLRAYKGARYGPVDRDAIVGKAQWSPLVDEATFWAAQAVLDAPGRAPGRKSVRRHLLTGLAGCGKCGSHLAGSYRTDGRVVYVCKACHGVAILADNIEPILYHIVAERLAMPDAADLLRREIHDAAEAETTRLELVTLYGELDRLAVERAEGLLTARQVKISTDIVNTKITKLQARQLDQERLRVLDGIPLGTPQVAGTIAELSPDRFRAVLDVLAEVVVQPVGKSGRIFNPERVRVNWR

SEQ ID NO: 4071 - protein, 452 aa, synthetic construct
MKAAIYIRVSTQEQVGNYSIQAQTEKLTALCRSKDWDVYDIFIDGGYSGSNMNRPALNEMLSKLHEIDAVVVYRLDRLSRSQRDTTTLIEEYFLKNNVEFVSLSETLDTSSPFGRAMIGILSVFAQLERETIRDRMVMGKIKRIESGLPLTTAKGRTFGYDVIDTKLYINEEEAKQLQLIYDIFEEEQSITSLQKRLKKLGFKVRTYNRYNNWLTNDLYCGYVSYKDKVHVRGIHEPIISEEQFYRVQEIFTRMGKNPNMNRDSASLLSNLVVCSKCGLGFVHRSKDTMSRGKKYHYRYYSCKTYKHTHELEKCGNKTWRADKLEELIINRVNNYSFASRNMVKEDELDSLNEKLKTEHAKKKRLFDLYINGSYEVSELDSMMNDIDAQINYYESQIEANGELKKNKKIQENLADLATVDFDSLGFREKRLYLKSLISKIYIDGEQVTIEWL

SEQ ID NO: 4072 - protein, 485 aa, synthetic construct
MTKKVAIYTRVSTTNQAEEGFSIDEQIDRLTKYAEAMGWQVSDTYTDAGLSGAKLERPAMQRLINDIENKAFDTVLVYKLDRLSRSVRDTLYLVKDVFTKNKIDFISLNESIDTSSAMGSLFLTILSAINEFERENIKERMTMGKLGRAKSGKSMMWTKTAFGYYHNRKTGILEIVPLQATIVEQIFTEYLSGISLTKLRDKLNESGHIGKDIPWSYRTLRQTLDNPVYCGYIKFKDSLFEGMHKPIIPYETYLKVQKELEERQQQTYERNNNPRPFQAKYMLSGMARCGYCGAPLRIVLGHKRKDGSRTMKYHCANRFPRKTKGVTVYNDNKKCDSGTYDLSNLEDTVIDNLIGFQEHNDSLLKIINGNNQPILDTSSIERQISQIDKKIQKNSDLYLNDFITMDELKDRTDSLQAEKKLLKAKISENKFNDSADVFELVKTQLGSIPINELSYDNKKKIVNDLVSKVDVTADNVDIIFKFQLA

SEQ ID NO: 4073 - protein, 485 aa, synthetic construct
MTKKVAIYTRVSTTNQAEEGFSIDEQIDRLTKYAEAMGWQVSDTYTDAGFSGAKLERPAMQRLINDIENKAFDTVLVYKLDRLSRSVRDTLYLVKDVFTKNKIDFISLNESIDTSSAMGSLFLTILSAINEFERENIKERMTMGKLGRAKSGKSMMWTKTAFGYYHNRKTGILEIVPPQATIVEQIFTDYLSGISLTKLRDKLNESGHIGKDIPWSYRTLRQTLDNPVYCGYIKFKDSLFEGMHKPIIPYETYLKVQKELEERQQQAYERNNNPRPFQAKYMLSGMARCGYCGAPLRIVLGHRRKDGSRTMKYHCANRFPRKTKGVTVYNDNKKCDSGTYDLSDLETTVIDNLIGLQENNDSLLKIINGNNQPILDTSSFRKLISQIDKKIQKNSDLYLNDFITMDELKDRTDSLQAEKKLLKAKISENKFNDSTDVFELVKAQLGSIPINELSYDDKKKIVNNLVSKVDVTADNVGIIFKFQLA

SEQ ID NO: 4074 - protein, 469 aa, synthetic construct
MSYTTPVRAAVYLRISEDRSGEQLGVARQREDCLKLCDQRNWVPVEYLDNDVSASTGKRRPAYEQMLADITAGKIAAVVAWDLDRLHRRPIELEAFMSLADEKRLALATVAGDVDLATPQGRLVARLKGSVAAHETEHKKARQRRAARQKAERGHPNWSKAFGYLPGPNGPEPDPRTAPLVKQAYADILAGASLGDVCRRWNDAGAFTITGRPWTTTTLSKFLRKPRNAGLRAYKGAHYGPVDRDAIVGKAQWGPLVDEATFWAAQAVLDAPGRAPGRKSVRRHLLTGLVGCGKCGNHLAGSYRTDGRVVYVCKTCHGVTILADNIEPILYHIVAERLAMPNAVDLLRREIYDAAEAEATRLELETLYGELDRLAVERAEGLLTARQVKISTDIVNAKITELQARQLDQERLRVFEGIPLGTPQVAGMIAALSPDRFRAVLDVLAEVVVQPVGKSGRIFNPERVQVNWR

SEQ ID NO: 4075 - protein, 452 aa, synthetic construct
MKAAIYIRVSTREQIENYSIQAQTEKLTALCRSKDWDVYDIFIDGGYSGSNMNRPALNEMLNKLHEIDAVVVYRLDRLSRSQRDTITLIEEYFLKNNVEFVSLSETLDTSSPFGRAMIGILSVFAQLERETIRDRMVMGKIKRIEAGLPLTTAKGRTFGYDVIDTKLYINEEEARQLRLIYDIFEEEQSITFLQKRLKKLGFKVRTYNRYNNWLTNDLYCGYVSYKDKVHVKGIHEPIISEEQFYRVQEIFTRMGKNPNMNRDSASLLNNLVVCSKCGLGFVHRRKDGVSRDKRYHYRYYSCKTYKHIHELEKCGNKIWRADKLEELIIDRVNNYSLASRNVGKEDELGSLNEKLKAEHAKKKRLFDLYINGSYEVSELDSMMNDIDAQINYYESQIEANEELKRNKKIQENLADLATVDFDSLEFREKQLYLKSLINKIYIDGEQVTIEWL

SEQ ID NO: 4076 - protein, 452 aa, synthetic construct
MKAAIYIRVSTREQVENYSIQAQTEKLTALCRSKDWDVYDIFVDGGYSGSNMNRPALNEMLSKLHEIDAVVVYRLDRLSRSQRDTITLIEEYFLKNNVEFVSLSETLDTSSPFGRAMIGILSVFAQLERETIRDRMVMGKIKRIEAGLPLTTAKGRTFGYDVIDTKLYINEEEAKQLQLIYDIFEEEQSITFLQKRLKKLGFKVHTYNRYNNWLTNDLYCGYVSYKDKVHVKGIHEPIISEEQFYRVQEIFTRMGKNPNMNRDSASLLNNLVVCGKCGLGFVHRRKDAASRDKKYHYRYYSCKTYKHIHELEKCGNKIWRADKLEELVINRVNNYSFASRNADKEDELDSLSEKLKIEHAKKKRLFDLYINGSYEVSELDSMMSDIDAQINYYESQIAANEEQKKNKKIQESLADLATVDFDSLEFREKQLYLKSLINKIYIDGEQVTIEWL

SEQ ID NO: 4077 - protein, 452 aa, synthetic construct
MKAAIYIRVSTREQVENYSIQAQTEKLTALCRSKDWDVYDIFVDGGYSGSNMNRPALNEMLSKLHEIDAVVVYRLDRLSRSQRDTITLIEEYFLKNNVEFVSLSETLDTSSPFGRAMIGILSVFAQLERETIRDRMVMGKIKRIEAGLPLTTAKGRTFGYDVIDTKLYINEEEARQLQLIYDIFEEERSITFLQKRLKKLGFKVHTYNRYNNWLTNDLYCGYVSYKDKVHVKGIHEPIISEEQFYRVQEILARMGKNPNMNRDSASLLNNLVVCGKCGLGFVHRRKDIASRGKEYHYRYYSCKTYKHIHELEKCGNKIWRADKLEELIINRVNNYSFASRNADKEDVLDSLNEKLKIEHAKKKRLFELYINGSYEVSELDSMMNDIDAQINYYESQIEANEELKKNKKVQENLAYLATVDFDSLEFREKQLYLKSLINKIYIDGEQVTIEWL

SEQ ID NO: 4078 - protein, 452 aa, synthetic construct
MKAAIYIRVSTQEQVENYSIQAQTEKLTALCRSKGWDVYDIFIDGGYSGSNMNRPALNEMLSKLHEIDAVVVYRLDRLSRSQRDTATLIEEYFLKNNVEFVSLSETLDTSSPFGRAMIGILGVFAQLERETIRDRMMMGKIKRIEAGLPLTTAKGRTFGYDVIDTKLYINEEEAKQLQLIYDIFEEEQSITSLQKRLKKLGFKVRTYNRYSNWLTNDLYCGYVSYKDKVHVKGIHEPIISEEQFYRVQEIFTRMGKSPNMNRDCASLLSNLVVCSKCGLGFVHRSKDTMSRGKKYHYRYYSCKTYKHTHELEKCGNKTWRADKLEELIINRVNNYSSASRNVDKEDELNSLNEKLKIEHAKKKRLFDLYINGSYEVSELDSMMNDIDAQINYYESQIEASEELKKNKKIQGNLADLATADFDSLEFREKQLYLKSLINKIYIDGEQVTIEWL

SEQ ID NO: 4079 - protein, 469 aa, synthetic construct
MSYTTPVRAAVYLRISEDRSGEQLGVARQREDCLKLCDQRKWVPVEYLDNDVSASTGKRRPAYEQMLADITAGRIAAVVAWDLDRLHRRPIELEAFMSLADEKRLALATVAGDVDLATPQGRLVARLKGCVAAHETEHKKARQRRAARQKAERGLPNWSKAFGYLPGPNGPEPDPRTAPLVKQAYADILAGASLGDVCRRWNNAGAFTITGRPWTTTTLSKFLRKPRNAGLRAYKGARYGPVDRDAIVGKAQWCPLVDEAIFWAAQAVLDAPGRAPGRKSVRRHLLTGLAGCGKCGNHLAGSYRTDGRVVYVCKACHGIAILADNIEPILYHIVAERLAKPDAVDLLRREIHDAAEAETIRLELETLYGELDRLAVERAEGLLTARQVKISTDIVNAKVTKLQARQLDQERLRVFDGIPLGTPQVAGIIAELSPDRFRAVLDVLAEVVVQPVGKSGRIFNPERVQVNWR

SEQ ID NO: 4080 - protein, 452 aa, synthetic construct
MKAAIYIRVSTREQVENYSIQAQTEKLTALCRSKDWDVYDIFIDGGYSGSNMNRPALNDMLSKLHEIDAVVVYRLDRLSRSQRDTITLIEEYFLKNNVEFVSLSETLDTSSPFGRAMIGILSVFAQLERETIRDRMVMGKIKRIEAGLPLTTAKGRTFGYDVIDTRLYINEEEARQLQLIYDIFEEEQSITFLQKRLKKLGFKVRTYNRYNNWLTNDLYCGYVSYKDKVHVKGIHEPIISEEQFYRVQEIFTRMGKNPNMNRDSASLLNNLVVCSKCGLGFVHRRKDAMSRDKKYHYRYYSCKTYKHIHELEKCGNKIWRADKLEELIINRVNNYGLASRNADKEDELDSLNEKLKIEHAKKKRLFELYINGSYDVSELDSMMNDIDAQINYYESQIEANEELKKNKKIQENLMHLATVDFDSLEFREKQLYLKSLIHKIYIDGEQVTIEWL

SEQ ID NO: 4081 - protein, 485 aa, synthetic construct
MTKKVAIYTRVSTTNQAEEGFSIDEQIDRLTKYAEAMGWQVSDTYTDAGFSGAKLERPAMQRLINDIENKAFDTVLVYKLDRLSRSVRDTLYLVKDVFTKNKIDFISLSESIDTSSAMGSLFLTILSAINEFERENIKERMTMGKLGRAKSGKSMMWTKTAFGYYHNRKTGILEIVPLQATIVEQIFTDYLSGISLTKLRDKLNESGHIGKDIPWSYRTLRQTLDNPVYCGYIKFKDSLFEGMHEPIIPYETYLKVQKELEERQQQTYERNNNPRPFQAKYMLSGMARCGYCGAPLRIVLGHKRKDGSRTMKYHCANRFPRKTKGVTVYNDNKKCDSGTYDLSNLENTVIDNLIGFQENNDSLLKIINGNNQPILDTSSFKKQISQIDKKIQKNSDLYLNDFITMDELKDRTDSLQAEKKLLKAKISENKFNDSTDVFELVKTQLGSIPINELSYDSKKKIVNNLVNKVDVTADNVHIIFKFQLA

SEQ ID NO: 4082 - protein, 485 aa, synthetic construct
MTKKVAIYTRVSTTNQAEEGFSIDEQTDRLTKYAEAMGWQVSDTYTDAGFSGAKLERPAMQRLINDIENKAFDTVLVYKLDRLSRSVRDTLYLVKDVFTKNQIDFISLNESIDTSSAMGSLFLTILSAINEFERENIKERMTMGKLGRAKSGKSMMWTKTAFGYYHNRKTGILEIVPLQATIVEQIFTDYLSGISLTKLRDKLNESGHIGKDIPWSYRTLRQTLDNPVYCGYIKFKDSLFEGMHKPIIPYETYLKVQKELEERQRQTYERNNNPRPFQAKYMLSGMARCGYCGAPLRIVLGHKRKDGSRTMKYHCANRFPRKTKGVTVYNDDKKCDSGTYDLSSLENTVIDNLIGFQENNDSLLKVINGNNQPILDTSSFKKQISQIDKKIQKNSDLYLNDFITMDELKDRTDSLQAEKERLKAKISENKFNDSTDAFELVKAQLGSIPINELSYDNKKKIVNNLVGKVDVTADNVDIIFKFQLA

SEQ ID NO: 4083 - protein, 485 aa, synthetic construct
MTKKVAIYTRVSTTNQAEEGFSIDEQIDRLTRYAEAMGWQVSDTYTDAGFSGAKLERPAMQRLINDIENKAFDTVLVYKLDRLSRSVRDTLYLVKDVFTKNKIDFISLNESINTSSAMGSLFLTILSAINEFERENIKERMTMGKLGRAKSGKSMMWTKTAFGYYHNHKTGILEIVPLQATIVEQIFTDYLSGISLTKLRDKLNESGHIGKDIPWSYRTLRQTLDNPVYCGYVKFKGSLFEGMHKPIIPYETYLKVQKELEERQQQTYERNNNPRPFQAKYMLSGMARCGYCGAPLRIVLGHKRKDGSRTLKYHCANRFPRKTKGVTVYNDNKKCDSGTYDLSSLENTVIDNLIGFQENNDSLLKIINGNNQPILDTSSFERQISQIDKKIQKNSDLYLNDFITMDELRDRTDSLQAEKKLLKAKISENKFNDSTDVFELVKTQLGSIPINELSYDNKKEIVNNLVSKVDVTADNVNIIFKFQLA

SEQ ID NO: 4084 - protein, 485 aa, synthetic construct
MTKKVAIYTRVSTTNQAEEGFSIDEQIDRLTKYAEAMGWQVSDTYTDAGLSGAKLERPAMQRLINDTENKAFDTVLVYKLDRLSRSVRDTLYLVKDVFTKNKIDFISLNESIDTSSAMGSLFLTILSAINEFERENIKERMTMGKLGRAKSGKSMMWTKTAFGYYHNRKTGILEIVPLQATIVEQIFTDYLSGISLTKLRDKLNESGHIGKDIPWSYRTLRQTLDNPVYCGYIKFKDSLFEGMHKPIIPYETYLKVQKELEERQQQAYERNNNPRPFQAKYMLSGMARCGYCGAPLRIVLGHKRKDGSRTMKYHCANRFPRKTKGITVYNDNKKCDSGTYDLSNLENTVIDNLIGFQENNDSLLKIINGYNRPILDTSSFEKQISQIDKKIQKNSDLYLNDFITMDELKDRTDSLQAEKKLLKAKISENKFNVSTDVFELVKTQLGSIPINELSYDDKKKIVNNLVSKVDVTADNVDIIFKFQLA

SEQ ID NO: 4085 - protein, 485 aa, synthetic construct
MTKKVAIYTRVSTTNQAEEGFSIDEQVDRLTKYAEAMGWQVSDTYTDAGFSGAKLERPAMQRLINDIENKAFDTVLVYKLDRLSRSVRDTLYLVKDVFTKNKIDFISLNESIDTSSAMGSLFLTILSAINEFERENIKERMTMGKLGRAKSGKSMMWTKTAFGYYHNRETGILEIVPLQATIVEQIFTDYLRGISLTKLRDKLNESGHIGKDIPWSYRTLRQTLDNPVYCGYIKFKDSLFEGMHKPIIPYETYLKVQKELEERQQQTYERNNNPRPFQAKYMLSGMARCGYCGAPLRIVLGHKRKDGSRTMKYHCANRFPRKTKGVTVYNDNKKCDSGTYDLSNLESTVIDNLIGFQENDDSLLRIINGNDQPILDTSSLKEQISQIDKKIQKNSDLYLNDFITMDELKDRTDSLQAEKKLLKAKISESKSNDSTDVFELVKTRLGSTPINELSYDNKKKIVNSLVSKVDVTADNVDIIFKFQLA

SEQ ID NO: 4086 - protein, 452 aa, synthetic construct
MKAAIYIRVSTQEQVGNYSIQAQTEKLTALCRSKDWDVYDIFIDGGYSGSNMNRPALNEMLSKLHEIDAVVVYRLDRLSRSQRDTTTLIEEYFLKNNVEFVSLSETLDTSSPFGRAMIGILSVFAQLERETIRDRMVMGKIKRIEAGLPLTTAKGRTFGYDVIDTRLYINEEEAKQLQLIYDIFEEVQSITFLQKRLKKLGFKVRTYNRYSNWLTNDLYCGYVSYKDKVHVKGIHEPIISEEQFYRVQEIFSRMGRNPNMNRDSASLLNSLVVCSKCGLGFVHRSKDTMSRGKKYHYRYYSCKTYKRTHELEKCGNKTWRADKLEELIINRVNNYSFASRNVDKEDELNNLNEKLKIEHAKKKRLFDLYINGSYEVSELDSMMNDIDAQINYYENQIEANEELKKNKKIQENLADLATVDFDSLEFREKQLYLKSLISKIYIDGEQVTIEWL

SEQ ID NO: 4087 - protein, 452 aa, synthetic construct
MKAAIYIRVSTQEQVENYSIQAQTEKLTALCRSKDWDVYDIFIDGGYSGSNMNRPALNEMLSKLHEIDAVVVYRLDRLSRSQRDTTTLIEEYFLKNNVEFVSLSETLDTSSPFGRAMIGILSVFAQLERETIRDRMVMGKIKRIEAGLPLTTAKGRTFGYDVIDTKLYINEEEAKQLQLIYDIFEEEQSITSLQKRLKKLGFKVRTYNRYSNWLTNDLYCGYVSYKDKVHVKGIHEPIISEEQFYRVQEIFTRMGKNPNMNRDSASLLNNLVVCSKCGLGFVHRRKDTMSGGKKYHYRYYSCKTYKHTHELEKCGNKTWRADKLEELIISRVNNYSFASRSVDKEDELDSLNEKLKIEHAKKKRLFDLYINGSYEVSELDSMMNDIDAQINYYESQIEANEELKKNKKIRENLADLATVDFDSLEFREKQLYLKSLINKIYIDGEQVTIEWL

SEQ ID NO: 4088 - protein, 452 aa, synthetic construct
MKAAIYIRVSTREQVENYSIQAQTEKLTALCRSKDWDVYDIFIDGGYSGSNMNRPALNEMLSKLHEIDAVVVYRLDRLSRSQRDTITLIEEYFLKNNVEFVSLSETLDTSSPFGRAMIGILSVFAQLERETIRDRMVMGKIKRIEAGLPLTTAKGRTFGYDVIDTKLYINEEEAKQLQLIYDIFEEEQSITFLQKRLKKLGFKVHTYNRYNNWLTNDLYCGYVSYKDKVHVKGVHEPIISEEQFYRVQEIFARMGKNPNMNRDSASLLNNLVVCSKCGLGFVHRRKDTMSRGKKYHYRYYSCKTYKHTHELEKCGNKIWRADKLEELIINRVNNYSFANRNADKGDELDSLNEKLKIEHAKKKRLFDLYINGSYNVSELDSMMSDIDAQINYYESQIEANGELKKNKKIQENLADLATADFDSLEFREKQLYLKSLINKIYIDGEQVTIEWL

SEQ ID NO: 4089 - protein, 452 aa, synthetic construct
MKAAIYIRVSTREQVENYSIQAQTEKLTALCRSKDWDVYDIFIDGGYSGSNMNRPALNEMLSKLREIDAVVVYRLDRLSRSQRDTITLIEEYFLKNNVEFVSLSETLDTSSPFGRAMIGILSVFAQLERETIRDRMVMGKIKRIEAGLPLTTAKGRTFGYDVIDTKLYINEEEAKQLQLIYDIFEEEQSITFLQKRLKKLGFKVRTYSSYNNWLTNDLYCGYVSYKDKVHVKGIHEPIISEEQFYRVQEIFTRMGKNPNMNRDSASLLNNLVVCSKCGLGFVHRRKDTMSRGKKYHYRYYSCKTYKHTHELEKCGNKIWRADKLEELIINRVNNYSFASRNVDKEDELDSLNEKLKIEHAKKRRLFDLYINGSYEVSELDSMMSDIDAQINYYESQIGANEELKKDKKIQESLANLATVDYDSLEFREKQLYLKSLINKIYIDGEQVTIEWL

SEQ ID NO: 4090 - protein, 452 aa, synthetic construct
MKAAIYIRVSTQEQVENYSIQAQTEKLTALCRSKDWDVYDIFIDGGYSGSNMNRPALNEMLSKLHEIDAVVVYRLDRLSRSQRDTTTLIEEYFLKNNVEFVSLSETLDTSSPFGRAMIGILSVFAQLERETIRDRMVMGKIKRIESGLPLTTARGRTFGYDVIDTKLYINEEEAEQLQLIYDIFEEEQSITSLQKRLKKLGFKVRTYNRYSSWLTNDLYCGYVSYKDQVHVKGIHEPIISEEQFYRVQEIFTRMGKNPNMNRDSASLLSNLVVCSKCGLSFVHRSKDTMSRGKKYHYRYYSCKTYKHTHELEKCGNKTWRADKLEELIINRVSNYSFASRNAVKEDELDSLNEKLKIEHAKKKRLFDLYINGSYEVSELDSMMNDIDAQINHYESQIEANEELKKNKKSQENLADLAAVDFDSLGFREKQLYLKSLINKVYIDGEQVTIEWL

SEQ ID NO: 4091 - protein, 452 aa, synthetic construct
MKAAIYIRVSTREQVENYSIQAQTEKLTALCRSKDWDVYDIFIDGGYSGSNMNRPALNEMLSKLHEIDAVVVYRLDRLSRSQRDTITLIEEYFLKNNVEFVSLSETLDTSSPFGRAMIGILSVFAQLERETIRDRMVMGKIKRIEAGLPLTTAKGRTFGYDVIGTKLYINEEEAKQLQLIYDIFEEEQSITFLQKRLKKLGFKVRTYSCYNNWLTNDLYCGYVSYKDKVHVKGIHEPIISEEQFYRVQEIFTRMGKNPNMNRDSASLLNNLVVCGKCGLGFVHRRKDIMSRGKKYHYRYYSCKTYKHIHELEKCGNKIWRADKLEELIINRVNDYSLASRNVDKEGELDSLNEKLKNEHAKKKRLFDLYINGSYEVRELDSMMNDIDAQINYYESQIEANEGLKRNKKTQEDLADLATVDFDSLEFREKQLYLKSLISKIYIDGEQVTIEWL

SEQ ID NO: 4092 - protein, 452 aa, synthetic construct
MKAAIYIRVSTREQVENYSIQAQTEKLTALCRSKDWDVYDIFIDGGYSGSNMNRPALNEMLSKLHEIDAVVVYRLDRLSRSQRDTITLIEEYFLKNNVEFVSLSETLDTSSPFGRAMIGILSVFAQLERETIRDRMVMGKIKRIEAGLPLTTAKGRTFGYDVIDTKLYINEEEAKQLRLIYDIFEEEQSITFLQKRLKKLGFKVRTYNRYSNWLTNDLYCGYVSYKDKVHVKGIHEPIISEEQFYRVQEIFTRMGKNPNMNRDSASLLNNLVVCSKCGLGFVHRRKDAMSRDKKYHYRYYSCKTYKHIHELEKCGNKIWRADKLEELIINRVNNYSLASRNVDKEDELDSLNEKLKIEHAKKKRLFDLYINGRYEVSELDSMMNDIDAQINYYESQIEANEELKKHKKIQENLANLATVDFDSLEFREKQLYLKSLINKIYIDGEQVTIEWL

SEQ ID NO: 4093 - protein, 452 aa, synthetic construct
MKAAIYIRVSTQEQVENYSIQAQTERLTALCRSKGWDVYDIFIDGGYSGSNMNRPALNEMLSKLHEIDAVVVYRLDRLSRSQRDTTTLIEEYFLKNNVEFVSLSETLDTSSPFGRAMIGILSVFAQLERETIRDRMVMGKIKRIEAGLPLTTAKGRTFGYDVIDTKLYINEEEAKQLQLIYDIFEEEQSITSLQKRLKKLGFKVRTYNRYNNWLTNDLYCGYVSYKDKVHVKGIHEPIISEEQFYRVQEIFTRMGKNPNMNRDSASLLNNLVVCSKCGLGFVHRSKDTMSRGKKYHYRYYSCKTYKHTHELEKCGNKTWRADKLEELIINRVNNYSSASRNVDKEDELDSLNEKLRIEHAKKKRLFDLYINGSYEVSELDSMMSDIDAQINHYESQIEANEKLKENKKIQENLAELATVDFDSLEFREKQLYLKSLINKIYIDGEQVTIEWL

SEQ ID NO: 4094 - protein, 452 aa, synthetic construct
MKAAIYIRVSTREQVGNYSIQAQTEKLTALCRSKDWDVYDIFIDGGYSGSNMNRPALNEMLSKLHEIDAVVVYRLDRLSRSQRDTITLIEEYFLKNNVEFVSLSETLDTSSPFGRAMIGILSVFAQLERETIRDRMVMGKIKRIEAGLPLTTAKGRTFGYDVIDTKLYINEEEAKQLQLIYDIFEEEQSITFLQKRLKKLGFKVRTYNHYNNWLTNDLYCGYVSYKDKVHVKGIHEPIISEEQFYRVQEIFTRMGKNPNMNRDSASLLNNLVVCSKCGLGFVHRRKDTMSRGKKYHYRYYSCKTYKHTHELEKCGNKIWRADKLEELIINRVNSYSLASRNVDKEDELDSLNEKLKIEHAKKKRLFDLYINGSYDVSELDSMMNDIDAQINYYESQIEANEELKKNKKIQENLADLATVDYDSLEFREKQLYLKSLINKIYIDGEQVTIEWL

SEQ ID NO: 4095 - protein, 452 aa, synthetic construct
MKAAIYIRVSTQEQVENYSIQAQTEKLTALCRSKDWDVYDIFIDGGYSGSNMNRPALSEMLSKLPEIDAVVVYRLDRLSRSQRDTITLIEEYFLKNNVEFVSLSETLDTSSPFGRAMIGILSVFAQLERETIRDRMVMGKIKRVEAGLPLTTAKGRTFGYDVIDTKLYINEEEAEQLQLIYDIFEEEQSITLLQKRLKKLGFKVHTYNRYNNWLTNDLYCGYVSYKDKVHVKGIHEPIISEEQFYRVQEIFTRMGKNPNMNRDSASLLNSLVVCSKCGLGFVHRRKDSTSRGKKYHYRYYSCKTYKHTHELDKCGNKIWRADKLEELVINRVNNYSFASRNVDKEDELDSLNEKLKIEHAKKRRLFDLYINGSYEVSELDSMMNDIDAQINYYESQIEANEKLKKNKKIQENLADLATVDFDSLEFREKQLYLKSLINKIYIDGEQVTIEWL

SEQ ID NO: 4096 - protein, 469 aa, synthetic construct
MCYTTPVRAAVYLRISEDRSGEQLGVARQREDCLKLCVQRKWVPVEYLDNDVSASTGKRRPAYEQMLADITAGKIAAVVAWDLDRLHRRPIELEAFMSLADEKRLALATVAGDVDLATPQGRLVARLKGSVAAHETEHKKARQRRAARQKAERGHPNWSRAFGYLPGPNGPEPDPRTAPLVKQAYADILAGASLGDVCRQWNDAGAFTITGRPWATTTLSKFLRKPRNAGLRAYKGARYGPVDRDAIVGKAQWSPLVDEATFWAAQAVLDAPGRAPGRKSVRRHLLTGLAGCGKCGNHLAGSYRTDGRVVYVCKACHGVAILADNIEPILYHIVAERLAMPNAVDLLRREIHDAAEAETIRLELETLYGELDRLAVERAEGLLTARQVKISTDIVNAKITKLQVRQLDQERLRVFDGIPLGTPQVAGMIAELSPDRFRAVLDVLAEVVVQPVGKGGRSFNPERVQVNWR

SEQ ID NO: 4097 - protein, 485 aa, synthetic construct
MTKKVAIYTRVSTTNQAEEGFSIDEQTDRLTKYAEAMGWQVSGTYTDAGFSGAKLERPAMQRLINDIENKAFDTVMVYKLDRLSRSVRDTLYLVKDVFTKNKIDFISLNESINTSSAMGSLFLTILSAINEFERENIKERMTMGKLGRAKSGKSMMWTKTAFGYYHNRKTGILEIVPLQATIVEQIFTDYLSGISLTKLRDKLNESGHIGKDIPWSYRTLRQTLDNPVYCGYIKFKDSLFKGMHKPIIPYETYLKVQKELEERQQQAYERNNNPRPFQAKYMLSGMARCGYCGAPLKIVLGHKRRDGSRTMKYHCANRFPRKTKGVTVYNDNKKCDSGTYDLSNLENTVIDSLVGFQENNDSLLKVINGNNQPNLDTSSLKKQISQIDEKIQKNSDLYLNDFITMDELKDRTDSLLAEKKLLKAEISENKFNDSTDVFELVKTQLGSIPINELSYDSKKKIVNNLVSKVDVTADNVDIIFKFQLA

SEQ ID NO: 4098 - protein, 452 aa, synthetic construct
MKAAIYIRVSTREQVENYSIQAQTERLTALCRSKDWDVYDIFIDGGYSGSNMNRPALNEMLSKLHEIDAVVVYRLDRLSRSQRDTITLIEEYFLKNNVEFVSLSETLDTSSPFGRAMIGILSVFAQLERETIRDRMVMGKIKRIEAGLPLTTAKGRTFGYDVIDTKLYINEEEAKQLQLIYDIFEEEQSITFLQKRLKKLGFKVRSYNRYNNWLTNDLYCGYVSYKDRVHVKGIHEPIISEEQFYRVQEIFTRMGKNPNMNRDSASLLNNLVVCSKCGLGFVHRRKDIVSRGKKYHYRYYSCKTYKHIHELEKCGNKIWRADKLEELVINRVNNYSLASRNVDKEDELDSLNEKLKIEHAKKKRLFDLYINGSYDVSELDSMMSDIDVQINHYESQIEANEELKKNKKIQENLAHLATVDFESLEFREKQLYLKSLINKIYIDGEQVTIDWL

SEQ ID NO: 4099 - protein, 452 aa, synthetic construct
MKAAIYIRVSTREQVENYSIQAQTEKLTALCRSKDWDVYDIFIDGGYSGSNMNRPALNEMLSKLHEIDAVVVYRLDRLSRSQRDTITLIEEYFLKNNVEFVSLSETLDTSSPFGRAMIGILSVFAQLERETIRDRMVMGKIKRIEAGLPLTTAKGRTFGYDVIDTKLYINEEEAKQLRLIYDIFEEEQSITSLQKRLKKLGFKVRTYNRYNNWLTNDLYCGYVSYKDKVHVKGIHEPIISEEQFYRVQEIFTRMGRNPNMNRDSASLLNNLVVCSKCGLGFVHRRKDAVSRDRKYHYRYYSCKTYKHIHELEKCGNKIWRADKLEELIISRVNNYSLASRNVDKEDELDSLNEKLKIERAKKKRLFDLYINGSYEVGELDSMMNDIDAQINYYESQIEANEELRKNRKIRENLANLATVDFDSLEFREKQLYLKSLINKIYIDGEQVTIEWL

SEQ ID NO: 4100 - protein, 485 aa, synthetic construct; identical to SEQ ID NO: 3220

SEQ ID NO: 4101 - protein, 452 aa, synthetic construct
MKAAIYIRVSTREQVENYSIQAQTEKLTALCRSKDWDVYDVFIDGGYSGSNMNRPALNEMLSKLHEIDAVVVYRLDRLSRSQRDTITLIEEYFLKNNVEFVSLSETLDTSSPFGRAMIGILSVFAQLERETIRDRMVMGKIKRIEAGLPLTTAKGRTFGYDVIDTKLYINEEEAKQLRLIYDIFEEEQSITFLQKRLKELGFKVRTYNRYNNWLTNDLYCGYVSYKDKVHVKGIHEPIISEEQFHRVQEIFTRMGKNPNMNRDSASLLNNLVVCSKCGLGFVHRRKDAMGRDKKYHYRYYSCKTYKHIHELEKCGNKIWRADKLEELIINRVNNYSLASRNMDKEDELDGLNERLKIEHAKKRRLFDLYINGSYEVSELDSMMSDIDAQINYYESQIGANEELKRNKKIQGNLANLATVDFDSLEFREKQLYLKSLINKIYIDGEQVTIEWL

SEQ ID NO: 4102 - protein, 452 aa, synthetic construct
MKAAIYIRVSTQEQVENYSIQAQTEKLTALCRSKDWDVYDIFIDGGYSGSNMNRPALNEMLSKLHEIDAVVVYRLDRLSRSQRDTTTLIEEYFLKNNVEFVSLCETLDTSSPFGRAMIGILSVFAQLERETIRDRMVMGKIKRIEAGLPLTTAKGRTFGYDVIDTKLYINEEEAKQLRLIYDIFEEEQSITSLQKRLKKLGFKVRTYNRYNNWLTNDLYCGYVSYKDKVHVKGIHEPIISEEQFYRVQEIFTRMGKNPNMNRDSASLLNNLVVCSKCGLGFVHRRKDTMSRGKKYHYRYYSCKTYKHTHELEKCGNKIWRADKLEELIINRVSNYSFASRNADKEDELDSLNEKLKIEHARKRRLFDLYIDGSYEVSELDSMMNDIDAQINYYESQIEANEELRKNRKIQENLANLATVDFDSLEFREKQLYLKSLINKIYIDGEQVTIDWL

SEQ ID NO: 4103 - protein, 452 aa, synthetic construct
MKAAIYIRVSTREQVENYSIQAQTEKLTALCRSKDWDVYDIFIDGGYSGSNMNRPALNEMLSKLHEIDAVVVYRLDRLSRSQRDTITLIEEYFLKNNVEFVSLSETLDTSSPFGRAMIGILSVFAQLERETIRDRMVMGKIKRIEAGLPLTTAKGRTFGYDVIDTKLYINEEEAKQLQLIYDIFEEEQSITFLQKRLKELGFKVRTYNRYNSWLTNDLYCGYVSYKDKVHVKGIHEPIISEEQFYRVQEIFTRMGKNPNMNRDSASLLNNLVVCSKCGLGFVHRRKDTTSRGKKYHYRYYSCKTYKHTHELEKCGNKIWRADKLEELIINRVNNYSFASRNADKEDELGSLNEKLKVEHAKKKRLFDLYISGSYEVSELDGMMNDIDAQINYYESQIEANVELKKNKKIQENLADPATVDFDSLEFREKQLYLKSLISKIYIDGEQVTIEWL

SEQ ID NO: 4104 - protein, 452 aa, synthetic construct
MKAAIYIRVSTREQVENYSIQAQTEKLTALCRSKDWDVHDIFIDGGYSGSNMNRPALNEMLSKLHEIDAVVVYRLDRLSRSQRDTITLIEEYFLKNNVEFVSLSETLDTSSPFGRAMIGILSVFAQLERETIRDRMVMGKIKRIEAGLPLTTAKGRTFGYDVIDTKLYINEEEARQLQLIYDIFEEEQSITSLQKRLKKLGFKVRTYSRYNNWLTNDLYCGYVSYKDKVHVKGIHEPIISEEQFYRVQEIFTRMGKNPNMNRDSASLLNNLVVCSKCGLGFVHRRKDTMSRGKKYHYRYYSCKTYKHTHELEKCGNKIWRADKLEELIINRVSNYSLASRNVDEEDELDSLNEKLKIEHAKRKRLFDLYINGSYEVSELDSMMNDIDAQINYYEGQIEANEELKKNKKIQENLANLATVDYDSLEFREKQLYLKSLINKIYIDGEQVTIEWL

SEQ ID NO: 4105 - protein, 469 aa, synthetic construct
MSYTTPVRAAVYLRISEDRSGEQLGVARQREDCLKLCGQRKWVPVEYLDNDVSASTGKRRPAYEQMLADITAGKIAAVVAWDLDRLHRRPIELEAFMSLADEKRLALATVAGDVDLATPQGRLVARLKGSVAAHETEHKRARQRRAARQKAERGHPNWSKAFGYLPGPNGPEPDPRTAPLVKQAYADILAGASLGDVCRRWNDASAFTITGRPWTTTALSKFLRKPRNAGLRAYKGARYGPVDRDAIVGKAQWSPLVDEATFWAAQAVLDAPGRAPGRKSVRRHLLTGLAGCGKCGNHLAGSYRTDGRVVYVCKACHGVAILADNIEPILYRIVVERLAMPDAVDLLRREIHDAAEAETIRLELETLYGELDRLAVERAEGLLTARQVKISTDIVNAKITKLQARQLDQERLRVLDSIPLGTPQVAGMIAELSPDRFRAVLDVLAEVVVQPVGKSGRIFNPERVQVNWR

SEQ ID NO: 4106 - protein, 485 aa, synthetic construct
MTKKVAIYTRVSTTNQAEEGFSIDEQIDRLTKYAEAMGWQVSSTYTDAGFSGAKLERPAMQRLINDIENKAFDTVLVYKLDRLSRSVRDTLYLVREVFAKNKIDFVSLNESIDTSSAMGSLFLTILSAINEFERENIKERMTMGKLGRAKSGKSMMWTKTAFGYYHNRKTGILEIVPLQATIVEQIFTDYLSGISLTKLRDKLNESGHIGKDIPWSYRTLRQTLDNPVYCGYIKFKDSLFEGMHKPIISYETYLKVQKELEERQQQTYERNNNPRPFQAKYMLSGMARCGYCGAPLRIVLGHKRKDGSRTMKYHCANRFPRKTKGITVYNDNKKCDSGAYDLSNLENTVIDNLIGLQENDDSLLKIINGNNRPILGTSSFEKQISQIDKKIQKNSDLYLNDFITMDELKDRTDSLQAEKKLLKARISENKFNDSADVFELVKTQLGSIPINELSYDNKKKIVNNLVSKVDVTADNVDIIYKFQLA

SEQ ID NO: 4107 - protein, 452 aa, synthetic construct
MKAAIYIRVSTREQVENYSIQAQTEKLTALCRSKDWDVYDIFIDGGYSGSNMNRPALNEMLSKLHEIDAVVVYRLDRLSRSQRDTLTLIEEYFLKNNVEFVSLSETLDTSSPFGRAMIGILSVFAQLERETIRDRMVMGKIKRIEAGLPLTTAKGRTFGYDVIDTKLYINEEEAKQLQLIYDIFEEEQSITFLQKRLKKLGFKVHTYNRYNNWLTNDLYCGYVSYKDKVHVKGIHEPIISEEQFYRVQEIFTRMGKNPNMNRGSASLLNNLVVCGKCGLGFVHRRKDAMSRDKKYHYRYYSCKTYKHIHELEKCGNKIWRADKLEELIINRVNDYSVASRNVDKEDELDSLNEKLKIEHAKKKRLFDLYINGSYEVSELDSMMNDIDARINYYESQIEANEELKKDKKIQENLAYLATVDFDSLEFREKQLYLKSLINKIYIDGEQVTIEWL

SEQ ID NO: 4108 - protein, 485 aa, synthetic construct
MTKKVAIYTRVSTTNQAEEGFSIDEQIDRLTKYAEAMGWQVSDTYTDAGFSGAKLERPAMQRLINDIENKAFDTVLVYKLDRLSRSVRDTLYLVKDVFTKNKVDFISLNESIDTSSAMGSLFLTILSAINEFERENIKERMTMGKLGRAKSGKSMMWTKTAFGYHHNRKTGILEIVPLQATIVERIFTDYLSGISLTKLRDKLNESGHIGKDIPWSYRTLRQTLDNPVYCGYIKFKGSLFEGMHKPIIPYETYLKVQKELEKRQQQTYERNNNPRPFQAKYMLSGMARCGYCGAPLRIVLGHKRKDGSRTMKYHCANRFPRRTKGVTVYNGNKKCDSGTYDLSNLENTVIDNLIGFQENNDSLLKIINGNNQPIQDTSSLKKQISQIDKKIQKNSDLYLNDFITMDELKDRTDSLQAEKKLLKAKISENKFNDSTDVLELVKTQLGSIPINELSYDNKKKIVNNLVSKVDVTADNVDIIFKFQLA

SEQ ID NO: 4109 - protein, 452 aa, synthetic construct
MKAAIYIRVSTQEQVENYSIQAQTEKLTALCRSKDWDVYDIFIDGGYSGSNMNRPALNEMLSKLHEIDAVVVYRLDRLSRSQRDTTTLIEEYFLKNNVEFVSLSETLDTSSPFGRAMIGILSVFAQLERETIRDRMVMGKIKRIEAGLPLTTAKGRTFGYDVIDTKLYINEEEARQLQLIYDIFEEEQSITSLQKRLKKLGFKVRTYNRYNNWLTNDLYCGYVSYKDKVHVKGIHEPIISEEQFYRVQEIFTRMGKNPNMNRDSASLLNNLVVCSKCGLGFVHRSKDTMSRGKKYHYRYYSCKTYKHTHELEKCGNKTWRADKLEELIINRVNNYSIASRNVDKEDELGGLNEKLKIEHAKKKRLFDLYINGSYEVSELDSMMYDIDAQINYYESQIEASEELKKNKKIQENLADLATVDFDCLEFREKQLYLRSLINKIYIDGERVTIEWL

SEQ ID NO: 4110 - protein, 452 aa, synthetic construct
MKAAIYIRVSTREQVENYSIQAQTEKLTALCRSKDWDVYDIFVDGGYSGSNMNRPALNEMLSKLHEIDAVVVYRLDRLSRSQRDTITLIEEYFLKNNVEFVSLSETLDTSSPFGRAMIGILSVFAQLERETIRDRMVMGKIKRIEAGLPLTTAKGRTFGYDVIDTKLYINEEEAKQLQLIYDIFEEEQSITRLQKRLKKLGFGVRTYNRYNNWLTNDLYCGYVSYKDKVHVKGIHEPIISEEQFYRVQEIFTRMGKNPNMNRDSASLLNNLVVCSKCGLGFVHRRKDAMSRNKKYHYRYYSCKTYKHIHELEKCGNKIWRADELEELVINRVNSYSVASRNVDKEDELGSLNEKLKIEHAKKKRLFDLYINGSYEVSELDSMMKDIDAQINYYESQIEASEELKKNKKIQENLAELATVDFDSLEFREKQLYLKSLINKIYIDGEQVTIEWL

SEQ ID NO: 4111 - protein, 452 aa, synthetic construct
MKAAIYIRVSTREQVENYSIQAQTEKLTALCRSKGWDVYDIFIDGGYSGSNMNRPALNEMLSKLHEVDAVVVYRLDRLSRSQRDTITLIEEYFLKNNVEFVSLSETLDTSSPFGRAMIGILSVFAQLERETIRDRMVMGKIKRIEAGLPLTTAKGRTFGYDVIDTKLYINEEEAKQLRLIYDIFEEEQSITFLQKRLKELGFKVRTYNRYNNWLTNDLYCGYVSYKDKVHVKGIHEPIISEEQFYRVQEIFTRMGKNPNMNRGSASLLNNLVVCGKCGLGFVHRRKDIMSRGKKYHYRYYSCKTYKHIHELEKCGNKIWRADKLEELIISRVNNYSFASRNADKEDELDSLNGKLKIEHARKRRLLDLYINGSYNVCELDCMMNDIDAQINYYESQIEANEELKKDKKIQENLAYLATVDFDSLEFREKQLYLKSLISKIYIDGEQVTIEWL

SEQ ID NO: 4112 - protein, 452 aa, synthetic construct
MKAAIYIRVSTREQVENYSIQAQTEKLTALCRSKDWDVYDIFIDGGYSGSNMNRPALNEMLSKLHEIDAVVVYRLDRLSRSQRDTITLIEEYFLKNNVEFVSLCETLDTSSPFGRAMIGILSVFAQLERETIRDRMVMGKIKRIEAGLPLTTAKGRTFGYDVIDTKLYINEEEAKQLRLIYDIFEEEQSITFLQKRLKKLGFKVRTYNRYNNWLTNDLYCGYVSYKDKVHVRGIHEPIISEEQFYRVQEVFARMGKNPNMNRDSASLLNNLVVCSKCGLGFVHRRKDAMSRGKKYHYRYYSCKTYKHIHELEKCGNKIWRADKLEELIINRVNNYSLASRNVDKEDELDSLNEKLKIEHAKKKRLFELYINGSYEVSELDSMMSNIDAQISYYESQIEANEELKRNKKIQENLAYLATVNFDSLEFREKQRYLKSLINKIYIDGEQVTIEWL

SEQ ID NO: 4113 - protein, 452 aa, synthetic construct
MKAAIYIRVSTREQVENYSIQAQTEKLTALCRSKDWDVYDIFIDGGYSGSNMNRPALNEMLSKLHEIDAVVVYRLDRLSRSQRDTLTLIEEYFLKNNVEFVSLSETLDTSSPFGRAMIGILSVFAQLERETIRDRTVMGKIRRIEAGLPLTTAKGRTFGYDVIDTKLYINEEEAKQLQLIYDIFEEERSITFLQKRLKKLGFKVHTYSRYNNWLSNDLYCGYVSYKDKVHVKGIHEPIISEEQFYRVQEIFTRMGKNPSMNRDSASLLSNLVVCSKCGLGFVHRRKDTTSRGKKYHYRYYSCKTYKHIHELEKCGNKIWRADKLEELIINRVNDYSFASRNVDKEGELDSLNEKLEIERAKKKRLFDLYINGSYEVSELDSMMNDIDAQISYYESQIEANEELKKNKKIQENLANLATVDYDSLEFREKQLYLKSLINKIYIDGEQVTIEWL

SEQ ID NO: 4114 - protein, 469 aa, synthetic construct
MCYTTPVRAAVYLRISEDRSGEQLGVARQREDCLKLCDQRKWVPVEYLDNDVSASTGKRRPAYEQMLADITAGKIAAVVAWDLDRLHRRPIELEAFMCLADEKRLALATVAGDVDLATPQGRLVARLKGSVAAHETEHKKARQRRAARQKAERGHPNWSKAFGYLPGPNGPEPDPRTAPLVKQAYADILAGASLGDVCRQWNGAGAFTITGRPWTTTTLSKFLRKPRNAGLRAYKGARYGPVDRDAIVGKAQWSPLVDEATFWAAQTVLDAPGRAPGRKSVRRHLLTGLAGCGKCGNHLAGSYRTDGKVVYVCKACHGVAILADNIEPILYHIVAERLAMPDAVDLLRREIHDAAEAETIRLELETLYGELDRLAVERAEGLLTARQVKISTDIVNTKITKLQARQLDQERLRVFDGIPLGTPQVAGMIAELSPDRFRAVLDVLAEVVVQPVGKSGRIFSPERVQVNWR

SEQ ID NO: 4115 - protein, 469 aa, synthetic construct
MSYTTPVRAAVYLRISEDRSGEQLGVARQREDCLKLCGQRKWVPVEYLDNDVSASTGKRRPAYEQMLADITAGKIAAVVAWDLDRLHRRPVELEAFMSLADEKRLALATVAGDVDLATPQGRLVARLKGCVAAHETEHKKARQRRAARQKAERGHPNWSKAFGYLPGPNGPEPDPRTAPLVKQAYADILAGASLGDVCRQWNNAGAVTITGRPWTTTALSKFLRKPRNAGLRAYKGARYGPVDRDAIVGKAQWSPLVDEATFWAAQAVLDAPGRAPGRKSVRRHLLTGLAGCGKCGNHLAGSHRTDGRVVYVCKACHGVAILADNIEPILYHIVAERLAMPNAVDLLRRGIRDAAEAETIRLELETLYGELDRLAVERAEGLLTARQVKISTDIVNAKITKLQARQLDQERLRVFDGIPLGTPQVAGMIAELSPDRFRAVLDVLAEVVVQPMGKSGRIFNPERVQVTWR

SEQ ID NO: 4116 - protein, 452 aa, synthetic construct
MKAAIYIRVSTREQVENYSIQAQTEKLTALCRSKDWDVYDVFIDGGYSGSNMNRPALNEMLNKLHEIDAVVVYRLDRLSRSQRDTITLIEEYFLKNNVEFVSLSETLDTSSPFGRAMIGILSVFAQLERETIRDRMVMGKIKRIEAGLPLTTAKGRTFGYDVIDTKLYINEEEARQLQLIYDIFEEEQSITFLQKRMKKLGFKVRTYNRYSNWLTNDLYCGYVSYKDKAHVKGIHEPIISEEQFYRVQEIFARMGKNPNMNRGSASLLNNLVVCSKCGLGFVHRRKDIMSRGKKYHYRYYSCKTYKHIHELEKCGNKIWRADKLEELIINRVNNYSFASRNADKEDELDSLNEKLKIEHAKKKRLFDLYINGSYKVSELDSMMNDIDAQINYYESRIEANEELKKNKKIQENLADLATVDFDSLEFREKQLYLKSLINKIYIDGEQVAIEWL

SEQ ID NO: 4117 - protein, 485 aa, synthetic construct
MTKKVAIYTRVSTTNQAEEGFSIDEQTDRLTKYAEAMGWQVSDTYTDAGFSGAKLERPAMQRLINDIENRAFDTVLVYKLDRLSRSVRDTLYLVKEVFTKNKIDFISLNESIDTSSAMGSLFLTILSAINEFERENIKERMTMGKLGRAKSGKSMMWTKTAFGYYHNRKTGILEVVPQLATIVEQIFTDYLSGVSLTKLRDKLNEGGHIGKDIPWSYRTLRQTLDNPVYCGYIKFKGSLFEGMHKPIIPYETYLKVQKELEGRQQQTYERNNNPRPFQAKYMLSGMARCGYCGAPLKIVLGHKRKDGSRTMKYHCANRFPRKTKGVTVYNDNKKCDSGTYDLSYLENTVIDNLIGFQENNDSLLKIINGNNQPILDTSSFKKQISQIDKKIQKNSDLYLDDFITMDELKDRTDSLRAEKKLLKAKISENKFNDSTDVFELVKTQLGSTPINELSYDNKKRIVNNLVSKVDVTADNVDIIFKFQLA

SEQ ID NO: 4118 - protein, 452 aa, synthetic construct
MKAAIYIRVSTREQVENYSIQAQTEKLTALCRSKDWDVYDIFIDGGYSGSNMNRPALNEMLSKLHEIDVVVVYRLDRLSRSQRDTITLIEEYFLKNNVEFVSLSETLDTSSPFGRAMIGILSVFAQLERETIRDRMVMGKIKRIEAGLPLTTAKGRTFGYDVIDAKLYINEEEAKQLQLIYDIFEEEQSITFLQKRLKKLGFKVRTYNRYNNWLTNDLYCGYVSYKDKVHVKGIHEPIISEEQFYRVQEIFTRMGKNPNMNRDSASLLNNLVVCSKCGLGFVHRRKDIMGRGKKYHYRYYSCKTYKHIHELEKCGNKIWRADELEELIINRVNNYSLASRNVDKEDGLDSLNEKLKIEHAKKKRLFDLYLNGSYEVSELDSMMNDVDAQISYYESQIEANEALIKNKKIQENLANLATVDFDSLEFREKQLYLKSLINKIYIDGEQVTIEWL

(The sequence listing continues in the following parts.)
